United States Patent Application Publication US 2024/0131193 A1 - sequence listing, part 3

SEQ ID NO: 1872 - DNA, 3372 bp, Homo sapiens
  source 1..3372: mol_type = genomic DNA
gcgaagttacagaggctcggaggcgcttgcaaaaatgtggctgtcagagagggaagtgcacatgaatttgaagacagcattagaaagcgttccgcccacagtttctctgttctcaacggctcagttttaacaggataaattttaagttaagtcccatatgaaggctcaaaagagcggtaaagaacaacagcttgacattatgaacaagcagtaccaacaacttgaaagtcgtttggatgagatactttctagaattgctaaggaaacggaagagattaaggaccttgaagaacagcttactgaaggccagatagcagcaaatgaagccctgaagaaggatttagaaggtgttatcagtgggttgcaagaatacctggggaccattaaaggccaggcaactcaggcccagaatgagtgcaggaagctgcgggatgagaaagagacattgttgcagagattgacagaagtcgagcaggagagagaccagctggaaatagttgccatggatgcagaaaatatgaggaaggagcttgcagagctagaaagtgccctccaagagcagcatgaggtgaatgcatctttgcagcagacccagggagatctcagtgcctatgaagctgagctagaggctcggctaaacctaagggatgctgaagccaaccagctcaaggaagagttggaaaaagtaacaagacttacccagttagaacaatcagcccttcaagcagaacttgagaaggaaaggcaagccctcaagaatgcccttggaaaagcccagttctcagaagaaaaggagcaagagaacagtgagctccatgcaaaacttaaacacttgcaggatgacaataatctgttaaaacagcaacttaaagatttccagaatcaccttaaccatgtggttgatggtttggttcgtccagaagaagtggcagctcgtgtggatgagctaagaagaaaactgaaattaggaactggggaaatgaacatccatagtccttcagatgtcttagggaaaagtcttgctgatttacagaaacaattcagtgaaattcttgcacgctccaagtgggaaagagatgaagcacaagttagagagagaaaactccaagaagaaatggctctgcagcaagagaaactggcaactggacaagaagagttcaggcaggcctgtgagagagccctggaagcaagaatgaattttgataagaggcaacatgaagcaagaatccagcaaatggagaatgaaattcactatttgcaagaaaatctaaaaagtatggaggaaatccaaggccttacagatctccaacttcaggaagctgatgaagagaaggagagaattctggcccaactccgagagttagagaaaaagaagaaacttgaagatgccaaatctcaggagcaagtttttggtttagataaagaactgaagaaactaaagaaagccgtggccacctctgataagctagccacagctgagctcaccattgccaaagaccagctgaagtcccttcatggaactgttatgaaaattaaccaggagcgagcagaggagttgcaggaagcagagaggttcagcagaaaggcagcacaagcagccagagatctcacccgagcagaagctgagatcgaactcctgcagaatctcctcaggcagaagggggagcagtttcgacttgagatggagaaaacaggtgtaggtactggagcaaactcacaggtcctagaaattgagaaactgaatgagacaatggaacgacaaaggacagagattgcaaggctgcagaatgtactagacctcactggaagtgacaacaaaggaggctttgaaaatgttttagaagaaattgctgaacttcgacgtgaagtttcttatcagaatgattacataagcagcatggcagatcctttcaaaagacgaggctattggtactttatgccaccaccaccatcatcaaaagtttccagccatagttcccaggccaccaaggactctggtgttggccttaagtactcagcctcaactcctgttagaaaaccacgccctgggcagcaggatgggaaggaaggcagtcaacctccccctgcctcaggatactgggtttattctcccatcaggagtgggttacataaactgtttccaagtagagatgcagacagtggaggagatagtcaggaagagagtgagctggatgaccaagaagaacccccatttgtgcctcctcctggatacatgatgtatactgtgcttcctgatggttctcctgtaccccagggcatggccctgtatgcaccacctcctcccttgccaaacaatagccgacctctcacccctggcactgttgtttatggcccacctcctgctggggcccccatggtgtatgggcctccaccccccaacttctccatccccttcatccctatgggtgtgctgcattgcaacgtccctgaacaccataacttagagaatgaagtttctagattagaagacataatgcagcatttaaaatcaaagaagcgggaagaaaggtggatgagagcatccaagcggcagtcggagaaagaaatggaagaactgcatcataatattgatgatcttttgcaagagaagaaaagcttagagtgtgaagtagaagaattacatagaactgtccagaaacgtcaacagcaaaaggacttcattgatggaaatgttgagagtcttatgactgaactagaaatagaaaaatcactcaaacatcatgaagatattgtagatgaaattgagtgcattgagaagactcttctgaaacgtcgctcagagctcagggaagctgaccgactcctggcagaggctgagagtgaactttcatgcactaaagaaaagacaaaaaatgctgttgaaaagttcactgatgccaagagaagtttattgcaaactgagtcagatgctgaggaattagaaaggagagctcaggaaactgctgttaacctcgtcaaagctgatcagcagctaagatcgctccaggctgatgcaaaggatttggagcagcacaaaatcaagcaagaagaaatcttgaaagaaataaacaaaattgtagcagcaaaagactcagacttccaatgtttaagcaagaagaaggaaaaactgacagaagagtaagtaaggcctctgtagggctacaaggggtttgtgctggaagacagctctggggttccgagtcccttaggatctgctctagtgttgctggtgctttgtaggcttcagaaactacagaaagacatagagatggcagaacgcaatgaggatcaccacctgcaggtccttaaagaatctgaggtgcttcttcaggccaaaagagccgagctggaaaagctgaaaagccaggtatg

SEQ ID NO: 1873 - DNA, 5824 bp, Homo sapiens
  source 1..5824: mol_type = genomic DNA
gccggaaagcagaaggagattaaggacctgcaaatagccatagatagcctggattccaaagacccaaaacattcccatatgaaggctcaaaagagcggtaaagaacaacagcttgacattatgaacaagcagtaccaacaacttgaaagtcgtttggatgagatactttctagaattgctaaggaaacggaagagattaaggaccttgaagaacagcttactgaaggccagatagcagcaaatgaagccctgaagaaggatttagaaggtgttatcagtgggttgcaagaatacctggggaccattaaaggccaggcaactcaggcccagaatgagtgcaggaagctgcgggatgagaaagagacattgttgcagagattgacagaagtcgagcaggagagagaccagctggaaatagttgccatggatgcagaaaatatgaggaaggagcttgcagagctagaaagtgccctccaagagcagcatgaggtgaatgcatctttgcagcagacccagggagatctcagtgcctatgaagctgagctagaggctcggctaaacctaagggatgctgaagccaaccagctcaaggaagagttggaaaaagtaacaagacttacccagttagaacaatcagcccttcaagcagaacttgagaaggaaaggcaagccctcaagaatgcccttggaaaagcccagttctcagaagaaaaggagcaagagaacagtgagctccatgcaaaacttaaacacttgcaggatgacaataatctgttaaaacagcaacttaaagatttccagaatcaccttaaccatgtggttgatggtttggttcgtccagaagaagtggcagctcgtgtggatgagctaagaagaaaactgaaattaggaactggggaaatgaacatccatagtccttcagatgtcttagggaaaagtcttgctgatttacagaaacaattcagtgaaattcttgcacgctccaagtgggaaagagatgaagcacaagttagagagagaaaactccaagaagaaatggctctgcagcaagagaaactggcaactggacaagaagagttcaggcaggcctgtgagagagccctggaagcaagaatgaattttgataagaggcaacatgaagcaagaatccagcaaatggagaatgaaattcactatttgcaagaaaatctaaaaagtatggaggaaatccaaggccttacagatctccaacttcaggaagctgatgaagagaaggagagaattctggcccaactccgagagttagagaaaaagaagaaacttgaagatgccaaatctcaggagcaagtttttggtttagataaagaactgaagaaactaaagaaagccgtggccacctctgataagctagccacagctgagctcaccattgccaaagaccagctgaagtcccttcatggaactgttatgaaaattaaccaggagcgagcagaggagttgcaggaagcagagaggttcagcagaaaggcagcacaagcagccagagatctcacccgagcagaagctgagatcgaactcctgcagaatctcctcaggcagaagggggagcagtttcgacttgagatggagaaaacaggtgtaggtactggagcaaactcacaggtcctagaaattgagaaactgaatgagacaatggaacgacaaaggacagagattgcaaggctgcagaatgtactagacctcactggaagtgacaacaaaggaggctttgaaaatgttttagaagaaattgctgaacttcgacgtgaagtttcttatcagaatgattacataagcagcatggcagatcctttcaaaagacgaggctattggtactttatgccaccaccaccatcatcaaaagtttccagccatagttcccaggccaccaaggactctggtgttggccttaagtactcagcctcaactcctgttagaaaaccacgccctgggcagcaggatgggaaggaaggcagtcaacctccccctgcctcaggatactgggtttattctcccatcaggagtgggttacataaactgtttccaagtagagatgcagacagtggaggagatagtcaggaagagagtgagctggatgaccaagaagaacccccatttgtgcctcctcctggatacatgatgtatactgtgcttcctgatggttctcctgtaccccagggcatggccctgtatgcaccacctcctcccttgccaaacaatagccgacctctcacccctggcactgttgtttatggcccacctcctgctggggcccccatggtgtatgggcctccaccccccaacttctccatccccttcatccctatgggtgtgctgcattgcaacgtccctgaacaccataacttagagaatgaagtttctagattagaagacataatgcagcatttaaaatcaaagaagcgggaagaaaggtggatgagagcatccaagcggcagtcggagaaagaaatggaagaactgcatcataatattgatgatcttttgcaagagaagaaaagcttagagtgtgaagtagaagaattacatagaactgtccagaaacgtcaacagcaaaaggacttcattgatggaaatgttgagagtcttatgactgaactagaaatagaaaaatcactcaaacatcatgaagatattgtagatgaaattgagtgcattgagaagactcttctgaaacgtcgctcagagctcagggaagctgaccgactcctggcagaggctgagagtgaactttcatgcactaaagaaaagacaaaaaatgctgttgaaaagttcactgatgccaagagaagtttattgcaaactgagtcagatgctgaggaattagaaaggagagctcaggaaactgctgttaacctcgtcaaagctgatcagcagctaagatcgctccaggctgatgcaaaggatttggagcagcacaaaatcaagcaagaagaaatcttgaaagaaataaacaaaattgtagcagcaaaagactcagacttccaatgtttaagcaagaagaaggaaaaactgacagaagagcttcagaaactacagaaagacatagagatggcagaacgcaatgaggatcaccacctgcaggtccttaaagaatctgaggtgcttcttcaggccaaaagagccgagctggaaaagctgaaaagccaggtgacaagtcagcagcaggagatggctgtcttggacaggcagttagggcataaaaaggaggagctgcatctactccaaggaagcatggtccaggcaaaagctgacctccaggaagctctgagactgggagagactgaagtaactgagaagtgcaatcacattagggaagtaaaatctcttctggaagaactgagttttcagaaaggagaactaaatgttcagattagtgaaagaaaaactcaacttacacttataaagcaggaaattgaaaaagaggaagaaaatcttcaggttgttttaaggcagatgtctaaacataaaaccgaactaaagaatattctggacatgttgcaacttgaaaaccatgagctacaaggtttgaagctacaacatgaccaaagggtatctgaattagagaagactcaggtggcagtgctagaggagaaactggagttagagaatttgcagcagatatcccagcagcagaaaggggaaatagagtggcagaagcagctccttgagagggataaacgagaaatagaacgaatgactgctgagtcccgagctttacaatcgtgtgttgagtgtttgagcaaagaaaaggaagatctccaagagaaatgtgacatttgggaaaaaaagttggcacaaaccaaaagggttttagcagcagcagaagaaaatagcaaaatggagcaatcaaacttagaaaagttggaattgaatgtcagaaaactgcagcaggaactagaccaactaaacagagacaagttgtcactgcataacgacatttcagcaatgcaacagcagctccaagaaaaacgagaagcagtaaactcactgcaggaggaactagctaatgtccaagaccatttgaacctagcaaaacaggacctgcttcacaccaccaagcatcaggatgtgttgctcagtgagcagacccgactccagaaggacatcagtgaatgggcaaataggtttgaagactgtcagaaagaagaggagacaaaacaacaacaacttcaagtgcttcagaatgagattgaagaaaacaagctcaaactagtccaacaagaaatgatgtttcagagactccagaaagagagagaaagtgaagaaagcaaattagaaaccagtaaagtgacactgaaggagcaacagcaccagctggaaaaggaattaacagaccagaaaagcaaactggaccaagtgctctcaaaggtgctggcagctgaagagcgtgttaggactctgcaggaagaggagaggtggtgtgagagcctggagaagacactctcccaaactaaacggcagctttcagaaagggagcagcaattggtggagaaatcaggtgagctgttggccctccagaaagaggcagattctatgagggcagacttcagccttctgcggaaccagttcttgacagaaagaaagaaagctgagaagcaggtggccagcctgaaggaagcacttaagatccagcggagccagctggagaaaaaccttcttgagcaaaaacaggagaacagctgcatacaaaaggaaatggcaacaattgaactggtagcccaggacaaccatgagcgggccaggcgcctgatgaaggagctcaaccagatgcagtatgagtacacggagctcaagaaacagatggcaaaccaaaaagatttggagagaagacaaatggaaatcagtgatgcaatgaggacacttaaatctgaggtgaaggatgaaatcagaaccagcttgaagaatcttaatcagtttcttccagaactaccagcagatctagaagctattttggaaagaaacgaaaacctagaaggagaattggaaagcttgaaagagaaccttccatttaccatgaatgagggaccttttgaagaaaaactgaacttttcccaagttcacataatggatgaacactggcgtggagaagcactccgggagaaactgcgtcaccgggaagaccgactcaaggcccaactccgacactgtatgtccaagcaagcagaagtattaattaaaggaaagcggcagacagagggcactttacacagtttgaggagacaagtagatgctttaggggaattggtcaccagcacctctgcagattcagcgtcatcacccagtctgtctcagctggagtcttccctcacagaggactctcaacttggacaaaatcaggaaaagaatgcctcagccagatgaggaatactgtcttgtgtaaatatattcaaggaaaacacctccactacctcactgacttcataattggaatgtcacatggtttttttaatcaagatgcagtgaactgagattctgaaactccactgtagtttactttgcctgtaccattaatgccaatgtttttataaatcacttgtacatagtacatatgggaatagttgcatatgggaatttaaaccaacatgtggctgagcctttttttttttaatcttcgtaacatgtttaaaaaaaaacagtgattttaactgcatatttgaacctacaaactggtaaatcttattaacaaaaagaatgtacttaaggccctctttatttatagtgtcgagttatttttgaattttgcttaaaatctatttttcatatgaaaataaaagataacaatcaa

SEQ ID NO: 1874 - DNA, 3137 bp, Homo sapiens
  source 1..3137: mol_type = genomic DNA
ctaaaacagaagaccatagaattaacacgagcatgtcagaagcaatatgagctggaacaggaattggccttttataaaattgatgctaaatttgagccactaaattattatccatcagagtatgctgaaattgataaagccccagatgaaagcccttacattggcaaatccagatacaagagaaatatgtttgccacagagagttatattattgacagtgctcaggcagtacagatcaagaagatggagccagatgaacaacttagaaatgatcacatgaacttgagaggccacacaccactggacacgcaactggaagacaaagaaaaaaaaataagtgcagcacaaactcgactatcagaactgcatgatgaaatagaaaaggcagaacaacaaattttgagagctactgaagaatttaaacaactggaagaagctatacaactaaaaaagattagatttcagaagcagggaaagaccttctttacaagcagttgagtggtagactacaacttgtaaataaattacgccaggaagctctggatctagaactgcagatggaaaagcaaaagcaggaaattgccggaaagcagaaggagattaaggacctgcaaatagccatagatagcctggattccaaagacccaaaacattcccatatgaaggctcaaaagagcggtaaagaacaacagcttgacattatgaacaagcagtaccaacaacttgaaagtcgtttggatgagatactttctagaattgctaaggaaacggaagagattaaggaccttgaagaacagcttactgaaggccagatagcagcaaatgaagccctgaagaaggatttagaaggtgttatcagtgggttgcaagaatacctggggaccattaaaggccaggcaactcaggcccagaatgagtgcaggaagctgcgggatgagaaagagacattgttgcagagattgacagaagtcgagcaggagagagaccagctggaaatagttgccatggatgcagaaaatatgaggaaggagcttgcagagctagaaagtgccctccaagagcagcatgaggtgaatgcatctttgcagcagacccagggagatctcagtgcctatgaagctgagctagaggctcggctaaacctaagggatgctgaagccaaccagctcaaggaagagttggaaaaagtaacaagacttacccagttagaacaatcagcccttcaagcagaacttgagaaggaaaggcaagccctcaagaatgcccttggaaaagcccagttctcagaagaaaaggagcaagagaacagtgagctccatgcaaaacttaaacacttgcaggatgacaataatctgttaaaacagcaacttaaagatttccagaatcaccttaaccatgtggttgatggtttggttcgtccagaagaagtggcagctcgtgtggatgagctaagaagaaaactgaaattaggaactggggaaatgaacatccatagtccttcagatgtcttagggaaaagtcttgctgatttacagaaacaattcagtgaaattcttgcacgctccaagtgggaaagagatgaagcacaagttagagagagaaaactccaagaagaaatggctctgcagcaagagaaactggcaactggacaagaagagttcaggcaggcctgtgagagagccctggaagcaagaatgaattttgataagaggcaacatgaagcaagaatccagcaaatggagaatgaaattcactatttgcaagaaaatctaaaaagtatggaggaaatccaaggccttacagatctccaacttcaggaagctgatgaagagaaggagagaattctggcccaactccgagagttagagaaaaagaagaaacttgaagatgccaaatctcaggagcaagtttttggtttagataaagaactgaagaaactaaagaaagccgtggccacctctgataagctagccacagctgagctcaccattgccaaagaccagctgaagtcccttcatggaactgttatgaaaattaaccaggagcgagcagaggagttgcaggaagcagagaggttcagcagaaaggcagcacaagcagccagagatctcacccgagcagaagctgagatcgaactcctgcagaatctcctcaggcagaagggggagcagtttcgacttgagatggagaaaacaggtgtaggtactggagcaaactcacaggtcctagaaattgagaaactgaatgagacaatggaacgacaaaggacagagattgcaaggctgcagaatgtactagacctcactggaagtgacaacaaaggaggctttgaaaatgttttagaagaaattgctgaacttcgacgtgaagtttcttatcagaatgattacataagcagcatggcagatcctttcaaaagacgaggctattggtactttatgccaccaccaccatcatcaaaagtttccagccatagttcccaggccaccaaggactctggtgttggccttaagtactcagcctcaactcctgttagaaaaccacgccctgggcagcaggatgggaaggaaggcagtcaacctccccctgcctcaggatactgggtttattctcccatcaggagtgggttacataaactgtttccaagtagagatgcagacagtggaggagatagtcaggaagagagtgagctggatgaccaagaagaacccccatttgtgcctcctcctggatacatgatgtatactgtgcttcctgatggttctcctgtaccccagggcatggccctgtatgcaccacctcctcccttgccaaacaatagccgacctctcacccctggcactgttgtttatggcccacctcctgctggggcccccatggtgtatgggcctccaccccccaacttctccatccccttcatccctatgggtgtgctgcattgcaacgtccctgaacaccataacttagtaagtggaaagacatacaactctctttccacactgcttccatgggtgactgataaggttatatacttaatgagttgacctatttatgactggattatatggcaaagtgtgtttgtaaggctgatgtttagaactgtgcaagcattctcttattaaaattctcttataaaa

SEQ ID NO: 1875 - DNA, 7660 bp, Homo sapiens
  source 1..7660: mol_type = genomic DNA
cgaacttctcccgctctacctcagcctgcgggactgctcggctcggcttctaggcgagacaggggctccctgtgtttcccaggctgcagtgcagtggccagtcacaaggttgatcatagcacattgtagcctggagctcctgggatcaagcaatcctcctgcctcatcctctggagtaactgggactgcaagtatacataccgtgcctgacgaaatatcacaatatttggttttgatgaacacctggctttattcttgcaatgaagaaaggttctcaacaaaaaatattctccaaagcaaagataccatcatcatctcactctcctatcccatcatctatgtccaatatgagatctaggtcactttcacctttgattggatcagagactctaccttttcattctggaggacagtggtgtgagcaagttgagattgcagatgaaaacaatatgcttttggactatcaagaccataaaggagctgattcacatgcaggagttagatatattacagaggccctcattaaaaaacttactaaacaggataatttggctttgataaaatctctgaacctttcactttctaaagacggtggcaagaaatttaagtatattgagaatttggaaaaatgtgttaaacttgaagtactgaatctcagctataatctaatagggaagattgaaaagttggacaagctgttaaaattacgtgaactcaacttatcatataacaaaatcagcaaaattgaaggcatagaaaatatgtgtaatctgcaaaagcttaaccttgcaggaaatgaaattgagcatattccagtatggttagggaagaagttaaaatctttgcgagtcctcaatttgaaaggcaacaagatatcatcgctccaagatataagcaagttgaaaccgcttcaagatttgatttctctgatcctagttgaaaatccagttgtgacccttcctcattacctccagtttaccattttccacctccgttcattggaaagtttggaaggtcagccagtaaccactcaggatagacaggaggcttttgagagattcagtttagaagaggtagaaagactggaaagagacctagaaaaaaagatgatagaaactgaagagcttaagagcaaacaaacaaggttccttgaggaaattaaaaatcaagataaattgaataaatcattaaaagaggaggccatgttacagaaacagagctgtgaggaactcaagagtgacttaaacacaaaaaatgaattgctaaaacagaagaccatagaattaacacgagcatgtcagaagcaatatgagctggaacaggaattggccttttataaaattgatgctaaatttgagccactaaattattatccatcagagtatgctgaaattgataaagccccagatgaaagcccttacattggcaaatccagatacaagagaaatatgtttgccacagagagttatattattgacagtgctcaggcagtacagatcaagaagatggagccagatgaacaacttagaaatgatcacatgaacttgagaggccacacaccactggacacgcaactggaagacaaagaaaaaaaaataagtgcagcacaaactcgactatcagaactgcatgatgaaatagaaaaggcagaacaacaaattttgagagctactgaagaatttaaacaactggaagaagctatacaactaaaaaagatttcagaagcagggaaagaccttctttacaagcagttgagtggtagactacaacttgtaaataaattacgccaggaagctctggatctagaactgcagatggaaaagcaaaagcaggaaattgccggaaagcagaaggagattaaggacctgcaaatagccatagatagcctggattccaaagacccaaaacattcccatatgaaggctcaaaagagcggtaaagaacaacagcttgacattatgaacaagcagtaccaacaacttgaaagtcgtttggatgagatactttctagaattgctaaggaaacggaagagattaaggaccttgaagaacagcttactgaaggccagatagcagcaaatgaagccctgaagaaggatttagaaggtgttatcagtgggttgcaagaatacctggggaccattaaaggccaggcaactcaggcccagaatgagtgcaggaagctgcgggatgagaaagagacattgttgcagagattgacagaagtcgagcaggagagagaccagctggaaatagttgccatggatgcagaaaatatgaggaaggagcttgcagagctagaaagtgccctccaagagcagcatgaggtgaatgcatctttgcagcagacccagggagatctcagtgcctatgaagctgagctagaggctcggctaaacctaagggatgctgaagccaaccagctcaaggaagagttggaaaaagtaacaagacttacccagttagaacaatcagcccttcaagcagaacttgagaaggaaaggcaagccctcaagaatgcccttggaaaagcccagttctcagaagaaaaggagcaagagaacagtgagctccatgcaaaacttaaacacttgcaggatgacaataatctgttaaaacagcaacttaaagatttccagaatcaccttaaccatgtggttgatggtttggttcgtccagaagaagtggcagctcgtgtggatgagctaagaagaaaactgaaattaggaactggggaaatgaacatccatagtccttcagatgtcttagggaaaagtcttgctgatttacagaaacaattcagtgaaattcttgcacgctccaagtgggaaagagatgaagcacaagttagagagagaaaactccaagaagaaatggctctgcagcaagagaaactggcaactggacaagaagagttcaggcaggcctgtgagagagccctggaagcaagaatgaattttgataagaggcaacatgaagcaagaatccagcaaatggagaatgaaattcactatttgcaagaaaatctaaaaagtatggaggaaatccaaggccttacagatctccaacttcaggaagctgatgaagagaaggagagaattctggcccaactccgagagttagagaaaaagaagaaacttgaagatgccaaatctcaggagcaagtttttggtttagataaagaactgaagaaactaaagaaagccgtggccacctctgataagctagccacagctgagctcaccattgccaaagaccagctgaagtcccttcatggaactgttatgaaaattaaccaggagcgagcagaggagttgcaggaagcagagaggttcagcagaaaggcagcacaagcagccagagatctcacccgagcagaagctgagatcgaactcctgcagaatctcctcaggcagaagggggagcagtttcgacttgagatggagaaaacaggtgtaggtactggagcaaactcacaggtcctagaaattgagaaactgaatgagacaatggaacgacaaaggacagagattgcaaggctgcagaatgtactagacctcactggaagtgacaacaaaggaggctttgaaaatgttttagaagaaattgctgaacttcgacgtgaagtttcttatcagaatgattacataagcagcatggcagatcctttcaaaagacgaggctattggtactttatgccaccaccaccatcatcaaaagtttccagccatagttcccaggccaccaaggactctggtgttggccttaagtactcagcctcaactcctgttagaaaaccacgccctgggcagcaggatgggaaggaaggcagtcaacctccccctgcctcaggatactgggtttattctcccatcaggagtgggttacataaactgtttccaagtagagatgcagacagtggaggagatagtcaggaagagagtgagctggatgaccaagaagaacccccatttgtgcctcctcctggatacatgatgtatactgtgcttcctgatggttctcctgtaccccagggcatggccctgtatgcaccacctcctcccttgccaaacaatagccgacctctcacccctggcactgttgtttatggcccacctcctgctggggcccccatggtgtatgggcctccaccccccaacttctccatccccttcatccctatgggtgtgctgcattgcaacgtccctgaacaccataacttagagaatgaagtttctagattagaagacataatgcagcatttaaaatcaaagaagcgggaagaaaggtggatgagagcatccaagcggcagtcggagaaagaaatggaagaactgcatcataatattgatgatcttttgcaagagaagaaaagcttagagtgtgaagtagaagaattacatagaactgtccagaaacgtcaacagcaaaaggacttcattgatggaaatgttgagagtcttatgactgaactagaaatagaaaaatcactcaaacatcatgaagatattgtagatgaaattgagtgcattgagaagactcttctgaaacgtcgctcagagctcagggaagctgaccgactcctggcagaggctgagagtgaactttcatgcactaaagaaaagacaaaaaatgctgttgaaaagttcactgatgccaagagaagtttattgcaaactgagtcagatgctgaggaattagaaaggagagctcaggaaactgctgttaacctcgtcaaagctgatcagcagctaagatcgctccaggctgatgcaaaggatttggagcagcacaaaatcaagcaagaagaaatcttgaaagaaataaacaaaattgtagcagcaaaagactcagacttccaatgtttaagcaagaagaaggaaaaactgacagaagagcttcagaaactacagaaagacatagagatggcagaacgcaatgaggatcaccacctgcaggtccttaaagaatctgaggtgcttcttcaggccaaaagagccgagctggaaaagctgaaaagccaggtgacaagtcagcagcaggagatggctgtcttggacaggcagttagggcataaaaaggaggagctgcatctactccaaggaagcatggtccaggcaaaagctgacctccaggaagctctgagactgggagagactgaagtaactgagaagtgcaatcacattagggaagtaaaatctcttctggaagaactgagttttcagaaaggagaactaaatgttcagattagtgaaagaaaaactcaacttacacttataaagcaggaaattgaaaaagaggaagaaaatcttcaggttgttttaaggcagatgtctaaacataaaaccgaactaaagaatattctggacatgttgcaacttgaaaaccatgagctacaaggtttgaagctacaacatgaccaaagggtatctgaattagagaagactcaggtggcagtgctagaggagaaactggagttagagaatttgcagcagatatcccagcagcagaaaggggaaatagagtggcagaagcagctccttgagagggataaacgagaaatagaacgaatgactgctgagtcccgagctttacaatcgtgtgttgagtgtttgagcaaagaaaaggaagatctccaagagaaatgtgacatttgggaaaaaaagttggcacaaaccaaaagggttttagcagcagcagaagaaaatagcaaaatggagcaatcaaacttagaaaagttggaattgaatgtcagaaaactgcagcaggaactagaccaactaaacagagacaagttgtcactgcataacgacatttcagcaatgcaacagcagctccaagaaaaacgagaagcagtaaactcactgcaggaggaactagctaatgtccaagaccatttgaacctagcaaaacaggacctgcttcacaccaccaagcatcaggatgtgttgctcagtgagcagacccgactccagaaggacatcagtgaatgggcaaataggtttgaagactgtcagaaagaagaggagacaaaacaacaacaacttcaagtgcttcagaatgagattgaagaaaacaagctcaaactagtccaacaagaaatgatgtttcagagactccagaaagagagagaaagtgaagaaagcaaattagaaaccagtaaagtgacactgaaggagcaacagcaccagctggaaaaggaattaacagaccagaaaagcaaactggaccaagtgctctcaaaggtgctggcagctgaagagcgtgttaggactctgcaggaagaggagaggtggtgtgagagcctggagaagacactctcccaaactaaacggcagctttcagaaagggagcagcaattggtggagaaatcaggtgagctgttggccctccagaaagaggcagattctatgagggcagacttcagccttctgcggaaccagttcttgacagaaagaaagaaagctgagaagcaggtggccagcctgaaggaagcacttaagatccagcggagccagctggagaaaaaccttcttgagcaaaaacaggagaacagctgcatacaaaaggaaatggcaacaattgaactggtagcccaggacaaccatgagcgggccaggcgcctgatgaaggagctcaaccagatgcagtatgagtacacggagctcaagaaacagatggcaaaccaaaaagatttggagagaagacaaatggaaatcagtgatgcaatgaggacacttaaatctgaggtgaaggatgaaatcagaaccagcttgaagaatcttaatcagtttcttccagaactaccagcagatctagaagctattttggaaagaaacgaaaacctagaaggagaattggaaagcttgaaagagaaccttccatttaccatgaatgagggaccttttgaagaaaaactgaacttttcccaagttcacataatggatgaacactggcgtggagaagcactccgggagaaactgcgtcaccgggaagaccgactcaaggcccaactccgacactgtatgtccaagcaagcagaagtattaattaaaggaaagcggcagacagagggcactttacacagtttgaggagacaagtagatgctttaggggaattggtcaccagcacctctgcagattcagcgtcatcacccagtctgtctcagctggagtcttccctcacagaggactctcaacttggacaaaatcaggaaaagaatgcctcagccagatgaggaatactgtcttgtgtaaatatattcaaggaaaacacctccactacctcactgacttcataattggaatgtcacatggtttttttaatcaagatgcagtgaactgagattctgaaactccactgtagtttactttgcctgtaccattaatgccaatgtttttataaatcacttgtacatagtacatatgggaatagttgcatatgggaatttaaaccaacatgtggctgagcctttttttttttaatcttcgtaacatgtttaaaaaaaaacagtgattttaactgcatatttgaacctacaaactggtaaatcttattaacaaaaagaatgtacttaaggccctctttatttatagtgtcgagttatttttgaattttgcttaaaatctatttttcatatgaaaataaaagataacaatc

SEQ ID NO: 1876 - DNA, 1894 bp, Homo sapiens
  source 1..1894: mol_type = genomic DNA
gggaaacgcctccgcgtcccttccaacagtaccggagagggagaggggcgtggctgagactagccccgaccacgcgcgcgcggcccctcggcaaccggcacaacacaacaaaatggctgccgcgccgctgggcccctgaggaaagagcccgaacttctcccgctctacctcagcctgcgggactgctcggctcggcttctaggcggttttgatgaacacctggctttattcttgcaatgaagaaaggttctcaacaaaaaatattctccaaagcaaagataccatcatcatctcactctcctatcccatcatctatgtccaatatgagatctaggtcactttcacctttgattggatcagagactctaccttttcattctggaggacagtggtgtgagcaagttgagattgcagatgaaaacaatatgcttttggactatcaagaccataaaggagctgattcacatgcaggagttagatatattacagaggccctcattaaaaaacttactaaacaggataatttggctttgataaaatctctgaacctttcactttctaaagacggtggcaagaaatttaagtatattgagaatttggaaaaatgtgttaaacttgaagtactgaatctcagctataatctaatagggaagattgaaaagttggacaagctgttaaaattacgtgaactcaacttatcatataacaaaatcagcaaaattgaaggcatagaaaatatgtgtaatctgcaaaagcttaaccttgcaggaaatgaaattgagcatattccagtatggttagggaagaagttaaaatctttgcgagtcctcaatttgaaaggcaacaagatatcatcgctccaagatataagcaagttgaaaccgcttcaagatttgatttctctgatcctagttgaaaatccagttgtgacccttcctcattacctccagtttaccattttccacctccgttcattggaaagtttggaaggtcagccagtaaccactcaggatagacaggaggcttttgagagattcagtttagaagaggtagaaagactggaaagagacctagaaaaaaagatgatagaaactgaagagcttaagagcaaacaaacaaggttccttgaggaaattaaaaatcaagataaattgaataaatcattaaaagaggaggccatgttacagaaacagagctgtgaggaactcaagagtgacttaaacacaaaaaatgaattgctaaaacagaagaccatagaattaacacgagcatgtcagaagcaatatgagctggaacaggaattggccttttataaaattgatgctaaatttgagccactaaattattatccatcagagtatgctgaaattgataaagccccagatgaaagcccttacattggcaaatccagatacaagagaaatatgtttgccacagagagttatattattgacagtgctcaggcagtacagatcaagaagatggagccagatgaacaacttagaaatgatcacatgaacttgagaggccacacaccactggacacgcaactggaagaccacaaactcgactatcagaactgcatgatgaaatagaaaaggcagaacaacaaattttgagagctactgaagaatttaaacaactggaagaagctatacaactaaaaaagatttcagaagcagggaaagaccttctttacaagcagttgagtggtagactacaacttgtaaataaattacgccaggaagctctggatctagaactgcagatggaaaagcaaaagcaggaaattgccggaaagcagaaggagattaaggacctgcaaatagccatagatagcctggattccaaagacccaaaacatgtgagtaaattaagaaattttgacttgttc

SEQ ID NO: 1877 - DNA, 3569 bp, Homo sapiens
  source 1..3569: mol_type = genomic DNA
gacgaggcgtttccgatctttgccgcagtccggatttcctgggtctctgggcactgaaggggaaatgccctcgggatgtttctagcaacccccttcccccaacacacacacactagttggcattctcttccagaaacttatcattttcttttttaaacctcccatcctcagactccccaaattaacaagtctttttagcctcttggattgggattaggatgacagtttttcagtgagggcgcagaaaaacagtgcatttcagcaccaaggacagacacaatcttcatggttcctgggctctgagtcagactgtcgaaaatattggcctaatatatgtgctgtgattcagactttgtggcgaggaacaaatcacaagacagtggcatagcagagatggaagaacttcctgtaccacataacatcaaaataagcaatataacgtgtgactcattcaagatttcatgggaaatggattcaaaatcaaaggatcgcattacacactattttattgacctcaacaagaaagagaacaagaactccaataaatttaaacacaaggatgttcccacaaaattggtggcaaaagctgttcccttgcctatgactgtccgtggacactggtttttaagcccaagaactgaatatacagtagcagtgcagactgcctcaaaacaagttgatggtgattatgttgtgtctgaatggagtgaaattatagaattctgcaccgcagactattcaaaagttcatctaacacaattgttggagaaggctgaagtgattgcaggacgcatgcttaagttttctgttttttatcgtaatcagcacaaagaatattttgactatgttcgagaacatcatgggaatgctatgcagccatctgtcaaggataacagtggtagccatggctctcctatcagtggaaaattagaaggcatcttcttcagctgcagcactgaattcaatactggaaagccaccccaggattcaccttatggaagatacaggtttgagattgccgcagaaaaactttttaaccccaatactaacttatactttggggacttctactgtatgtacactgcttatcattatgtgattcttgttattgctcctgtgggatcaccaggagatgaattttgtaagcagcgccttcctcaactaaattctaaggataataaatttttgacctgtacagaagaagatggggtgctggtttaccaccatgcccaggatgtcattttagaagtcatttacactgaccctgtggatctttctgtgggcaccgtggcagaaatcactggtcatcagctcatgagtttgtctactgcaaatgcaaagaaagatcccagctgcaaaacctgtaatatcagtgttggacgttaatgcccacttttcttattcttactcagccccttttcctcccttaggagcattggtcctctgttgtccatttttatcaccagatgttttccactgaagcatgcacatgccactgtcaccaaaacaaacaactaccactttccaaatttcattcagaaccattttagtgttttcctattccctacccctcccactactttcaatgatgaaataccctaagttaagttctccttttgacactttattgcctagatgctgcaatgtttttatgtttcctttatgccaaacataacaaaacagttatatagactgctttagcaaagtacacaataatggcttataaatggtgtttaaatatgcattcattttaatctactgaacaaatattgggataactccaaaccgcatgaaagggtgtaattgcagcatgagttaaatcttgaagcctagaattgtcagcacttccaacttcttgtttgacagtgttatttatgttatttatattagctaacaggaaacaactactgtgtttcaacataataaatataatagaaaaatattttatttgtattgttgtataaaatatttacaatcatatagaatatatagagttacattttaatagcaactgtgtacatgtcacgaaaccatttcccttatcaaagatgtaatttgtaaacctcaaatagttgtgtatctgtcctgttagaagtagatgacttcaattaaacaaatttatgaaggacattattctgattcataaaagttataaaatattaggtaaatacagagaaaacaataagcctctgaaataagtctgtttctgaaatagtcaatagtcttcccatccaaactataagagaatgtgaatttcttcaacatcatacttaaacattacagaaaatagaaatacaaacaaggttggtacatgagagaaaatgttgaccttttacttccttttacaaaaatgaaaataataaacatgttttcgtataaaataacacaaaatgatatacactgaagttgatgaagcaaataaatattctggcttctttttcaaggtatcagggcaaacaatttccaaacttttcattttgtacagaaggatgaataactacagctcatgggaaatgttttgactttacaaagtatagatgttggaacattaagaaaaatgtatattcccaatgaaaaaatagttatatcatcttatagtaaaccaaaagattagcaataatactatggacacattagattatatactacagacacatatctatccaaaatacctattttaaatttttaatacaatattttattttaatataaacatctgtcagttatagacaaagataataattcacaaagtacatgctatcagaatgaactttggtaaccagaaatgtaaaatttcaaataacggataaaataatgtgttatttttatagagaaagaaaaaaatagcaacacaatctagtttattttagggtactgagagcctagcagacttaaaggacaaggtagtaaatgttttatcactcaaaaatccattagaagtttcaaataaattgctttcttgctagctgtattccttcctacttgaaaagcgaatttcttttcctcctatgattgattttttaaaatcatgctcttttccatacatcaacataaacagtctttggatactaaataaactttccctaacaagtgtcctagctatgttatttagatttgataaaatattagacatttttaaaaatacttgtattgactatgagttttctgcttggcatggaggacactgaattttttcccaattatatggctacctgttgtattcttccccccgtttaaatcccttctccttgtatataattaaacttgctattccttcttaaaaacagctaatactaccactaaagtgcttccattttcattgtgtcaaaactacttagcaaggatggcagaggaaaataaactttactttatatcatgggtgaaagtgatcataacatttcctgaacctcaaatagttttggccacatcttgcttgctgatgaggacctctaatagtctcagtttggcttttatgtgcttatattcataatactcatctgccattggtatcctatcttccttttgtggacttctgcaaaacaaaaatacatttgttagttcacaatgaa

SEQ ID NO: 1878 - DNA, 3578 bp, Homo sapiens
  source 1..3578: mol_type = genomic DNA
cccgccgggagcgcgcgcctcccatcctcgcgccgggtcctgctcggtctctcagagccgcacactccgcggagctcctgccacagccgtcgccttcgcggcggctctccagccccgcgcctcagcctcggcgccgcatcaccgcgtcccaggcctccttccctccctctgccactccccctccctttcccgctcttcttgcccacccggccggcagagagagcctggatacgaagcaggcgggcttcagagtgggttggaaaaatggaggtgccgcgcctggatcatgccctcaacagccccaccagcccctgtgaggaggtgatcaaaaacctcagcctggaggccattcagctgtgcgaccgggacgggaacaaatcacaagacagtggcatagcagagatggaagaacttcctgtaccacataacatcaaaataagcaatataacgtgtgactcattcaagatttcatgggaaatggattcaaaatcaaaggatcgcattacacactattttattgacctcaacaagaaagagaacaagaactccaataaatttaaacacaaggatgttcccacaaaattggtggcaaaagctgttcccttgcctatgactgtccgtggacactggtttttaagcccaagaactgaatatacagtagcagtgcagactgcctcaaaacaagttgatggtgattatgttgtgtctgaatggagtgaaattatagaattctgcaccgcagactattcaaaagttcatctaacacaattgttggagaaggctgaagtgattgcaggacgcatgcttaagttttctgttttttatcgtaatcagcacaaagaatattttgactatgttcgagaacatcatgggaatgctatgcagccatctgtcaaggataacagtggtagccatggctctcctatcagtggaaaattagaaggcatcttcttcagctgcagcactgaattcaatactggaaagccaccccaggattcaccttatggaagatacaggtttgagattgccgcagaaaaactttttaaccccaatactaacttatactttggggacttctactgtatgtacactgcttatcattatgtgattcttgttattgctcctgtgggatcaccaggagatgaattttgtaagcagcgccttcctcaactaaattctaaggataataaatttttgacctgtacagaagaagatggggtgctggtttaccaccatgcccaggatgtcattttagaagtcatttacactgaccctgtggatctttctgtgggcaccgtggcagaaatcactggtcatcagctcatgagtttgtctactgcaaatgcaaagaaagatcccagctgcaaaacctgtaatatcagtgttggacgttaatgcccacttttcttattcttactcagccccttttcctcccttaggagcattggtcctctgttgtccatttttatcaccagatgttttccactgaagcatgcacatgccactgtcaccaaaacaaacaactaccactttccaaatttcattcagaaccattttagtgttttcctattccctacccctcccactactttcaatgatgaaataccctaagttaagttctccttttgacactttattgcctagatgctgcaatgtttttatgtttcctttatgccaaacataacaaaacagttatatagactgctttagcaaagtacacaataatggcttataaatggtgtttaaatatgcattcattttaatctactgaacaaatattgggataactccaaaccgcatgaaagggtgtaattgcagcatgagttaaatcttgaagcctagaattgtcagcacttccaacttcttgtttgacagtgttatttatgttatttatattagctaacaggaaacaactactgtgtttcaacataataaatataatagaaaaatattttatttgtattgttgtataaaatatttacaatcatatagaatatatagagttacattttaatagcaactgtgtacatgtcacgaaaccatttcccttatcaaagatgtaatttgtaaacctcaaatagttgtgtatctgtcctgttagaagtagatgacttcaattaaacaaatttatgaaggacattattctgattcataaaagttataaaatattaggtaaatacagagaaaacaataagcctctgaaataagtctgtttctgaaatagtcaatagtcttcccatccaaactataagagaatgtgaatttcttcaacatcatacttaaacattacagaaaatagaaatacaaacaaggttggtacatgagagaaaatgttgaccttttacttccttttacaaaaatgaaaataataaacatgttttcgtataaaataacacaaaatgatatacactgaagttgatgaagcaaataaatattctggcttctttttcaaggtatcagggcaaacaatttccaaacttttcattttgtacagaaggatgaataactacagctcatgggaaatgttttgactttacaaagtatagatgttggaacattaagaaaaatgtatattcccaatgaaaaaatagttatatcatcttatagtaaaccaaaagattagcaataatactatggacacattagattatatactacagacacatatctatccaaaatacctattttaaatttttaatacaatattttattttaatataaacatctgtcagttatagacaaagataataattcacaaagtacatgctatcagaatgaactttggtaaccagaaatgtaaaatttcaaataacggataaaataatgtgttatttttatagagaaagaaaaaaatagcaacacaatctagtttattttagggtactgagagcctagcagacttaaaggacaaggtagtaaatgttttatcactcaaaaatccattagaagtttcaaataaattgctttcttgctagctgtattccttcctacttgaaaagcgaatttcttttcctcctatgattgattttttaaaatcatgctcttttccatacatcaacataaacagtctttggatactaaataaactttccctaacaagtgtcctagctatgttatttagatttgataaaatattagacatttttaaaaatacttgtattgactatgagttttctgcttggcatggaggacactgaattttttcccaattatatggctacctgttgtattcttccccccgtttaaatcccttctccttgtatataattaaacttgctattccttcttaaaaacagctaatactaccactaaagtgcttccattttcattgtgtcaaaactacttagcaaggatggcagaggaaaataaactttactttatatcatgggtgaaagtgatcataacatttcctgaacctcaaatagttttggccacatcttgcttgctgatgaggacctctaatagtctcagtttggcttttatgtgcttatattcataatactcatctgccattggtatcctatcttccttttgtggacttctgcaaaacaaaaatacatttgttagttcacaatgaa

SEQ ID NO: 1879 - DNA, 1501 bp, Homo sapiens
  source 1..1501: mol_type = genomic DNA
cgggcggcagagctggagtgaagggagctagtggtagcagtcaccattatgctcaaagcggtgatcctgattggaggccctcaaaagggaactcgcttcagacctttgtcttttgaggtgcccaaaccattgtttcctgtggcaggggtccctatgatccaacaccatattgaagcctgtgcccaggtccctggaatgcaggagattctgctcattggcttctaccaacctgatgagcccctcacccagttcctagaagccgcccagcaggagtttaaccttccagtcaggtacctgcaggaatttgcccccctaggcacagggggtggtctttaccattttcgagaccagatcctggctgggagccccgaggcattcttcgtgctcaatgctgatgtctgctccgacttccccttgagtgctatgttggaagcccaccgacgccagcgtcaccctttcttactccttggcactacggctaacaggacgcaatccctcaactacggctgcatcgttgagaatccacagacacacgaggtattgcactatgtggagaaacccagcacatttatcagtgacatcatcaactgcggcatctacctcttttctcctgaagccttgaagcctcttcgggatgtcttccagcgtaatcagcaggatgggcaattggaggactcaccaggcttgtggccaggggcaggtaccatccgcctagagcaggatgtgttttcagccctggcagggcagggccagatatacgtgcatctcactgatggtatctggagtcagatcaagtccgcaggttcagccctctacgcctcccgcctctacctgagccgataccaggacactcacccagaacggctggccaagcacaccccagggggcccatggatccgagggaatgtgtacatccacccgaccgccaaggtggccccctcggctgtgctgggccccaacgtctccatcgggaagggggtgaccgtgggtgagggtgtgcggctccgggagagcatcgtcctccatggagccactttgcaggagcacacgtgtgttctgcatagcatcgtgggctgggggagcaccgtgggacgctgggcccgcgtggagggtacccccagtgaccctaaccccaacgatccccgagcccgcatggacagtgagagcctcttcaaggacgggaagctgctgcctgctatcaccatcctgggctgccgagtccggatccctgccgaggtgctcatcctgaactcgattgttctgccacacaaggagctgagccgaagcttcaccaaccagatcatcctctgagtagggctgccagaaggcccccagctcctacccactccccttgaggctgctgcctgcttggccagcctctgtccagaaaggaccagagaaagccaggctggatcgtcacatgccggggagcaatgtggatggcctggggactcctgggttttctccctcccgactccctaataaaccccgtgaaccttgg

SEQ ID NO: 1880 - DNA, 1242 bp, Homo sapiens
  source 1..1242: mol_type = genomic DNA
gatccactgagctggctctcgggtccctggggacaggtacctgcaggaatttgcccccctaggcacagggggtggtaccattttcgagaccagatcctggctgggagccccgaggcattcttcgtgctcaatgctgatgtctgctccgacttccccttgagtgctatgttggaagcccaccgacgccagcgtcaccctttcttactccttggcactacggctaacaggacgcaatccctcaactacggctgcatcgttgagaatccacagacacacgaggtattgcactatgtggagaaacccagcacatttatcagtgacatcatcaactgcggcatctacctcttttctcctgaagccttgaagcctcttcgggatgtcttccagcgtaatcagcaggatgggcaattggaggactcaccaggcttgtggccaggggcaggtaccatccgcctagagcaggatgtgttttcagccctggcagggcagggccagatatacgtgcatctcactgatggtatctggagtcagatcaagtccgcaggttcagccctctacgcctcccgcctctacctgagccgataccaggacactcacccagaacggctggccaagcacaccccagggggcccatggatccgagggaatgtgtacatccacccgaccgccaaggtggccccctcggctgtgctgggccccaacgtctccatcgggaagggggtgaccgtgggtgagggtgtgcggctccgggagagcatcgtcctccatggagccactttgcaggagcacacgtgtgttctgcatagcatcgtgggctgggggagcaccgtgggacgctgggcccgcgtggagggtacccccagtgaccctaaccccaacgatccccgagcccgcatggacagtgagagcctcttcaaggacgggaagctgctgcctgctatcaccatcctgggctgccgagtccggatccctgccgaggtgctcatcctgaactcgattgttctgccacacaaggagctgagccgaagcttcaccaaccagatcatcctctgagtagggctgccagaaggcccccagctcctacccactccccttgaggctgctgcctgcttggccagcctctgtccagaaaggaccagagaaagccaggctggatcgtcacatgccggggagcaatgtggatggcctggggactcctgggttttctccctcccgactccctaataaaccccgtgaaccttg

SEQ ID NO: 1881 - DNA, 1940 bp, Homo sapiens
  source 1..1940: mol_type = genomic DNA
agcaccggaagccgctcccctgtgaggctgcggaccgggagcagcggccgcaggtccgggcgccatggctgcggagcggacccggccgctgcaaggctctggcggtccgagcgtgcctagtagctgtgaacccggcgcgaggtcccgggccccggggcgctcgctcaggtaaatttttccataaccttatggagagaaaggactttgagacatggcttgataacatttctgttacatttctttctctgacggacttgcagaaaaatgaaactctggatcacctgattagtctgagtggggcagtccagctcaggcatctctccaataacctagagactctcctcaagcgggacttcctcaaactccttcccctggagctcagtttttatttgttaaaatggctcgatcctcagactttactcacatgctgcctcgtctctaaacagtggaataaggtgataagtgcctgtacagaggtgtggcagactgcatgtaaaaatttgggctggcagatagatgattctgttcaggacgctttgcactggaagaaggtttatttgaaggctattttgagaatgaagcaactggaggaccatgaagcctttgaaacctcgtcattaattggacacagtgccagagtgtatgcactttactacaaagatggacttctctgtacagggtcagatgacttgtctgcaaagctgtgggatgtgagcacagggcagtgcgtttatggcatccagacccacacttgtgcagcggtgaagtttgatgaacagaagcttgtgacaggctcctttgacaacactgtggcttgctgggaatggagttccggagccaggacccagcactttcgggggcacacgggggcggtatttagcgtggactacaatgatgaactggatatcttggtgagcggctctgcagacttcactgtgaaagtatgggctttatctgctgggacatgcctgaacacactcaccgggcacacggaatgggtcaccaaggtagttttgcagaagtgcaaagtcaagtctctcttgcacagtcctggagactacatcctcttaagtgcagacaaatatgagattaagatttggccaattgggagagaaatcaactgtaagtgcttaaagacattgtctgtctctgaggatagaagtatctgcctgcagccaagacttcattttgatggcaaatacattgtctgtagttcagcacttggtctctaccagtgggactttgccagttatgatattctcagggtcatcaagactcctgagatagcaaacttggccttgcttggctttggagatatctttgccctgctgtttgacaaccgctacctgtacatcatggacttgcggacagagagcctgattagtcgctggcctctgccagagtacaggaaatcaaagagaggctcaagcttcctggcaggcgaagcatcctggctgaatggactggatgggcacaatgacacgggcttggtctttgccaccagcatgcctgaccacagtattcacctggtgttgtggaaggagcacggctgacaccatgagccaccaccgctgactgactttgggtgccggggctgcgggttttgggtgcaacctctgcggcagccgactgcatgaaccaaagttctcacctaatggtatcatcacgcagtgcacaatcatttatctatgttttgccaggggccagggctcggggtgggggagggcttgttttattgacatacaacgcagcatgctaatggggtacaccattgacttcatttgtacttagttatgttggtcagtgttagaggatgcattttgggttcatctttcttgagtggagtattggttttaagtaaagaaagttaaatgatccattaatctgctaattggttgcctatgaaatcacattgtctgttattaaagctttttaccata

SEQ ID NO: 1882 - DNA, 663 bp, Homo sapiens
  source 1..663: mol_type = genomic DNA
ggaaagatggaggcagcggagacagaggcggaagctgcagccctagaggtcctggctgaggtggcaggcatcttggaacctgtaggcctgcaggaggaggcagaactgccagccaagatcctggttgagtttgtggtggactctcagaagaaagacaagctgctctgcagccagcttcaggtagcggatttcctgcagaacatcctggctcaggagagaccctggtgtgtccttcaaggctgttggtctacaacctgctggagatgtaaatttgccatgacttcctggaggacagcagcatggagaaagatcctagaaaaggcctctgacttccctcacctcccaaccatcattacaggaaagactgtgaactcctgagttcagcttgatttctgactacatcccagcaagctctggcatctgtggattaaaatccctggatctctctcagttgtgtatttgttcatcttcatatgctggcaggaacaactattaatacagatactcagaagccaataacatgacaggagctgggactggtttgaacacagggtgtgcagatggggagggggtactggccttgggcctcctatgatgcagacatggtgaatttaattcaaggaggaggagaatgttttaggcaggtggttatatgtgggaaga

SEQ ID NO: 1883 - DNA, 1872 bp, Homo sapiens
  source 1..1872: mol_type = genomic DNA
gggattgtgggaaggcagctgaactcggcgcctggaaagatggaggcagcggagacagaggcggaagctgcagccctagaggtcctggctgaggtggcaggcatcttggaacctgtaggcctgcaggaggaggcagaactgccagccaagatcctggttgagtttgtggtggactctcagaagaaagacaagctgctctgcagccagcttcaggtagcggatttcctgcagaacatcctggctcaggaggacactgctaagggtctcgaccccttggcttctgaagacacgagccgacagaaggcaattgcagctaaggaacaatggaaagagctgaaggccacctacagggagcacgtagaggccatcaaaattggcctcaccaaggccctgactcagatggaggaagcccagaggaaacggacacaactccgggaagcctttgagcagctccaggccaagaaacaaatggccatggagaaacgcagagcagtccagaaccagtggcagctacaacaggagaagcatctgcagcatctggcggaggtttctgcagaggtgagggagcgtaagacagggactcagcaggagcttgacagggtgtttcagaaacttggaaacctgaagcagcaggcagaacaggagcgggacaagctgcagaggtatcagaccttcctccagcttctgtataccctgcagggtaagctgttgttccctgaggctgaggctgaggcagagaatcttccagatgataaaccccagcagccgactcgaccccaggagcagagtacaggagacaccatggggagagaccctggtgtgtccttcaaggctgttggtctacaacctgctggagatgtaaatttgccatgacttcctggaggacagcagcatggagaaagatcctagaaaaggcctctgacttccctcacctcccaaccatcattacaggaaagactgtgaactcctgagttcagcttgatttctgactacatcccagcaagctctggcatctgtggattaaaatccctggatctctctcagttgtgtatttgttcatcttcatatgctggcaggaacaactattaatacagatactcagaagccaataacatgacaggagctgggactggtttgaacacagggtgtgcagatggggagggggtactggccttgggcctcctatgatgcagacatggtgaatttaattcaaggaggaggagaatgttttaggcaggtggttatatgtgggaagataattttattcatggatccaaatgtttgttgagtcctttctttgtgctaaggttcttgcggtgaaccagaattataacagtgagctcatctgactgttttaggatgtacagcctagtgttaacattcttggtatctttttgtgccttatctaaaacatttctcgatcactggtttcagatgttcatttattatattcttttcaaagattcagagattggcttttgtcatccactattgtatgttttgtttcattgacctctagtgataccttgatctttcccactttctgttttcggattggagaagatgtaccttttttgtcaactcttacttttatcagatgatcaactcacgtatttggatctttatttgttttctcaaataaatatttaaggttatacatttcttctgacttcctttattttcacaatcattcaattcatagcatttcctatattctgttataattatttcattgattcataaatttctttgaaaaataatttggtcttctattgattgtgagaagataatctaagtttaatttggtcagagaatatcatctgtttaataaactttgaaatttggtgagtgaattatcttttttactgataa

SEQ ID NO: 1884 - DNA, 3603 bp, Homo sapiens
  source 1..3603: mol_type = genomic DNA
agggagggggtggtgtccccagccggtttggggggtgcgttgcccggagacggaaagtttgggagcccgagcaggctcggctgcagcctcggggagggggtccagcgggtggcggccctggggatggggaaggagcaggagctgctggaggcggcccgcaccgggcacctcccggcggtggagaagctgctgtccgggaagcggctctcctcaggctttgggggcggcggcggcggtggctctgggggcggcggcggcggcagcggcggcggcggcggcggcctcggctcttccagccaccccctctccagtctgctcagaaatcaagctccatgagggcagactttgtctttttccatctgcatctccagcccctagaaggcgcacttcacgtgtctgctgagtacatgccatgtggagagggccaaatgtgaactgtgttgacagcactggctacacacccctgcaccatgctgctttgaatggccataaggatgtggtcgaggttcttctgaggaacgatgcgctgaccaacgtggctgactcaaaaggctgctaccctctgcatttggcagcctggaaaggagatgcccagatagtgcggttgctcatccatcaagggccttcacacaccagagtcaatgaacagaacaatgacaacgagacagccctgcattgtgcagcgcagtatggccacacagaggtggtgaaggtgctcttagaggagctgacggaccccaccatgcgcaacaacaaattcgagacccctttggacctggcagcactgtacgggcgactggaggtggtgaaaatgctccttaatgcacaccccaacctcctgagctgcaacactaagaagcacacccctctgcacttggcagcaaggaatggccacaaagccgtggtccaggtcctcctcgatgctggcatggacagcaactaccagacggagatgggcagtgctttgcatgaggctgctttgtttggcaagaccgatgtggtgcaaatcctgctggctgcaggaactgacgtcaacataaaagataaccatggactgactgccctagacactgttcgggaactgccttctcaaaagagccagcaaatagcagcattaattgaagatcacatgactggaaaaagaagtacaaaagaagtagataaaacccccccaccccagccacctctcatctccagtatggactccatatcacagaagtctcagggtgacgtggagaaagcagtgactgaactgattatagattttgatgcaaatgctgaagaagagggtccctacgaagctctgtataatgccatctcctgccattcgttggacagcatggccagcgggcgatcatctgaccaagactccacgaacaaggaggctgaggcagcaggagtgaaacctgctggagtgaggcctagggaacgtccaccacctccagcaaagccaccgcccgatgaagaggaagaagaccacatagataagaagtattttcccttgacagcttctgaggttctgtccatgagacctaggattcatgggagtgcagcccgggaagaagacgaacacccttatgaactgttgttaacagcagagacaaagaaagtggtgttggtggatggaaaaacaaaaggctaagagaactgtcagaagcccatcagtctgggaagaaagggagcttcatgcctggcctccttgtggttaggaaggaaaatggcccacacacttaccaaattaaggggctactgccacgtgcgtccctgttgaagtgggacagcacagtgctctgcacagaagccattctcctgaaagagattgagaaaatcatgagttctattggagaagggattgacttttctcaggaacggcagaagatctcaggtttacggacgctggagcagagtgtcggggagtggctggagtcgattgggctgcagcagtatgagagcaagttgcttctgaatggctttgacgatgtccacttcctggggtctaatgtgatggaagagcaggacctgcgggacatcggcatcagcgacccacagcaccggcggaagctgctccaggcggcacgctccctacccaaggtgaaggctctgggttatgacgggaacagcccccctagcgtgccctcctggctggactccctggggctgcaggactacgtccattccttcttgtcaagtggttacagctccattgacaccgtgaagaacctctgggagctagagctcgtcaatgtcctgaaggtccagctgctcggccatcgcaagcgcatcatcgcctccctcgcagacagaccgtacgaggagccgccccagaagccccccagattctcccagctgaggtgccaagatttgctctcccagacgtcatccccactgagtcagaatgattcctgcactgggcggtcggcagatctgctgctgcctccaggggacacaggcaggaggcgccatgacagtctccatgaccctgcggcaccctcccgagcggagcgcttcaggatccaggaggagcaccgtgaggccaagctgaccctgcggcccccgagcctggcagccccctacgccccagtgcagagttggcaacaccagccagagaaactcatcttcgagtcctgtggttatgaagccaattatctgggctccatgctgatcaaagatctgcgagggacagaatccacgcaagacgcctgtgccaagatgcggaaatctacggagcacatgaagaagatccccaccatcatcctgtccatcacatacaaaggtgtcaagttcatcgatgcctccaacaagaacgtcattgcagagcacgagatccggaacatttcctgtgcggcccaggacccggaggacctctgtacctttgcctacatcaccaaggacctgcagaccagccaccactattgccatgtgttcagcaccgtggatgtgaacctgacctacgagatcatcctgacgctggggcaggccttcgaagtggcctatcagttggccctgcaggcccagaagtccagggcgacgggcgcctctgcagctgagatgattgaaacaaaatcttccaaaccggtgcctaagcctcgggtcggcgtgaggaaatccgcagtgccgctgccccccgatagtcgctgttgttactgtcacacctgcaccacccaccgtccttcctacctaccgctgccatctgttagtcctggagtcaagctggaaccacctgatatggaccaagatgcccaatcccatgccagtgtctcctgggttgtggaccccaaaccagactctaagcggagcctcagcaccaaccatactaggttggagctggtctgctgcagtcagcctgaaaatgagttggtctctacaatctcaggagacaagcccaaatccttcctagaacctctcttatttgtgatgccaacaacagcttacaaccacaactgcccagaatggagaagccagaaggatggaggctgctccacctctgaatgcccacatcacctctgcctggaaaaaccgggtgttctaagcttagagatgagggaaaggagacttactgggctagagaacaggaccagaataaacttgatacaagtgagtcac

SEQ ID NO: 1885 - DNA, 1997 bp, Homo sapiens
  source 1..1997: mol_type = genomic DNA
tgagcaaccctaattaacctgattttttgctgataatcactctcaatggaatcaaatcacaaatccggggatggattgagcggcactcagaaggaagcagccctccgcgcactggtccagcgcacaggatatagcttggtccaggaaaatggacaaagaaaatatggtggccctccacctggttgggatgctgcaccccctgaaaggggctgtgaaatttttattggaaaacttccccgagacctttttgaggatgagcttataccattatgtgaaaaaatcggtaaaatttatgaaatgagaatgatgatggattttaatggcaacaatagaggatatgcatttgtaacattttcaaataaagtggaagccaagaatgcaatcaagcaacttaataattatgaaattagaaatgggcgcctcttaggggtttgtgccagtgtggacaactgccgattatttgttgggggcatcccaaaaaccaaaaagagagaagaaatcttatcggagatgaaaaaggttactgaaggtgttgtcgatgtcatcgtctacccaagcgctgcagataaaaccaaaaaccgaggctttgccttcgtggagtatgagagtcatcgagcagctgccatggcgaggaggaaactgctaccaggaagaattcagttatggggacatggtattgcagtagactgggcagagccagaagtagaagttgatgaagatacaatgtcttcagtgaaaatcctatatgtaagaaatcttatgctgtctacctctgaagagatgattgaaaaggaattcaacaatatcaaaccaggtgctgtggagagggtgaagaaaattcgagactatgcttttgtgcacttcagtaaccgagaagatgcagttgaggctatgaaagctttaaatggcaaggtgctggatggttcccccattgaagtcaccctagcaaaaccagtggacaaggacagttatgttaggtatacccgaggcacaggtggaaggggcaccatgctgcaaggagagtatacctactctttgggccaagtttatgatcccaccacaacctaccttggagctcctgtcttctatgccccccagacctatgcagcaattcccagtcttcatttcccagccaccaaaggacatctcagcaacagagccattatccgagccccttctgttagagaaatttacatgaatgtacctgtaggggctgcgggagtgagaggactgggcggccgtggctatttggcatacacaggcctgggtcgaggataccaggtcaaaggagacaaaagagaagacaaactctatgacattttacctgggatggagctcaccccaatgaatcctgtcacattaaaaccccaaggaattaaactcgctccccagatattagaagagatttgtcagaaaaataactggggacagccagtgtaccagctgcactctgctattggacaagaccaaagacagctattcttgtacaaaataactattcctgctctagccagccagaatcctgcaatccaccctttcacacctccaaagctgagtgcctttgtggatgaagcaaagacgtatgcagccgaatacaccctgcagaccctgggcatccccactgatggaggcgatggcaccatggctactgctgctgctgctgctactgctttcccaggatatgctgtccctaatgcaactgcacccgtgtctgcagcccagctcaagcaagcggtaacccttggacaagacttagcagcatatacaacctatgaggtctacccaacttttgcagtgactgcccgaggggatggatatggcaccttctgaagatgcttttttaaatttaagaataagacacacaaaactctattaaaaaaaaaaaagaaataaacctctaactcggtccccaatgatcataaataatatgtttcctaaagaaatgcctttccagagactgtatagcttataccaattatagaatcatgaagtaagaa

SEQ ID NO: 1886 - DNA, 2211 bp, Homo sapiens
  source 1..2211: mol_type = genomic DNA
tttgatatgacgattagagcataacccgagtgacacgttgaattcgccataatcaaggaaaccttttccgggtggggatctctgaaattactcagtgagcaaccctaattaacctgattttttgctgataatcactctcaatggaatcaaatcacaaatccggggatggattgagcggcactcagaaggaagcagccctccgcgcactggtccagcgcacaggatatagcttggtccaggaatttagaggttcctatagatggaagcagtgtgtctgggcacatgcccagagccagaagcgagcatgagcacagcaattcctggcctcaaaaaaggaaataatgctttgcagtccatcattttgcaaactttgctggaaaaggaaaatggacaaagaaaatatggtggccctccacctggttgggatgctgcaccccctgaaaggggctgtgaaatttttattggaaaacttccccgagacctttttgaggatgagcttataccattatgtgaaaaaatcggtaaaatttatgaaatgagaatgatgatggattttaatggcaacaatagaggatatgcatttgtaacattttcaaataaagtggaagccaagaatgcaatcaagcaacttaataattatgaaattagaaatgggcgcctcttaggggtttgtgccagtgtggacaactgccgattatttgttgggggcatcccaaaaaccaaaaagagagaagaaatcttatcggagatgaaaaaggttactgaaggtgttgtcgatgtcatcgtctacccaagcgctgcagataaaaccaaaaaccgaggctttgccttcgtggagtatgagagtcatcgagcagctgccatggcgaggaggaaactgctaccaggaagaattcagttatggggacatggtattgcagtagactgggcagagccagaagtagaagttgatgaagatacaatgtcttcagtgaaaatcctatatgtaagaaatcttatgctgtctacctctgaagagatgattgaaaaggaattcaacaatatcaaaccaggtgctgtggagagggtgaagaaaattcgagactatgcttttgtgcacttcagtaaccgagaagatgcagttgaggctatgaaagctttaaatggcaaggtgctggatggttcccccattgaagtcaccctagcaaaaccagtggacaaggacagttatgttaggtatacccgaggcacaggtggaaggggcaccatgctgcaaggagagtatacctactctttgggccaagtttatgatcccaccacaacctaccttggagctcctgtcttctatgccccccagacctatgcagcaattcccagtcttcatttcccagccaccaaaggacatctcagcaacagagccattatccgagccccttctgttagaggggctgcgggagtgagaggactgggcggccgtggctatttggcatacacaggcctgggtcgaggataccaggtcaaaggagacaaaagagaagacaaactctatgacattttacctgggatggagctcaccccaatgaatcctgtcacattaaaaccccaaggaattaaactcgctccccagatattagaagagatttgtcagaaaaataactggggacagccagtgtaccagctgcactctgctattggacaagaccaaagacagctattcttgtacaaaataactattcctgctctagccagccagaatcctgcaatccaccctttcacacctccaaagctgagtgcctttgtggatgaagcaaagacgtatgcagccgaatacaccctgcagaccctgggcatccccactgatggaggcgatggcaccatggctactgctgctgctgctgctactgctttcccaggatatgctgtccctaatgcaactgcacccgtgtctgcagcccagctcaagcaagcggtaacccttggacaagacttagcagcatatacaacctatgaggtctacccaacttttgcagtgactgcccgaggggatggatatggcaccttctgaagatgcttttttaaatttaagaataagacacacaaaactctattaaaaaaaaaaaagaaataaacctctaactcggtccccaatgatcataaataatatgtttcctaaagaaatgcctttccagagactgtatagcttataccaattatagaatcatgaagtaagaa

SEQ ID NO: 1887 - DNA, 2116 bp, Homo sapiens
  source 1..2116: mol_type = genomic DNA
tttgatatgacgattagagcataacccgagtgacacgttgaattcgccataatcaaggaaaccttttccgggtggggatctctgaaattactcagataacagtgctgtgccaaaaacctgtggattttctctacaaaaattattgagcaaccctaattaacctgattttttgctgataatcactctcaatggaatcaaatcacaaatccggggatggattgagcggcactcagaaggaagcagccctccgcgcactggtccagcgcacaggatatagcttggtccaggaaaatggacaaagaaaatatggtggccctccacctggttgggatgctgcaccccctgaaaggggctgtgaaatttttattggaaaacttccccgagacctttttgaggatgagcttataccattatgtgaaaaaatcggtaaaatttatgaaatgagaatgatgatggattttaatggcaacaatagaggatatgcatttgtaacattttcaaataaagtggaagccaagaatgcaatcaagcaacttaataattatgaaattagaaatgggcgcctcttaggggtttgtgccagtgtggacaactgccgattatttgttgggggcatcccaaaaaccaaaaagagagaagaaatcttatcggagatgaaaaaggttactgaaggtgttgtcgatgtcatcgtctacccaagcgctgcagataaaaccaaaaaccgaggctttgccttcgtggagtatgagagtcatcgagcagctgccatggcgaggaggaaactgctaccaggaagaattcagttatggggacatggtattgcagtagactgggcagagccagaagtagaagttgatgaagatacaatgtcttcagtgaaaatcctatatgtaagaaatcttatgctgtctacctctgaagagatgattgaaaaggaattcaacaatatcaaaccaggtgctgtggagagggtgaagaaaattcgagactatgcttttgtgcacttcagtaaccgagaagatgcagttgaggctatgaaagctttaaatggcaaggtgctggatggttcccccattgaagtcaccctagcaaaaccagtggacaaggacagttatgttaggtatacccgaggcacaggtggaaggggcaccatgctgcaaggagagtatacctactctttgggccaagtttatgatcccaccacaacctaccttggagctcctgtcttctatgccccccagacctatgcagcaattcccagtcttcatttcccagccaccaaaggacatctcagcaacagagccattatccgagccccttctgttagaggggctgcgggagtgagaggactgggcggccgtggctatttggcatacacaggcctgggtcgaggataccaggtcaaaggagacaaaagagaagacaaactctatgacattttacctgggatggagctcaccccaatgaatcctgtcacattaaaaccccaaggaattaaactcgctccccagatattagaagagatttgtcagaaaaataactggggacagccagtgtaccagctgcactctgctattggacaagaccaaagacagctattcttgtacaaaataactattcctgctctagccagccagaatcctgcaatccaccctttcacacctccaaagctgagtgcctttgtggatgaagcaaagacgtatgcagccgaatacaccctgcagaccctgggcatccccactgatggaggcgatggcaccatggctactgctgctgctgctgctactgctttcccaggatatgctgtccctaatgcaactgcacccgtgtctgcagcccagctcaagcaagcggtaacccttggacaagacttagcagcatatacaacctatgaggtctacccaacttttgcagtgactgcccgaggggatggatatggcaccttctgaagatgcttttttaaatttaagaataagacacacaaaactctattaaaaaaaaaaaagaaataaacctctaactcggtccccaatgatcataaataatatgtttcctaaagaaatgcctttccagagactgtatagcttataccaattatagaatcatgaagtaagaa

SEQ ID NO: 1888 - DNA, 2068 bp, Homo sapiens
  source 1..2068: mol_type = genomic DNA
tttgatatgacgattagagcataacccgagtgacacgttgaattcgccataatcaaggaaaccttttccgggtggggatctctgaaattactcagtgagcaaccctaattaacctgattttttgctgataatcactctcaatggaatcaaatcacaaatccggggatggattgagcggcactcagaaggaagcagccctccgcgcactggtccagcgcacaggatatagcttggtccaggaaaatggacaaagaaaatatggtggccctccacctggttgggatgctgcaccccctgaaaggggctgtgaaatttttattggaaaacttccccgagacctttttgaggatgagcttataccattatgtgaaaaaatcggtaaaatttatgaaatgagaatgatgatggattttaatggcaacaatagaggatatgcatttgtaacattttcaaataaagtggaagccaagaatgcaatcaagcaacttaataattatgaaattagaaatgggcgcctcttaggggtttgtgccagtgtggacaactgccgattatttgttgggggcatcccaaaaaccaaaaagagagaagaaatcttatcggagatgaaaaaggttactgaaggtgttgtcgatgtcatcgtctacccaagcgctgcagataaaaccaaaaaccgaggctttgccttcgtggagtatgagagtcatcgagcagctgccatggcgaggaggaaactgctaccaggaagaattcagttatggggacatggtattgcagtagactgggcagagccagaagtagaagttgatgaagatacaatgtcttcagtgaaaatcctatatgtaagaaatcttatgctgtctacctctgaagagatgattgaaaaggaattcaacaatatcaaaccaggtgctgtggagagggtgaagaaaattcgagactatgcttttgtgcacttcagtaaccgagaagatgcagttgaggctatgaaagctttaaatggcaaggtgctggatggttcccccattgaagtcaccctagcaaaaccagtggacaaggacagttatgttaggtatacccgaggcacaggtggaaggggcaccatgctgcaaggagagtatacctactctttgggccaagtttatgatcccaccacaacctaccttggagctcctgtcttctatgccccccagacctatgcagcaattcccagtcttcatttcccagccaccaaaggacatctcagcaacagagccattatccgagccccttctgttagaggggctgcgggagtgagaggactgggcggccgtggctatttggcatacacaggcctgggtcgaggataccaggtcaaaggagacaaaagagaagacaaactctatgacattttacctgggatggagctcaccccaatgaatcctgtcacattaaaaccccaaggaattaaactcgctccccagatattagaagagatttgtcagaaaaataactggggacagccagtgtaccagctgcactctgctattggacaagaccaaagacagctattcttgtacaaaataactattcctgctctagccagccagaatcctgcaatccaccctttcacacctccaaagctgagtgcctttgtggatgaagcaaagacgtatgcagccgaatacaccctgcagaccctgggcatccccactgatggaggcgatggcaccatggctactgctgctgctgctgctactgctttcccaggatatgctgtccctaatgcaactgcacccgtgtctgcagcccagctcaagcaagcggtaacccttggacaagacttagcagcatatacaacctatgaggtctacccaacttttgcagtgactgcccgaggggatggatatggcaccttctgaagatgcttttttaaatttaagaataagacacacaaaactctattaaaaaaaaaaaagaaataaacctctaactcggtccccaatgatcataaataatatgtttcctaaagaaatgcctttccagagactgtatagcttataccaattatagaatcatgaagtaagaa

SEQ ID NO: 1889 - DNA, 2003 bp, Homo sapiens
  source 1..2003: mol_type = genomic DNA
ggaagacatcaggatgtaccatctgcccttctgtcggaccccagggtacgtcccatgagcgcggccgagctgcgtcgagggcagcagagcgtgctgcactgctcagggacccggactctgcagtttctcctgcactgttttcacctttggccagacgggctctgggaagacctacaccctgactggaccccctccccagggggagggggtgcctgtaccccccagcctggctggcatcatgcagaggaccttcgcctggctgttggaccgcgtgcagcacctgggtgcccctgtcacccttcgcgcctcttatctggagatctacaatgagcaggttcgggacttgctgagcctggggtctccccggcccctccctgttcgctggaacaagactcggggcttctatgtggagcagctgcgggtggtggaatttgggagtctggaggccctgatggaacttttgcaaacgggtctcagccgtcgaaggaactcagcccacaccctgaaccaggcctccagccgaagccatgccctgctcaccctttacatcagccgtcaaactgcccagcagatgccttctgtggaccctggggagccccctgttggtgggaagctgtgctttgtggacctggcaggcagtgagaaggtagcagccacgggatcccgtggggagctgatgcttgaggctaacagcatcaaccgaagcctgctggccctgggtcactgcatctccctgctgctggacccacagcggaagcagagccacatccctttccgggacagcaagctcaccaagttgctggcagactcactgggagggcgcggggtcaccctcatggtggcctgcgtgtccccctcagcccagtgccttcctgagactctcagcaccctgcgatatgcaagccgagctcagcgggtcaccacccgaccacaggcccccaagtctcctgtggcaaagcagccccagcgtttggagacagagatgctgcagctccaggaggagaaccgtcgcctgcagttccagctggaccaaatggactgcaaggcctcagggctcagtggagcccgggtggcctgggcccagcggaacctgtacgggatgctacaggagttcatgctagagaatgagaggctcaggaaagaaaagagccagctgcagaatagccgagacctggcccagaatgagcagcgcatcctggcccagcaggtccatgcactagagaggcgtctcctctctgcctgctaccatcaccagcagggtcctggcctgaccccaccgtgtccctgcttgatggccccagctcccccttgccatgcactgccacccctctactcctgcccctgctgccacatctgcccactgtgtcgagtgcccctggcccactgggcctgcctgccaggggagcaccacctgccccaggtgttggaccctgaggcctcaggtggcaggcccccatctgcccggcccccaccctgggcacccccatgcagccctggctctgccaagtgcccaagagagaggagtcacagtgactggactcagacccgagtcctggcagagatgttgacggaggaggaggtggtaccttctgcacctcccctgcctgtgaggcccccgaagacatcaccagggctcagaggtggggccggggttccaaacctggcccagagactggaggccctcagagaccagattggcagctccctgcgacgtggccgcagccagccaccctgcagtgagggcgcacggagcccaggccaagtcctccctccccattgaaggccaagtgggaacccaggagactgctgtgtgacctcagactgggctccacactcttgggcttcagtctgcccatctgctgaatggagacagcagctgctactccacctgcagctgggctaggggcggggactgggggtgctatttaggggaacaaggggattcaggagaaaccaggcagcaggggatgaaatacatgaataaagagaggcatcagctccaa

SEQ ID NO: 1890 - DNA, 1617 bp, Homo sapiens
  source 1..1617: mol_type = genomic DNA
tttttcatgatttttcctcacactgatcactatccaatcagaacaataaacttctaacactcccttactaaaagaacatggttaagggtgagaaaggccccaagggcaagaagatcaccctcaaggtggccaggaattgcatcaaaatcacttttgatgggaaaaagcgccttgacttgagcaagatgggaattaccaccttccccaagtgtattctgcgccttagtgacatggacgagctggaccttagccggaatcttatcaggaagatccctgactccatctccaagttccagaacctccggtggctggacctgcacagcaactacatagacaagctgcctgagtccattggccagatgaccagcctgctctacctcaacgtcagcaacaaccggctgaccagcaacgggctgcccgtggagctgaagcaactcaagaacatccgcgctgtgaacctaggcttgaaccacctggacagcgtgcccaccacactgggggccctgaaggagctccacgaggtagggctccatgacaacctactgaacaacatccccgtgagcatctccaagctccccaagctgaaaaagctcaacataaagcggaacccctttccaaagccaggtgagtcggaaatattcatagactccatcaggaggctggagaacttgtatgttgtggaggagaaggatctgtgtgcggcttgcctgagaaaatgccaaaacgcccgggacaacctgaatagaatcaagaacatggccacgacgacaccgagaaagaccatctttcccaatctgatctcacccaattccatggccaaggactcctgggaagactggagaatacgcttgacatcttcctagagtagctgtggcaaaatcttgaagactactcagctaacagaataaacgactctgaagaggagaagcccccagttaggagaagacagagtggcaagtgagatgttctggaaaccaggctcgccggagctggccaagccaccgacttgcttctcaaattcacttcacctcccttagctttagcccacctgtgtgtgaaaatgactttgggaaatatttgatgtggtttttaaaatgtatatagaaaaaaatttaagaaaattacagattatatattatagacaactaaatatttaagactttaagacttaaaaggcttactgcctctacatttcactcagactagtacatctcaatgccagtagtctgtgataaatttatgtaggtataatgagatactgatatggtttgggcatttgtctcctccaaacctcatgttgagatttgatccccagtgttggaggtggggcctaatggaaggtcatgggggtgggtccctcatgaatggcctggtgccatccttttggtaatgagtgagttctcactgtattagatcctgttgaaaattgattgttaaaaagaccttggcacctccctctcctctctctctcttcctctcactatgtgatgcctgctccccttcaccttccaccatgagtggaagcacctataccccaaagccctcaccagaaggaggtgccggcacctgtacagcttgtaagaaccatgactcaaataaacttcttttctttataaa

SEQ ID NO: 1891 - DNA, 2380 bp, Homo sapiens
  source 1..2380: mol_type = genomic DNA
gatgctccaaatatccctacaaagtactttattattcctgtttcacagacaaggaaactggggcacagacaggttgaacaatgttcctgtagctgagccaggatttgaacccagggatttatttctctacaagggacacaggtgactgaacttcctcctggccccgaggacccagggaagcacctctttgagatcagcccaggtggtgccggggagcgggagaaggtgccggccaaccccgaggcgctcctgctcatggccagctcccagcgtgacatggaggactgggtgcaggccatccgccgagtcatctgggccccgctgggcggaggtactgcccgtagatcgcatgcccaccctctagaacccttgcctccagggatctttgggcagcgcctagaggaaacagtccaccacgagcggaagtatggcccccgcctggcgcccctgctggtggagcagtgtgtggacttcatccgggagcgcgggctcactgaggaggggctgttccgcatgccaggccaggccaacctggtgagggacctgcaggattccttcgactgtggggagaagccactgtttgacagcacaacagacgtgcacacggtggcctccctgctgaagctgtacctgcgggagctccccgagcccgtggtccccttcgccaggtacgaggacttcctcagctgcgcccagctgctcaccaaggacgagggggagggcactctggagttggctaaacaagtgagcaaccttcctcaggcaaattacaacctgctcagatacatctgcaagtttctggatgaagttcaggcatactcaaatgtcaacaagatgagtgtccagaatctggcaaccgtttttggacctaacattctgcggccacaggtagaggacccagtaaccatcatggaaggcacttccctcgtccagcacctgatgaccgtcctcatccgcaaacacagccagctcttcacggcaccggtcccggaagggcccacctccccgcgcgggggcctgcaatgcgcagtggggtggggctccgaggaggtcaccagggacagccaaggagagcccggcggccccggcctgcccgcgcacaggacctcttccctggacggggcggccgtggcggtgctctccagaacagcccccacggggccggggagccggtgcagccctgggaagaaggtgcagaccctgcccagttggaagtcctccttccggcagccgaggtccctatcgggaagcccgaaggggggcggctcatccctggaggtgcccatcatctcctccggcgggaactggcttatgaacgggctgtcctccctgcgcggacaccgccgggcctcgtcgggagaccggctcaaggactcgggctccgtgcagagactctccacctacgacaatgtgcccgcgccgggcctggtccccggcatacccagcgtggccagtatggcgtggtccggggcctcgtccagcgagtcgtcggtggggggctcactcagcagctgcacggcctgccgcgccagcgactcgtctgcccgcagttccctgcacaccgactgggccctggagccctccccgctccccagcagcagcgaggaccccaagtccctggacctggaccacagcatggacgaggcgggcgcgggtgccagcaacagcgagcccagcgagccggacagccccacccgggaacacgcgcgccgctccgaggccttacaggggctggtcactgagctcagggccgagctgtgccgccagcggactgagtacgagaggagtgtgaaaagaatcgaagaagggagtgctgacctgagaaaacgaatgtcccggttagaagaagaactggaccaggaaaagaaaaaatacatcatgctggaaataaagctgcggaactctgaacgggcgcgggaggatgcggagaggaggaaccagctgttgcagagggaaatggaggagtttttttcgaccctaggaagcttgactgttggggcaaaaggtgccagggccccaaagtaaaaggaatggcagagctcacttctgtaccacgtctgctggtctccagccttgtatggagttagaagcgtctgtatctctggagcagccaggcgctctggagccagctggagagagagagatcctgatacctctgtggggactgtggggacttttgggaccccacacactccaggtgggatcagatgctgctccaaccatgcagttcctggtgagggtcagaaggggacggtaccaagagtagcgcttagcccttacccaggaaatatccttcatggccacagaaatggagggcgcccaggatccaggcagccaccgggaacagtcagctttctttattaaatgtgctcacaaagca

SEQ ID NO: 1892 - DNA, 2339 bp, Homo sapiens
  source 1..2339: mol_type = genomic DNA
acctgcgacaggtggagcgcacggggcgggcgcacggccatgtccgccgagggcgcggagccggggccggggtccgggtccgggcccgggccggggccactctgccccgaacacggccaggctctgagctggttctgcggctccgagcgacggcccgtgtgcgccgcctgcgcggggttgggcggtcgctgccgggggcaccgcatccgccgggcggaggagcgcgccgaggagctgcggaacaagattgtggaccagtgtgagaggctgcagttacagagtgctgccatcaccaagtatgtggcggacgtcctgccggggaagaatcaaagagcagtgagcatggccagtgcagcgagggaactggttatccagcggttgagtctggtgaggagtctttgcgagagcgaggagcagcggttactggaacaggtgcatggcgaagaggagcgggcccaccagagcatcctgacacagcgggtgcactgggccgaggcgctgcagaaacttgacaccatccgcactggcctggtgggcatgcttactcacctggatgacctccagctgattcagaaggagcaagagattttcgagaggaccgaagaagcagagggcattttggatccccaggagtcggaaatgttaaactttaatgagaagtgcactcggagcccactactgacccaactctgggcaacggcggttcttgggtctctctcaggcacagaggacatacggatcgatgagaggacagtcagccccttcctgcaattgtcagatgatcgaaagaccctgaccttcagcaccaagaagtcaaaggcctgtgcagatggcccggagcgcttcgaccactggcccaatgccctggctgccacctccttccagaatgggctccatgcctggatggtgaatgtccagaacagttgtgcctataaggtgggcgtggcttcaggccacctgccccgcaagggttctggcagtgactgccgtctgggccacaatgccttctcctgggtcttctctcgctatgatcaggagtttcgtttctcacacaatgggcagcacgagcccctggggctgctgcggggcccagcccagctgggtgtagtgctggacttgcaggttcaggagctgctcttctatgagccagcctccggcacagtgctctgtgcccatcatgtgtccttcccggggcccctcttcccagtctttgctgtggccgatcagaccatttctatcgtccgctgacctctggccacaggaagccaggtccaccgcccaccaccctttcaggccatgtttctactcagtgtgcttttcccaaatgatgtgtgtggtgtttctaagagaaacagggcccataaccagtgggcagctttaggagggatggggatctgtttcagatctaggcataacctgtaaatcacaggtgtccaaacttttggcttccctgggccacatttgaagaagaattttcttgggccacataaaatacactaacgatagctgatgagctaaaaaaaaaaaaaaagtctgtgtataatttttgtgatatctgccaccacagataagcaaaaaagtccttgcattcaaagggttggagattgctgctttgagtgctgggtacctgtggggaacctactactccctgggccttagtctcccaaatccaccatgcatctgcccctctgagggtgtcttcactttgtctctggcatctagcatggtgcctggtgcatagtgagcatgcaataaatatttggcaggtgagtggatggatagatggataggtgaatgtaggtggacaggtgactgggtggatgttgtggtctctggagaagcactgccattcagcctcctgctccagctgttcacatgcagaaatgctctcttcacaggcagagaagcctgtggctaaagtttccacatcccattaactcagtgcttttgtctttttcatgacatggcacatagagaaaatatttttttctagcacacaagagcaacctgaaaggctgctcctggccagaggactctgtcccgggggaccgtgtcctcccccatgtcctgcctaggccctcagaggaccaggggatcatgtctccaggtaacccgactgtagcccctgctggctgagctccagcctgtgcccactgataatagcagggacggccttttctcttagagcagctgataagtttccctacctgatggccccctctgacataaactgcacacctggggtgatggcttaaagccagaaagagctgagggagttaagagggccaaccttagggcacgtgggcattattaaaggtcttaaaagcattgaagattta

SEQ ID NO: 1893 - DNA, 872 bp, Homo sapiens
  source 1..872: mol_type = genomic DNA
ggagcatgatggaagtcgtagtaggaaatggcgtcgtggcattgaggggcatccctcctagaacctccaggaaaagctcgcggaagacgaggttctgcggagagagaggctccaagcagtctgggaagtgtagtccagttggcttagcagtagtttcgttgggggggagccgaggttccgggaaggggctaggccggcttgaaaagagattatgactgtaccttttaactttgtagctggaacacaagaagtgtttgtttaatgaatgacgtacacatttaagatctgtttggacgcggaggataatcctgtgaattgctaatagttcactgggtttggcccttagtgttgacttcagtatgctgagacggaaaccaacacgcctagagctaaagcttgatgacattgaagagtttgagaacattcgaaaggacctggagacccgtaagaaacagaaggaagatgtggaagttgtaggaggcagtgatggagaaggagccattgggcttagcagtgatcccaagagccgggaacaaatgatcaatgatcggattggttataaaccccaacccaagcccaataatcgttcatctcaatttggaagtcttgaattttagagatggattatcttgcatgccagagcgctggaatggaataaaatgatggcagaagtacaaaccagatttagagaattgagtgcttgcagtcaagcagaatgtacctcctgcagagacaaatcttctgcatgagattactgatgcttcacttgcactctaagctggaatccaaactctggtttgtctcttgaaaatttgactctataaaactgatctgattttctgtttttaaaaataaatatatttttggaaaaa

SEQ ID NO: 1894 - DNA, 938 bp, Homo sapiens
  source 1..938: mol_type = genomic DNA
ggctagcggccctgcgtgggagttcctgacagctggattctagaagtagaactatgagctcacctttggcctcccttagcaagacccgaaaagtgcccctgccctcggagcctatgaatcctgggaggcgaggaatccgcatctatggagatgagcggtgacctaggcatccctgtctgcagaagatgaggtggacatgttgagtgatgggtgtggctcagaagaaaagatctcagtcccttcctgctatggcggcataggtgcccctgtgagtcggcaagtccctgcatcccatgactcggagctgatggccttcatgacgaggaagttgtgggacctggagcagcaggtgaaggcccagactgatgagatactgtccaaggatcagaagatagcggccctagaggacctggtgcagaccctccggccacacccagccgaggcaaccctgcagcggcaggaggaactggagacgatgtgtgtgcagctgcagcggcaggtcagggagatggagcggttcctcagtgactatggcctgcagtgggtgggcgagcccatggaccaggaggactcagagagcaagacagtctcagagcatggcgagagggactggatgacagccaagaagttctggaagccaggggactcattggcgccccctgaggtggactttgacaggctgctggccagcctgcaggatcttagtgagctggtggtagagggtgacacccaagtgacaccagtgcccggcggggcacggctgcgtaccctcgagcccatcccgctgaagctctaccggaatggcatcatgatgttcgacgggcccttccagcccttctacgatccctccacacagcgctgcctccgagacatattggatggcttctttccctcagagctccagcgactgtaccccaatggggtcccctttaaggtga

SEQ ID NO: 1895 - DNA, 1846 bp, Homo sapiens
  source 1..1846: mol_type = genomic DNA
agtgcagccccagccagaagagctggaaggctgggcggccaggcccgctgtgtccccagttttcctgttggagtccatctgctgtgctctcaggagagaaggctgggtctctgggagctcacatcctgtatgccctccctccatgccaagcaactttggggagtcctggcagtggtgccaggcgttgctcttacctgtaccataaccaggaggctgatggttgctcaggcctccctcaaactagccaatgagaagtgcacgggtcctggtcgcctaggaaaccgcgtgacaacaagatggcggcgctgcgggacggctagcggccctgcgtgggagttcctgacagctggattctagaagtagaactatgagctcacctttggcctcccttagcaagacccgaaaagtgcccctgccctcggagcctatgaatcctgggaggcgaggaatccgcatctatggagatgtccctgcatcccatgactcggagctgatggccttcatgacgaggaagttgtgggacctggagcagcaggtgaaggcccagactgatgagatactgtccaaggatcagaagatagcggccctagaggacctggtgcagaccctccggccacacccagccgaggcaaccctgcagcggcaggaggaactggagacgatgtgtgtgcagctgcagcggcaggtcagggagatggagcggttcctcagtgactatggcctgcagtgggtgggcgagcccatggaccaggaggactcagagagcaagacagtctcagagcatggcgagagggactggatgacagccaagaagttctggaagccaggggactcattggcgccccctgaggtggactttgacaggctgctggccagcctgcaggatcttagtgagctggtggtagagggtgacacccaagtgacaccagtgcccggcggggcacggctgcgtaccctcgagcccatcccgctgaagctctaccggaatggcatcatgatgttcgacgggcccttccagcccttctacgatccctccacacagcgctgcctccgagacatattggatggcttctttccctcagagctccagcgactgtaccccaatggggtcccctttaaggtgagtgacttgcgcaatcaggtctacctggaggatggactggaccccttcccaggcgagggccgtgtggtgggcaggcagctgatgcacaaggccttggacagggtggaggagcacccaggctccaggatgactgctgagaaatttctgaacaggctccccaagtttgtgatccggcaaggcgaggtgattgacatccggggccccatcagggacaccttgcagaactgctgcccattgcctgcccggatccaggagattgtggtggagacgcccaccttggccgctgagcgagagaggagccaggagtcacccaacacgccggcacccccgctctccatgctgcgcatcaagtctgagaatggggaacaggccttcctactgatgatgcagcctgacaacaccattggggacgtgcgagctctgctagcgcaggccagggtcatggatgcctctgcctttgagatcttcagcacattcccgcccaccctctaccaggacgatacactcacgctgcaggctgcaggccttgtgcccaaagcagcactgctgctgcgggcacgccgagccccgaagtccagcctgaaattcagtcctggtccctgtcccggtcccggtcccggccccagtcccggtcccggtcccggccccagtcccggtcccggtcccggccccagtccctgtcctggacccagtcccagcccccaataaagcacccgccccctc

SEQ ID NO: 1896 - DNA, 2872 bp, Homo sapiens
  source 1..2872: mol_type = genomic DNA
tggacccaactggcgaggctgctggggttgcagcgggacagttggggcggccccgcaggcccagtaaacgattatgagggaaatgactctgaagcagaagacttgaatttcagggagactttgccttcatcaagtcaggaaaacacacctagatcaaaggtttttgaaaataaagttaattcagagaaggtaaaactttctcttcggaatttcccacataatgattatgaggatgtttttgaagagccttcagaaagtggcagtgatcccagcatgtggacagccagaggccccttcagaagagacaggtggagcagtgaggatgaggaggctgcagggccatcacaggctctctcccctctactttctgatacgcgcaaaattgtttctgaaggagaactagatcagttggctcagattcggccattaatattcaattttcatgagcagacagccatcaaggattgtttgaaaatccttgaggaaaaaacagcagcgtatgatatcatgcaggaatttatggctttagaacttaagaatctgcctggtgagttcaactctgggaatcaaccaagcaacagagaaaaaaacagataccgagatattcttccatatgattcaacacgcgttcctcttggaaaaagcaaggactacatcaatgctagttatattagaatagtcaattgtggagaagagtatttttatatcgctactcaaggaccactgctgagcaccatagatgacttttggcaaatggtgttggaaaataattcaaatgttattgccatgataaccagagagatagaaggtggaattatcaaatgctaccattactggcccatttctctgaagaagccattggaattgaaacacttccgtgtattcctggagaactaccagatacttcaatatttcatcattcgaatgtttcaagttgtggagaagtccacgggaactagtcactctgtaaaacagttgcagttcaccaagtggccagaccatggcactcctgcctcagcagatagcttcataaaatatattcgttatgcaaggaagagccaccttacaggacccatggttgttcactgcagtgccggcataggccggacaggggtgttcctatgtgtggatgtcgtgttctgtgccatcgtaaagaactgttcattcaacatcatggatatagtggcccaaatgagagaacaacgttctggcatggttcaaacgaaggagcagtatcacttttgttacgatattgtgcttgaagttcttcggaaacttctgactttggattaagaaagacttctgttgcctctcacttgaaattaccaagtgggtttgcacctcctcataaagaacatgtttgcactgtgctgaagggctttgctatgcatacaatctgctttcttggtttatcagtttattttctttctaaaagctccctgaagggcaatatcatttggcttggggtgatcagtgtttacttattgatcttgctagacaatatcaaaataacttcccacattttccagtgaaacagatgttacataaaacgattgcagcttggctatttggttgaagggattacagagcccaataaaggatttaaaatatattcattaagattttatttggaaaggtggctggagagagctgaggatttccaggactttgtaagttcttattctgggagaacataaggccaataatcatgacctcttccaggcatttttaagacagatgtctattcatgttctttagctagagcctgtactttttgctggcatttgaataacccagtttaaaaagagtccagttagggtggactaactttggacacaaattggcttccatttcctacattttcatactgctgccttcctacagctgctagaccaagacctgttggtctgggaagcatttcatggatagggagagctcctctcggtgaacagtccaaaactaaaatagatgtttatatagaaagcccaagaggagatttttgccatgcctgagttctttcctatcccaccctaacacttaacatattacttagtctgctttgttaaaagcaagtattacctttaacttgcctcttactctttgccctttagctaactaataaagtttgatataggcattattatataattctgagtcattcatggtatatctcatgtttgatgtatttttcaaactaagatctatgatagttttttttccagagttccattaaatcatttatttcctttactttctcacctctgttgaaacatttagaaactggatttgggaacccaattttggaaaaccagattcatagtcatgaaaatggaaacttccatattctgtttttgaaaagatgtggccattattacagtaattttattataggactttgcctcgtacaattaatagtgatattttggacaaggagttctggtgacaagctatacctaattataagctataaaacaatagatatgagtgtttgtacagtttaactcaatggagatcagaatattctatgtattgagaaaatgtttaatatcaatctataaatcttgaatttctaagaggcttattttgttcttttggctgaatgagtatatttgaattggttgaataattaataattctcattgtaaaaataattatatgccaaaaatatatttgatgttaaatcaaatagatgattctgtttacattgttcatatgaataataatctgtgttaatttcattttgataattggcctttaatatttgtatctctaattttattttctctctgttactgtaaaataatagctataatgtataacaattttcttcagaagaattctatgctattattaaaataaaatatttactgtg

SEQ ID NO: 1897 - DNA, 1792 bp, Homo sapiens
  source 1..1792: mol_type = genomic DNA
aaaccgcgtgacaacaagatggcggcgctgcgggacggctagcggccctgcgtgtactttcccaagcaccaccaggccaaaggtctctcagttcagagcagaaagccgtatacccagaggagcaggcagataacagaaacttccagaaacctctgtggagacagtggaagaggcaaaagggagttcctgacagctggattctagaagtagaactatgagctcacctttggcctcccttagcaagacccgaaaagtgcccctgccctcggagcctatgaatcctgggaggcgaggaatccgcatctatggagatgaagatgaggtggacatgttgagtgatgggtgtggctcagaagaaaagatctcagtcccttcctgctatggcggcataggtgcccctgtgagtcggcaagtccctgcatcccatgactcggagctgatggccttcatgacgaggaagttgtgggacctggagcagcaggtgaaggcccagactgatgagatactgtccaaggatcagaagatagcggccctagaggacctggtgcagaccctccggccacacccagccgaggcaaccctgcagcggcaggaggaactggagacgatgtgtgtgcagctgcagcggcaggtcagggagatggagcggttcctcagtgactatggcctgcagtgggtgggcgagcccatggaccaggaggactcagagagcaagacagtctcagagcatggcgagagggactggatgacagccaagaagttctggaagccaggggactcattggcgccccctgaggtggactttgacaggctgctggccagcctgcaggatcttagtgagctggtggtagagggtgacacccaagtgacaccagtgcccggcggggcacggctgcgtaccctcgagcccatcccgctgaagctctaccggaatggcatcatgatgttcgacgggcccttccagcccttctacgatccctccacacagcgctgcctccgagacatattggatggcttctttccctcagagctccagcgactgtaccccaatggggtcccctttaaggtgagtgacttgcgcaatcaggtctacctggaggatggactggaccccttcccaggcgagggccgtgtggtgggcaggcagctgatgcacaaggccttggacagggtggaggagcacccaggctccaggatgactgctgagaaatttctgaacaggctccccaagtttgtgatccggcaaggcgaggtgattgacatccggggccccatcagggacaccttgcagaactgctgcccattgcctgcccggatccaggagattgtggtggagacgcccaccttggccgctgagcgagagaggagccaggagtcacccaacacgccggcacccccgctctccatgctgcgcatcaagtctgagaatggggaacaggccttcctactgatgatgcagcctgacaacaccattggggacgtgcgagctctgctagcgcaggccagggtcatggatgcctctgcctttgagatcttcagcacattcccgcccaccctctaccaggacgatacactcacgctgcaggctgcaggccttgtgcccaaagcagcactgctgctgcgggcacgccgagccccgaagtccagcctgaaattcagtcctggtccctgtcccggtcccggtcccggccccagtcccggtcccggtcccggccccagtcccggtcccggtcccggccccagtccctgtcctggacccagtcccagcccccaataaagcacccgccccctc

SEQ ID NO: 1898 - DNA, 2043 bp, Homo sapiens
  source 1..2043: mol_type = genomic DNA
attattccacaacaccccttgggtgccccaacgcgcctagcaccctgtaagtgctccccagctgtggatacaggtttctctcagggcagcccgcaagcagtgcagccccagccagaagagctggaaggctgggcggccaggcccgctgtgtccccagttttcctgttggagtccatctgctgtgctctcaggagagaaggctgggtctctgggagctcacatcctgtatgccctccctccatgccaagcaactttggggagtcctggcagtggtgccaggcgttgctcttacctgtaccataaccaggaggctgatggttgctcaggcctccctcaaactagccaatgagaagtgcacgggtcctggtcgcctaggaaaccgcgtgacaacaagatggcggcgctgcgggacggctagcggccctgcgtgggagttcctgacagctggattctagaagtagaactatgagctcacctttggcctcccttagcaagacccgaaaagtgcccctgccctcggagcctatgaatcctgggaggcgaggaatccgcatctatggagatgaagatgaggtggacatgttgagtgatgggtgtggctcagaagaaaagatctcagtcccttcctgctatggcggcataggtgcccctgtgagtcggcaagtccctgcatcccatgactcggagctgatggccttcatgacgaggaagttgtgggacctggagcagcaggtgaaggcccagactgatgagatactgtccaaggatcagaagatagcggccctagaggacctggtgcagaccctccggccacacccagccgaggcaaccctgcagcggcaggaggaactggagacgatgtgtgtgcagctgcagcggcaggtcagggagatggagcggttcctcagtgactatggcctgcagtgggtgggcgagcccatggaccaggaggactcagagagcaagacagtctcagagcatggcgagagggactggatgacagccaagaagttctggaagccaggggactcattggcgccccctgaggtggactttgacaggctgctggccagcctgcaggatcttagtgagctggtggtagagggtgacacccaagtgacaccagtgcccggcggggcacggctgcgtaccctcgagcccatcccgctgaagctctaccggaatggcatcatgatgttcgacgggcccttccagcccttctacgatccctccacacagcgctgcctccgagacatattggatggcttctttccctcagagctccagcgactgtaccccaatggggtcccctttaaggtgagtgacttgcgcaatcaggtctacctggaggatggactggaccccttcccaggcgagggccgtgtggtgggcaggcagctgatgcacaaggccttggacagggtggaggagcacccaggctccaggatgactgctgagaaatttctgaacaggctccccaagtttgtgatccggcaaggcgaggtgattgacatccggggccccatcagggacaccttgcagaactgctgcccattgcctgcccggatccaggagattgtggtggagacgcccaccttggccgctgagcgagagaggagccaggagtcacccaacacgccggcacccccgctctccatgctgcgcatcaagtctgagaatggggaacaggccttcctactgatgatgcagcctgacaacaccattggggacgtgcgagctctgctagcgcaggccagggtcatggatgcctctgcctttgagatcttcagcacattcccgcccaccctctaccaggacgatacactcacgctgcaggctgcaggccttgtgcccaaagcagcactgctgctgcgggcacgccgagccccgaagtccagcctgaaattcagtcctggtccctgtcccggtcccggtcccggccccagtcccggtcccggtcccggccccagtcccggtcccggtcccggccccagtccctgtcctggacccagtcccagcccccaataaagcacccgccccctc

SEQ ID NO: 1899 - DNA, 1312 bp, Homo sapiens
  source 1..1312: mol_type = genomic DNA
cgctgcgggacggctagcggccctgcgtggaggcgaggaatccgcatctatggagatgtccctgcatcccatgactcggagctgatggccttcatgacgaggaagttgtgggacctggagcagcaggtgaaggcccagactgatgagatactgtccaaggatcagaagatagcggccctagaggacctggtgcagaccctccggccacacccagccgaggcaaccctgcagcggcaggaggaactggagacgatgtgtgtgcagctgcagcggcaggtcagggagatggaggggactcattggcgccccctgaggtggactttgacaggctgctggccagcctgcaggatcttagtgagctggtggtagagggtgacacccaagtgacaccagtgcccggcggggcacggctgcgtaccctcgagcccatcccgctgaagctctaccggaatggcatcatgatgttcgacgggcccttccagcccttctacgatccctccacacagcgctgcctccgagacatattggatggcttctttccctcagagctccagcgactgtaccccaatggggtcccctttaaggtgagtgacttgcgcaatcaggtctacctggaggatggactggaccccttcccaggcgagggccgtgtggtgggcaggcagctgatgcacaaggccttggacagggtggaggagcacccaggctccaggatgactgctgagaaatttctgaacaggctccccaagtttgtgatccggcaaggcgaggtgattgacatccggggccccatcagggacaccttgcagaactgctgcccattgcctgcccggatccaggagattgtggtggagacgcccaccttggccgctgagcgagagaggagccaggagtcacccaacacgccggcacccccgctctccatgctgcgcatcaagtctgagaatggggaacaggccttcctactgatgatgcagcctgacaacaccattggggacgtgcgagctctgctagcgcaggccagggtcatggatgcctctgcctttgagatcttcagcacattcccgcccaccctctaccaggacgatacactcacgctgcaggctgcaggccttgtgcccaaagcagcactgctgctgcgggcacgccgagccccgaagtccagcctgaaattcagtcctggtccctgtcccggtcccggtcccggccccagtcccggtcccggtcccggccccagtcccggtcccggtcccggccccagtccctgtcctggacccagtcccagcccccaataaagcacccgccccctcaa

SEQ ID NO: 1900 - DNA, 7622 bp, Homo sapiens
  source 1..7622: mol_type = genomic DNA
gccggcagagaccagccggcgggtggcggcggcccccagcacggccggtgcaaggcctcgggttaagcggcggccgagcggggctcggcccggggtgctcggggagctcgccgcggcgggcagcaggaggaagcggcggcggcgcgtcccgagcggtgcgcgccatggcgggcgggccccccaaggccctgccgtccacggggccccactccctgcgcgacatgccgcacccgctggccggctccagcagcgaggaggccgtgggtggtgacagcacgcccagcccggacctgctgatggcccgcagcttcggtgacaaggatctcattttgcccaacggtggtactccagcaggtacttcaagtccagcttcttcatcttcccttctcaacagacttcagcttgatgatgatattgatggtgagactagagatctcttcgttatagttgatgatcccaagaagcatgtgtgtacaatggagacttacatcacctataggatcaccaccaaaagtactcgggtggagtttgacctgccagaatattctgttcgtcgaagataccaggattttgactggttgaggagcaaactggaagaatcccagcccactcatctcattccccctcttcccgagaagtttgtggtaaaaggtgttgtggatcgtttttcagaagagtttgtggagaccagaagaaaagctttggataaatttctaaaaagaattacggaccatcctgtgctgtctttcaatgaacactttaatattttccttactgctaaggacctgaacgcctacaagaagcaagggatagcattgctgaccagaatgggcgagtcagtcaagcacgtcactggcggctacaagctgaggactcggccgcttgagtttgctgccataggtgactacttagatacatttgcactcaaactgggaaccattgatcgaatagcccagcggatcatcaaagaagaaatagagtaccttgtggagctgagagaatacgggcctgtgtactccacatggagcgccttggagggtgagctggctgaacccctggagggtgtgtcagcttgcattgggaactgctctacagccttagaagagctgacagatgacatgacagaagacttcctacctgtgctcagggaatatattttatactctgactccatgaagagtgtattgaagaagagggaccaagttcaagcagagtatgaagccaaactggaagctgtggctctgcggaaggaagaccgccccaaggtaccggcggacgtcgagaaatgtcaggatcggatggagtgtttcaatgctgacctgaaagctgacatggagaggtggcagaacaacaagaggcaggacttccggcagctactcatggggatggctgacaagaacatccagtattatgagaagtgcctcatggcgtgggagtcgattattccactactgcaggagaaacaagaggccaagtaaagttctttcttgggacggagactcttctacctacacagggcctggcaccctataccggaatgtccctgcagtgccagagacgcagtgctgggaaaacaaccacagaaacatctctcctttgtgtatttttccctcccccacctttcaccccacagtggttttcaattagtatttattccatggtggagtctgtgaggctagaatatctctcagcaagagcagcatacctccatgttgtgaaggcatctgttcagtgaagcactacgaaaatttgaaaccaagggacaagacaacctgcagctgacgctctgacatttcatgacagtttcctctttagggacagctgagttgccagttgtgggagagaacccggggcctgcttttcaaggatgaggaggaggcaggaacagaaggcagctgctgctttctgtggaaacctggcccctctggaattggcctctgtgggcattgactcgtcttggcctaggaggcattggtgcctccctggcaagtccttaacgtacagtacctgtagctgtgagtgtggcctgctgcctgcttgtgatgagtgataccgtcttactgtttctgtttcacatagggacatttaaatcaatgtcaatgtgcgtccatgcttgagtgagcaagccagcgtccttgtcctcctgcaatgcctttgggaagctcaggggaatgctccccaagcttgtttctgacactagaatgcaacagattggaaactttttgtgtaaaatgaaaaaaacaaagtgctggttttttttttttttctgtgaaggtcttcagtgttttgcttgttcactgtcatcagagcagggattagacctgttagggaatatctattgtcttgaagtcagagtagctccccattgttgagatcagtgggcatataccaagctccacccccagtgtcagctttgtgcaatttgcctttacctcaccaaaaatacctactttaatatttcctcctgtgtcctctgaatgtctgggcgagcttttggtgagagggctggtatgtcatgttgttatgatacagtcgaaatttgtcaatgcagtgtgaatgttctacataaagtgctttaacccttaacatttcctggtcaggaaggaaaatcagtacctggacgggcctcgaaaatgacaaatgcaacagcgagccctttgtgtccagctaagctaaagtctcctcagtgtgcagccagattcctggggactgctgagtgtggttacaggctgcatttcagacaatgaccaggtttacttttcagatcacaaagcaaacagtcaccaaggatctgtcttccaactcttttttttttctgctgaaatgaagctacatgtcatgtttgtgttctttcatctgtggctcatccctgtaaaactacgaatctgagcctcaaataagcagtagtttttttgttgtttatttttaatgaaacagctgtgttaaggcgctgcttcagatgcaagttcacctggaaatactggtcagcgggcagcacgtcaaggtcacttaagcccacttttaactgcaggtcatcctcgcatcagccaaggctgtggtgctgttgatgccgcagttggacagcataggacggcttggttctgtttcattgtgtttgacaatgttgcagtttaaatgataatgtttaaatcaattggtacttgcctgtagtgttaaaccctatttgtgccattctcaagtcctttgatgtgaattttcagtttggtacagttagaaatgactcattgatgcggacaggtaagaacaacccatgtacccccgagtgattgcatgctttattctacctctaagccatcgtgttgacgtgggtatggacgcctgggtctgacctgacactgtgctgggagaatcaggatgtgtgtctaatggcgagctgacagccctctgctgatatttggcagaaggcaccagaccagcccagcagcaaatgctcatctttgggaacataggaagctttaccttggggaaggtatgctttacaaatgtccagtgtaatgaatgtttggaaaaaactggagttacaggaaaatgaaatctgactatctgctagttgccaaaacccagaaacattcctgtgtaatggttagttgggaaagaaggcagcacttgaaaaaatttaccaggttcctcactgggagatgtgggaaggggcgtgggacgcacgcggtcactccctctcctagtgagaggcagatggctggctctgaagggaggcaggcaccgtgggatttgggcttgctctgcttggtccccatgtgatgccctgtgctgtaagatatcagaaagacctggaacaaggcaaactttatgtcctcctggcatgttattgataacagagccaggaagtccagtgtacattacagattttctgggagaaatagtccttccagagaaaggattccttcccagcctccaggctggtgtctcatgaggtgaggaggctggcccagaaggaaggggacgttaggtggtgaagcaggctcccctgggcctctgagggccagcagtcccaaccatttgcctcttcgttttgaccaagcacaaaagagatattccctagaagtgtcacacggaggcttctgtgccaaagactgccttgtagaggtctcatcacctcacacttcttgacttcacaaaattgtggccctgagatcagtactcctctcttaagtatttattattattattatttactttacctcaagcagacagacataggttttgaggcttgaatacatggcagtggaatacaaggccctccctagcagccgccccaggcctggaaagtgggagatttcattcgcccgggttaaaaatccagaggaagacagaagagaggagtcctaggaactgagcagattttagagacgcaaatgatgtttaagagagccttgtgatttgtagcaagcatgggcactgctttttcttactaatgtggtagatctacacgaacattctaggctgttctgctcagagcgaggaaccactgctcctcaatggggagggaacataccacccagccaggcttagcattgggttttatcctttaataaaagttttataatgaatcctgttcaccttaaagtgtgattatggagatgattggctccatattccaccacgtcattccttcaactcaccagacacctttctttagttgaaataaaccagcatgacctggagatcatggtgactgtaagctaagtctgttttcatgccagatttcagccccacccagagtgtgctctagatgttgttgatttgaatggttttcccagttcccactccacatggggaagttgaatgaatgcacacctgctgctcacttcttgtgaggctgccttttgtgatcaaataacaggaagttctgctttagaggagggcacgatgaccatgtggcagtctgcaagtggaattttgggatggcagcccgaggaacatccagagttactgtgtgacttggtcctgccatcgttagctttgaaatcacaggcattgggctctgttttgacaccattcattggactgcgggacagtcattctttacgttctctcttgagctggtgagagaggaggaagagggaagtcaagagcaacctccaaggcctatgtcagcctcttctccttgggtcttggggtgggttagaactgggttccagtctggccagatgggttgctggctgcactgagggtgattcttctcagaagatgggctgcctgtggtcaggacagggcataccagtctggactccaccttcccagacacctactttaaggacctgtggaaactgggtgatccaattatagggctggggcaaccctgctttggccaccctcatttacaaacttaggttgggagcttgggtttcctgtctcacttccaaaagccttcaagatggcagcagatggacacaccctctcatttcttgtgtcttgtctgtcagatggcaggaggcctgtatcagtaaatttgaggaaaatgttctctcctgggccagcctcacagcttgcgttgggtgtgttggaattgttctcttcggccttgttctgccttgtgatcttttcaattcagtgaataaaccaggaatccattttttcaccaacccaccctgtagattgtcagctttttgtttgagagatgcctggtctcacagttacatgtatcagagtgtgtgtaagttgtctgtgttagaaaggttggggtgggggctttgttgcaggggattagactgttctttcttcatcataatttgagatacatcctgagtatgactgtctaaccctttctgtgtggcagaaaaatatgttttccaggtagtttttactactacagagagtctgtaaataagtgctttaaaaaaataacaaaccaataagatatttgtctcctatataaacattctgtgtatttagcacttgaaaatcaacaaatccagaatttaaaaaaatgccacagacttttcaaagcccaactctacttttttgagaatttgtccgtacctactaatatgccttattcttcttcacctagtgttttaaaagtcctgggtagaaagagttttagaaatgtaatcagttgttcagcttcaataatatagagatctaacatagtcagtcctcaggccccctaaagaaacaagcaagaaagtgagggccatcactagggttggctttggggaggggaaaactaaggactgcttttgccaaatgatatttttgataatgtaaggaaacacagggaccacaaaaccttttttttttttttaagtgtgaaagattagtgccttttggcatacttttgattttagaggatatagtatcggcattgacaaatcacgtagaaacaaagaatgctatagatgacaacagtattaaatgttactcctgattctgcagaacagcttttgaagatactggggggtatcttcaagcctcagagcagcttgtttcagatagaaattctctatgggttgaaatgccaaaaacagaaaacatgatgttgactcatgtaatttagtccattttagcagagcctttagtgttaacaccagtggcgaggagcattgcatattctctgtcagcagcagcactcccacaccaggtggttctgggctctctgtaggctggtcctagtaggtgacacccagcaacacccctgttggacaggattgattgttcgcagtcttagaccaacacttcagtcagaaatgttactgggaggaggaaaggaaaatcactttttttcctccatgtggaaatgaggagagaggaaagtggattgcaaaccaaaatgtgagtcagtgtgatgaagcagtggctctgtcatctcggcctttatccaataacaaaccagcatctcttaaaggcgcttttggcctagacacccctgaagtttggatgaagtctggtggattccctgtctgttgtatttctgtgtgcctgttcccttcattgctgtgagttgggagtgcattgagagatgatgtccatctgatatattcctgtgaaataaactgccagcaaactttctaacttgtattttaactgttaaagaagagattaaaaacttcggctttggacatgtccacattatggactgtcatcttatttttaaaagtcattctttacgtttaaaattttaaaataaaaaccttctgaggtattgatgtagtccaccgtgtaaatgttaccttctctccatgctgccattatgccaaaacaaaagctgtgataaaaaaagtgcttgagagagtgtgttgataagaaagtgatttatttacagatggaagtctttgtttcatgaagctaccaaactttaaaaagaatgtcacccttttttttgtttgttatggaaaccagagattgtaaaatggaaaaagaatcgtttttttgttgactttttgatgctggcacgaggtttttgtccacttttttcatatatctgtgtataaaaaaattgttgtttactatggaattagtattacattttgaggtaaacaaaagaatttgtattgcttgataaatattagcttgtaaatttaaagtttctttacttcaattaacttaaaggaccaataaacccataaaagatgctttcttta

SEQ ID NO: 1901 - DNA, 1388 bp, Homo sapiens
  source 1..1388: mol_type = genomic DNA
tggcctgactcacaggacactaaggctccttttctgaagaagccttttaccagtctcatttaggggatgggaacaacatgtcttcacctagggactttagagcagagcctgtaaacgattatgagggaaatgactctgaagcagaagacttgaatttcagggagactttgccttcatcaagtcaggaaaacacacctagatcaaaggtttttgaaaataaagttaattcagagaaggtaaaactttctcttcggaatttcccacataatgattatgaggatgtttttgaagagccttcagaaagtggcagtgatcccagcatgtggacagccagaggccccttcagaagagacaggtggagcagtgaggatgaggaggctgcagggccatcacaggctctctcccctctactttctgatacgcgcaaaattgtttctgaaggagaactagatcagttggctcagattcggccattaatattcaattttcatgagcagacagccatcaaggattgtttgaaaatccttgaggaaaaaacagcagcgtatgatatcatgcaggaatttatggctttagaacttaagaatctgcctggtgagttcaactctgggaatcaaccaagcaacagagaaaaaaatagataccgagatattcttccatatgattcaacacgcgttcctcttggaaaaagcaaggactacatcaatgctagttatattagaatagtcaattgtggagaagagtatttttatatcgctactcaaggaccactgctgagcaccatagatgacttttggcaaatggtgttggaaaataattcaaatgttattgccatgataaccagagagatagaaggtggaattatcaaatgctaccattactggcccatttctctgaagaagccattggaattgaaacacttccgtgtattcctggagaactaccagatacttcaatatttcatcattcgaatgtttcaagttgtggagaagtccacgggaactagtcactctgtaaaacagttgcagttcaccaagtggccagaccatggcactcctgcctcagcagatagcttcataaaatatattcgttatgcaaggaagagccaccttacaggacccatggttgttcactgcagtgccggcataggccggacaggggtgttcctatgtgtggatgtcgtgttctgtgccatcgtaaagaactgttcattcaacatcatggatatagtggcccaaatgagagaacaacgttctggcatggttcaaacgaaggagcagtatcacttttgttacgatattgtgcttgaagttcttcggaaacttctgactttggattaagaaagacttctgttgcctctcacttgaaattaccaagtgggtttgcac

SEQ ID NO: 1902 - DNA, 2539 bp, Homo sapiens
  source 1..2539: mol_type = genomic DNA
gtgaacaaaaattgtttgctggcccccaggatactaactagacctttggcctgactcacaggacactaaggctccttttctgaagaagccttttaccagtctcatttaggggatgggaacaacatgtcttcacctagggactttagagcagagcctgtaaacgattatgagggaaatgactctgaagcagaagacttgaatttcagggagactttgccttcatcaagtcaggaaaacacacctagatcaaaggtttttgaaaataaagttaattcagagaaggtaaaactttctcttcggaatttcccacataatgattatgaggatgtttttgaagagccttcagaaagtggcagtgatcccagcatgtggacagccagaggccccttcagaagagacaggtggagcagtgaggatgaggaggctgcagggccatcacaggctctctcccctctactttctgatacgcgcaaaattgtttctgaaggagaactagatcagttggctcagattcggccattaatattcaattttcatgagcagacagccatcaaggattgtttgaaaatccttgaggaaaaaacagcagcgtatgatatcatgcaggaatttatgacgggaactagtcactctgtaaaacagttgcagttcaccaagtggccagaccatggcactcctgcctcagcagatagcttcataaaatatattcgttatgcaaggaagagccaccttacaggacccatggttgttcactgcagtgccggcataggccggacaggggtgttcctatgtgtggatgtcgtgttctgtgccatcgtaaagaactgttcattcaacatcatggatatagtggcccaaatgagagaacaacgttctggcatggttcaaacgaaggagcagtatcacttttgttacgatattgtgcttgaagttcttcggaaacttctgactttggattaagaaagacttctgttgcctctcacttgaaattaccaagtgggtttgcacctcctcataaagaacatgtttgcactgtgctgaagggctttgctatgcatacaatctgctttcttggtttatcagtttattttctttctaaaagctccctgaagggcaatatcatttggcttggggtgatcagtgtttacttattgatcttgctagacaatatcaaaataacttcccacattttccagtgaaacagatgttacataaaacgattgcagcttggctatttggttgaagggattacagagcccaataaaggatttaaaatatattcattaagattttatttggaaaggtggctggagagagctgaggatttccaggactttgtaagttcttattctgggagaacataaggccaataatcatgacctcttccaggcatttttaagacagatgtctattcatgttctttagctagagcctgtactttttgctggcatttgaataacccagtttaaaaagagtccagttagggtggactaactttggacacaaattggcttccatttcctacattttcatactgctgccttcctacagctgctagaccaagacctgttggtctgggaagcatttcatggatagggagagctcctctcggtgaacagtccaaaactaaaatagatgtttatatagaaagcccaagaggagacttttgccatgcctgagttctttcctatcccaccctaacacttaacatattacttagtctgctttgttaaaagcaagtattacctttaacttgcctcttactctttgccctttagctaactaataaagtttgatataggcattattatataattctgagtcattcatggtatctctcatgtttgatgtatttttcaaactaagatctatgatagttttttttccagagttccattaaatcatttatttcctttactttctcacctctgttgaaacatttagaaactggatttgggaacccaattttggaaaaccagattcatagtcatgaaaatggaaacttccatattctgtttttgaaaagatgtggccattattacagtaattttattataggactttgcctcgtacaattaatagtgatattttggacaaggagttctggtgacaagctatacctaattataagctataaaacaatagatatgagtgtttgtacagtttaactcaatggagatcagaatattctatgtattgagaaaatgtttaatatcaatctataaatcttgaatttctaagaggcttattttgttcttttggctgaatgagtatatttgaattggttgaataattaataattctcattgtaaaaataattatatgccaaaaatatatttgatgttaaatcaaatagatgattctgtttacattgttcatatgaataataatctgtgttaatttcattttgataattggcctttaatatttgtatctctaattttattttctctctgttactgtaaaataatagctataatgtataacaattttcttcagaagaattctatgctattattaaaataaaatatttactgtg

SEQ ID NO: 1903 - DNA, 2481 bp, Homo sapiens
  source 1..2481: mol_type = genomic DNA
gcgtggacccaactggcgaggctgctggggttgcagcgggacagttggggcggccccgcaggcccaggtgaacaaaaattgtttgctggcccccaggatactaactagacctttggcctgactcacaggacactaaggctccttttctgaagaagccttttaccagtctcatttaggggatgggaacaacatgtcttcacctagggactttagagcagagcctgtaaacgattatgagggaaatgactctgaagcagaagacttgaatttcagggagactttgccttcatcaagtcaggaaaacacacctagatcaaaggtttttgaaaataaagttaattcagagaaggtaaaactttctcttcggaatttcccacataatgattatgaggatgtttttgaagagccttcagaaagtggcagtgatcccagcatgtggacagccagaggccccttcagaagagacaggtggagcagtgaggatgaggaggctgcagggccatcacaggctctctcccctctactttctgatacgcgcaaaattgtttctgaaggagaactagatcagttggctcagattcggccattaatattcaattttcatgagcagacagccatcaaggattgtttgaaaatccttgaggaaaaaacagcagcgtatgatatcatgcaggaatttatggctttagaacttaagaatctgcctggtgagttcaactctgggaatcaaccaagcaacagagaaaaaaatagataccgagatattcttccatttcaacatcatggatatagtggcccaaatgagagaacaacgttctggcatggttcaaacgaaggagcagtatcacttttgttacgatattgtgcttgaagttcttcggaaacttctgactttggattaagaaagacttctgttgcctctcacttgaaattaccaagtgggtttgcacctcctcataaagaacatgtttgcactgtgctgaagggctttgctatgcatacaatctgctttcttggtttatcagtttattttctttctaaaagctccctgaagggcaatatcatttggcttggggtgatcagtgtttacttattgatcttgctagacaatatcaaaataacttcccacattttccagtgaaacagatgttacataaaacgattgcagcttggctatttggttgaagggattacagagcccaataaaggatttaaaatatattcattaagattttatttggaaaggtggctggagagagctgaggatttccaggactttgtaagttcttattctgggagaacataaggccaataatcatgacctcttccaggcatttttaagacagatgtctattcatgttctttagctagagcctgtactttttgctggcatttgaataacccagtttaaaaagagtccagttagggtggactaactttggacacaaattggcttccatttcctacattttcatactgctgccttcctacagctgctagaccaagacctgttggtctgggaagcatttcatggatagggagagctcctctcggtgaacagtccaaaactaaaatagatgtttatatagaaagcccaagaggagacttttgccatgcctgagttctttcctatcccaccctaacacttaacatattacttagtctgctttgttaaaagcaagtattacctttaacttgcctcttactctttgccctttagctaactaataaagtttgatataggcattattatataattctgagtcattcatggtatctctcatgtttgatgtatttttcaaactaagatctatgatagttttttttccagagttccattaaatcatttatttcctttactttctcacctctgttgaaacatttagaaactggatttgggaacccaattttggaaaaccagattcatagtcatgaaaatggaaacttccatattctgtttttgaaaagatgtggccattattacagtaattttattataggactttgcctcgtacaattaatagtgatattttggacaaggagttctggtgacaagctatacctaattataagctataaaacaatagatatgagtgtttgtacagtttaactcaatggagatcagaatattctatgtattgagaaaatgtttaatatcaatctataaatcttgaatttctaagaggcttattttgttcttttggctgaatgagtatatttgaattggttgaataattaataattctcattgtaaaaataattatatgccaaaaatatatttgatgttaaatcaaatagatgattctgtttacattgttcatatgaataataatctgtgttaatttcattttgataattggcctttaatatttgtatctctaattttattttctctctgttactgtaaaataatagctataatgtataacaattttcttcagaagaattctatgctattattaaaataaaatatttactgtg

SEQ ID NO: 1904 - DNA, 1653 bp, Homo sapiens
  source 1..1653: mol_type = genomic DNA
cctggaccagggggacatctgagaagcatgatgttgagtgccagacagctaggtctccaaagttgggctcgttgctggagtctgccccctcaaccgctgaattcttgctgggagtagtagcagtttgggaatgccatctgcagcatggagctggggttgagcttggaccaccccaagacctggggtggatcttaagggtcagcttgagcctaggctctcgagtcctgacatcatcctctaccgccacgctttccagctgtcagccttggtctccatctggttccttgagggtgtggcctctgcgtcctgctatcacccttccttgtctaaaccttcccacctgagtggagaggaacttgggggaaaatctctaagcatgggctcttcctgctgtcctatgcttcctatcccctagggttagtggtgcgtgttgggtggtggagcgagggatcccttggagcaaggttcttagagaactttgggtctgaaagcagctcaaaccttccaaagccccaagcttccctgtgctattagagcacctcctcctggagagagcggctctcgtggctggggagttggatgcaccaaacctgtgtgcggctggagagggaggcttctgccagaccctctcccgggcctgtcctgccacccaggcccctccccagtcacactgagctccagatcagggaagggccgaaaaggacgatcagggcagccgcagaaggggcgccctgcgtgggacgggtccgttgcgcgcctggtaaccgagggggaagggaaggggcctctggcgtgcggggcggtgtcgcgcaggtcccaccccgcctgcccgcgccgcccattggtcccgagcgcgatgacttggcgggcggagcaggaaggaaaccgctcccgagcacggcggcggcgtcgtctcccggcagtgcagctgccgctaccgccgccctctgcccgccggcccgtctgtctacccccagcatgagcggcctgcgcgtctacagcacgtcggtcaccggctcccgcgaaatcaagtcccagcagagcgaggtgacccgaatcctggatgggaagcgcatccaataccagctagtggacatctcccaggacaacgccctgagggatgagatgcgagccttggcaggcaaccccaaggccaccccaccccagattgtcaacggggaccagtactgtggggactatgagctcttcgtggaggctgtggaacaaaacacgctgcaggagttcctgaagctggcttgagtcaagcctgtccagagttcccctgctggactccatcaccacactccccccagccttcacctggccatgaaggaccttttgaccaactccctgtcattcctaacctaaccttagagtccctcccccaatgcaggccacttctcctccctcctctctaaatgtagtcccctctcctccatctaaaggcaacattccttacccattagtctcagaaattgtcttaagcaacagccccaaatgctggctgcccccagccaagcattggggccgccatcctgcctggcactggctgatgggcacctctgttggttccatcagccagagctctgccaaaggccccgcagtccctctcccaggaggaccctagaggcaattaaatgatgtcctgttcca

SEQ ID NO: 1905 - DNA, 3301 bp, Homo sapiens
  source 1..3301: mol_type = genomic DNA
caatatatgaggggatacagtgcctcaggtttaaaagagcaggaagctgagtgagaggttgcagaaaaagtgtcttcgctcggcagaggttacaggtggcatctcagaaagagctttgaggctacaggctgtagtcgggaaggggatcggagaactgtgtgaagggacagcttagggactagcgtcctgggactagggggaagttcgcgactttctgaagactggcaggaatgtgcctcctggccctcgatgcttcccccctgaggggaggcatcgtgagggactgtggcaggcttcactgaacgctgagccggggaggtccaactccacgtatggatccggggaatgagaattcagccacagaggctgccgcgatcatagacctagatcccgacttcgaaccccagagccgtccccgctcctgcacctggccccttccccgaccagagatcgctaaccagccgtccgagccgcccgaggtggagccagatctgggggaaaaggtacacacggaggggcgctcagagccgatcctgttgccctctcggctcccagagccggccgggggcccccagcccggaatcctgggggctgtaacaggtcctcggaagggaggctcccgccggaatgcctggggaaatcagtcatatgcagaactcatcagccaggccattgaaagcgccccggagaagcgactgacacttgcccagatctacgagtggatggtccgtactgtaccctacttcaaggacaagggtgacagcaacagctcagcaggatggaagaactcgatccgccacaacctgtccctgcacagcaagttcatcaaggttcacaacgaggccaccggcaaaagctcttggtggatgctgaaccctgagggaggcaagagcggcaaagccccccgccgccgggccgcctccatggatagcagcagcaagctgctccggggccgcagtaaagcccccaagaagaaaccatctgtgctgccagctccacccgaaggtgccactccaacgagccctgtcggccactttgccaagtggtcaggcagcccttgctctcgaaaccgtgaagaagccgatatgtggaccaccttccgtccacgaagcagttcaaatgccagcagtgtcagcacccggctgtcccccttgaggccagagtctgaggtgctggcggaggaaataccagcttcagtcagcagttatgcagggggtgtccctcccaccctcaatgaaggtctagagctgttagatgggctcaatctcacctcttcccattccctgctatctcggagtggtctctctggcttctctttgcagcatcctggggttaccggccccttacacacctacagcagctcccttttcagcccagcagaggggcccctgtcagcaggagaagggtgcttctccagctcccaggctctggaggccctgctcacctctgatacgccaccaccccctgctgacgtcctcatgacccaggtagatcccattctgtcccaggctccgactcttctgttgctgggggggcttccttcctccagtaagctggccacgggcgtcggcctgtgtcccaagcccctagaggctccaggccccagcagtctggttcccaccctttctatgatagcaccacctccagtcatggcaagtgcccccatccccaaggctctggggactcctgtgctcacaccccctactgaagctgcaagccaagacagaatgcctcaggatctagatcttgatatgtatatggagaacctggagtgtgacatggataacatcatcagtgacctcatggatgagggcgagggactggacttcaactttgagccagatccctgagtcatgcctggaagctttgtcccctgcttcagatgtggagccaggcgtgttcatatctactctttacccttgagccctccccaggaatttgggaccctgctttagagctagggtggggtctggtcacacacaggtgttgaagaaattataaagataaagctgccccatctggggacgatatggggagggagatgggaggggaaaggggagagggtttttctcactgtgccaattagggggtaaggccccctctcaggagccatcatcggctttccccattcctacccacttaggctttgtagcaagatgagcaatgctgttggaaatgtgaagtcaccagtggccttacccctgcctttgggagcaggatttttttgtagagagtcttatctgagctgagccaggctagctggagcctgggatttctatgcagtggccccttaggccagtgatgtgcggtgggtgggctgtttaggggatctggaagggccaaggtctgagcactggagtggctcgccaggccaaatcacccttagaaggctgcagataacagaaaggctttttataaacttttaaagaaatataaacacaaatatagagattttttaaccatggcagggtgctagtggtgggcagaatgcttttttttctttctgaaggctttgtgatagtgacatgatacaaacactacagacaataaatattaggagacacagggaagtggggagaggtggggagtaatagtaaacacagggaagagctcccctacggaccaggtatagagaaaggtctatgcagaaataggttagagtttccctaacaaaaaagctaacccaggtcccctcattccttcaacttgtgcctgggagtgtgtggtgttagggtgcagccacactcttctatgacccagcatgggttagtgctatggtgggagagtacattgaaggcctggaattagcttggggccagggaagggactgggaggggagagaagagaaggagggaaggatttaggatggtaaagttaggtacagagacctccctgttcaaggcccctgacagctgtccctgcccttcttccccttccctgactgcaggggttatgtggaagtgtgtgtggcagcaggcagcggggaggggaggaacagggaagggggagctggggagcttggctgagggtctgggaaatgagcagggatggggggggatgtggatcaggtttactagcacctgccagggaggccatctggggctccttctccaccccagcccccaaagcagcccttcccccagtgccctttgcatcgtcccctcccccacccctgctgtgggttcccatcatttcctgtgtcagcgcctggcctacccagattgtatcatgtgctagattggagtggggaagtgtgtcaaatcaataaatgaataaattcaataaatgcctataaccagct

SEQ ID NO: 1906 - DNA, 1770 bp, Homo sapiens
  source 1..1770: mol_type = genomic DNA
gacagaattcgggcaccaggagaaggaagccaacaggatccgacccggtgttttgtgacaaaggcaagacccccaggtctacttagagcaaagttagtagaggaggcagctaggcgtggctctcattccttcccacagaatggattataagtcgagcctgatccaggatgggaatcccatggagaacttggagaagcagctgatctgccctatctgcctggagatgtttaccaagccagtggtcatcttgccgtgccagcacaacctgtgccggaagtgtgccaatgacatcttccaggctgcaaatccctactggaccagccggggcagctcagtgtccatgtctggaggccgtttccgctgccccacctgccgccacgaggtgatcatggatcgtcacggagtgtacggcctgcagaggaacctgctggtggagaacatcatcgacatctacaaacaggagtgctccagtcggccgctgcagaagggcagtcaccccatgtgcaaggagcacgaagatgagaaaatcaacatctactgtctcacgtgtgaggtgcccacctgctccatgtgcaaggtgtttgggatccacaaggcctgcgaggtggccccattgcagagtgtcttccagggacaaaagactgaactgaataactgtatctccatgctggtggcggggaatgaccgtgtgcagaccatcatcactcagctggaggattcccgtcgagtgaccaaggagaacagtcaccaggtaaaggaagagctgagccagaagtttgacacgttgtatgccatcctggatgagaagaaaagtgagttgctgcagcggatcacgcaggagcaggagaaaaagcttagcttcatcgaggccctcatccagcagtaccaggagcagctggacaagtccacaaagctggtggaaactgccatccagtccctggacgagcctgggggagccaccttcctcttgactgccaagcaactcatcaaaagcattgtggaagcttccaagggctgccagctggggaagacagagcagggctttgagaacatggacttctttactttggatttagagcacatagcagacgccctgagagccattgactttgggacagatgaggaagaggaagaattcattgaagaagaagatcaggaagaggaagagtccacagaagggaaggaagaaggacaccagtaaggagctggatgaatgagaggcccccagatgcagagagactggagagggtggggaggggcccagcggccttggtgacaggcccagggtgggaggggtcggggcccctggaggggcaatggggaggtgatgtcttctctctgctcagagagcagggactagggtaggaccctcaccgctgcgtccagcagacactgaaccagaattggaaacgtgcttgaaacaatcacacaggacacttttctacattggtgcaaaatggaatattttgtacatttttaaaatgtgatttttgtatatacttgtatatgtatgccaatttggtgctttttgtaaaggaacttttgtataataatgcctggtcgttgggtgacctgcgattgtcagaaagaggggaaggaagccaggttgatacagctgcccacttcctttcctgagcaggaggatggggtagcactcacagggacgatgtgctgtatttcagtgcctatcccagacatacggggtggtaactgagtttgtgttatatgttgttttaataaatgcacaatgctctcttcctgttcttcaaa

SEQ ID NO: 1907 - DNA, 3581 bp, Homo sapiens
  source 1..3581: mol_type = genomic DNA
cgagaagtgcttccaagcgtccattttgagccttggaaactacgacgaccaaagggccacgggttcatgggtcgtttctcatttccgtcgagttaaacgtctggggctgcttctgaggaatcagcttgactggccagcaagttcagctccggcaagtcatttgattcacccggtgatgaaatgggggtcaaccagtctgtgggctttccacctgtcacaggaccccacctcgtaggctgtggggatgtgatggagggtcagaatctccaggggagcttctttcgactcttctacccctgccaaaaggcagaggagaccatggagcagcccctgtggattccccgctatgagtactgcactggcctggccgagtacctgcagtttaataagcgctgcgggggcttgctgttcaacctggcggtgggatcttgtcgcctgcctgttagctggaatggcccctttaagacaaaggactctggataccccttgatcatcttctcccatggcctaggagccttcaggactttgtattcagccttctgcatggagctggcctcacgtggctttgtggttgctgtgccagagcacagggaccggtcagcggcaaccacctatttctgcaagcaggccccagaagagaaccagcccaccaatgaatcgctgcaggaggaatggatccctttccgtcgagttgaggaaggggagaaggaatttcatgttcggaatccccaggtgcatcagcgggtaagcgagtgtttacgggtgttgaagatcctgcaagaggtcactgctgggcagactgtcttcaacatcttgcctggtggcttggatctgatgactttgaagggcaacattgacatgagccgtgtggctgtgatgggacattcatttggaggggccacagctattctggctttggccaaggagacccaatttcggtgtgcggtggctctggatgcttggatgtttcctctggaacgtgacttttaccccaaggcccgaggacctgtgttctttatcaatactgagaaattccagacaatggagagtgtcaatttgatgaagaagatatgtgcccagcatgaacagtctaggatcataaccgttcttggttctgttcatcggagtcaaactgactttgcttttgtgactggcaacttgattggtaaattcttctccactgaaacccgtgggagcctggacccctatgaagggcaggaggttatggtacgggccatgttggccttcctgcagaagcacctcgacctgaaagaagactataatcaatggaacaaccttattgaaggcattggaccgtcgctcaccccaggggccccccaccatctgtccagcctgtaggcacaactggccatttgtaaagtcacttcagccaagttttcatttgggagctacccaagggcacccatgagctcctatcaagaagtgatcaacgtgaccccttttcacagattgaaaggtgtaatcacactgctgcttggataactgggtactttgatcttagatttgatcttaaaatcactttgggactgggatcccttgctgattgacaaacagactttctgggaccttgatggagtggggaacaagcagtagagtgggactgggggagacccaggccccgggctgagcactgtgaggcctggatgtgaagactcagcccagcgaagctcattcccttacccccggccagtgctgctgcttcagtggaagagatgaagccaaaggacagaatgaaaatccctaccttcagagactctagcccagcccaacaccatctcttcctacctctcagccttctccctccccagggccacttgttgaagtctgagcactttatgtaaatttctaggtgtgagccgtgatcacattttctatttatttccaagtcttctcattgtatggaacatagtactacttatacttacagtagtaagttatacttgtgagcccacagagtggcagacagcatggctctcacagcacagggagaaaaactgaggtacacagaggtacctcagaagctctggatgtctttgggggttttgctaagtgtatcttgataggaaacaacaaaagcaggttgagatggggaagatgacagaacaacagtgttaaatggccatttgcacaggcctttgccacaacagagaagtagtttggtcagctaaaactcagctgcagcctggacagtagagcgagaccccatcttaaaaataaagaaggctgggcgtggtggctcatgcctgtaatcccaacactttgggaggccaaggcaggcagatcacttaaggccaggagttcaagaccacctggccaacatggtgaaaccccgtctctactaaaaatacaaaaaattagcctggcgtaatggcaggcgcctataatcccagctactcaggaggctgaagcagaagaatcacttgaacctaggaggcggaggttgcagtgagtcaagatcgcgccactgcactccagcctgggtgacagagcaagactctgtcttaaaaaaaaaaaaaagaaaaagaaaaatttaaaataaataaaatttaaaaacgcagaaggccactcccagagaggcctaggagtaccttggtcattttttcttgcctcaaatattataaacctccaacttgctcagaatcagggtgcttttattgtctgttttctggctctgaggcccttgccccaaatttaagtcagatacagactgaatttccattctgttctgtttataatatgaatgatattaatactcttgtttgcttaatgttatgttggaattttctgtttaatctgcagtagagcaagatggagagccatctggaattgacttccttctgtctttcttctgtgttcgcttactacttgggcccatgtgggaaaaaaactttaaaaggaaggaagtcttcttagggatccagttcaaagctatttgggggcatcaaactgaaactctcttctccactactcaagacttcgtgcctcagtccaagtaggtaagagcaaaagggaaatgcatctctacacaatggcccatggtcagggccaccagagcaagctgggcctagatctccacctgtcagtgactggccattctaagaggtgaaacagcagatcgttgaggctgtgagggaggatctttgaattcccatgagacatagcataagaagggtatcattaaagccctgggctctaaagttacagagcctggttttgagtcctggctccaccactgccaactgggtaaatttgagcaaatggtattctctttcttatctcagctcctgcgtttctaaaatgagggtctgcgttatgaatagttaggaggattaagtgagaggatgtataacccatgggttacttaaaagtatatttcctaccttccaaacatgagatttttctagttatagtttcttttctagcttgattgctttgtggtcagagaaaatgacccatatggtttccatccttcaaaatttgttgaaacttggttgttggcctagtatgagatcaatgttgtaaatgtgccatgtatgtttaaaaagactatatattctgaa

SEQ ID NO: 1908 - DNA, 2523 bp, Homo sapiens
  source 1..2523: mol_type = genomic DNA
tgaggaatcagcttgactggcaacaggaagccgagaggaaaccagcaagcggctgctgttctgtgttcccccatccagccagcaagttcagctccggcaagtcatttgattcacccggtgatgaaatgggggtcaaccagtctgtgggctttccacctgtcacaggaccccacctcgtaggctgtggggatgtgatggagggtcagaatctccaggggagcttctttcgactcttctacccctgccaaaaggcagaggagaccatggagcagcccctgtggattccccgctatgagtactgcactggcctggccgagtacctgcagtttaataagcgctgcgggggcttgctgttcaacctggcggtgggatcttgtcgcctgcctgttagctggaatggcccctttaagacaaaggactctggataccccttgatcatcttctcccatggcctaggagccttcaggactttgtattcagccttctgcatggagctggcctcacgtggctttgtggttgctgtgccagagcacagggaccggtcagcggcaaccacctatttctgcaagcaggccccagaagagaaccagcccaccaatgaatcgctgcaggaggaatggatccctttccgtcgagttgaggaaggggagaaggaatttcatgttcggaatccccaggtgcatcagcgggtaagcgagtgtttacgggtgttgaagatcctgcaagaggtcactgctgggcagactgtcttcaacatcttgcctggtggcttggatctgatgactttgaagggcaacattgacatgagccgtgtggctgtgatgggacattcatttggaggggccacagctattctggctttggccaaggagacccaatttcggtgtgcggtggctctggatgcttggatgtttcctctggaacgtgacttttaccccaaggcccgaggacctgtgttctttatcaatactgagaaattccagacaatggagagtgtcaatttgatgaagaagatatgtgcccagcatgaacagtctaggatcataaccgttcttggttctgttcatcggagtcaaactgactttgcttttgtgactggcaacttgattggtaaattcttctccactgaaacccgtgggagcctggacccctatgaagggcaggaggttatggtacgggccatgttggccttcctgcagaagcacctcgacctgaaagaagactataatcaatggaacaaccttattgaaggcattggaccgtcgctcaccccaggggccccccaccatctgtccagcctgtaggcacaactggccatttgtaaagtcacttcagccaagttttcatttgggagctacccaagggcacccatgagctcctatcaagaagtgatcaacgtgaccccttttcacagattgaaaggtgtaatcacactgctgcttggataactgggtactttgatcttagatttgatcttaaaatcactttgggactgggatcccttgctgattgacaaacagactttctgggaccttgatggagtggggaacaagcagtagagtgggactgggggagacccaggccccgggctgagcactgtgaggcctggatgtgaagactcagcccagcgaagctcattcccttacccccggccagtgctgctgcttcagtggaagagatgaagccaaaggacagaatgaaaatccctaccttcagagactctagcccagcccaacaccatctcttcctacctctcagccttctccctccccagggccacttgttgaagtctgagcactttatgtaaatttctaggtgtgagccgtgatcacattttctatttatttccaagtcttctcattgtatggaacatagtactacttatacttacagtagtaagttatacttgtgagcccacagagtggcagacagcatggctctcacagcacagggagaaaaactgaggtacacagaggtacctcagaagctctggatgtctttgggggttttgctaagtgtatcttgataggaaacaacaaaagcaggttgagatggggaagatgacagaacaacagtgttaaatggccatttgcacaggcctttgccacaacagagaagtagtttggtcagctaaaactcagctgcagcctggacagtagagcgagaccccatcttaaaaataaagaaggctgggcgtggtggctcatgcctgtaatcccaacactttgggaggccaaggcaggcagatcacttaaggccaggagttcaagaccacctggccaacatggtgaaaccccgtctctactaaaaatacaaaaaattagcctggcgtaatggcaggcgcctataatcccagctactcaggaggctgaagcagaagaatcacttgaacctaggaggcggaggttgcagtgagtcaagatcgcgccactgcactccagcctgggtgacagagcaagactctgtcttaaaaaaaaaaaaaagaaaaagaaaaatttaaaataaataaaatttaaaaacgca

SEQ ID NO: 1909 - DNA, 847 bp, Homo sapiens
  source 1..847: mol_type = genomic DNA
gttccttggagagcttggagccgcgcgccggagggaataggaaagcttggttacaacccgggacacccggagcttcaggatggttcgtactaagacatggaccctgaagaagcactttgttggctatcctactaatagtgactttgagttgaagacagctgagctcccacccttaaaaaatggagaggtcctgcttgaagctttgttcctcaccgtggatccctacatgagagtggcagccaaaagattgaaggaaggtgatacaatgatggggcagcaagtggccaagtaattatttccatttgtcccagtgcttggaaaatatgtctcctctttacctcctgctgggtcctgtctctgtccattgctcctacaatttcttcagcctatgttgttgactcactgtgtgatcttggaatcaacttgggaaattctgtctccttcctaactagctggaaaggagggaaggatgtgaaattgtcattttttcagcttcactttgccatccttacttttaattactaaaaaaaaaaaagtatttgtccaggtcatgatttattgcgggatctggccagcagcccacaatgcaacagggttctctctttgttcccaggtggatcggcaggttgagaaataatagacacacacaagatagtgaaagctgggtccaggggcgtcaccgccttctggttccgtggtgccaccaaagcactgaatatacccgcatttattattaagtttagtgagggcgggggtaggttagtgagggatttagggtcatttgattatgaggtgagatggtcacatggggatgaagtaattctttaacatacatctgtatgcagaa

SEQ ID NO: 1910 - DNA, 1061 bp, Homo sapiens
  source 1..1061: mol_type = genomic DNA
gagatacgcgcacacacacacacaaacgcactcagatttcccggaccctggttttcctcctgtgaccctttcggggccgggctctcaccctaaagaagcagccccgccctggggtggccccaccctctcttgggacctgtcataagtcggaccccgggcgcccggctgcgcagtcccagccgccttccccaggcagtggaaccttcgggctcctgagcttcaggatggttcgtactaagacatggaccctgaagaagcactttgttggctatcctactaatagtgactttgagttgaagacagctgagctcccacccttaaaaaatggagaggtcctgcttgaagctttgttcctcaccgtggatccctacatgagagtggcagccaaaagattgaaggaaggtgatacaatgatggggcagcaagtggccaagtaattatttccatttgtcccagtgcttggaaaatatgtctcctctttacctcctgctgggtcctgtctctgtccattgctcctacaatttcttcagcctatgttgttgactcactgtgtgatcttggaatcaacttgggaaattctgtctccttcctaactagctggaaaggagggaaggatgtgaaattgtcattttttcagcttcactttgccatccttacttttaattactaaaaaaaaaaaagtatttgtccaggtcatgatttattgcgggatctggccagcagcccacaatgcaacagggttctctctttgttcccaggtggatcggcaggttgagaaataatagacacacacaagatagtgaaagctgggtccaggggcgtcaccgccttctggttccgtggtgccaccaaagcactgaatatacccgcatttattattaagtttagtgagggcgggggtaggttagtgagggatttagggtcatttgattatgaggtgagatggtcacatggggatgaagtaattctttaacatacatctgtatgcagaagtacagtatacagagataagaatttacaatatagtgtgtgcatcagtaatttctaacagagccttaaaa

SEQ ID NO: 1911 - DNA, 2298 bp, Homo sapiens
  source 1..2298: mol_type = genomic DNA
gagcttcaggatggttcgtactaagacatggaccctgaagaagcactttgttggctatcctactaatagtgactttgagttgaagacagctgagctcccacccttaaaaaatggagaggtcctgcttgaagctttgttcctcaccgtggatccctacatgagagtggcagccaaaagattgaaggaaggtgatacaatgatggggcagcaagtggccaaccagttattataataccattggtagaaatcgtctatggatctttactggaatttcagtgaccttacagatttatttagaggaaactgacatctttacaatttctctctccaaacacaagagttgtggaaagtaaaaatgtagccctaccaaaaggaactattgtactggcttctccaggctggacaacgcactccatttctgatgggaaagatctggaaaagctgctgacagagtggccagacacaataccactgtctttggctctggggacagttggcatgccaggcctgactgcctactttggcctacttgaaatctgtggtgtgaagggtggagaaacagtgatggttaatgcagcagctggagctgtgggctcagtcgtggggcagattgcaaagctcaagggctgcaaagttgttggagcagtagggtctgatgaaaaggttgcctaccttcaaaagcttggatttgatgtcgtctttaactacaagacggtagagtctttggaagaaaccttgaagaaagcgtctcctgatggttatgattgttattttgataatgtaggtggagagttttcaaacactgttatcggccagatgaagaaatttggaaggattgccatatgtggagccatctctacatataacagaaccggcccacttcccccaggcccacccccagagattgttatctatcaggagcttcgcatggaagcttttgtcgtctaccgctggcaaggagatgcccgccaaaaagctctgaaggacttgctgaaatgggtcttagagcttccctactttgtaattgactgacttcaagcaaataatcttgtctataaatccatgaagagtgctaagccatcactggaatacattagcgaaaaacttgtatcaggtaactcaggtctctatataagaccccttaaaaaaatctgaaaatgtaaattagttcccattagtaggctgtgccttgtaggagaaagagaaatgaagaccctttctcactaacatgaacccttccttcccacactcccagataaaggttaaacacatgttaaaagaaccttggcttaaaggggagacagattattagactgtcctgccatttatatttcctgaataggacctgcctcttcaggggccagaggtaatgaagggtgctcttttctctgtctatttgtacctcctctgagatcattgtgttattaaactttactatgcatcttatttagaaattgcttaatcgctctgggcacggtggctcacgcctgtaatcccagcactttgggaggccgaggcaggcagatcacgaggtcaggagatcgagaccatcctggctaacacggtgaagccctgtccctactaaaaatacaaaacaattagccgggcatggtggtgagcacctgtagtcccagctagtcgggaggctgaggcaggagaatggcatgaacctgggaggcggagcttgcagtgagccaagatcgcggcactgcactccagcctgggcaacagagcgagactctgtctcaaaaaaaaaaaaaagaaagaaaaagagattgcttaatcactgccttatgacatttcgcactatgatccgacacctattatttcttcttaggtgtactttgtaatcttttttacatgtactgtgtaagtggatcttgccccaccttgacttcaagttcatggaggacaggacttccatctcttattttcaaggtttccaatgatgtacctgataaatttgttgctaggatgagaacagtatatcattgagaatattaaattaagttttaaaatttgttgttgctttgatacagggtaaaatccagtacaaggaatatatcattgaaggatttgaaaacatgccagctgcatttatgggaatgctgaaaggagataatttggggaagacaatagtgaaagcatgaaaaagaggacacatggaatctggaggccatttagatgattagttaatttgtttttcaccatttagcaaaaatgtatactaccttaaatgtcttaagaaatagtactcataatgagtttgagctacttaataaaatacatttaagtggt

SEQ ID NO: 1912 - DNA, 1388 bp, Homo sapiens
  source 1..1388: mol_type = genomic DNA
tggcctgactcacaggacactaaggctccttttctgaagaagccttttaccagtctcatttaggggatgggaacaacatgtcttcacctagggactttagagcagagcctgtaaacgattatgagggaaatgactctgaagcagaagacttgaatttcagggagactttgccttcatcaagtcaggaaaacacacctagatcaaaggtttttgaaaataaagttaattcagagaaggtaaaactttctcttcggaatttcccacataatgattatgaggatgtttttgaagagccttcagaaagtggcagtgatcccagcatgtggacagccagaggccccttcagaagagacaggtggagcagtgaggatgaggaggctgcagggccatcacaggctctctcccctctactttctgatacgcgcaaaattgtttctgaaggagaactagatcagttggctcagattcggccattaatattcaattttcatgagcagacagccatcaaggattgtttgaaaatccttgaggaaaaaacagcagcgtatgatatcatgcaggaatttatggctttagaacttaagaatctgcctggtgagttcaactctgggaatcaaccaagcaacagagaaaaaaacagataccgagatattcttccatatgattcaacacgcgttcctcttggaaaaagcaaggactacatcaatgctagttatattagaatagtcaattgtggagaagagtatttttatatcgctactcaaggaccactgctgagcaccatagatgacttttggcaaatggtgttggaaaataattcaaatgttattgccatgataaccagagagatagaaggtggaattatcaaatgctaccattactggcccatttctctgaagaagccattggaattgaaacacttccgtgtattcctggagaactaccagatacttcaatatttcatcattcgaatgtttcaagttgtggagaagtccacgggaactagtcactctgtaaaacagttgcagttcaccaagtggccagaccatggcactcctgcctcagcagatagcttcataaaatatattcgttatgcaaggaagagccaccttacaggacccatggttgttcactgcagtgccggcataggccggacaggggtgttcctatgtgtggatgtcgtgttctgtgccatcgtaaagaactgttcattcaacatcatggatatagtggcccaaatgagagaacaacgttctggcatggttcaaacgaaggagcagtatcacttttgttacgatattgtgcttgaagttcttcggaaacttctgactttggattaagaaagacttctgttgcctctcacttgaaattaccaagtgggtttgcac

SEQ ID NO: 1913 - DNA, 2539 bp, Homo sapiens
  source 1..2539: mol_type = genomic DNA
gtgaacaaaaattgtttgctggcccccaggatactaactagacctttggcctgactcacaggacactaaggctccttttctgaagaagccttttaccagtctcatttaggggatgggaacaacatgtcttcacctagggactttagagcagagcctgtaaacgattatgagggaaatgactctgaagcagaagacttgaatttcagggagactttgccttcatcaagtcaggaaaacacacctagatcaaaggtttttgaaaataaagttaattcagagaaggtaaaactttctcttcggaatttcccacataatgattatgaggatgtttttgaagagccttcagaaagtggcagtgatcccagcatgtggacagccagaggccccttcagaagagacaggtggagcagtgaggatgaggaggctgcagggccatcacaggctctctcccctctactttctgatacgcgcaaaattgtttctgaaggagaactagatcagttggctcagattcggccattaatattcaattttcatgagcagacagccatcaaggattgtttgaaaatccttgaggaaaaaacagcagcgtatgatatcatgcaggaatttatgacgggaactagtcactctgtaaaacagttgcagttcaccaagtggccagaccatggcactcctgcctcagcagatagcttcataaaatatattcgttatgcaaggaagagccaccttacaggacccatggttgttcactgcagtgccggcataggccggacaggggtgttcctatgtgtggatgtcgtgttctgtgccatcgtaaagaactgttcattcaacatcatggatatagtggcccaaatgagagaacaacgttctggcatggttcaaacgaaggagcagtatcacttttgttacgatattgtgcttgaagttcttcggaaacttctgactttggattaagaaagacttctgttgcctctcacttgaaattaccaagtgggtttgcacctcctcataaagaacatgtttgcactgtgctgaagggctttgctatgcatacaatctgctttcttggtttatcagtttattttctttctaaaagctccctgaagggcaatatcatttggcttggggtgatcagtgtttacttattgatcttgctagacaatatcaaaataacttcccacattttccagtgaaacagatgttacataaaacgattgcagcttggctatttggttgaagggattacagagcccaataaaggatttaaaatatattcattaagattttatttggaaaggtggctggagagagctgaggatttccaggactttgtaagttcttattctgggagaacataaggccaataatcatgacctcttccaggcatttttaagacagatgtctattcatgttctttagctagagcctgtactttttgctggcatttgaataacccagtttaaaaagagtccagttagggtggactaactttggacacaaattggcttccatttcctacattttcatactgctgccttcctacagctgctagaccaagacctgttggtctgggaagcatttcatggatagggagagctcctctcggtgaacagtccaaaactaaaatagatgtttatatagaaagcccaagaggagatttttgccatgcctgagttctttcctatcccaccctaacacttaacatattacttagtctgctttgttaaaagcaagtattacctttaacttgcctcttactctttgccctttagctaactaataaagtttgatataggcattattatataattctgagtcattcatggtatatctcatgtttgatgtatttttcaaactaagatctatgatagttttttttccagagttccattaaatcatttatttcctttactttctcacctctgttgaaacatttagaaactggatttgggaacccaattttggaaaaccagattcatagtcatgaaaatggaaacttccatattctgtttttgaaaagatgtggccattattacagtaattttattataggactttgcctcgtacaattaatagtgatattttggacaaggagttctggtgacaagctatacctaattataagctataaaacaatagatatgagtgtttgtacagtttaactcaatggagatcagaatattctatgtattgagaaaatgtttaatatcaatctataaatcttgaatttctaagaggcttattttgttcttttggctgaatgagtatatttgaattggttgaataattaataattctcattgtaaaaataattatatgccaaaaatatatttgatgttaaatcaaatagatgattctgtttacattgttcatatgaataataatctgtgttaatttcattttgataattggcctttaatatttgtatctctaattttattttctctctgttactgtaaaataatagctataatgtataacaattttcttcagaagaattctatgctattattaaaataaaatatttactgtg

SEQ ID NO: 1914 - DNA, 2481 bp, Homo sapiens
  source 1..2481: mol_type = genomic DNA
gcgtggacccaactggcgaggctgctggggttgcagcgggacagttggggcggccccgcaggcccaggtgaacaaaaattgtttgctggcccccaggatactaactagacctttggcctgactcacaggacactaaggctccttttctgaagaagccttttaccagtctcatttaggggatgggaacaacatgtcttcacctagggactttagagcagagcctgtaaacgattatgagggaaatgactctgaagcagaagacttgaatttcagggagactttgccttcatcaagtcaggaaaacacacctagatcaaaggtttttgaaaataaagttaattcagagaaggtaaaactttctcttcggaatttcccacataatgattatgaggatgtttttgaagagccttcagaaagtggcagtgatcccagcatgtggacagccagaggccccttcagaagagacaggtggagcagtgaggatgaggaggctgcagggccatcacaggctctctcccctctactttctgatacgcgcaaaattgtttctgaaggagaactagatcagttggctcagattcggccattaatattcaattttcatgagcagacagccatcaaggattgtttgaaaatccttgaggaaaaaacagcagcgtatgatatcatgcaggaatttatggctttagaacttaagaatctgcctggtgagttcaactctgggaatcaaccaagcaacagagaaaaaaacagataccgagatattcttccatttcaacatcatggatatagtggcccaaatgagagaacaacgttctggcatggttcaaacgaaggagcagtatcacttttgttacgatattgtgcttgaagttcttcggaaacttctgactttggattaagaaagacttctgttgcctctcacttgaaattaccaagtgggtttgcacctcctcataaagaacatgtttgcactgtgctgaagggctttgctatgcatacaatctgctttcttggtttatcagtttattttctttctaaaagctccctgaagggcaatatcatttggcttggggtgatcagtgtttacttattgatcttgctagacaatatcaaaataacttcccacattttccagtgaaacagatgttacataaaacgattgcagcttggctatttggttgaagggattacagagcccaataaaggatttaaaatatattcattaagattttatttggaaaggtggctggagagagctgaggatttccaggactttgtaagttcttattctgggagaacataaggccaataatcatgacctcttccaggcatttttaagacagatgtctattcatgttctttagctagagcctgtactttttgctggcatttgaataacccagtttaaaaagagtccagttagggtggactaactttggacacaaattggcttccatttcctacattttcatactgctgccttcctacagctgctagaccaagacctgttggtctgggaagcatttcatggatagggagagctcctctcggtgaacagtccaaaactaaaatagatgtttatatagaaagcccaagaggagatttttgccatgcctgagttctttcctatcccaccctaacacttaacatattacttagtctgctttgttaaaagcaagtattacctttaacttgcctcttactctttgccctttagctaactaataaagtttgatataggcattattatataattctgagtcattcatggtatatctcatgtttgatgtatttttcaaactaagatctatgatagttttttttccagagttccattaaatcatttatttcctttactttctcacctctgttgaaacatttagaaactggatttgggaacccaattttggaaaaccagattcatagtcatgaaaatggaaacttccatattctgtttttgaaaagatgtggccattattacagtaattttattataggactttgcctcgtacaattaatagtgatattttggacaaggagttctggtgacaagctatacctaattataagctataaaacaatagatatgagtgtttgtacagtttaactcaatggagatcagaatattctatgtattgagaaaatgtttaatatcaatctataaatcttgaatttctaagaggcttattttgttcttttggctgaatgagtatatttgaattggttgaataattaataattctcattgtaaaaataattatatgccaaaaatatatttgatgttaaatcaaatagatgattctgtttacattgttcatatgaataataatctgtgttaatttcattttgataattggcctttaatatttgtatctctaattttattttctctctgttactgtaaaataatagctataatgtataacaattttcttcagaagaattctatgctattattaaaataaaatatttactgtg

SEQ ID NO: 1915 - DNA, 3060 bp, Homo sapiens
  source 1..3060: mol_type = genomic DNA
ggacgcctggtgttctcgcgggaaagaaccgttgcgcccgactttgcgcggaggtaggagggggaagtggaggcgggagtgaagtctcgcgagaagagtcggttgccgtagcagagccctctagctgtgtgtgtctgaggctcggccgcctgagccgcggacggtttgctgagcccgttagtgcgcccggccgagacacgccgccgccatgtcccgctacctgcgtccccccaacacgtctctgttcgtcaggaacgtggccgacgacaccaggtctgaagacttgcggcgtgaatttggtcgttatggtcctatagttgatgtgtatgttccacttgatttctacactcgccgtccaagaggatttgcttatgttcaatttgaggatgttcgtgatgctgaagacgctttacataatttggacagaaagtggatttgtggacggcagattgaaatacagtttgcccagggggatcgaaagacaccaaatcagatgaaagccaaggaagggaggaatgtgtacagttcttcacgctatgatgattatgacagatacagacgttctagaagccgaagttatgaaaggaggagatcaagaagtcggtcttttgattacaactatagaagatcgtatagtcctagaaacagtagaccgactggaagaccacggcgtagcagaagccattccgacaatgatagattcaaacaccgaaatcgatctttttcaagatctaaatccaattcaagatcacggtccaagtcccagcccaagaaagaaatgaaggctaaatcacgttctaggtctgcatctcacaccaaaactagaggcacctctaaaacagattccaaaacacattataagtctggctcaagatatgaaaaggaatcaaggaaaaaagaaccacctagatccaaatctcagtcaagatcacagtctaggtctaggtcaaaatctagatcaaggtcttggactagtcctaagtccagtggccactgatagtataaaccatggtcatttttaggcatgtatcattcatttactcatagtttggtttacttaaattatcaggaatacaatgttgcaatgatgcttaaaaaacacttgttagttttccctgtaccaggcaatggttataattaaaatgatatgctgttgagaagccactcttaagagtccagtttgtttaatgttatgggcagctaccaatttgtggtgtctctgtatatttttgtaaagattctcattttttatgcttgaagtatttggtgaaaagatgttggttgaccataatttgcaacattgtctcattaaaaataaactttcatattcatatttggtagaactgttaacctagaaatgtagcttgctaataagatagaatgatacaaaagtgaagtagtagccacagtacaacactgactgctcagacacatttaggttcagggtggacctttatgtcttgtcaagatgtctaggcccggctgggcgtggtggctcacacctgtaatcccagcactttgggaggctgaggcgggcggatcacgaggtcaggagttcgagaccagcctgaccaacacggtgaaaccccgtctctactaaaaatacaaaaattatccgggcatggtggcacatgcctgtaatctcagctactcaggaggctgaggcaagagaatcgcttgaacctgggaggtagaagttgcagtgagccaaaatcacgccactgcactccagcctgggcaacagagtgagactccgtctcaaaaaaaaaaaaaaaaaaaccggatgtctaggccaatgataattatttttgatgcagtgtggattagttcttttgttaaccccactgtcttggggaatgatgccagctgggaaattgagtttttgactgaaacatggagccttcactgctttttttctggttcctatgaagatttggaacatagaaaacacaaaaactcaccttaaaatttgagcaggtcgttgatggcaaaaataattttaaggaaaaaggaatattcttatgtagttattctaaagtttaaggagcgttgttgaccataatattgcttagttttcttactgctgttaagtaagtaaattgtttcaaagtaggttttgtgtgtgtgtgcctagtgtaaaagaactgaaattttgatgcttacagcacttggctcgtgcatttgtatcaaaatttgcctgcctctttatgagggaggcctgcttttcacacctcagtttatttaatacgaggcaagttgtaagacaacactcattctaggtgattctgtggtgccatgaaatttaaggtaatttggggaaaaggattagtcagttttaagcaagagtcacatcttttgagctttcgattatcagtgtagtacctgactaaaaatgaagtaatacccttaaaccatttataatttctagtatttctctgaaagatcgttttggggacaaaagtgacttgacatgtccaatttcatttcagaataaaaagctagcatctttaaaaatctcagattgcttgcttacagatacaagtaagaattatggacaaacgattccttttagaggattacttttttcaatttcggttttagtaatctaggctttgcctgtaaagaatacaacgatggattttaaatactgtttgtggaatgtgtttaaaggattgattctagaacctttgtatatttgatagtatttctaactttcatttctttactgtttgcagttaatgttcatgttctgctatgcaatcgtttatatgcacgtttctttaatttttttagattttcctggatgtatagtttaaacaacaaaaagtctatttaaaactgtagcagtagtttacagttctagcaaagaggaaagttgtggggttaaactttgtattttctttcttatagaggcttctaaaaaggtatttttatatgttctttttaacaaatattgtgtacaacctttaaaacatcaatgtttggatcaaaacaagacccagcttattttctgcttgctgtaaattaagcaaacatgctataataaaaacaaaatgaagg

SEQ ID NO: 1916 - DNA, 2205 bp, Homo sapiens
  source 1..2205: mol_type = genomic DNA
ggacgcctggtgttctcgcgggaaagaaccgttgcgcccgactttgcgcggaggtaggagggggaagtggaggcgggagtgaagtctcgcgagaagagtcggttgccgtagcagagccctctagctgtgtgtgtctgaggctcggccgcctgagccgcggacggtttgctgagcccgttagtgcgcccggccgagacacgccgccgccatgtcccgctacctgcgtccccccaacacgtctctgttcgtcaggaacgtggccgacgacaccaggtctgaagacttgcggcgtgaatttggtcgttatggtcctatagttgatgtgtatgttccacttgatttctacactcgccgtccaagaggatttgcttatgttcaatttgaggatgttcgtgatgctgaagacgctttacataatttggacagaaagtggatttgtggacggcagattgaaatacagtttgcccagggggatcgaaagacaccaaatcagatgaaagccaaggaagggaggaatgtgtacagttcttcacgctatgatgattatgacagatacagacgttctagaagccgaagttatgaaaggaggagatcaagaagtcggtcttttgattacaactatagaagatcgtatagtcctagaaacagtagaccgactggaagaccacggcgtagcagaagccattccgacaatgatagccaagtaagcaagaagaaaaatgagagataatgcttcagtgagagaggaaaggtgctacatagagtatgagctgttaagttacaacccaggggaaagacctgggaactattgtattattctcttgaaaatttggcccagtaagctgctacatccagttcaactaacaaaatcctgtataccacagagaagaataaagaaaaccaaactgacaaacatccttcttttatttaagaccaaactgcagctggaatacccagtacagttctgcttactacacttcaagaaagatctgaaagcggaaaaagaaccaaagaagggcagttcaagcgaccaaagggtgggtggaaggtgctgcagtatgaatactgtacgaatattttgactctggtctgaaaagataaaagaatgttatcgaaaactacatggaataattgaagtcccttcaagtttgaaagtaagcattttaggacaaataaaaggaaattcaactttgtacttgtggaaactaatccctaaatatgaataggtttatattgattcatgggtaacaggtccataataaattattggaaactaggatgtctgaatatcaaggaagacagccatagtctcttacagtgcctctgttggtctgtctcaaactgaattgggtgggaaaaggtatggtccaatataaaagttccatttttgccattattggcaaatcttgcctttgtttattttggtgccagtgttttctgcttaatcatttgctttgttggcatctgtgtttatttacttgtacaccacatgcagtttacatctgtcttaactactccttcccaggtaaattccaattatatttgacatccagctaagagggcccatctcttctcacctctttcctagtcagtatattcagcaaatatttattgagcccttactgtgggcaaatcattgtactggataattgagaaaaatagataattcccttattcagtaaatgtctactgagcacaatctagtgaatcattacagtatggcctcattgttttgtttgaggtgtgttattcataacaatattttacaccattcgtatcaatgtaattatagaacacaatatacgatcaaggataagtaattgtgtggttatctgccatttaaaagtatccagtatttgatcacattattataaataatgaaaaaatgatttaatctgtaataaactggtttattgtgcagtgactgtaatatactagagttataataaattgtttactctgcctcaccaaacacatgctaggatataacccccaaaataagtatttaactttgcattaggtataaaggagactgggtgctataattagattattttgaggcagacagagagctgttatcctaactgatttagtatgttctgtaattgagaaaatgttcaccaaattatactttttagtgatttacatgtacattttataggggacatgttctgtgtatagcgaataaataacttttatagtatc

SEQ ID NO: 1917 - DNA, 1074 bp, Homo sapiens
  source 1..1074: mol_type = genomic DNA
caggctgagcgttggaagccattttggctgcaacctacctgaagcgatgtctgcctttggtcacgacgaggcctggatggaggccggaggctttggtctggaggctgccgaaagaacggaataccagtctctgtgcaaatctaaactcttattcctgggagagcagagcgtagggaagacatccatcatcagccgcttcatgtacaacagcttcggctgcgcctgccaggcaactgttggaattgacttcttgtctaagaccatgtacttggaggaccaaatagttcagctgcagctatgggacacagctggccaggagcgctttcacagcctaattcctagctacattcgtgattcaactattgcagtggttgtctatgacattacaaacatcaattcttttaaggagacagataagtgggtagaacacgtgcgagcagaaagaggtgacgatgttgtcatcatgttgttgggtaacaagattgatttggataacaaaagacaagtcactgcagaacagggtgaagaaaaatccagaaacctcaatgtgatgtttattgagaccagtgccaaaaccggttacaacgtgaaaaagctgttccggcgtgtggcttctgcccttctttccacaaggacttcacctccaccaaaagaggggacggttgaaatcgaactggaatccttcgaggagtcaggcaacagaagctattgttgacagcttaggctttctctgcctcatttgatggatttcttacatttgggcttgccataccagttctcctccccacctcgttttatgatacatggccacttactctcttccaattcctaggcttggggtaaaaacagaacccctgaaagtgctatcattttttcctgaccgcatctcacagctactgggtggaagcttcttgcagcacctgggaattctaccttaccttctccgacagctaaaagacatctgtagagaatacagttctacagcagctgacatacttcaaaggccaatacaattcattctccactgtttgttgttgtttacctacaccctcaataaatggttctttaacctaa

SEQ ID NO: 1918 - DNA, 453 bp, Homo sapiens
  source 1..453: mol_type = genomic DNA
cctggtgtaatcatggtacagattattaaagacacgaatgaatttaaaacatttttgacagctgccggacacaaactcgcagtggttcaattttcttcgaaacggtgtggtccctgcaaaaggatgtttcctgttttccatgctatgtctgtgaaataccaaaatgtattttttgctaatgtggatgtgaacaattctccggagctggctgaaacttgtcacatcaaaacaatacccacatttcagatgttcaagaaaagccagaaggtaaccctattctcaagaatcaaaagaataatttgctgttatagaagtggattcatgagcaacctgtgtcttgcagatgatggaaatgagtaggatttaacttttcaatcaggaataaaattccttaaagcctcaacattttcgcagcacttgaatcaataaatgtttcacctttgtgcatttgtg

SEQ ID NO: 1919 - DNA, 433 bp, Homo sapiens
  source 1..433: mol_type = genomic DNA
tccaactaaaccaacaggggattttcatcagcacttccctggtgtaatcatggtacagattattaaagacacgaatgaatttaaaacatttttgacagctgccggacacaaactcgcagtggttcaattttcttcgaaacggtgtggtccctgcaaaaggatgtttcctgttttccatgctatgtctgtgaaataccaaaatgtattttttgctaatgtggatgtgaacaattctccggagctggctgaaacttgtcacatcaaaacaatacccacatttcagatgttcaagaaaagccagaaggtaaccctattctcaagaatcaaaagaataatttgctgttatagaagtggattcatgagcaacctgatttttgagttttgtggagccgatgctaaaaaattggaagccaagactcaagaattaatgtaa

SEQ ID NO: 1920 - DNA, 2378 bp, Homo sapiens
  source 1..2378: mol_type = genomic DNA
tcgccgcccgccccgctgctgtctggcgggggaggagctcgggaccgggagcagcggctctggcggtcgtggcggtcggagatccgagagctctgcttctctgaaaagcgtgtggctttctggacttgtttcaggccacccacgagccagcgggaaaggattgccagccagagaaagacgaactccgaagtcccaatgcacagatcagcccccagtcaaaccaccaagaggagccgatcgccattttccactactcgtcgtagttgggacgacagcgagagttcgggaaccaacctgaatattgataatgaggactattccaggtatccgccaagagagtacagagcttcgggtagcagaagaggaatggcctatggacatattgactcttatggggcagatgatagtgaggaggagggggctgggcctgttgagcgaccgccagtgagagggaaaactggcaagtttaaagatgataagctgtatgacccagagaaaggggcaaggtctttggctgggccacctccacatttctctagttttagccgtgatgtgagagaggagcgagacaagttagacccagtccctgcagcaagatgctcagctagcagagctgacttcctgccacaaagtagtgtggcctcacagtcgtcttctgaaggcaagctggctacaaaaggtgacagctcggagagggagagaagggagcaaaatttacctgcacgtcccagcagggctcctgtgagtatttgtggtggtggggaaaacacctcaaagagtgcagaggaacctgtggtcaggcccaaaatcagaaacctggcaagtccaaactgcgtgaaaccaaaaattttttttgatactgatgatgatgacgatatgccacacagtacttccaggtggagggataccgccaatgacaatgagggccactcggatggcctggcaagaagagggagaggcgagagttcaagtggctatcccgagccaaagtaccctgaagacaaacgggaagcgaggagtgaccaagtgaaaccagaaaaggtgccgagacgacgacgcaccatggccgaccctgacttctggacgcacagtgatgattactacaaatactgcgacgaagactctgacagtgacaaagagtggattgctgctctgcgtcggaaatatcgaagccgagagcaaaccctgtcctccagtggcgaaagctgggagactctgccggggaaagaagagcgggaacctccacaggctaaggtgagtgccagcactggcaccagccctggccccggtgctagtgccagtgccggggctggcgccggggccagtgctggcagcaatggcagcaattaccttgaagaagttcgagaaccatctcttcaggaagagcaggcatccctggaagaaggagaaattccttggctccagtaccatgagaatgacagtagcagtgagggggataatgattctggtcacgagttgatgcaacctggggtattcatgctggatggaaacaacaaccttgaagatgactccagtgtgagcgaagacctagaagtggattggagcctctttgatggatttgcagatgggttaggagtggctgaagccatttcctatgtggaccctcagttcctcacctacatggcacttgaagaacgcctggcccaggcaatggaaactgcccttgcgcacttggagtctctcgcagtggatgtagaggtggccaatccaccagcaagcaaggagagcattgacgctcttcccgagatcctggtcactgaagatcatggcgcagttggtcaggagatgtgctgccccatctgctgtagcgaatatgtgaagggggaggtggcaactgagctgccgtgccaccactatttccacaagccgtgtgtgtccatctggcttcagaagtcaggcacctgccccgtgtgccgctgcatgttccctcccccactctaaagaccaaggccgtttactcctggtctgattattttccccatctgaaatccacaatactgcaggagccctcttgaaattaacaatggaaataaaaccaatcagtcagttagcctaaacctattgattcctcgtgattatttccaatgtgaaaacagttgtgtatgattgcattaaaaatcatatcatcttttagaggttagaaaagggaaaactaaactttctaaatgctacttgagattgcagtaagaagatacgttttctaacctgaaagttaaatcgcatttgttttcttcagtagaatgggaatgtgttgctgttacttgtaatgtcaagtttatctgttaaatatgtccaaaaggcaaaatcatttttgttgcatgttatgggtcgatgttcctgtaattgcagtgccgtaa

SEQ ID NO: 1921 - DNA, 736 bp, Homo sapiens
  source 1..736: mol_type = genomic DNA
gtgcggaggggcggggcgtgtggaggccgggacggcgcccccggccggcggtgaggccggctcagcgcggagcagctcagtgccccccgcgccccgctccggcagctccacgctcgcgcccgccatgccggagcagttcagcgtcgccgagttcctggccgtcaccgcggaggacctcagctccccggctggggccgccgccttcgccgccaagatgccccggtaccgaggggcggcgctggcgcgggaggagatcttggaaggagaccaagccatcctgcagagaataaagaaggctgtgcgggcaatccatagctccggccttggccatgtggagaatgaagagcagtaccgagaggccgtggaatccttaggcaacagccacctgtcccagaacagccatgagctgtccacaggcttcctaaacttggccgtgttcacccgcgaggttgctgcgctcttcaagaacctgattcagaacttgaacaacattgtctctttccccctggacagtctgatgaaggggcagctgagggacggtcgacaggattccaaaaaacagctggagaaggcatggaaggactatgaagccaaaatggccaagctggagaaggagcgcgatcgggccagggtgacaggagggatccctgcttggaacctggggatcccagccaagccccacccaactctgaagagggcctccgagagcccccaggcacctccagacccagcctga

SEQ ID NO: 1922 - DNA, 2692 bp, Homo sapiens
  source 1..2692: mol_type = genomic DNA
gtcagattctcctctaagtctggctttcctgcaaacccagtcttgtaatcattttgccaacattaaaaatgtgttccaggtctacacctgacagtcactggaatgctactccaggccttagaagaaagtgaaactaattttaaaggccccttattctttctgttacctgcctgctgaagtgaaaataaatctccctgctcctttattctaaactgattttactttcccatctcaaaaacgtgtgcagggagcaggagccctcctacccgagccccagctgtattggaaaccctcctaagtcagagtgatgggtcaggaatctagcaagcctgtatggcccaatccaacaggagggtatcagtccaatacaggtaggaggtatggaagaaggcatgcttatgtcagtttcaggccacccacgagccagcgggaaaggattgccagccagagaaagacgaactccgaagtcccaatgcacagatcagcccccagtcaaaccaccaagaggagccgatcgccattttccactactcgtcgtagttgggacgacagcgagagttcgggaaccaacctgaatattgataatgaggactattccaggtatccgccaagagagtacagagcttcgggtagcagaagaggaatggcctatggacatattgactcttatggggcagatgatagtgaggaggagggggctgggcctgttgagcgaccgccagtgagagggaaaactggcaagtttaaagatgataagctgtatgacccagagaaaggggcaaggtctttggctgggccacctccacatttctctagttttagccgtgatgtgagagaggagcgagacaagttagacccagtccctgcagcaagatgctcagctagcagagctgacttcctgccacaaagtagtgtggcctcacagtcgtcttctgaaggcaagctggctacaaaaggtgacagctcggagagggagagaagggagcaaaatttacctgcacgtcccagcagggctcctgtgagtatttgtggtggtggggaaaacacctcaaagagtgcagaggaacctgtggtcaggcccaaaatcagaaacctggcaagtccaaactgcgtgaaaccaaaaattttttttgatactgatgatgatgacgatatgccacacagtacttccaggtggagggataccgccaatgacaatgagggccactcggatggcctggcaagaagagggagaggcgagagttcaagtggctatcccgagccaaagtaccctgaagacaaacgggaagcgaggagtgaccaagtgaaaccagaaaaggtgccgagacgacgacgcaccatggccgaccctgacttctggacgcacagtgatgattactacaaatactgcgacgaagactctgacagtgacaaagagtggattgctgctctgcgtcggaaatatcgaagccgagagcaaaccctgtcctccagtggcgaaagctgggagactctgccggggaaagaagagcgggaacctccacaggctaaggtgagtgccagcactggcaccagccctggccccggtgctagtgccagtgccggggctggcgccggggccagtgctggcagcaatggcagcaattaccttgaagaagttcgagaaccatctcttcaggaagagcaggcatccctggaagaaggagaaattccttggctccagtaccatgagaatgacagtagcagtgagggggataatgattctggtcacgagttgatgcaacctggggtattcatgctggatggaaacaacaaccttgaagatgactccagtgtgagcgaagacctagaagtggattggagcctctttgatggatttgcagatgggttaggagtggctgaagccatttcctatgtggaccctcagttcctcacctacatggcacttgaagaacgcctggcccaggcaatggaaactgcccttgcgcacttggagtctctcgcagtggatgtagaggtggccaatccaccagcaagcaaggagagcattgacgctcttcccgagatcctggtcactgaagatcatggcgcagttggtcaggagatgtgctgccccatctgctgtagcgaatatgtgaagggggaggtggcaactgagctgccgtgccaccactatttccacaagccgtgtgtgtccatctggcttcagaagtcaggcacctgccccgtgtgccgctgcatgttccctcccccactctaaagaccaaggccgtttactcctggtctgattattttccccatctgaaatccacaatactgcaggagccctcttgaaattaacaatggaaataaaaccaatcagtcagttagcctaaacctattgattcctcgtgattatttccaatgtgaaaacagttgtgtatgattgcattaaaaatcatatcatcttttagaggttagaaaagggaaaactaaactttctaaatgctacttgagattgcagtaagaagatacgttttctaacctgaaagttaaatcgcatttgttttcttcagtagaatgggaatgtgttgctgttacttgtaatgtcaagtttatctgttaaatatgtccaaaaggcaaaatcatttttgttgcatgttatgggtcgatgttcctgtaattgcagtgccgtaaaagcttattaaagttgttcttttggttttacatggta

SEQ ID NO: 1923 - DNA, 2115 bp, Homo sapiens
  source 1..2115: mol_type = genomic DNA
gcggtcgtggcggtcggagatccgagagctctgcttctctgaaaagcgtgtggctttctggacttggtctacacctgacagtcactggaatgctactccaggccttagaagaaagtgaaactaattttaaaggccccttattctttctgttacctgcctgctgaagtgaaaataaatctccctgctcctttattctaaactgattttactttcccatctcaaaaacgtgtgcagggagcaggagccctcctacccgagccccagctgtattggaaaccctcctaagtcagagtgatgggtcaggaatctagcaagcctgtatggcccaatccaacaggagggtatcagtccaatacaggtaggaggtatggaagaaggcatgcttatgtcagtttcaggccacccacgagccagcgggaaaggattgccagccagagaaagacgaactccgaagtcccaatgcacagatcagcccccagtcaaaccaccaagaggagccgatcgccattttccactactcgtcgtagttgggacgacagcgagagttcgggaaccaacctgaatattgataatgaggactattccagtacttccaggtggagggataccgccaatgacaatgagggccactcggatggcctggcaagaagagggagaggcgagagttcaagtggctatcccgagccaaagtaccctgaagacaaacgggaagcgaggagtgaccaagtgaaaccagaaaaggtgccgagacgacgacgcaccatggccgaccctgacttctggacgcacagtgatgattactacaaatactgcgacgaagactctgacagtgacaaagagtggattgctgctctgcgtcggaaatatcgaagccgagagcaaaccctgtcctccagtggcgaaagctgggagactctgccggggaaagaagagcgggaacctccacaggctaaggtgagtgccagcactggcaccagccctggccccggtgctagtgccagtgccggggctggcgccggggccagtgctggcagcaatggcagcaattaccttgaagaagttcgagaaccatctcttcaggaagagcaggcatccctggaagaaggagaaattccttggctccagtaccatgagaatgacagtagcagtgagggggataatgattctggtcacgagttgatgcaacctggggtattcatgctggatggaaacaacaaccttgaagatgactccagtgtgagcgaagacctagaagtggattggagcctctttgatggatttgcagatgggttaggagtggctgaagccatttcctatgtggaccctcagttcctcacctacatggcacttgaagaacgcctggcccaggcaatggaaactgcccttgcgcacttggagtctctcgcagtggatgtagaggtggccaatccaccagcaagcaaggagagcattgacgctcttcccgagatcctggtcactgaagatcatggcgcagttggtcaggagatgtgctgccccatctgctgtagcgaatatgtgaagggggaggtggcaactgagctgccgtgccaccactatttccacaagccgtgtgtgtccatctggcttcagaagtcaggcacctgccccgtgtgccgctgcatgttccctcccccactctaaagaccaaggccgtttactcctggtctgattattttccccatctgaaatccacaatactgcaggagccctcttgaaattaacaatggaaataaaaccaatcagtcagttagcctaaacctattgattcctcgtgattatttccaatgtgaaaacagttgtgtatgattgcattaaaaatcatatcatcttttagaggttagaaaagggaaaactaaactttctaaatgctacttgagattgcagtaagaagatacgttttctaacctgaaagttaaatcgcatttgttttcttcagtagaatgggaatgtgttgctgttacttgtaatgtcaagtttatctgttaaatatgtccaaaaggcaaaatcatttttgttgcatgttatgggtcgatgttcctgtaattgcagtgccgtaaaagcttattaaagttgttcttttggttttacatggta

SEQ ID NO: 1924 - DNA, 740 bp, Homo sapiens
  source 1..740: mol_type = genomic DNA
gggtttattactactgaaggaagaacgtgagtaggttaggatttcggttgagaggcttggggtcttgcgtttcgcccaccatctcctggggacagggtggagtcgatatccgggacgggggggaggttgcggtgcccctcagggctacctctcaagagtgctatcatttccgcaggccagatcagaaaagggagctcaggtaccttccagagagtgagacccagcgcccttgtctcgcacccagtaggctttcatccccgccatggcggagctgatccagaagaagctacagggagaagtggagaaatatcaacagctacagaaggacttaagtaaatccatgtcggggaggcagaaacttgaagcacaactaacagaaaataatatcgtgaaagaggaactggccctgctggatgggtccaacgtggtctttaaacttctgggtccggtgctagtcaaacaggagctgggggaggctcgggccacagtagggaagaggctggactatatcacagctgaaattaagcgatacgaatcccagcttcgggatcttgagcggcagtcagagcaacagagggagacccttgctcagctgcagcaggagttccagcgggcccaggcagcaaaggcaggggctcctggcaaggcctgaccccatggtggggggaggggaggggaggggagggaatgaggcagctctaggatctatactgtagctaataaaatgtaaaaacacctgg

SEQ ID NO: 1925 - DNA, 581 bp, Homo sapiens
  source 1..581: mol_type = genomic DNA
attactactgaaggaagaacgtgagtaggccagatcagaaaagggagctcaggtaccttccagagagtgagacccagcgcccttgtctcgcacccagtaggctttcatccccgccatggcggagctgatccagaagaagctacagggagaagtggagaaatatcaacagctacagaaggacttaagtaaatccatgtcggggaggcagaaacttgaagcacaactaacagaaaataatatcgtgaaagaggaactggccctgctggatgggtccaacgtggtctttaaacttctgggtccggtgctagtcaaacaggagctgggggaggctcgggccacagtagggaagaggctggactatatcacagctgaaattaagcgatacgaatcccagcttcgggatcttgagcggcagtcagagcaacagagggagacccttgctcagctgcagcaggagttccagcgggcccaggcagcaaaggcaggggctcctggcaaggcctgaccccatggtggggggaggggaggggaggggagggaatgaggcagctctaggatctatactgtagctaataaaatgt

SEQ ID NO: 1926 - DNA, 521 bp, Homo sapiens
  source 1..521: mol_type = genomic DNA
gtttattactactgaaggaagaacgtgagtagatcagaaaagggagctcaggtaccttccagagagtgagacccagcgcccttgtctcgcacccagtaggctttcatccccgccatggcggagctgatccagaagaagctacagggagaagtggagaaatatcaacagctacagaaggacttaagtaaatccatgtcggggaggcagaaacttgaagcacaactaacagaaaataatatcgtgaaagaggaactggccctgctggatgggtccaacgtggtctttaaacttctgggtccggtgctagtcaaacaggagctgggggaggctcgggccacagtagggaagaggctggactatatcacagctgaaattaagcgatacgaatcccagcttcgggatcttgagcggcagtcagagcaacagagggagacccttgctcagctgcagcaggagttccagcgggcccaggcagcaaaggcaggggctcctggcaaggcctgaccccatggtggggggag

SEQ ID NO: 1927 - DNA, 1760 bp, Homo sapiens
  source 1..1760: mol_type = genomic DNA
attggccgagcgcggccgttgggggtgaggccgcgtcgggggaggacaacaaagggccgcgggcggcgggcagtggtgtcccagtctcccggtgcttccctgaggctgaggcgcccggcctcccgcccgccgcgctccagatgaagtgtgagcactgcacgcgcaaggaatgtagtaagaaaacaaaaactgatgaccaagagaatgtgtcagccgatgcaccgagtccagcccaggaaaatggagagaagggagaattccacaagttggctgatgccaagatatttttgagcgactgcctggcatgtgacagctgtatgactgcagaggaaggagtccaactttcccagcaaaatgccaaggacttcttccgcgttctgaaccttaacaagaaatgtgatacctcaaagcacaaagtgctggtagtgtctgtgtgtcctcaatctttgccttattttgctgctaaattcaacctcagtgtaactgatgcatccagaagactctgtggtttcctcaaaagtcttggggtgcactatgtatttgatacgacgatagctgcggattttagtatcctggagagtcaaaaagaattcgtgcgtcgctatcgccagcacagtgaggaggaacgcaccctgcccatgctgacctctgcctgtcctggctgggtccgatacgccgagcgggtgctgggtcgccccatcactgcccacctctgcaccgccaagtccccccagcaggtcatgggctctttggtgaaggattatttcgccagacagcagaacctgtctccagagaagattttccacgtcattgtggccccttgttatgacaagaagctggaggctcttcaggaaagccttccccctgctttgcatggctcccggggcgctgactgcgtgttaacatcaggtaaggtacttatctcttggtggtgcacacctgtaatcacagctactcaggaggctgcggcaagagaatcacttgaacccgggaggcagaggttacagcgagacaagattgcaccactggactccagcctgggcggcggaggtgaaattgctcaaataatggagcaaggtgacctctcagtgagagatgctgccgtcgacactctgtttggagacttgaaggaggacaaagtgacgcgtcatgatggagccagctcagacgggcacctggcacacatcttcagacatgcggccaaggagctgttcaacgaggatgtggaggaggtcacttaccgagccctgagaaacaaagacttccaagaggtcacccttgagaagaacggagaggtggtgttacgctttgctgcagcctatggctttcgaaacatccagaacatgatcctgaagcttaagaagggcaagttcccattccactttgtggaggtcctcgcctgtgctggaggatgcttaaatggcagaggccaagcccagactccagacggacatgcggataaggccctgctgcggcagatggaaggcatttacgctgacatccctgtgcggcgtccggagtccagtgcacacgtgcaggagctgtaccaggagtggctggaggggatcaactcccccaaggcccgagaggtgctgcataccacgtaccagagccaggagcgtggcacacacagcctggacatcaagtggtgaagtcaggccagggccttccagctgctcttggggccagagccaagagcctctcagtagagggaggggctgccctgagtggagtattaaagacacttaagaaaaccgctc

SEQ ID NO: 1928 - DNA, 499 bp, Homo sapiens
  source 1..499: mol_type = genomic DNA
atggctaccgagcccgaagccgcggagccggtggtgccttcgctcgtggatcgatacttcactcgctggtacaaaccggatgtcaaaggaaaattttgtgaggaccactgtatactacagcactctaaccgaatatgtgtcatcacattggcagaatctcatccagttcttcaaagtggaaaaacaattaaaagcatttcctatcagatcagtaccaactgtagcagacttcagaacaaggtctctgggaaatttaagcggagaattatctatctagaaaaggtagaagacgtcatcaagaggaaaatgatgcctctaagcttgggactgcatcttccccactcttaatcctccttctataggaaggaatcttcacgagcacaggatccctcacttctgtctgctgcctcacctatcccatcccataaaaggaggtggatgctcatcttttcagtctttctggtgactttgcaaaaataaattgaacacattaaccctt

SEQ ID NO: 1929 - DNA, 3037 bp, Homo sapiens
  source 1..3037: mol_type = genomic DNA
aattgagatggtttactgtaaaattaaaatgggagttagttttctagacatgtaactctctggggagtataaaactggtcacaatgggctttgcgttgaagtatctgtccctcagatctcatcagaaggagtatataatacaaaaatataaattcaacctctgtatgttttcttctatgttttatgctgggactcactggagatctttgtaagtaatcaaagctggccctttatctttgattttggcttttagggaattctagggacttcctttccccaaattaaaactcattttgaggtgtttggttttgtcttttaatttttgcaacttcaaaattgatgactcagttctagtgtactttatcctcgaacttgtttaaaataggttactttcttgaaataaataataatataatgaagagatcatgacttggatttgggtgggggaattaaataccttttcaaaattgccatcagtatcatcttggatgaagaaagttcagtggttaaaagcgtcttctgaagtgtggtcatagtcggtgaggtttatttcagtttggcttctcattttaattttcagatgtatatcacatatatgtgaaaagtactgacaaaaataatttatgaaataaacacagtagggcatgaggttgtgttatttgtgaggcagcaatggagcatgacttgtagtcaacaaacatgggtgtcctgatcaaagctctgctgtgctattcggcaagactctatgtggatgcctcttgtagaatgtggttaataataccagccgatctcatagggcactgtgcagactcagcattatggtgcacagctccttgaactcataggagtggcacttaactggagctttgtgtcgtactcatcaaacatcttcccccagacaatgattcttctgattctgctaactctggacagagtttgcattgtcttttgagaaaaatgaatgtatcacttagtcaaaaaactgtaaaaatacataggctctttccgatgcttgctttctcagagccctatgagtttgtctctctggaatggctgcaaaagtggttggatgaatcaacacctaccaaacctattgataatcacgcttgcctgtgttcccatgacaagcttcacccggataaaatatcaattatgaagaggatatctgaatatgcagctgacattttctatagtagatatggaggaggtccaagactaactgtgaaagccctgtgtaaggaatgtgtagtagaacgttgtcgcatattgcgtctgaagaaccaactaaatgaagattataaaactgttaataatctgctgaaagcagcagtaaagggcgatggattttgggtggggaagtcctccttgcggagttggcgccagctagctcttgaacagctggatgagcaagatggtgatgcagaacaaagcaacggaaagatgaacggtagcaccttaaataaagatgaatcaaaggaagaaagaaaagaagaggaggaattaaattttaatgaagatattctgtgtccacatggtgagttatgcatatctgaaaatgaaagaaggcttgtttctaaagaggcttggagcaaactgcagcagtactttccaaaggctcctgagtttccaagttacaaagagtgctgttcacagtgcaagattttagaaagagaaggggaagaaaatgaagccttacataagatgattgcaaacgagcaaaagacttctctcccaaatttgttccaggataaaaacagaccgtgtctcagtaactggccagaggatacggatgtcctctacatcgtgtctcagttctttgtagaagagtggcggaaatttgttagaaagcctacaagatgcagccctgtgtcatcagttgggaacagtgctcttttgtgtccccacgggggcctcatgtttacatttgcttccatgaccaaagaagattctaaacttatagctctcatatggcccagtgagtggcaaatgatacaaaagctctttgttgtggatcatgtaattaaaatcacgagaattgaagtgggagatgtaaacccttcagaaacacagtatatttctgagcccaaactctgtccagaatgcagagaaggcttattgtgtcagcagcagagggacctgcgtgaatacactcaagccaccatctatgtccataaagttgtggataataaaaaggtgatgaaggattcggctccggaactgaatgtgagtagttctgaaacagaggaggacaaggaagaagctaaaccagatggagaaaaagatccagattttaatcaaatcatgcatgcattttcagttgctccttttgaccagaatttgtcaattgatggaaagattttaagtgatgactgtgccaccctaggcacccttggcgtcattcctgaatctgtcattttattgaaggctgatgaaccaattgcagattatgctgcaatggatgatgtcatgcaagtttgtatgccagaagaagggtttaaaggtactggtcttcttggacattaatctttgaatacttgctgactgctaagaaatgaccagaggggaagaggagtttgacatgttagggcattaaagcaaaggtggatttaagaattaaaccattacatgccccttccaaaaggcagaaatccattcaaacgtgactgtcccaaatgccttatgtcaaataaagcagattgcactgatggacatcagacttgaaggaaatgtttccaattttatatttaaggggggtggtgggtgggagggggcaagtaaagacggaacaagtttagtagcagtaatagtaaatcatgtttacatatgagatttatagtcgtgggaggggaataaagttctgttatatttccttgctcgagtttcataccagatgcgttggtccataaaggattgtatcaagtagatgggacaacattctgctctgaacgaaaagtaattttagagacataacctgcttaccaatgcctgtctttgattcatattctactttcaataaagcatgaaagtgaagaacttg

SEQ ID NO: 1930 - DNA, 1328 bp, Homo sapiens
  source 1..1328: mol_type = genomic DNA
cggccgcgttgccaaggtgacccgggcgcgggaaggcggctccggctcgcgcgggccgggccgggcggcggcggcggcaccatgagcggccggaagcgcagcttcaccttcggggcctacggcgggtagggcgtggcgcggcgcggggcggggcgcgtgcgcgcgtgtgcgtgtgcacgcgtgggggggagcccgtgcggggtgtgctcgcgtttgggcgggtgggcctgggctatgactgctgtgggggctgagcgtttgacctcagtgcgcgcatggctgtcgtgctgtggcgcctgtgtgtgtgtgtttctgtttctgtgtctgtgtgtgttcccattgcgtgtccatgtgcatgtgtggggaggtgagtgcagggtggacattgctgtgtttgtgtctaagcacatgatagtggcgcttatgcatgtgactggggctgcggggctactccgcctgtgtgtgcgcgcgtgtgtgtgcatgcgtgtgtgcgcaactgctcacatgtatagggtggacaagtccttcacttctcgccggagtgtgtggaggagcgatgggcagaaccagcacttccctcaggcactagacctgtcacgagtgaacttagttccctcctatactccttcactctaccctaagaacacagatctatttgagatgattgagaagatgcagggaagcaggatggatgaacaacgctgctccttcccgccgcccctcaaaacagaggaggactacattccatacccgagcgtgcacgaggtcttggggcgagaaggacccttccccctcatcctgctgccccagtttgggggctactggattgagggcaccaaccacgaaatcaccagcatccccgagacagagccactgcagtcgcccacaaccaaggtgaagctcgagtgcaaccccacagcccgcatctaccggaagcactttctcggcaaggagcatttcaattactactcactggacgctgccctcggccaccttgtcttctcactcaagtacgatgtcatcggggaccaagagcacctgcggctgctgctcaggaccaagtgccggacataccatgatgtcatccccatctcctgcctcaccgagttccctaatgttgtccagatggcaaagttggtgtgtgaagacgtcaatgtggatcggttctatcctgtgctctaccccaaggtatggctggatctgggcacagctcactgagggtgggtgagtaactggaagactgagcatttattaagcaccttctgtgtgccagatactttcccaaggttctctcatttaatcctcacaataaccctgtgaagtccaca

SEQ ID NO: 1931 - DNA, 3328 bp, Homo sapiens
  source 1..3328: mol_type = genomic DNA
ctatttgagatgattgagaagatgcagggaagcaggatggatgaacaacgctgctccttcccgccgcccctcaaaacagaggaggactacattccatacccgagcgtgcacgaggtcttggggcgagaaggacccttccccctcatcctgctgccccagtttgggggctactggattgagggcaccaaccacgaaatcaccagcatccccgagacagagccactgcagtcgcccacaaccaaggtgaagctcgagtgcaaccccacagcccgcatctaccggaagcactttctcggcaaggagcatttcaattactactcactggacgctgccctcggccaccttgtcttctcactcaagtacgatgtcatcggggaccaagagcacctgcggctgctgctcaggaccaagtgccggacataccatgatgtcatccccatctcctgcctcaccgagttccctaatgttgtccagatggcaaagttggtgtgtgaagacgtcaatgtggatcggttctatcctgtgctctaccccaaggcttcccggctcatcgtcacctttgacgagcatgtcatcagcaataacttcaagtttggcgtcatttatcagaagcttgggcagacctccgaggaagaactcttcagcaccaatgaggaaagtcccgctttcgtggagttccttgaatttcttggccagaaggtcaaactgcaggactttaaggggttccgaggaggcctggacgtgacccacgggcagacggggaccgaatctgtgtactgcaacttccgcaacaaggagatcatgtttcacgtgtccaccaagctgccatacacggaaggggacgcccagcagttgcagcggaagcggcacatcgggaacgacatcgtggctgtggtcttccaggatgagaacactcctttcgtgcccgacatgatcgcgtccaacttcctgcatgcctacgtcgtggtgcaggctgagggcgggggccctgatggccccctctacaaggtctctgtcactgcaagagatgatgtgcccttctttggaccccccctcccggaccccgctgtgttcaggaaggggcctgagttccaggaatttttgctgacaaagctgatcaatgctgaatatgcctgctacaaggcagagaagtttgccaaactggaggagcggacgcgggccgccctcctggagacgctctatgaggaactacacatccacagccagtccatgatgggcttgggcggcgacgaggacaagatggagaatggcagtgggggcggcggcttctttgagtctttcaagcgggtcatccggagccgcagccagtccatggatgccatggggctgagcaacaagaagcccaacaccgtgtccaccagccacagcgggagcttcgcgcccaacaaccccgacctggccaaggcggctggaatatcattgcttattcctgggaaaagtgcgagtagattcggacgccggggcagtgccataggcataggaaccgtggaagaggttgtcgtccgcggggccgccggctctggaggctgcctgcacgcgctgttctctgctcgctctcaggacggaggccatattggggacgttgcccctctgcccccgggacaggccccagggcgtgcgggatggagtggcggcagctccgatggcactcagcacctgctttggggcctgtcactgattgtccctgggaagagccccacgaggaagaagtcgggcccgttcggctcccgccgcagcagcgccattggcatcgagaacatacaggaggtgcaggagaagagggagagccctccggctggtcagaagaccccagacagcgggcacgtctcacaggagcccaagtcggagaactcatccactcagagctccccagagatgcccacgaccaagaacagagcggagaccgcagcgcagagagcagaggcgctcaagctcccgctcctcgtccagtgccagcagcttcgccagcgtggtggaggagacggagggtgtggacggagaggacacaggcctggagagcgtgtcatcctcaggaacaccccacaagcgggactccttcatctatagcacgtggctggaggacagtgtcagcaccactagtgggggcagctccccaggcccctctcgatcaccccacccagacgccggcaagttgggggaccctgcgtgtcccgagatcaagatccagctggaagcatctgagcagcacatgccccagctgggctgttagccgggccaccccctctgaaggtgaaactgagcagatgaggccacagaagcacaaggggaaggtgccgtgtcaagcccaggcagacgagacctctgccctgaagaccaacaccagcccgtgggctgccccctgcctccccaccctccccatggcccacccatctgggctgtctctgcagggcagagccgtccagacctgggatcagggaagctgctggcatcgtccccacccccagcctgggggtctgggctggggcagggattgctcagtggaagcaggactgggggtctggcttgccccctccctgggcctccatcacccctgagcatccctctggactcagagggaacaaggtgggagagagagtttgagacagctccgtgtggagagcttagcccctggaggcagcacaaggaggatgtgatatgtgggggagtgagcactgggttgggagccgggtcctggtttccaatttgggttctgctgtgtgactctgggcaagtcactctccctctctgggcatgtctgctacaaatggacaagattatttcagaggtcactgaagactgtgattacatgcacctgccttagaaggtaggattttcttcccagggacctcctatcaccctaccctgcttcttgaggtccctggagccccaggtgggctgaggggcagggagccggctgtgcccagtatgcctcctggaccctccagttctgccacaggtctgccgatgccctgtccactgcctacacatgacagacaagtaaccccctcatgggggatggggacctacctggctcctcagccagcacccagcttaacccctgccatcccatgctgggccctccaggccaagagtctcagctggccgagagtccaggccttgcctcccccgaccgccatggagggggcagcccggcacagctgctgggagcccttgtgtgtctggtcacactttttaggcgtcacgccaaaggccagcctcctggccccaatacccattttggaagcccctgtggccgtgtggatgtcggtaacagttgtataaaataaattctatttatcgctattgt

SEQ ID NO: 1932 - DNA, 3169 bp, Homo sapiens
  source 1..3169: mol_type = genomic DNA
atggcacagctgcggcccgcggtgccacccggccgtccgcggaggggctcgctgcccgcgggggccagctggcagaacacagatctatttgagatgattgagaagatgcagggaagcaggatggatgaacaacgctgctccttcccgccgcccctcaaaacagaggaggactacattccatacccgagcgtgcacgaggtcttggggcgagaaggacccttccccctcatcctgctgccccagtttgggggctactggattgagggcaccaaccacgaaatcaccagcatccccgagacagagccactgcagtcgcccacaaccaaggtgaagctcgagtgcaaccccacagcccgcatctaccggaagcactttctcggcaaggagcatttcaattactactcactggacgctgccctcggccaccttgtcttctcactcaagtacgatgtcatcggggaccaagagcacctgcggctgctgctcaggaccaagtgccggacataccatgatgtcatccccatctcctgcctcaccgagttccctaatgttgtccagatggcaaagttggtgtgtgaagacgtcaatgtggatcggttctatcctgtgctctaccccaaggcttcccggctcatcgtcacctttgacgagcatgtcatcagcaataacttcaagtttggcgtcatttatcagaagcttgggcagacctccgaggaagaactcttcagcaccaatgaggaaagtcccgctttcgtggagttccttgaatttcttggccagaaggtcaaactgcaggactttaaggggttccgaggaggcctggacgtgacccacgggcagacggggaccgaatctgtgtactgcaacttccgcaacaaggagatcatgtttcacgtgtccaccaagctgccatacacggaaggggacgcccagcagttgcagcggaagcggcacatcgggaacgacatcgtggctgtggtcttccaggatgagaacactcctttcgtgcccgacatgatcgcgtccaacttcctgcatgcctacgtcgtggtgcaggctgagggcgggggccctgatggccccctctacaaggtctctgtcactgcaagagatgatgtgcccttctttggaccccccctcccggaccccgctgtgttcaggaaggggcctgagttccaggaatttttgctgacaaagctgatcaatgctgaatatgcctgctacaaggcagagaagtttgccaaactggaggagcggacgcgggccgccctcctggagacgctctatgaggaactacacatccacagccagtccatgatgggcttgggcggcgacgaggacaagatggagaatggcagtgggggcggcggcttctttgagtctttcaagcgggtcatccggagccgcagccagtccatggatgccatggggctgagcaacaagaagcccaacaccgtgtccaccagccacagcgggagcttcgcgcccaacaaccccgacctggccaaggcggctggaatatcactgattgtccctgggaagagccccacgaggaagaagtcgggcccgttcggctcccgccgcagcagcgccattggcatcgagaacatacaggaggtgcaggagaagagggagagccctccggctggtcagaagaccccagacagcgggcacgtctcacaggagcccaagtcggagaactcatccactcagagctccccagagatgcccacgaccaagaacagagcggagaccgcagcgcagagagcagaggcgctcaaggacttctcccgctcctcgtccagtgccagcagcttcgccagcgtggtggaggagacggagggtgtggacggagaggacacaggcctggagagcgtgtcatcctcaggaacaccccacaagcgggactccttcatctatagcacgtggctggaggacagtgtcagcaccactagtgggggcagctccccaggcccctctcgatcaccccacccagacgccggcaagttgggggaccctgcgtgtcccgagatcaagatccagctggaagcatctgagcagcacatgccccagctgggctgttagccgggccaccccctctgaaggtgaaactgagcagatgaggccacagaagcacaaggggaaggtgccgtgtcaagcccaggcagacgagacctctgccctgaagaccaacaccagcccgtgggctgccccctgcctccccaccctccccatggcccacccatctgggctgtctctgcagggcagagccgtccagacctgggatcagggaagctgctggcatcgtccccacccccagcctgggggtctgggctggggcagggattgctcagtggaagcaggactgggggtctggcttgccccctccctgggcctccatcacccctgagcatccctctggactcagagggaacaaggtgggagagagagtttgagacagctccgtgtggagagcttagcccctggaggcagcacaaggaggatgtgatatgtgggggagtgagcactgggttgggagccgggtcctggtttccaatttgggttctgctgtgtgactctgggcaagtcactctccctctctgggcatgtctgctacaaatggacaagattatttcagaggtcactgaagactgtgattacatgcacctgccttagaaggtaggattttcttcccagggacctcctatcaccctaccctgcttcttgaggtccctggagccccaggtgggctgaggggcagggagccggctgtgcccagtatgcctcctggaccctccagttctgccacaggtctgccgatgccctgtccactgcctacacatgacagacaagtaaccccctcatgggggatggggacctacctggctcctcagccagcacccagcttaacccctgccatcccatgctgggccctccaggccaagagtctcagctggccgagagtccaggccttgcctcccccgaccgccatggagggggcagcccggcacagctgctgggagcccttgtgtgtctggtcacactttttaggcgtcacgccaaaggccagcctcctggccccaatacccattttggaagcccctgtggccgtgtggatgtcggtaacagttgtataaaataaattctatttatcgctattgtacccaga

SEQ ID NO: 1933 - DNA, 3264 bp, Homo sapiens
  source 1..3264: mol_type = genomic DNA
ggagctcagcgctgcggggcccggacccgggcgcgcgcgggccaggagccggctgggccagctgaagtgccgccccggcgggggccgggccgggccgcgctcaggatggcacagctgcggcccgcggtgccacccggccgtccgcggaggggctcgctgcccgcgggggccagctggcagaacacagatctatttgagatgattgagaagatgcagggaagcaggatggatgaacaacgctgctccttcccgccgcccctcaaaacagaggaggactacattccatacccgagcgtgcacgaggtcttggggcgagaaggacccttccccctcatcctgctgccccagtttgggggctactggattgagggcaccaaccacgaaatcaccagcatccccgagacagagccactgcagtcgcccacaaccaaggtgaagctcgagtgcaaccccacagcccgcatctaccggaagcactttctcggcaaggagcatttcaattactactcactggacgctgccctcggccaccttgtcttctcactcaagtacgatgtcatcggggaccaagagcacctgcggctgctgctcaggaccaagtgccggacataccatgatgtcatccccatctcctgcctcaccgagttccctaatgttgtccagatggcaaagttggtgtgtgaagacgtcaatgtggatcggttctatcctgtgctctaccccaaggcttcccggctcatcgtcacctttgacgagcatgtcatcagcaataacttcaagtttggcgtcatttatcagaagcttgggcagacctccgaggaagaactcttcagcaccaatgaggaaagtcccgctttcgtggagttccttgaatttcttggccagaaggtcaaactgcaggactttaaggggttccgaggaggcctggacgtgacccacgggcagacggggaccgaatctgtgtactgcaacttccgcaacaaggagatcatgtttcacgtgtccaccaagctgccatacacggaaggggacgcccagttgcagcggaagcggcacatcgggaacgacatcgtggctgtggtcttccaggatgagaacactcctttcgtgcccgacatgatcgcgtccaacttcctgcatgcctacgtcgtggtgcaggctgagggcgggggccctgatggccccctctacaaggtctctgtcactgcaagagatgatgtgcccttctttggaccccccctcccggaccccgctgtgttcaggaaggggcctgagttccaggaatttttgctgacaaagctgatcaatgctgaatatgcctgctacaaggcagagaagtttgccaaactggaggagcggacgcgggccgccctcctggagacgctctatgaggaactacacatccacagccagtccatgatgggcttgggcggcgacgaggacaagatggagaatggcagtgggggcggcggcttctttgagtctttcaagcgggtcatccggagccgcagccagtccatggatgccatggggctgagcaacaagaagcccaacaccgtgtccaccagccacagcgggagcttcgcgcccaacaaccccgacctggccaaggcggctggaatatcactgattgtccctgggaagagccccacgaggaagaagtcgggcccgttcggctcccgccgcagcagcgccattggcatcgagaacatacaggaggtgcaggagaagagggagagccctccggctggtcagaagaccccagacagcgggcacgtctcacaggagcccaagtcggagaactcatccactcagagctccccagagatgcccacgaccaagaacagagcggagaccgcagcgcagagagcagaggcgctcaaggacttctcccgctcctcgtccagtgccagcagcttcgccagcgtggtggaggagacggagggtgtggacggagaggacacaggcctggagagcgtgtcatcctcaggaacaccccacaagcgggactccttcatctatagcacgtggctggaggacagtgtcagcaccactagtgggggcagctccccaggcccctctcgatcaccccacccagacgccggcaagttgggggaccctgcgtgtcccgagatcaagatccagctggaagcatctgagcagcacatgccccagctgggctgttagccgggccaccccctctgaaggtgaaactgagcagatgaggccacagaagcacaaggggaaggtgccgtgtcaagcccaggcagacgagacctctgccctgaagaccaacaccagcccgtgggctgccccctgcctccccaccctccccatggcccacccatctgggctgtctctgcagggcagagccgtccagacctgggatcagggaagctgctggcatcgtccccacccccagcctgggggtctgggctggggcagggattgctcagtggaagcaggactgggggtctggcttgccccctccctgggcctccatcacccctgagcatccctctggactcagagggaacaaggtgggagagagagtttgagacagctccgtgtggagagcttagcccctggaggcagcacaaggaggatgtgatatgtgggggagtgagcactgggttgggagccgggtcctggtttccaatttgggttctgctgtgtgactctgggcaagtcactctccctctctgggcatgtctgctacaaatggacaagattatttcagaggtcactgaagactgtgattacatgcacctgccttagaaggtaggattttcttcccagggacctcctatcaccctaccctgcttcttgaggtccctggagccccaggtgggctgaggggcagggagccggctgtgcccagtatgcctcctggaccctccagttctgccacaggtctgccgatgccctgtccactgcctacacatgacagacaagtaaccccctcatgggggatggggacctacctggctcctcagccagcacccagcttaacccctgccatcccatgctgggccctccaggccaagagtctcagctggccgagagtccaggccttgcctcccccgaccgccatggagggggcagcccggcacagctgctgggagcccttgtgtgtctggtcacactttttaggcgtcacgccaaaggccagcctcctggccccaatacccattttggaagcccctgtggccgtgtggatgtcggtaacagttgtataaaataaattctatttatcgctattgt

SEQ ID NO: 1934 - DNA, 3271 bp, Homo sapiens
  source 1..3271: mol_type = genomic DNA
ggccgcgggcaccagagtgccgagcccaggacgcccccggcccaggcccttggggtggacaagtccttcacttctcgccggagtgtgtggaggagcgatgggcagaaccagcacttccctcaggcactagacctgtcacgagtgaacttagttccctcctatactccttcactctaccctaagaacacagatctatttgagatgattgagaagatgcagggaagcaggatggatgaacaacgctgctccttcccgccgcccctcaaaacagaggaggactacattccatacccgagcgtgcacgaggtcttggggcgagaaggacccttccccctcatcctgctgccccagtttgggggctactggattgagggcaccaaccacgaaatcaccagcatccccgagacagagccactgcagtcgcccacaaccaaggtgaagctcgagtgcaaccccacagcccgcatctaccggaagcactttctcggcaaggagcatttcaattactactcactggacgctgccctcggccaccttgtcttctcactcaagtacgatgtcatcggggaccaagagcacctgcggctgctgctcaggaccaagtgccggacataccatgatgtcatccccatctcctgcctcaccgagttccctaatgttgtccagatggcaaagttggtgtgtgaagacgtcaatgtggatcggttctatcctgtgctctaccccaaggcttcccggctcatcgtcacctttgacgagcatgtcatcagcaataacttcaagtttggcgtcatttatcagaagcttgggcagacctccgaggaagaactcttcagcaccaatgaggaaagtcccgctttcgtggagttccttgaatttcttggccagaaggtcaaactgcaggactttaaggggttccgaggaggcctggacgtgacccacgggcagacggggaccgaatctgtgtactgcaacttccgcaacaaggagatcatgtttcacgtgtccaccaagctgccatacacggaaggggacgcccagcagttgcagcggaagcggcacatcgggaacgacatcgtggctgtggtcttccaggatgagaacactcctttcgtgcccgacatgatcgcgtccaacttcctgcatgcctacgtcgtggtgcaggctgagggcgggggccctgatggccccctctacaaggtctctgtcactgcaagagatgatgtgcccttctttggaccccccctcccggaccccgctgtgttcaggaaggggcctgagttccaggaatttttgctgacaaagctgatcaatgctgaatatgcctgctacaaggcagagaagtttgccaaactggaggagcggacgcgggccgccctcctggagacgctctatgaggaactacacatccacagccagtccatgatgggcttgggcggcgacgaggacaagatggagaatggcagtgggggcggcggcttctttgagtctttcaagcgggtcatccggagccgcagccagtccatggatgccatggggctgagcaacaagaagcccaacaccgtgtccaccagccacagcgggagcttcgcgcccaacaaccccgacctggccaaggcggctggaatatcactgattgtccctgggaagagccccacgaggaagaagtcgggcccgttcggctcccgccgcagcagcgccattggcatcgagaacatacaggaggtgcaggagaagagggagagccctccggctggtcagaagaccccagacagcgggcacgtctcacaggagcccaagtcggagaactcatccactcagagctccccagagatgcccacgaccaagaacagagcggagaccgcagcgcagagagcagaggcgctcaaggacttctcccgctcctcgtccagtgccagcagcttcgccagcgtggtggaggagacggagggtgtggacggagaggacacaggcctggagagcgtgtcatcctcaggaacaccccacaagcgggactccttcatctatagcacgtggctggaggacagtgtcagcaccactagtgggggcagctccccaggcccctctcgatcaccccacccagacgccggcaagttgggggaccctgcgtgtcccgagatcaagatccagctggaagcatctgagcagcacatgccccagctgggctgttagccgggccaccccctctgaaggtgaaactgagcagatgaggccacagaagcacaaggggaaggtgccgtgtcaagcccaggcagacgagacctctgccctgaagaccaacaccagcccgtgggctgccccctgcctccccaccctccccatggcccacccatctgggctgtctctgcagggcagagccgtccagacctgggatcagggaagctgctggcatcgtccccacccccagcctgggggtctgggctggggcagggattgctcagtggaagcaggactgggggtctggcttgccccctccctgggcctccatcacccctgagcatccctctggactcagagggaacaaggtgggagagagagtttgagacagctccgtgtggagagcttagcccctggaggcagcacaaggaggatgtgatatgtgggggagtgagcactgggttgggagccgggtcctggtttccaatttgggttctgctgtgtgactctgggcaagtcactctccctctctgggcatgtctgctacaaatggacaagattatttcagaggtcactgaagactgtgattacatgcacctgccttagaaggtaggattttcttcccagggacctcctatcaccctaccctgcttcttgaggtccctggagccccaggtgggctgaggggcagggagccggctgtgcccagtatgcctcctggaccctccagttctgccacaggtctgccgatgccctgtccactgcctacacatgacagacaagtaaccccctcatgggggatggggacctacctggctcctcagccagcacccagcttaacccctgccatcccatgctgggccctccaggccaagagtctcagctggccgagagtccaggccttgcctcccccgaccgccatggagggggcagcccggcacagctgctgggagcccttgtgtgtctggtcacactttttaggcgtcacgccaaaggccagcctcctggccccaatacccattttggaagcccctgtggccgtgtggatgtcggtaacagttgtataaaataaattctatttatcgctattgta

SEQ ID NO: 1935 - DNA, 1633 bp, Homo sapiens
  source 1..1633: mol_type = genomic DNA
gcgtctgccaatgatccaggagccgctcctttccactcgggaaaccttcagaggagtctcagaaaggacacggctggctgcttttctcagcgccgaagccgcgccatgctcgtcctcagaagcgccctgactcgggcgctggcctcacggacgctggcgcctcagatgtgctcatcttttgctacgggacccagacaatacgatggaatattctatgaatttcgttcttattaccttaagccctcaaagatgaatgagttcctggaaaattttgagaaaaacgctcatcttcggacagctcactctgaattggttggatactggagtgtagaatttggaggcagaatgaatacagtgtttcatatttggaagtatgataattttgctcatcgaactgaagttcggaaagccttggccaaagataaggaatggcaagaacaattcctcattccaaatttggctctcattgataaacaagagagtgagattacttatctggtaccatggtgcaaattagaaaaacctccaaaagaaggagtctatgaactggccacttttcagatgaaacctggtgggccagctctgtggggtgatgcatttaaaagggcagttcatgctcatgtcaatctaggctacacaaaactagttggagtgttccacacagagtacggagcactcaacagagttcatgttctttggtggaatgagagtgcagatagtcgtgcagctgggagacataagtcccatgaggatcccagagttgtggcagctgttcgggaaagtgtcaactacctagtatctcagcagaatatgcttctgattcctacatcgttttcaccactgaaatagttttctactgaaatacaaaacatttcattaactgctataggatctgtctgctaatggtgcttaaattctcccaagaggttctcacttttatttgaaggaggtgttaagttaatttgctatgtttcttgcattatgaaggctacatctgtgctttgtaagtaccacttcaaaaaatagttctgtttactttctgcatggtatttcagtgtctgtcatacattaaaaatacttgtcactgttttaagatcttgactcttcatttgtttcagaatagctcttctactgtattctgacaactctttgctttatagcattttgttgtattcaaatgataatggtagcatttccatgcttgtgacagcatttttaagttattaatatattttatcaacctttccatcatgtctgttttcctggttttttttggttgttttttgaccagtaaaatttattttgtaataccaaataggatttaagaaaattaacgtatttctttactatggaaaaccacattgtcatttgtgacatcatctatattaaatatggttttcacattagttatttgtcacttacttggaaaatgatgctgttaggtcctggtattaaaaatctagaaaagacttgttggtttatgtgctgaaatgtctttatttataattaattttaactactatttacttcatttcggatcctgtttaacaaagatacttgagacatccatttgttttaatgaaatctgtatggatatggaaatgcttgccctaataaaagcctacatatacct

SEQ ID NO: 1936 - DNA, 4266 bp, Homo sapiens
  source 1..4266: mol_type = genomic DNA
gggggctgtagggagggggaccagtggcagagggaccttaggtgatccttagaaataaaggctagcttctgttcgaccttggagtagggcgaagaggtgtagacaggcctggagaagcgaggtaaaagcctgagtaaaagcaagaagttggagaatatgagatacatctcatctctagtaaatacttaaatgacttcccctcctcccggagtcaagcacaattcggggatgcaatgacggacgtaggtgaagacactgcgggaacttacagacaaaactggtttgtggcctgtttgattcctgtcagaggtttgctgacccaagacagtatcgaaaatgcatattaagtcaattattctagagggattcaagtcctatgctcagaggaccgaagtcaatggttttgaccccctcttcaatgctatcactggcttaaatggtagtgggaaatccaacatattggactccatctgctttttgctgggcatctccaacctgtctcaggttcgggcttctaatttacaagatttagtttacaaaaatgggcaggctggtattaccaaagcctctgtgtcaatcacttttgataattctgacaaaaagcaaagtcctttaggatttgaggttcatgatgaaatcacagtaacaaggcaggtggttattggtggtagaaataaatatttaatcaatggagtcaatgccaacaacaccagagtacaggatctcttctgttctgttggccttaatgttaacaaccctcactttctcatcatgcagggccgaattacaaaagtattgaatatgaaacctccagagattttatccatgatagaagaagcagctggaaccaggatgtatgaatacaaaaaaatagctgcacagaaaactatagaaaaaaaggaggctaagctgaaagaaattaagacgatacttgaagaagagattactccaaccattcaaaaattaaaagaggaaagatcgtcctacttggagtaccaaaaagtaatgagagaaatagaacatttgagtcgtttatatattgcttatcagtttttgctggctgaagataccaaagtacgctcagctgaggaattaaaagaaatgcaagataaagttataaagcttcaggaagaattgtctgagaatgataaaaaaataaaagcacttaatcatgaaatagaagaattggaaaaaagaaaagataaggaaactggaggtatacttcgatctttagaagatgctcttgcagaggctcagcgagttaatactaaatctcaaagcgcatttgatctcaagaagaaaaatctggcatgtgaggaaagcaaacgcaaagagctggaaaaaaatatggttgaggactcaaaaactttagcagcaaaggaaaaagaggttaaaaagataacagatggactgcatgcccttcaagaagcaagtaataaagatgctgaagctctggcagctgcacagcagcacttcaatgctgtttccgctggcctgtccagtaatgaagatggagcagaagcaactcttgctggtcaaatgatggcctgtaaaaatgatataagtaaagctcagacagaagccaaacaggctcagatgaagttgaagcatgctcaacaggaattaaagaataaacaagctgaagttaagaagatggatagtggctacaggaaggatcaagaagctctagaagctgtaaaaagacttaaagaaaaacttgaagctgaaatgaaaaagctaaattatgaagaaaataaagaggaaagccttttggaaaagcgcaggcagctgtctcgtgatattggtagattgaaagaaacatatgaagctctattagccagatttcccaatcttcgatttgcatacaaggatccagagaagaactggaatagaaattgtgtgaaaggacttgtggcttctctgattagtgtgaaagacacttctgcaaccacagctttagaattagtggctggagaacgactctacaatgttgtagtagacacagaagttactggtaaaaagctactagaaaggggggaactgaaacgtcgatacactataattccactcaataaaatttcagccagatgtattgcaccagaaactctgagagttgctcagaatcttgttggccctgacaacgttcatgtggctctttccttggttgaatataaaccagaacttcagaaagcaatggagtttgtctttggaacaacatttgtttgtgacaatatggataatgccaaaaaagtggcctttgataagaggataatgactagaactgtaactctcggaggtgatgtgtttgatcctcatgggacattgagtggaggtgctcgatcccaggcagcttccattttaaccaagtttcaagaactcaaagatgttcaggatgaactgagaatcaaagagaatgagctgcgggctctagaagaggaattagcaggtcttaaaaacactgctgaaaagtatcgccaactaaaacagcagtgggagatgaaaactgaagaggcagatttattacaaaccaagctccagcaaagctcatatcacaagcaacaagaagaattagatgcccttaaaaaaaccattgaggaaagtgaggagactttgaaaaacactaaagaaatccaaagaaaagcagaagaaaaatatgaagtattggaaaataaaatgaaaaatgcagaagctgaaagagagcgagaactgaaagatgctcagaaaaaactggattgtgccaaaacaaaggcagatgcatctagcaagaagatgaaagaaaaacaacaggaagttgaagctatcactctggaactggaagagctcaagagagagcatacatcttacaaacaacagcttgaagctgtaaatgaagctatcaaatcctatgaaagtcagattgaagtaatggcagctgaggtggctaaaaataaggagtcagtaaataaagctcaagaagaggtgaccaagcaaaaagaggtgataacagcccaagacactgtaattaaagctaaatatgcagaagtggcaaaacacaaggagcaaaacaatgattctcagcttaaaattaaggaattagaccacaacatcagcaaacataaacgggaggctgaagatggtgctgcaaaggtatccaaaatgttgaaagattatgactggattaatgcagagagacacctctttggccaacccaatagtgcctatgatttcaaaactaacaaccctaaagaagctggtcagagacttcagaagttgcaagaaatgaaggagaaactaggaagaaatgtcaatatgagagctatgaatgtattgacagaagctgaagagcgatacaatgacttgatgaagaagaagagaattgtagaaaatgacaaatccaaaattcttacaactatagaagaccttgaccagaagaaaaaccaagccctaaatattgcatggcaaaaggtgaacaaggactttgggtctattttttctactcttttgcctggtgctaatgctatgcttgcaccaccagagggtcaaactgttttggatggtctggagttcaaggttgccttgggaaatacctggaaagaaaacctaactgaacttagtggtggtcagaggtctttagtggccttgtcattaatactgtccatgcttctcttcaaacctgctccaatttatatccttgatgaggtagatgcagccttggatctttctcatacccaaaacattggacagatgctgcgtactcatttcacacattctcagttcattgtggtgtcactaaaagaaggtatgttcaacaatgcaaacgttcttttcaaaaccaagtttgtggatggtgtttctacagtagccagatttactcaatgtcaaaatggaaagatttcaaaggaagcaaaatccaaggcaaaaccacccaaaggagcacatgtggaagtttaaactacaaagttatttcttcatcttgacctgtttttttaaatgtaaacttttaaggacttgagataactaatttgtttatatacaaaaattaatgttactgtgttacttaacccatgttttctctttatataatcacttatcgcttacaaatgagcatatattcctcatctcttaactagtctaattatggtccaattattgtggttgtgattttatgcatatcatcaaatgtttttttcttatgcgggtcttttatatattagggatcctgagatacccgattctatatgtaaaagctaatatacaaaaaagcagattaaattacatgataaatgt

SEQ ID NO: 1937 - DNA, 5909 bp, Homo sapiens
  source 1..5909: mol_type = genomic DNA
cggcgcgggtgttgagagcggtgtggcaggtgttgtagccgctatggtgaagttcgctttgtagcggccccggctagagagttgttctgttccctgcctttgtgacccggaggagcttttggggtgcgtcaagcccctggcctgaggcagcgaactggtttgtggcctgtttgattcctgtcagaggtttgctgacccaagacagtatcgaaaatgcatattaagtcaattattctagagggattcaagtcctatgctcagaggaccgaagtcaatggttttgaccccctcttcaatgctatcactggcttaaatggtagtgggaaatccaacatattggactccatctgctttttgctgggcatctccaacctgtctcaggttcgggcttctaatttacaagatttagtttacaaaaatgggcaggctggtattaccaaagcctctgtgtcaatcacttttgataattctgacaaaaagcaaagtcctttaggatttgaggttcatgatgaaatcacagtaacaaggcaggtggttattggtggtagaaataaatatttaatcaatggagtcaatgccaacaacaccagagtacaggatctcttctgttctgttggccttaatgttaacaaccctcactttctcatcatgcagggccgaattacaaaagtattgaatatgaaacctccagagattttatccatgatagaagaagcagctggaaccaggatgtatgaatacaaaaaaatagctgcacagaaaactatagaaaaaaaggaggctaagctgaaagaaattaagacgatacttgaagaagagattactccaaccattcaaaaattaaaagaggaaagatcgtcctacttggagtaccaaaaagtaatgagagaaatagaacatttgagtcgtttatatattgcttatcagtttttgctggctgaagataccaaagtacgctcagctgaggaattaaaagaaatgcaagataaagttataaagcttcaggaagaattgtctgagaatgataaaaaaataaaagcacttaatcatgaaatagaagaattggaaaaaagaaaagataaggaaactggaggtatacttcgatctttagaagatgctcttgcagaggctcagcgagttaatactaaatctcaaagcgcatttgatctcaagaagaaaaatctggcatgtgaggaaagcaaacgcaaagagctggaaaaaaatatggttgaggactcaaaaactttagcagcaaaggaaaaagaggttaaaaagataacagatggactgcatgcccttcaagaagcaagtaataaagatgctgaagctctggcagctgcacagcagcacttcaatgctgtttccgctggcctgtccagtaatgaagatggagcagaagcaactcttgctggtcaaatgatggcctgtaaaaatgatataagtaaagctcagacagaagccaaacaggctcagatgaagttgaagcatgctcaacaggaattaaagaataaacaagctgaagttaagaagatggatagtggctacaggaaggatcaagaagctctagaagctgtaaaaagacttaaagaaaaacttgaagctgaaatgaaaaagctaaattatgaagaaaataaagaggaaagccttttggaaaagcgcaggcagctgtctcgtgatattggtagattgaaagaaacatatgaagctctattagccagatttcccaatcttcgatttgcatacaaggatccagagaagaactggaatagaaattgtgtgaaaggacttgtggcttctctgattagtgtgaaagacacttctgcaaccacagctttagaattagtggctggagaacgactctacaatgttgtagtagacacagaagttactggtaaaaagctactagaaaggggggaactgaaacgtcgatacactataattccactcaataaaatttcagccagatgtattgcaccagaaactctgagagttgctcagaatcttgttggccctgacaacgttcatgtggctctttccttggttgaatataaaccagaacttcagaaagcaatggagtttgtctttggaacaacatttgtttgtgacaatatggataatgccaaaaaagtggcctttgataagaggataatgactagaactgtaactctcggaggtgatgtgtttgatcctcatgggacattgagtggaggtgctcgatcccaggcagcttccattttaaccaagtttcaagaactcaaagatgttcaggatgaactgagaatcaaagagaatgagctgcgggctctagaagaggaattagcaggtcttaaaaacactgctgaaaagtatcgccaactaaaacagcagtgggagatgaaaactgaagaggcagatttattacaaaccaagctccagcaaagctcatatcacaagcaacaagaagaattagatgcccttaaaaaaaccattgaggaaagtgaggagactttgaaaaacactaaagaaatccaaagaaaagcagaagaaaaatatgaagtattggaaaataaaatgaaaaatgcagaagctgaaagagagcgagaactgaaagatgctcagaaaaaactggattgtgccaaaacaaaggcagatgcatctagcaagaagatgaaagaaaaacaacaggaagttgaagctatcactctggaactggaagagctcaagagagagcatacatcttacaaacaacagcttgaagctgtaaatgaagctatcaaatcctatgaaagtcagattgaagtaatggcagctgaggtggctaaaaataaggagtcagtaaataaagctcaagaagaggtgaccaagcaaaaagaggtgataacagcccaagacactgtaattaaagctaaatatgcagaagtggcaaaacacaaggagcaaaacaatgattctcagcttaaaattaaggaattagaccacaacatcagcaaacataaacgggaggctgaagatggtgctgcaaaggtatccaaaatgttgaaagattatgactggattaatgcagagagacacctctttggccaacccaatagtgcctatgatttcaaaactaacaaccctaaagaagctggtcagagacttcagaagttgcaagaaatgaaggagaaactaggaagaaatgtcaatatgagagctatgaatgtattgacagaagctgaagagcgatacaatgacttgatgaagaagaagagaattgtagaaaatgacaaatccaaaattcttacaactatagaagaccttgaccagaagaaaaaccaagccctaaatattgcatggcaaaaggtgaacaaggactttgggtctattttttctactcttttgcctggtgctaatgctatgcttgcaccaccagagggtcaaactgttttggatggtctggagttcaaggttgccttgggaaatacctggaaagaaaacctaactgaacttagtggtggtcagaggtctttagtggccttgtcattaatactgtccatgcttctcttcaaacctgctccaatttatatccttgatgaggtagatgcagccttggatctttctcatacccaaaacattggacagatgctgcgtactcatttcacacattctcagttcattgtggtgtcactaaaagaaggtatgttcaacaatgcaaacgttcttttcaaaaccaagtttgtggatggtgtttctacagtagccagatttactcaatgtcaaaatggaaagatttcaaaggaagcaaaatccaaggcaaaaccacccaaaggagcacatgtggaagtttaaactacaaagttatttcttcatcttgacctgtttttttaaatgtaaacttttaaggacttgagataactaatttgtttatatacaaaaattaatgttactgtgttacttaacccatgttttctctttatataatcacttatcgcttacaaatgagcatatattcctcatctcttaactagtctaattatggtccaattattgtggttgtgattttatgcatatcatcaaatgtttttttcttatgcgggtcttttatatattagggatcctgagatacccgattctatatgtaaaagctaatatacaaaaaagcagattaaattacatgataaatgtagctgatcatcagtgtttaattgatttaattcctaaggcaatattaatgtgttttctaaagtcattcaggtaaggaagaattataaatcaggtaactggaccaacaaagggaacacatataaagctattatgcatgcatggagccgtttgaggctagttttttaaggccacaactccagacccctgatttagactgagataggaaacagatcttgaaagaatccttattttaatgatacatgaatatcatgttcctatacgcttaataattggtctctacgttttaatgatacatgaatatcatgttcctatacgcttaataattggtctctacgactttaatgtttttgtttttttaagctgtgtaagtatttttaaatcaaagcttaggaggtgtgttgcgtggtactatctgctgcaaatttatctgaagtttgttaatattttccaagatttttgtcagccttttcataatccagtcattaacaacctattggtaaacaagaatgtaggtgccagtagactaaaccaaatttatttttccctgagtctgatatatatatgtataaatataaataactcaatccatctgttccaccaaaataactcaaaagttggatgattatttgtcttccgctttccagttcaaagggatgaaattcctttagaacttgaaagatgacactagcgaacaccatgagaatactgtctacagtttttggtacgtcatcactagaacagtgaccccaaactgaatcatgaaaggtctgacatgatgtaatctgatcttccatgtgttattttggccccacatctcttcttgattttttagtcttatttccttagtgttattatcatacttcccctgatatatggccgtacttcctggccctgggcttgacatttcccacccttcattctccatacatatgagatgtcagaaaacatgcagtaattgatattatgggacacattggaaaggattgaatctggaattagttctgtccactgtggaggggagaggaaataatgctgtaaatgttgagttacagaaagtccaatgtcaaatatagtttttttgtttcctttcaaatgtattacagactgtgccaaaacagttaccaattcacactgtcaatattaaagtataccatagtatacaaattagtcagtacttgctgttaattttaatatttctgatttaacagttagttattaagtggtacttcattgctgttttagccaacgttttaaaaataatttgggagtttgactattttggcttacgtactcatttccttttctctgctaaaaatgttttgcttgtgtgcgttcctgatttttgtcttgtataatcttgatctttgaaaaccctcaaacatgtattaaattgttgtaactttttttcattagagggaagacattaaggggattggggacatttgtttcacacatctgcagtaatatgagttaactaatatttaacaagctctttctttacattagctgctgttctcatttgtatgtattgtcatatttaatcctcagagtaacctagtgaggtaaatactgttgttgtcagcatggtgtaatcgaggaattgagtgagttgagcagaaaagttaggaaacttgctcagggtgataatacagttaggagtgtcagggcccatggacaaatcttgtcagtctccagaacctaagatatactacgtcactgacagcttgaacatttgtatttattgtacagaataaatttaagaaaaa

SEQ ID NO: 1938 - DNA, 2171 bp, Homo sapiens
  source 1..2171: mol_type = genomic DNA
gatgtcacctttcaacatcaccagtttgaacttacaatacttaagtcctggcaagtcataagtggggaaaatgtctctcccaagattccaaagagtaaactttgggccatatgataattacattccagtcagtgaattaagcaaaaaatcatggaatcagcaacactttgccctgttatttcccaaaccacaacggccaggaaccaaaaggagatcaaaaccttctcaaatacgggacaacacggtttctataattgatgaagaacaattaagaggagatcgtagacaaccattatggatgtaccgttctttaatgagaatttctgagagaccatctgtttatttagctgccaggaggcagcctctcaaaccaactcgtactgtcgaggtggattctaaagcagcagaaattggtaagaaaggtgaagacaagacaacacagaaggacacaacagattcggaatcagaattaaaacaaggaaaaaaagattcaaagaaaggcaaggatatagagaaaggaaaagaagaaaagctagatgcaaagaaagatagcaaaaaaggtaaaaaggatgcagagaagggcaaagactcagcaacagaatctgaagatgaaaaaggaggtgcaaagaaagataacaaaaaagataaaaaggattcaaacaaaggcaaagactcggcaacagaatctgaaggtgaaaaaggaggtacagagaaagatagcaaaaaaggtaaaaaggattcaaagaagggcaaggattcagccatagaattacaagctgtaaaagcagatgaaaagaaggatgaggatggaaaaaaagatgcaaacaaaggtgatgaatcgaaggatgccaagaaagatgcaaaggagattaaaaaaggtaagaaagataagaagaagcccagtagtacagacagtgactcaaaggatgatgtcaagaaagagtctaagaaggacgccacgaaagatgccaagaaagttgccaagaaagatactgagaaagaatctgctgattcaaagaaggatgcaaagaaaaatgctaagaaggatgcaaagaaggatgcaaagaagaatgcaaagaaggatgaaaagaaggatgcaaagaagaagggcaagtaggccttggataagaatttgaaccgaaagaataattcaaaagcatatttgatgaaacaatagtggtagtctgcagctgaatttgtgagaaaacaagaggcctcaaagaattaaataatttttaaaaggtggtaaagaaggatacaaaggagaactcagcagagatttataaaaatatataagaaagatgttaagaaaaattaaggggggatccattgaaagacttgaagaatacatatacttatattcggggatatgaaggattcaatgaatgatctctagaaagatttaaagaagaatattcagataaggatgttgaagataatgacactaaatctatggacacacacacacacacacacacacacacacacacacacacacacacacacacacagtttaatgaaggcttaaagaatccaaggagacagatgttgtatctatagatttaaaataatctcaagctgcatccacagatacaaaaaaatataggagccatgaaatgaagttaaacaccttgtagaaagcctactttcaagtaaatatagcattcctttggcaaaaagaaaaaaaaagtaaaagaaaagaaaaaaaatgtattaccacccgatgagcctacatctttctttctgaagtttaaacaaccacagtcatgtttatggttgttggatgtgccacttccaatccaaaagaagcacacttgtctcgctctgttgccctggctggagttcagtgacatgatctcaggcttactacagcctccaccttcaggttcaagtgattctcctgcctcagcctctctggtagctgggattacagggaaggaaaatagctggcatttcttgctggagaaagttatcacaagtggaaaggttaccctagaaacaaaagatgactaccgtgaggatggattggacattacaccacactggaaaagtgaaacatctcattcagttggtgatcttcctgtcatgaaagttgcttgacagctctaattacgaattgaacacattaaacacctggtgaaattatcaattaaaaacatctagtcaccata

SEQ ID NO: 1939 - DNA, 1910 bp, Homo sapiens
  source 1..1910: mol_type = genomic DNA
ctagaggacctgtgcaacaacctcttgaggatcgaatcttcactcccgctgtctcagcagtctacagcacggtaacacaagtggcaagacagccgggaacccctaccccatccccttattcagcacatgaaataaacaaggggcatccaaatcttgcggcaacgcccccgggacatgcatcgtcccctggactctctcaaaccccttatccctctggacagaatgcaggtccaaccacgctggtataccctcaaacccctcagacaatgaattcacaacctcaaacccgttctccgtttttccagaggcctcaaatacagcctcctagagctaccatcccgaacagcagtccttccattcgtcctggtgcacagacacccactgcagtgtaccaggctaatcagcacatcatgatggttaaccatctgcccatgccgtacccagtgccccaggggcctcagtactgtataccacagtaccgtcatagtggccctccttatgttgggcccccccaacaatatccagttcaaccaccggggccaggtcctttttatcctggaccaggacctggggacttccccaatgcttatggaacgcctttttacccaagtcagccggtgtatcagtcagcacctatcatagtgcctacgcagcaacagccgcctccagccaagagagagaaaaaaactataagaattcgggatccaaaccagggaggtaaagacataacagaggagattatgtctggaggtggcagcagaaatcctactccacccataggaagacccacgtccacacctactcctcctcagcagctgcccagccaggtccccgagcacagccctgtggtttatgggactgtggagagcgctcatcttgctgccagcacccctgtcactgcagctagcgaccagaagcaagaggagaagccaaaaccagatccagtgttaaagtctccttccccagtccttaggctagtcctcagtggagagaagaaagaacaagaaggccagacatctgaaactactgcaatagtatccatagcagagcttcctctgcctccatcacctaccactgtttcttctgttgctcgaagtacaattgcagcccccacctcttctgctcttagtagccaaccaatattcaccactgctatagatgacagatgtgaactctcatccccaagagaagacacaattcctatacccagcctcacatcttgcacagaaacatcagaccctttaccaacaaatgaaaatgatgatgatatatgcaagaaaccctgtagtgtagcacctaatgatattccactggtttctagtactaacctaattaatgaaataaatggagttagcgaaaaattatcagccacggagagcattgtggaaatagtaaaacaggaagtattgccattgactcttgaattggagattctcgaaaatcccccagaagaaatgaaactggagtgtatcccagctcccatcaccccttccacagttccttcctttcctccaactcctccaactcctccagcttctcctcctcacactccagtcattgttcctgctgctgccactactgttagttctccgagtgctgccatcacagtccagagagtcctagaggaggacgagagcataagaacttgccttagtgaagatgcaaaagagattcagaacaaaatagaggtagaagcagatgggcaaacagaagagattttggattctcaaaacttaaattcaagaaggagccctgtcccagaaacatcgaatgaatgctgaaattcctagtctggtttcttcagtggtgtgtttgtgttttagtacaacctgcaaaagagttactccattgtctaaaaatgcaaatgagaatttccaaatatacaaaatgcctccaaggtatatgtcacg

SEQ ID NO: 1940 - DNA, 1136 bp, Homo sapiens
  source 1..1136: mol_type = genomic DNA
cagaaacatcgaatgaatgctgaaattcctagtctggtttcttcagtggtgtgtttgtgttttagtacaacctgcaaaagagttactccattgtctaaaaatgcaaatgagaatttccaaatatacaaaatgcctccaagctcaaatagctataactgtaccaaagacatggaagaaaccaaaagatcggacccgaaccactgaagagatgttagaggcagaattggagcttaaagctgaagaggagctttccattgacaaagtacttgaatctgaacaagataaaatgagccaggggtttcatcctgaaagagacccctctgacctaaaaaaagtgaaagctgtggaagaaaatggagaagaagctgagccagtacgtaatggtgctgagagtgtttctgagggtgaaggaatagatgctaattcaggctccacagatagttctggtgatggggttacatttccatttaaaccagaatcctggaagcctactgatactgaaggtaagaagcagtatgacagggagtttctgctggacttccagttcatgcctgcctgtatacaaaaaccagagggcctgcctcctatcagtgatgtggttcttgacaagatcaaccaacccaaattgccaatgcgaactctggatcctcgaattttgcctcgaggaccagactttacaccagcctttgctgattttggaaggcagacacctggtggaagaggcgtacctgtaagtgcaagttccctacaactcacttagttagacactggcacagactccatgaaatcctacctcatggcaagacagcagcttttattcgttgattctagtcaagaagaagaagaagaggcaaagactatcctttccatactcatattaaagcagataaagaatacacttgagttctttttacttggcagaagctagtctgcattaatttggtcttgattttttttttccctattttttcaattgaggtgacctgcaaataggtttaaaaatagtgccaaccatggccagggatggtggctcaggtctgtaatgctagcactttgtggggtcaaggcaggaggatcacttgaggtcaggagttcaaggtcagcctgacaacaaagagagaccctgtctctaccac

SEQ ID NO: 1941 - DNA, 4675 bp, Homo sapiens
  source 1..4675: mol_type = genomic DNA
gcccccgggacatgcatcgtcccctggactctctcaaaccccttatccctctggacagaatgcaggtccaaccacgctggtataccctcaaacccctcagacaatgaattcacaacctcaaacccgttctccgtttttccagaggcctcaaatacagcctcctagagctaccatcccgaacagcagtccttccattcgtcctggtgcacagacacccactgcagtgtaccaggctaatcagcacatcatgatggttaaccatctgcccatgccgtacccagtgccccaggggcctcagtactgtataccacagtaccgtcatagtggccctccttatgttgggcccccccaacaatatccagttcaaccaccggggccaggtcctttttatcctggaccaggacctggggacttccccaatgcttatggaacgcctttttacccaagtcagccggtgtatcagtcagcacctatcatagtgcctacgcagcaacagccgcctccagccaagagagagaaaaaaactataagaattcgggatccaaaccagggaggtaaagacataacagaggagattatgtctggaggtggcagcagaaatcctactccacccataggaagacccacgtccacacctactcctcctcagcagctgcccagccaggtccccgagcacagccctgtggtttatgggactgtggagagcgctcatcttgctgccagcacccctgtcactgcagctagcgaccagaagcaagctcaaatagctataactgtaccaaagacatggaagaaaccaaaagatcggacccgaaccactgaagagatgttagaggcagaattggagcttaaagctgaagaggagctttccattgacaaagtacttgaatctgaacaagataaaatgagccaggggtttcatcctgaaagagacccctctgacctaaaaaaagtgaaagctgtggaagaaaatggagaagaagctgagccagtacgtaatggtgctgagagtgtttctgagggtgaaggaatagatgctaattcaggctccacagatagttctggtgatggggttacatttccatttaaaccagaatcctggaagcctactgatactgaaggtaagaagcagtatgacagggagtttctgctggacttccagttcatgcctgcctgtatacaaaaaccagagggcctgcctcctatcagtgatgtggttcttgacaagatcaaccaacccaaattgccaatgcgaactctggatcctcgaattttgcctcgaggaccagactttacaccagcctttgctgattttggaaggcagacacctggtggaagaggcgtacctttgttgaatgttgggtcacgaagatctcaacctggccaaagaagagaacccagaaagatcatcacagtttctgtaaaagaagatgtacacctgaaaaaggcagaaaatgcctggaagccaagccaaaaacgagacagccaagccgatgatcccgaaaacattaaaacccaggagctttttagaaaagttcgaagtatcttaaataaattgacaccacagatgttcaatcaactgatgaagcaagtgtcaggacttactgttgacacagaggagcggctgaaaggagttattgacctggtctttgagaaggctattgatgaacccagtttctctgtggcttacgcaaacatgtgtcgatgtctagtaacgctgaaagtacccatggcagacaagcctggtaacacagtgaatttccggaagctgctactgaaccgttgccagaaggagtttgaaaaagataaagcagatgatgatgtctttgagaagaagcagaaagaacttgaggctgccagtgctccagaggagaggacaaggcttcatgatgaactggaagaagccaaggacaaagcccggcggagatccattggcaacatcaagtttattggagaactctttaaactcaaaatgctgactgaagccatcatgcatgactgtgtggtgaagctgctaaagaaccatgatgaagaatccctggagtgcctgtgtcgcctgctcaccaccattggcaaagacttggactttgaaaaagcaaagccacgtatggaccagtactttaatcagatggagaaaattgtgaaagaaagaaaaacctcatctaggattcggttcatgcttcaagatgttatagacctaaggctgtgcaattgggtatctcgaagagcagatcaagggcctaaaactatcgaacagattcacaaagaggctaaaatagaagaacaagaagagcaaaggaaggtccagcaactcatgaccaaagagaagagaagaccaggtgtccagagagtggacgaaggtgggtggaacactgtacaaggggccaagaacagtcgggtactggacccctcaaaattcctaaaaatcactaagcctacaattgatgaaaaaattcagctggtacctaaagcacagctaggcagctggggaaaaggcagcagtggtggagcaaaggcaagtgagactgatgccttacggtcaagtgcttccagtttaaacagattctctgccctgcaacctccagcaccctcagggtccacgccatccacgcctgtagagtttgattcccgaaggaccttaactagtcgtggaagtatgggcagggagaagaatgacaagccccttccatctgcaacagctcggccaaatactttcatgaggggtggcagcagtaaagacctgctagacaatcagtctcaagaagagcagcggagagagatgctggagaccgtgaagcagctcacaggaggtgtggatgtggagaggaacagcactgaggctgagcgaaataaaacaagggagtcagcaaaaccagaaatttcagcaatgtcagctcatgacaaggctgcattatcagaagaggaactggagaggaagtcgaaatctatcattgatgaatttctacacattaatgattttaaggaagccatgcagtgtgtggaagagctgaatgcccagggcctactacatgtttttgtgagagtgggagtggagtccaccctggaaaggagccagatcaccagggatcacatgggccaattactctatcagctggtacagtcagaaaaactcagcaaacaggactttttcaaaggtttttcagaaactttggaattggcagatgacatggccattgatattccccatatttggttgtaccttgctgaactggtgacccccatgttaaaagaaggtggaatctccatgagagaacttaccatagaatttagcaaacctttacttcctgttggaagagctggggtcttgctatctgaaatattgcacctactatgcaaacaaatgagccataagaaagtgggagccttatggagggaggctgacctcagctggaaggactttttaccagaaggagaagatgtacataattttcttttggagcagaagttggacttcatagagtctgacagtccctgttcctctgaagcactttcaaagaaagaactgtctgccgaagagctgtataagcgactcgagaaactcattattgaggacaaagcgaatgatgaacagatctttgactgggtagaggctaatctagacgaaatccagatgagttcacctacattccttagagctttaatgactgctgtttgtaaagcagctattatagccgactcttctaccttcagagtggacactgctgttatcaagcagagagtgccgatcttactcaagtacctagactcagatacagagaaggaactgcaagcactttatgcactacaagcatcgatagtaaaacttgatcaacctgccaatttgctgcggatgttttttgattgtctatatgacgaggaggtgatctccgaggatgccttctacaaatgggagagcagcaaggaccctgcagagcagaatgggaagggcgtggctctgaaatctgtcacggcattcttcacgtggctgcgggaagcagaagaggagtctgaggataactaaaacttcaaatacacaaaatgaaacaaaagaaacaatttaagtatttttttaaaaagtttcacgtcttcgccaatcacagtgcagcaaggccaattctcgcagaaacccccacgtgtgcacgagtgggagaggggaaagagaaaaaaaggtgatcatggaggaaaaaggtactggataaaagtaaacttcaaaccttagggcgggagcactaaaaccaaaatacatgtattatttatagaaaatattttctgttttaatcttttctttttaaacaaggactcatacttaaaaaaatgtttagcaaaaaaaaaaaaagttgagaacttttaatttattttaaggactgcaaatgccagtgtaattttttaatttgcagtttctgtaaacaacttgtataatagaaaagcagagaaataaatttccctccccttcaagatgcacctcatgtttgttttaaggtatagcatttagtccagatttgagaaagtttggggtgaacaaggtaagaaagatttttttttttttggcatcaaatctttctgcctgcctctcagcttgcttcagaaaatttaaaaaatcacaatagtaatcaaaacatacataacattgaaacagaaggaaatgctgtggaccacagaactccaagaattgttt

SEQ ID NO: 1942 - DNA, 5046 bp, Homo sapiens
  source 1..5046: mol_type = genomic DNA
ccccatccccttattcagcacatgaaataaacaaggggcatccaaatcttgcggcaacgcccccgggacatgcatcgtcccctggactctctcaaaccccttatccctctggacagaatgcaggtccaaccacgctggtataccctcaaacccctcagacaatgaattcacaacctcaaacccgttctccgggaggattcagacctatccagtttttccagaggcctcaaatacagcctcctagagctaccatcccgaacagcagtccttccattcgtcctggtgcacagacacccactgcagtgtaccaggctaatcagcacatcatgatggttaaccatctgcccatgccgtacccagtgccccaggggcctcagtactgtataccacagtaccgtcatagtggccctccttatgttgggcccccccaacaatatccagttcaaccaccggggccaggtcctttttatcctggaccaggacctggggacttccccaatgcttatggaacgcctttttacccaagtcagccggtgtatcagtcagcacctatcatagtgcctacgcagcaacagccgcctccagccaagagagagaaaaaaactataagaattcgggatccaaaccagggaggtaaagacataacagaggagattatgtctggaggtggcagcagaaatcctactccacccataggaagacccacgtccacacctactcctcctcagctgcccagccaggtccccgagcacagccctgtggtttatgggactgtggagagcgctcatcttgctgccagcacccctgtcactgcagctagcgaccagaagcaagaggagaagccaaaaccagatccagtgttaaagtctccttccccagtccttaggctagtcctcagtggagagaagaaagaacaagaaggccagacatctgaaactactgcaatagtatccatagcagagcttcctctgcctccatcacctaccactgtttcttctgttgctcgaagtacaattgcagcccccacctcttctgctcttagtagccaaccaatattcaccactgctatagatgacagatgtgaactctcatccccaagagaagacacaattcctatacccagcctcacatcttgcacagaaacatcagaccctttaccaacaaatgaaaatgatgatgatatatgcaagaaaccctgtagtgtagcacctaatgatattccactggtttctagtactaacctaattaatgaaataaatggagttagcgaaaaattatcagccacggagagcattgtggaaatagtaaaacaggaagtattgccattgactcttgaattggagattctcgaaaatcccccagaagaaatgaaactggagtgtatcccagctcccatcaccccttccacagttccttcctttcctccaactcctccaactcctccagcttctcctcctcacactccagtcattgttcctgctgctgccactactgttagttctccgagtgctgccatcacagtccagagagtcctagaggaggacgagagcataagaacttgccttagtgaagatgcaaaagagattcagaacaaaatagaggtagaagcagatgggcaaacagaagagattttggattctcaaaacttaaattcaagaaggagccctgtcccagctcaaatagctataactgtaccaaagacatggaagaaaccaaaagatcggacccgaaccactgaagagatgttagaggcagaattggagcttaaagctgaagaggagctttccattgacaaagtacttgaatctgaacaagataaaatgagccaggggtttcatcctgaaagagacccctctgacctaaaaaaagtgaaagctgtggaagaaaatggagaagaagctgagccagtacgtaatggtgctgagagtgtttctgagggtgaaggaatagatgctaattcaggctccacagatagttctggtgatggggttacatttccatttaaaccagaatcctggaagcctactgatactgaaggtaagaagcagtatgacagggagtttctgctggacttccagttcatgcctgcctgtatacaaaaaccagagggcctgcctcctatcagtgatgtggttcttgacaagatcaaccaacccaaattgccaatgcgaactctggatcctcgaattttgcctcgaggaccagactttacaccagcctttgctgattttggaaggcagacacctggtggaagaggcgtacctttgttgaatgttgggtcacgaagatctcaacctggccaaagaagagaacccagaaagatcatcacagtttctgtaaaagaagatgtacacctgaaaaaggcagaaaatgcctggaagccaagccaaaaacgagacagccaagccgatgatcccgaaaacattaaaacccaggagctttttagaaaagttcgaagtatcttaaataaattgacaccacagatgttcaatcaactgatgaagcaagtgtcaggacttactgttgacacagaggagcggctgaaaggagttattgacctggtctttgagaaggctattgatgaacccagtttctctgtggcttacgcaaacatgtgtcgatgtctagtaacgctgaaagtacccatggcagacaagcctggtaacacagtgaatttccggaagctgctactgaaccgttgccagaaggagtttgaaaaagataaagcagatgatgatgtctttgagaagaagcagaaagaacttgaggctgccagtgctccagaggagaggacaaggcttcatgatgaactggaagaagccaaggacaaagcccggcggagatccattggcaacatcaagtttattggagaactctttaaactcaaaatgctgactgaagccatcatgcatgactgtgtggtgaagctgctaaagaaccatgatgaagaatccctggagtgcctgtgtcgcctgctcaccaccattggcaaagacttggactttgaaaaagcaaagccacgtatggaccagtactttaatcagatggagaaaattgtgaaagaaagaaaaacctcatctaggattcggttcatgcttcaagatgttatagacctaaggctgtgcaattgggtatctcgaagagcagatcaagggcctaaaactatcgaacagattcacaaagaggctaaaatagaagaacaagaagagcaaaggaaggtccagcaactcatgaccaaagagaagagaagaccaggtgtccagagagtggacgaaggtgggtggaacactgtacaaggggccaagaacagtcgggtactggacccctcaaaattcctaaaaatcactaagcctacaattgatgaaaaaattcagctggtacctaaagcacagctaggcagctggggaaaaggcagcagtggtggagcaaaggcaagtgagactgatgccttacggtcaagtgcttccagtttaaacagattctctgccctgcaacctccagcaccctcagggtccacgccatccacgcctgtagagtttgattcccgaaggaccttaactagtcgtggaagtatgggcagggagaagaatgacaagccccttccatctgcaacagctcggccaaatactttcatgaggggtggcagcagtaaagacctgctagacaatcagtctcaagaagagcagcggagagagatgctggagaccgtgaagcagctcacaggaggtgtggatgtggagaggaacagcactgaggctgagcgaaataaaacaagggagtcagcaaaaccagaaatttcagcaatgtcagctcatgacaaggctgcattatcagaagaggaactggagaggaagtcgaaatctatcattgatgaatttctacacattaatgattttaaggaagccatgcagtgtgtggaagagctgaatgcccagggcctactacatgtttttgtgagagtgggagtggagtccaccctggaaaggagccagatcaccagggatcacatgggccaattactctatcagctggtacagtcagaaaaactcagcaaacaggactttttcaaaggtttttcagaaactttggaattggcagatgacatggccattgatattccccatatttggttgtaccttgctgaactggtgacccccatgttaaaagaaggtggaatctccatgagagaacttaccatagaatttagcaaacctttacttcctgttggaagagctggggtcttgctatctgaaatattgcacctactatgcaaacaaatgagccataagaaagtgggagccttatggagggaggctgacctcagctggaaggactttttaccagaaggagaagatgtacataattttcttttggagcagaagttggacttcatagagtctgacagtccctgttcctctgaagcactttcaaagaaagaactgtctgccgaagagctgtataagcgactcgagaaactcattattgaggacaaagcgaatgatgaacagatctttgactgggtagaggctaatctagacgaaatccagatgagttcacctacattccttagagctttaatgactgctgtttgtaaagcagctattatagccgactcttctaccttcagagtggacactgctgttatcaagcagagagtgccgatcttactcaagtacctagactcagatacagagaaggaactgcaagcactttatgcactacaagcatcgatagtaaaacttgatcaacctgccaatttgctgcggatgttttttgattgtctatatgacgaggaggtgatctccgaggatgccttctacaaatgggagagcagcaaggaccctgcagagcagaatgggaagggcgtggctctgaaatctgtcacggcattcttcacgtggctgcgggaagcagaagaggagtctgaggataactaaaacttcaaatacacaaaatgaaacaaaagaaacaatttaagtatttttttaaaaagtttcacgtcttcgccaatcacagtgcagcaaggccaattctcgcagaaacccc

SEQ ID NO: 1943 - DNA, 2656 bp, Homo sapiens
  source 1..2656: mol_type = genomic DNA
gaagcgcgctaggttggctcttctgcgcgcctgcgccttggcgagctctgcgcaggcgcatttccaacgcttggaggagagggcggggtgtcgtttcctttcgctgatgcaagagcctagtgcggtggtgggagaggtatcggcaggggcagcgctgccgccggggcctggggctgacccgtctgacttcccgtccgtgccgagcccactcgagccgcagccatgtctggggacgagatgatttttgatcctactatgagcaagaagaaaaagaagaagaagaagccttttatgttagatgaggaaggggatacccaaacagaggaaacccagccttcagaaacaaaagaagtggagccagagccaactgaggacaaggatttggaagctgatgaagaggacactaggaaaaaagatgcttctgatgatctagatgacttgaacttctttaatcaaaagaaaaagaagaaaaaaactaaaaagatatttgatattgatgaagctgaagaaggtgtaaaggatcttaagattgaaagtgatgttcaagaaccaactgaaccagaggatgaccttgacattatgcttggcaataaaaagaagaaaaagaagaatgttaagttcccagatgaggatgaaatactagagaaagatgaagctctagaagatgaagacaacaaaaaagatgatggtatctcattcagtaatcagacaggccctgcttgggcaggctcagaaagagactacacatacgaggagctgctgaatcgagtgttcaacatcatgagggaaaagaatccagatatggttgctggggagaaaaggaaatttgtcatgaaacctccacaagtcgtccgagtaggaaccaagaaaacttcttttgtcaactttacagatatctgtaaactattacatcgtcagcccaaacatctccttgcatttttgttggctgaattgggtacaagtggttctatagatggtaataaccaacttgtaatcaaaggaagattccaacagaaacagatagaaaatgtcttgagaagatatatcaaggaatatgtcacttgtcacacatgccgatcaccggacacaatcctgcagaaggacacacgactctatttcctacagtgcgaaacttgtcattctagatgttctgttgccagtatcaaaaccggcttccaggctgtcacgggcaagcgagcacagctccgtgccaaagctaactaatttgctaatcactgattttgcaaagcttgttgtggagatgtggctggacaggtttgccatcagagtggatataccgttgtattaaaaacaagataaaaaagctgccaagatttttggcgagtggttggtctgaagtccttgcaagacgctgatgctcaagctgttgacatactcattgcctactttaacacctgtcagagaaacgtgatatggggtaaggaggtgcttttttaaaatcgttcatagacttctgtaaaatgcaagataaattaaagttattataacagtgattctttcaatttggtttgtccttcagttttcttttctataaatgtgcttggtgaaatcagcaagaaaccaaccatataaaacagtgtgtgccgggctctgactgagaaactgaacaatggcaggcgcttcatctgggcagccatttttcttctctgcttctcttgagatacatagttaaagtagacacggcctcccacgcgagtgtggtgggaccttgagacttaggaggattgcctgttttcagtgtccagggaatgactccatagatttgaattcttttccgtatgtggggatggttgctactacctcaccgccaagtcctcccccagctgttaccacatgagggaatacaaggtgctaggtaccctccttcctcgttggccactaagaggtcttagaaacatagcctgtaaatgtgtcttgtaactggcacactaaaaaagatcctagttgagcatctctcttggtgaggaagcgatgtgtgtgcggttcaggaaactcctccaagaggaggaggagtccaaacagggatgccagaggaagctttccgttttcctagccaacttgtgttctgggtttgaaaaagacccaccacaaatgctttttctattttctgatttaaaagtcgcttttgaatatgaccatgagaaaccaagaaatgctgcttgtgtggtgctctgcttcctgaggatttggctggaaggggattctccgctggcacatgggagaaggccatcttctgtgtcggtgctgtgatctgccttgttctcacttgctgaggataagggcatacacgctgctcctcgctttcttgttgcccgacttcgtactaagcagctcaggagcagtcactcagacccaaatgtcttgactgtgttgtttttaatcactgtgacccttaaagtacaggccaagtgttgtcaaacaccttggctaaaacagtggagggtgatgggtaaagcagtagagggccctcaacccacacactggctgaaactgccaccaactgccacgatgaacccaactgctgtttatgcccccattttcctttttttgtatctacacccacacgattcccaatgttggatatttctacatgaataaagcaaggatcagtgcctcttatgtaattaacgctcca

SEQ ID NO: 1944 - DNA, 7150 bp, Homo sapiens
  source 1..7150: mol_type = genomic DNA
gggccgcgcgtggcggcggcgatgggcgagggcgggctgcccccggccttccagctgctgctgcgcgcgtgtgaccagggcgacacggagacggcgcggcggctgctggagccgggggcggcggagccagccgagcgcggcgcggagccggaggcgggcgcggagccggcgggggccgaggtggccgggcccggggccgcagcggcgggggcagtcggggctccggtgcccgtggattgctcggacgaggcgggcaacaccgcactgcagttcgccgcggccgggggccacgaaccgctggtgcgcttcctgctgcgccgcggtgcctcggtcaacagccgcaaccactacggctggagcgcgctcatgcaggcggccagatttgggcatgtgagtgtggcacacctcctgttggatcacggggctgatgtcaatgcccagaaccggctgggggccagtgtgctcactgtggcttctcggggcggccacctgggtgtggtgaagctgctcctggaagccggtgcctttgtggaccatcaccacccttcaggcgagcaactggggttgggcggcagcagggatgagcccttggacatcacagccctgatggctgccatccagcacgggcacgaggccgtggtgcgtctactgatggagtggggcgcggaccccaaccacgcagcccggaccgtgggctggagcccgctgatgctggccgcactcactgggcggcttggagtggcccagcagctggtggagaagggcgccaaccctgaccacctcagcgtgctggagaagaccgccttcgaggttgcactggactgcaagcacagggaccttgtagactacctggacccgctgaccaccgtcaggcccaaaacagatgaggagaaaaggcgacctgatattttccatgcattgaaaatgggaaacttccagctggtcaaagagattgccgatgaagaccccagccacgtgaacttggtcaatggggacggggcgacgccactgatgctagcagctgttacggggcagctggctctggtgcagctgctggtggagaggcacgcggatgttgacaagcaggacagcgtgcatggctggacggccctcatgcaggcaacctaccatgggaataaggaaattgtgaaatatctgctaaaccaaggggccgatgtcactcttcgtgcaaaaaatggatacacggcctttgacctggtgatgctgctgaatgatcccgacacggaacttgttcgactgctggcatctgtctgcatgcaggtgaataaagacaaaggccggccgagccaccagcctcccctgccccactcgaaggtccgacagccctggagcatcccagtgctgcccgatgacaagggtggactgaagtcctggtggaaccgaatgtccaatcggttccgaaagctcaaactgatgcagacgctgccccgtgggctgtccagcaaccagcctttgcctttctctgacgagcctgagccagctctggactccacaatgagggctgccccccaggacaagacaagccgctctgcactccctgatgcggcccctgtgaccaaagacaatggtcctgggagcacaagaggagaaaaggaagacacgttattgacaaccatgcttcgaaacggagctcccctcaccagactcccgagtgacaagctgaaagcagtcatccccccattcctacccccttccagttttgagctgtggagctctgatcggtcccggacgcgtcacaacgggaaggcagaccccatgaagactgcgctgccccagagagccagcaggggccaccccgtgggcggcgggggcacagacactacacccgtcaggcctgttaaatttccaagcctccccagaagcccagcctcttctgccaattctggaaacttcaaccactcgcctcattcatcgggcggctccagtggggtaggtgtgagccggcacggtggggagctgcttaaccgctcaggtggcagcatagacaatgtcttgtcccaaatcgctgcccagaggaaaaaagcagccggattattggagcagaaacccagccatcggtcaagccctgtggggccagcaccggggtccagcccgtctgagcttccagcctcccctgcaggtggcagcgctcctgttggcaagcagaaattggagaccagcaaaaggcctccatctggaacttccactacctccaagagcacctctccaaccctcacgccctccccctcacccaaagggcacactgcagagtcctcagtgtcttcctcgtcatcccatcggcagtccaagagcagtgggggctccagcagtggcaccatcacagatgaggatgaactgactggaatccttaagaaattatcacttgagaaatatcagcccatttttgaggaacaagaggtggacatggaagcgttcctcacactgactgacggtgacttgaaggagctgggaattaagacagatgggtccaggcagcagattctggcagcgatttctgaactgaacgcaggcaagggacgcgagagacaaattttacaggaaaccattcacaactttcactcttcctttgagagcagtgccagcaacaccagggcccctggcaacagcccctgtgcgtgatcctccttcccgcagccaccagcgtgagctctctgaatcccgggaccccttcacgtggccacagccccagccctgcccccgtcacactgctgtgccttagtcatgttgttccctttgctcgggatgcccacttcacgtcgacggcattcattggtagtacttcttgctgcaacaaacttcaacacacagagacagattcccatgtaacagtccagtgggggtgcttctgcttggcaggttggttcacacagtgatgcagggactcagctcctttcatcctgtgctctgccctccccgggagcctcagagtttgcttctggctggcggcaagggaaagggacgatggagaaggcacggctgcttcttacctgccttgctcttaactgacacacatcactcctgctcacgtcctcttggccactggtagtcatgtggccccacctggatgcagaggaggccaggatgtgcagtctccacatagtggcttcccagcaacaacttttgacttagatggggggtatgtattatggtgagaggttagccttcctggcacatcttcccttaaaacttctaacttgcccctcctagtccaagtcacctctcagatgaagtcttttttgaccccctttcagccactgggtcccttagtgctgtgtatgtgactgctgtagcattccactgcacctgctgcatacagcttacattggagatgtgtatgtcaaacgcatttttctttattgcaaagagagtctattatagaaggaaagaagtggaggcctgctgtgtggatcccttcttcttcctagctttcagtttccttatctgcaaagtggaaggtcagaccagatgatgctctggtactccacagtgctcacctgtatcactgcagggctttctgcactgaaagtggaagcagaaggctaatgggtcacattgtgtaaaggtctctggtgctcaaagtttctaggcaaagaagtgaaaatttggaattttgtctacatcctattaatgctgtgttcctcaaaagggaattggcttgtgtagtttcctaccatatcatattttattaaattagaggggccctgacttttaaaacccactggctttctgaagtgttttccagtgaatgactcattcagccagtgcttgttgcatttatgttagctaccaggtgccaagtgtgcagacacaatacagagccttcaggctctcgacaggcaagagaacacctgtaaatagatggtcccgacattgagaggcagcatggtagagtgggcagaccttgtgctctggactcaggttcaaagttcagatgaagctcaatggcctcttagttggagcttagaaccagtatgcccaaagtgctgggtctgcaggaagtacccagtcgatggtaggctgcacagaattctgatctctaccttgagccatgctgagccacaagttggtctccttgggaggtgccatctctcatctgtccctcccccagccatgaaagcccattcccctatgctggctttcagaggctgtcgttaacttactgcccagagcctcgtagttttcttcccctgccctgatggttgggtgtttttcctttaaattctctcagccttacactcacagaagccaactttccacaggactgaagacaaagtgtttcatttagctgttactgatagacacctttacaaaggttactaatgtcccagcctttttaaggagacacactcattcatcccctactatgtgctggcagctttacctttgtcatttcatcctcatggccaccctggaggtggcattgtgtaacctcatcttgcacattcgggaaacggatgcttaggagagggaagcagcttgccagttaaacagcccagaaggagcagatctggggtcagaaccggacctggtgggcttgcaagcctgtgccttttccactaactcctatagactcctggagctagaagcacttgtgattcttgttttaatttactgatggcttcaggggttaacagtaggcctagaattgtttgcctctgaaattcatggcccctgacgttatgtgctttgaggttttgtgcctgctttttgctgtggtcctgtttttttcataacaatatactggtatagcttccactcaggtaagtttgattgaacaatgatacacagctgcaccggggggtcaccttttcacaaatgtagacctccatgaactcattggatgaccctggacagagcggggctattcccattttgcagacaggacagcagaggctccagacaatgcctttcctttctttttcactggactcaagtgtccaaggcttttcatcctaggaagtttgtgtgctggttcacaagaggtccctggcaccctttctggggatgtttggatgcggctggtaggcagggaagagaaagggcaccccagcgggggcatgtgtggaggcagcacggaacatgtaggttatagatcgtcagggaggaggggtcagttgggtgcttgtttttctgatttttggtccttgatcacccccttcccttcccacacgtgtccccagcctgcctgtggctgttccccccacaagaagcacctcccttgcttggcaaccttcaccagcatttcccaaaagtatgctcctgggaaccctagttccacaggataataggtttttcataaagaaacgtagggtgtgtatgtgaaagtggggtgaggttccctggttgagtaggtttggcagacactaaagcgagctacacgatcatctttgctacaggcctctcacaaccttcagcatgccagcatgggtcaggcctcttcacagggccaagaaactcatagcatctcccacattactctcatcacttctccaaggtgcttttgcaagactggaattccttggacaccattggagaagccccgctttttctggaacagcggcaaccaagaggccttgcagccctggaagtgggtcagggcccttggtggtcacctttttctccccagcagctctgcagaggtggcctgcttggcagtgggacatcaggggaccggtcctgctttgagatggcagggtccctgttctgagagctctccagcctgagggcattgagctgaggctccaccctgagctctcctgcagggtggagggcattgtttcccagcacccaggcagtgtcttgctggtgtgtcgtgagtgctggatgtccaagtccctgctggccacggagggctcctgcctctcttcttcagcgccacaaaattacatggaggccagctggttttgtgaggagattgtttattttttaattcttttgtttaccgaacgtttactgagcatctaccctgtgccagccctactcgtacgctctgtctccaaagatgaaaaaggacttctctgccctcaagggaaccccacagtatcttagaggagacaatcatgtcggtgagatggtgtggtgatgaagcctgctgggtatacagctcagggaaagtcatcgatgatggctcaggctcagcctgggcacgccccagaggagagagatggagtggggcctcaaagggcaggtttaggcagaaaagaaaaagggcattccagctggggcatgtgcaaaggcagcacgtaatgtgtaagttctagatcgtcagggaggaagggtcagttgggtgcctgtttttctgtttttagtcctttaaaatgagtagaagcaacctgttaccctggaaagagcactggacatagacctagtgctgcgtgatgttgagcacgtttcttcttccctttgagtcccagtttcccttttggttacagggggatagtagcccccagggatcatgtgaaagtgagaaagcccttttcacactgtggagcggtgcagatgtgggaaacctcaaagatggttgcccattttaaatcctttcatctctcatctctctttcttctctcccttctgccctgacgtagccatggttgggtgggtgaggccagaagaaactgcctccggcaagaggtagcagccgctcaggtggctctgctggcatcggagcccacagaagtgaggagtggccgatggacctgccctccaaatgtgcctgactctgggtcttgctgtcactggatttcctggcatggcagacagaaagaaagatagtttgaccaagtcgtagaagctgatccagcgggtaaaaagggggcagggaactcgtcccttttattcttgcctcagagctgcctgaagacatgggccaggccggaggctggacaactttggataacgctgacctgtacttccaagtaaatgcctcctgaagagcccgggacccttcctgggagaattctgcagccagaatgaaggtgccatcagcaggaggcactgtgaagcaccatcctgtcgctgtccttgtccattcctagcaagttaatcgtgtcttgttaaccagcagttcctgttcaacgtgtaaagagacctgatgttttccctaataaagctgataacagattttgcagga

SEQ ID NO: 1945 - DNA, 1476 bp, Homo sapiens
  source 1..1476: mol_type = genomic DNA
gaaagagcagaagaggaggtggggtggagggagcagagccagggattaggggactactgaggctctggagatgagaccgccaggagtccttccccaccatgagccccctccactcctgcagctggaggagtttttcccagtctcagtgctgccctggggcgagagagactgaacaagctgtttgggtgggaagagaatggaggaagttgacagggatgggcggggcccgtgggggggctgaccaggaacccagcttcctgctcagtacccaggcatccagcccccagctcacccccaccccttccagcccccactcccctcaggaacccaaggttccagccctcctcccaaatcccagccacccctcccccaccagtttctcccctctaggggatggaggctgagagaccccaggaagaagaggatggtgagcagggcccccctcaggatgaggaaggctggccccctccaaactccaccactcggccttggcgatctgctcctccatcccctcctcctccagggacccgccacacagccctgggaccccgctcggcctccctgctctccctgcagactgaactccttctggacctggtggctgaagcccagtcccgccgcctggaggagcagagggccaccttctacaccccccaaaacccctcaagcctagcccctgccccactccgtcctctcgaggacagagaacagctttacagcactatcctcagtcaccagtgccagcggatggaagcccagcggtcagagcctcccctccctccaggggggcaagagctcctggagttgctgctgagagttcagggtgggggtcgaatggaggagcaaaggtcccggccccccacacacacctgctgagacttgagccccaaccagcccttccttgccactggtctcaaagctgggcagcccattgcatgccctcaactcttgcttggcaggggtaccagagactgaaagacacggcacaaatctcaatattcatctcccacatcaccttccctgggaactggacagggtgaaagtcctcaaactctgggaacaggcgagatggaacagggatttaactccccgcccacaggtccatgggagcttgaggcagtaagggggatcccaggcacccatctcaaggagtggctgggagtcttttccctaacttgtggggacaccaccagttgtcaagctactaggcagtagggtctgagggctcaggcctccacctgagaggttataacctgagagacagctctacccttcctcccagtaagaagggaaggtgggtgggcacctgagagattaagactattctcccagtcccactaccagcacccccgatccctgagactgaggggtttacgggctgtgaatggaccttcagccctgcccaccctccctccccactgctgctgagtctgtctgatgttttggttgtgtgaataaatataattcccctctgga

SEQ ID NO: 1946 - DNA, 1456 bp, Homo sapiens
  source 1..1456: mol_type = genomic DNA
ccggagcggggatcacctcaacttgactgtggtcccccagccctccaagaaatgcccataaaccaaggaggagagggtaaaaaatagaagaatacatggaattggggagaagaatgggaaaaaagatgggagtgactgcataatgtcagcattttgtgcttttggctcagcatttggattggatggaggattttcatcctgaaaccagccctccgtcgccaccgaccatggaataattgtcttccacgaaactcttccctggtgccaaaaagggttttatgtatatatttgagagctccacatccctggatctgaatcctccacttcccactggaaccatgcccctcccagtcccgtttctcccctctaggggatggaggctgagagaccccaggaagaagaggatggtgagcagggcccccctcaggatgaggaaggctggccccctccaaactccaccactcggccttggcgatctgctcctccatcccctcctcctccagggacccgccacacagccctgggaccccgctcggcctccctgctctccctgcagactgaactccttctggacctggtggctgaagcccagtcccgccgcctggaggagcagagggccaccttctacaccccccaaaacccctcaagcctagcccctgccccactccgtcctctcgaggacagagaacagctttacagcactatcctcagtcaccagtgccagcggatggaagcccagcggtcagagcctcccctccctccaggggggcaagagctcctggagttgctgctgagagttcagggtgggggtcgaatggaggagcaaaggtcccggccccccacacacacctgctgagacttgagccccaaccagcccttccttgccactggtctcaaagctgggcagcccattgcatgccctcaactcttgcttggcaggggtaccagagactgaaagacacggcacaaatctcaatattcatctcccacatcaccttccctgggaactggacagggtgaaagtcctcaaactctgggaacaggcgagatggaacagggatttaactccccgcccacaggtccatgggagcttgaggcagtaagggggatcccaggcacccatctcaaggagtggctgggagtcttttccctaacttgtggggacaccaccagttgtcaagctactaggcagtagggtctgagggctcaggcctccacctgagaggttataacctgagagacagctctacccttcctcccagtaagaagggaaggtgggtgggcacctgagagattaagactattctcccagtcccactaccagcacccccgatccctgagactgaggggtttacgggctgtgaatggaccttcagccctgcccaccctccctccccactgctgctgagtctgtctgatgttttggttgtgtgaataaatataattcccctctgga

SEQ ID NO: 1947 - DNA, 3572 bp, Homo sapiens
  source 1..3572: mol_type = genomic DNA
ctatccgctggtggaggtgagggcgcccggcaggccgccctgcaggcggcagggcatgaggccgccccgagagtccccagggggctgcgctgccccccagccaggaggaaaggccctcgaggggcgcaggcggacgggaacagggcgtcactgagggctacaatggcaccatctttgcctacggccagacaggcagcgggaagtccttcaccatgcagggcctgccggatccgccctcccagagaggcatcatccccagggccttcgagcacgtgttcgagagcgtccagtgtgcagagaacactaagttcctggtccgggcctcctacctggagatctacaatgaagatgtccgggacctccttggggctgacaccaagcagaagctggagctgaaggagcacccagagaagggcgtgtacgtgaaggggctgtccatgcacacggtgcacagcgtggcccagtgtgagcacatcatggagactggctggaagaaccgttcggtcggctacacgctgatgaacaaggattcctcacgctcgcactccatcttcaccatcagcatcgagatgtctgccgtggatgagcggggcaaggaccacctccgggcgggcaagctgaacctggtggacctggcgggcagcgagcggcagtccaagaccggggccacgggcgagcggctcaaggaggccaccaagatcaacctgtcgctctcggcactgggcaatgtcatctcggcgctggtggacgggcgctgtaagcacgtcccctaccgtgactcgaagctgacgcggctgctgcaggactcactgggcggcaacaccaagacgctcatggtggcctgcctgtcgcctgcggacaacaactacgatgagacactcagcacgctgcgctacgccaaccgggccaagaacatcaggaacaagccgcgcatcaatgaggaccccaaggatgcgctgcttcgcgagtaccaggaggagatcaagaagctcaaggccatcctgacacagcagatgagccccagcagcctgtcagccctgctgtccaggcaggtgcccccagaccctgtgcaggtggaggagaagctgttgccccaacctgtgatccagcatgacgtggaggccgagaagcagctgatccgggaggagtatgaagagcgcctggcccggctgaaagccgactataaggccgagcaggagtctcgggccaggctggaggaagacatcactgccatgcgcaactcatatgacgtcaggctgtccacgctggaggagaacctgcggaaggagacagaggctgtcctgcaggtgggagtcctctacaaggctgaggtcatgtccagggctgagtttgccagcagcgctgagtacccgcctgcttttcagtatgagacagtggtgaaacccaaggtcttctccacgactgacactctgcccagtgacgatgtctccaagactcaggtttcctccaggtttgcggagctgcccaaggtggaaccctccaaatctgagatttctctgggctccagtgagtcatcctcgctcgaagaaacctctgtgtccgaggctttccctgggcctgaggagccctccaacgtggaggtctccatgcccactgaggagtccaggagcagatacttcctggatgagtgcctcgggcaggaggccgctgggcacctgctgggggaacagaactacctcccgcaagaggagccgcaggaggtgcccctgcaggggttactaggcctgcaggacccgtttgccgaggtggaagccaagctggccagactctcctccaccgtggccaggacagatgcaccccaggcagacgtccccaaggtccctgtgcaggtccctgcgccgacagacctgctggagcccagtgatgccaggcccgaagccgaggcggctgatgacttcccgcccaggcctgaggtagatctggcctcggaagtggccttagaggtggtgcggacagcagagcctggcgtgtggttggaggctcaggccccggtggccctggtggctcagcctgagcccctgccggccacagctggtgtgaagagggagagcgtgggcatggaggtggcagtgctgactgatgacccgctgcccgttgtggaccagcagcaggtgctggcccgtctgcagctgttggagcagcaggttgtgggtggagagcaggccaagaacaaggacctgaaggagaagcacaagcggcgcaagcgctacgcagacgagcgcaggaagcagctggtggctgccctgcagaactcggatgaggacagcggggactgggtgctgcttaacgtctacgactccatccaggaggaagtgcgggccaagagcaagctgctggagaagatgcagaggaagcttcgggcagcagaggtggagatcaaagatctgcagtccgagtttcagctggagaagatcgattacttggccaccatccgccggcaggagcgtgactccatgctcttgcagcagctcctggagcaggtgcagcccctgattcgcagggactgtaactacagcaacctggagaagattctgcgtgagtcctgctgggacgaagataacggcttctggaagatcccacatcccgtcatcacaaaaaccagcctcccagtagcagtttcaactgggccacagaacaaaccagcccgcaaaacctctgcagcagacaatggcgagccgaacatggaggacgaccgctacaggctcatgctcagtcggagcaacagtgaaaacattgccagcaactacttccgatctaagcgggccagccagatcctcagcacagacgccaggaagagcctcacacatcacaactcgccaccaggcctcagctgcccactcagcaacaactctgccatcccacccacccaggcccctgaaatgccccagccccggcccttccgcctcgagtccctcgacatccctttcaccaaggccaagcgtaagaaaagcaaaagcaactttggcagtgagcctctgtgagcacagctgcttgccattgcctgccttataggcatgtagagactgccaggccctcccagggcagccccaaccaggtctcctcccacctgccacacagcgctccggggcctgagggctccctcagccctgggaagacacattcccttccctgttccccagagagcccacctccgccctgggcaggagcccctcggaggctgtatagtcctccttagagaggcctgctccagctgttcataccacatcagtgtttccgtctgctcacctgccacagagcccacacccatgcccaccagtgttggtctttgcctcaaagcctgagacctgcttcacggccttcaccagccctgatggagagggcagcagctgccacgtggaggaagctcaatatcagctgggaaggaactgtgcctctgtctgactggccccacttcctaagcactgccctgccccatggggtggcacaggggtcccacagcaggtcttcctgcactgcccacccctggctggtctgtggcccaaggaaggccactccacattaagctgcccaataaactgcttttaagataa

SEQ ID NO: 1948 - DNA, 730 bp, Homo sapiens
  source 1..730: mol_type = genomic DNA
agattgtttgtttgggaaattttgcactctacaattcgtaagatgaacaaacatgtcctgaagatccagaaagagctggaagaagctaaagagaaacttgctaggcaacacaaacggcgaagtgatgatgacgacagaagcagtgacaggaaagacggggttcttgaggaacaaatagaacgacttcaggaaaaagtggaatctgctcagagtgaacaaaagaatcttttcctcgttatatttcagcggtttatcatgatcttgaccgagcacctagtacgatgcgaaactgatgggaccagtgtattaacaccatggtataagaactgtatagagaggctgcagcagatcttcctacaggtatgtggggaacttcgattaggtaataacactattctcagccacaaagatttttcattaaaaaaaatccttgtcaaatttgttaggaggttatatagtacctgttagaccctttagttcatgtccatttgctgctaccattgctcatcagaatatttaggcttaaactgattctgtaccacttagattcctaattgccacccccccaacaaccccccgccccaccttttttttgagatggcatctcactctgttgcccaggctggagttcagtgacacgatctcagctcactgcaacctccacctcctaggtttaagcaattcttctgcctcagcctcccatattgctgggattacaggcacccgtcac

SEQ ID NO: 1949 - DNA, 5178 bp, Homo sapiens
  source 1..5178: mol_type = genomic DNA
ggcggaggcagcccgagggggcggttgcatgtgtgccagacgttcgtagcccactgagcttcctcacgccggctgtcgcagcgcctagccccacccggcggcctctcctgcgcttccggggccgtggcgagctagtgcgcctgcgtgccggcccatccgcgcgccttgcagctgtccttgcgtcggccagcggccagacagttcctgcagcgcttaccgcctggcctctcggttccgcggcgcaccggagggcagcatgtcgcggcggcggcacagcgacgagaacgacggtgggcagcctcacaaaaggagaaagacctctgatgcaaatgaaactgaagatcatttggaatctttaatatgtaaagtaggagaaaagagtgcctgctctttggagagcaacctagaaggcttggctggtgttttggaagctgatcttcctaactacaagagcaagatcttaaggcttctttgtacagttgcacgcctattacctgagaagctgacaatttatacaacattagttggactactgaatgccaggaattacaattttggtggagaatttgtagaagccatgattcgtcaacttaaagaatcattgaaagcaaacaattataatgaagccgtgtatttggtccgttttttatctgatcttgtgaattgtcatgtgattgccgccccatcaatggttgctatgtttgaaaattttgtaagcgtaactcaggaagaagatgtacctcaggtgcgacgagattggtatgtgtatgcatttctgtcatctttgccctgggttggaaaggagttgtacgaaaagaaagatgcagagatggaccgcatctttgccaacactgaaagctatcttaaaagacgccaaaagactcatgtacccatgttacaggtatggactgctgataaaccacatccacaagaagagtatttagattgcctgtgggcccagattcagaaattgaaaaaggatcgctggcaggaacggcacatcctaagaccttatcttgcctttgacagcatcctgtgtgaagcactgcagcacaatctgcctccttttacaccacctcctcacactgaagattcagtgtacccaatgccaagggtcatcttcagaatgtttgattacacagatgatcccgagggtcctgtcatgccagggagtcattcagtggaaagatttgtaatagaagagaatcttcactgcatcattaagtcccactggaaggaaaggaagacttgtgctgcacagttagtgagctatccagggaagaacaagatccccttgaactaccacatagttgaggtgatctttgcagagctgtttcaacttccagcaccccctcacattgatgtgatgtacacaacactcctcattgaactgtgcaaacttcaacctggctctctaccccaagttcttgcacaggcaactgaaatgctatacatgcgtttggacacaatgaacactacctgtgtagacaggtttattaattggttttctcatcatctaagtaacttccagttccgttggagctgggaagattggtcagattgtcttagtcaagatcctgaaagtcccaaaccgaagtttgtaagagaagttctagaaaaatgtatgaggttgtcttaccatcagcgtatattagatattgttcctcctaccttctcagctctgtgtcctgcaaacccaacctgcatttacaagtatggagatgaaagtagcaattctcttcctggacattctgttgccctctgtttagctgttgcctttaaaagtaaggcaaccaatgatgaaatcttcagcattctgaaagatgtaccaaatcctaaccaggatgatgacgacgatgaaggattcagttttaacccattgaaaatagaagtctttgtacagactctgctacacttggcagccaaatcattcagccactccttcagtgctcttgcaaagtttcatgaagtcttcaaaaccctagctgaaagtgatgaaggaaagttacatgtgctaagagttatgtttgaggtctggaggaaccatccacagatgattgctgtactagtggataagatgattcgtacacaaatagttgattgtgctgccgtagcaaattggatcttctcttcagaactatctcgtgactttaccagattgtttgtttgggaaattttgcactctacaattcgtaagatgaacaaacatgtcctgaagatccagaaagagctggaagaagctaaagagaaacttgctaggcaacacaaacggcgaagtgatgatgacgacagaagcagtgacaggaaagacggggttcttgaggaacaaatagaacgacttcaggaaaaagtggaatctgctcagagtgaacaaaagaatcttttcctcgttatatttcagcggtttatcatgatcttgaccgagcacctagtacgatgcgaaactgatgggaccagtgtattaacaccatggtataagaactgtatagagaggctgcagcagatcttcctacagcatcaccaaataatccagcagtacatggtgaccctggagaaccttctcttcactgctgaattagaccctcatatcttggccgtgttccagcagttctgtgccctgcaggcctaagggtcattttttcctcatgtcaaggttttttttgatatcttaaaataatttgtcttattttttgatggtttgaatgcttgctttcttgtagtatcctttcacttcttaaaggaaacaaaggggaagaggacagtgaatgaacatggcattacttttaattgccctgaaaagcaaatacttcctaacggcagtaatgtgactatgaccatgatatattatatatgtgacagatacaaattctctgtgatcagtttgttattttttttctccttaaggcacaaaataattggtttgaggtatgtgaaacactagaggtcaaccttacatagtatatagaactgatgggtttacccagctacccagtagcataacttttcacagctcggggatgaattaacatggctgaaataaaactaaaagtatggtttttaaactttggcatttcatgatttatcatctcactctactctaaaactggtggtttcttactgaaggtgttctccatttgaaattttatcttcaaagtatttttaagtagtatctttaagacatgacttgttagtaataaaagtgttactagttggaagagtagctctcaaatttgtcttaatgtaaatcacctgggaatctttcaagttattttgaaatttaaaccaccgtctgggggtggaacgcagacatcctcagtaatccttaaagtttccccaggtgattccaggtttggtcaccattatcttagagcatctactcacttcctctagccttggggttatttgtccaaggtcttgtagtgagttacagaatactaaagtggatgtagaagtggtcagattgactgaaactataccctgaattagatgtgagtttagattttgtttatatggaacctgatccaaaaaactacgaagtcctgagcttgtttcctgtatagtactgatgctgaaataagatgacagcagtttgtaaaataatacacaaatatgaggaattgtctgacattccaaatttcgaggatttttagacttttttcattaaaccttagaaaaaaattaccagtaatcctacaactactggtagtgttgttgtgcatttgcacaaaataggtataattttttcttattacatcccaagtttatgatgcattaagcgttttgcatattttgatatatttttgctttggtttaccatacattttagtggctacagaatgtagtctgcttaataaatgggaattcctagaatgtttaaataccatactatttaagacaaaatacaaaatatccagaaaaatccaggttgcgtggctggttagtaaaggactaaaacccaggttcttggctaaatgttttcgtttatactgtttatctttcccattgcttaagcacagcacaaactatgtaattatatataattacagttgacccttgaacaacatgggtttgaactgtgtgagtctccttacacacaggttttcttccacccctgagatggcaagaccagccccttgtcttcctcagcctgctcaacgtgaagatgatgaggatgaagacctttatgatgatccacttctacttattaaatagtaaatatatttttttcttatgattttattttcttttctctagcttcataagaatatagcatatgggctgggcgcagtggctcacgcctgtaatcccagcactttgggaggctgaggcgggcggatcacaaggtcaggagattgagaccatcctggctaacacagtgaaaccctgtctctactaaaaacacaaaaacttagccaggcgtggtggtacatggctgtagtcccagctacttgggaggctgagacaggagaatcgcttgaacctgggaggtggaggtttcagtgagccaagattgtgccactgcactccagcctgggtgatggagcgaggctctgtctcaaaaaagaaaaaaaatatatagcatataacatacaaaatgagtttatcaactgtttgttattggtaagtcagcagtgggctattggtggttaagttttgggggagtcaaaagttacatgcaaattttttactgtgcggggtgtcagcatccctaaccccatgttgttcaagggtcaactgtagtttaaaatgactcctgtctcaaaaaaccaaaggataacctttaagggattggtaactttgactcaaaactgctttgtaatcttttcacaatgtactgaaaagtgtggctagttatgtttgatccacattctagagaaatttgtaggttttaatttcttttctcttggtcctctcttcatgtataatggttgcttttaacagctgttcgctgatgtggtcctgctctgtcccagtctagcagctttagtgtatggaaaaattgaactaggaattgagttttgaagaaataaaggtgtaagagcaaacattcaacagttgctgtccccagtaatgaagttcatacagacaaaagatggcatgtcactgtacatcataccttgcaataaatattctgttaaattgtgctggtgcaatttaacatgcttttgtcaaagtaaa

SEQ ID NO: 1950 - DNA, 2516 bp, Homo sapiens
  source 1..2516: mol_type = genomic DNA
gtgccaggtcagagctgcaactctgtgctacgtttctgtgtggctttcttgaaactacttctctttatttttgttggcgtggctatttattgttatctgtaacgacgcaatatgctgccgaagtctgggaaggagaggggagctgtaagtctacaccagtgttaactggctaaccttggatgcctgtcatttgatgttggacatttgaaagatggcagcatctctggggaaggagggactgaacacttttgaccacctaccatgtcccaggttctatcgatcctgggcatgcacacgctcatgagtaaccagcagtactaccaggccctgagcagcagctccatcatgaacaaggaggggctcaacagcgtgattaaacccacacaatacaagcctgtgcccgacgaagaaccaaattcaacagacgtagaggaaacgctggaacggataaagaacaacgacccaaaacttgaagaagttaacctcaataatatccggaatatccccatccccaccctcaaggcatatgcagaagccctgaaagaaaactcatatgtgaagaagttcagcatcgtggggacacggagtaatgaccccgtggcgtatgcccttgctgagatgctcaaggagaacaaggtgttgaagacactgaatgtggaatccaacttcatttctggagctgggattctgcgcctggtagaagccctcccatacaacacttctctggtggaaatgaaaattgacaaccagagccagcccctgggcaacaaagtggaaatggagattgtgagcatgttggaaaaaaacgcaacacttctcaaattcggctaccactttacccagcaaggaccccggcttcgggcatccaacgcaatgatgaacaacaatgaccttgtgaggaagaggaggcttgcggacctgactgggcccatcattcccaagtgccggagtggtgtctagtgtgtggcggtggagtccatgcctttgaactggatgtgttctattgatgacctgtgctctgcaggggaaaccagaaggcaaaatgctggcagcatgaaacccttttgtggttcagttctttatgcactaaggttttaggttgactagtggttgtagttgaaaattttataaaataccgttaatgtgaagtttttctttagtcacagaagttgaatctggttattatttaaaaactagaagcccccaaaccagcagatcttactgaagatgatgttccagcagcagcgacttagccccaggagcccagtttcaatggccttgctgtgtggtgtttcaagtgcatttaaaatgtgtgacacagaaacggcacactcttccacatgcttttgaagtattataaaacactttattacaaatttgtcttagctattagcaaataaaactgattatcattctttattaaccctccttggaattttgaaaacctcgattaaagttgccaaattgattactggatccagaacacaattttcccctcagaacagatagacagactgaagccactgaactctgccaggagtcaacatgagattccttttgctggatatgcagaaatgataggaaaaaaaccaatggtgaaatttcaagtttcaaaaaccaacctttcattaccaatcccaggcaacaaacatgtccctgagtgttctttaagaacatttgggatttatgtacaatttaatactggagttagaactttttccttattgaatgccaaccttatgatggatgtgaaaatctacggccaaatacttttgaaaacacctttctatattgcacagtgggcaaatggcttatgtgaggtaagacactagagggataaatttccagatcaacatggctatggtatttagtaatggcccagcttagagacttcagctactgatctcatcacttattagacaaattgctgctgaccttacgcctgtatattaagcctccgcaggatgccggacaatggtgaagaaactccagatatcaaggaattgggaaatcctggccaaaccaccccaagatgattacactgaaatgtagtattagtactgctgccagatctctttttaacatcatgtgcgtctcttgggatccagcaaaagtgttaagccacaatgcccttgtgccttttaatataccacagtgccagttaaactaatatttttgtttgttgcttttgggagttattttcattagtgatttcagcaaatctcatgataaaggacaaggtcaagaactccagagcactgagcagagaggctggtgatgaaaaggtgaaggcctgcgcactgaactgtaaggcagtgggcagtacagggtaactggaggcggggccagggcctcagcgctatggaagagtgtccactgaggctgcacatggcccaggagtggcaccatgttgcagggacaaccatccccatttggcttctccttaaaacacaattgcagctgcattctgcatcgctgaaaactgcaatataatattaaatctgttggtctatgca

SEQ ID NO: 1951 - DNA, 3741 bp, Homo sapiens
  source 1..3741: mol_type = genomic DNA
cctccgcgcccccggctgctgctcacgccccgcccgggagccagattttgtggaagtataatactttgtcattatgagatgtcgtctctcggtgcctcctttgtgcaaattaaatttgatgacttgcagttttttgaaaactgcggtggaggaagttttgggagtgtttatcgagccaaatggatatcacaggacaaggaggtggctgtaaagaagctcctcaaaatagagaaagaggcagaaatactcagtgtcctcagtcacagaaacatcatccagttttatggagtaattcttgaacctcccaactatggcattgtcacagaatatgcttctctgggatcactctatgattacattaacagtaacagaagtgaggagatggatatggatcacattatgacctgggccactgatgtagccaaaggaatgcattatttacatatggaggctcctgtcaaggtgattcacagagacctcaagtcaagaaacgttgttatagctgctgatggagtattgaagatctgtgactttggtgcctctcggttccataaccatacaacacacatgtccttggttggaactttcccatggatggctccagaagttatccagagtctccctgtgtcagaaacttgtgacacatattcctatggtgtggttctctgggagatgctaacaagggaggtcccctttaaaggtttggaaggattacaagtagcttggcttgtagtggaaaaaaacgagagattaaccattccaagcagttgccccagaagttttgctgaactgttacatcagtgttgggaagctgatgccaagaaacggccatcattcaagcaaatcatttcaatcctggagtccatgtcaaatgacacgagccttcctgacaagtgtaactcattcctacacaacaaggcggagtggaggtgcgaaattgaggcaactcttgagaggctaaagaaactagagcgtgatctcagctttaaggagcaggagcttaaagaacgagaaagacgtttaaagatgtgggagcaaaagctgacagagcagtccaacaccccgctgctgccttcctttgagattggtgcatggacggaagacgatgtgtattgttgggttcagcagctcgtcagaaaaggtgactcttcagcagagatgagtgtatatgcaagcttgtttaaagaaaacaacattacagggaagcggctgctgctgctggaggaagaagacctgaaagacatgggcattgtctccaaggggcatatcattcacttcaagtcagccattgagaaattaacccatgattacataaatttgtttcacttcccaccactaattaaggactcaggaggtgaacctgaagaaaatgaggaaaaaatagtgaacctggaactggtttttggttttcacttgaaaccaggaactggcccacaggattgtaagtggaaaatgtatatggagatggatggggatgaaattgcaataacctacataaaagatgtgacattcaacactaacctacctgatgcggagattttaaagatgacaaagccaccatttgtaatggagaagtggattgtaggaatagcaaaaagtcagactgtggagtgcactgtcacatatgagagtgatgttagaactccaaaaagcactaaacatgtccattcgattcagtggagtagaacaaaacctcaggatgaagtgaaagcagtccaacttgccattcagacattattcaccaattcagatggcaaccctggaagcaggtccgactcaagtgctgattgccagtggttagatactctgaggatgcggcagattgcatccaacacttctttacagcgttcccagagcaatcctattctggggtcaccgttcttctcacactttgatggccaggattcctacgctgctgctgtgagacggccccaggtgcccattaagtatcaacagattacacctgtgaaccagtccagaagctcgtctcctactcagtatggactgaccaaaaacttctcttccctacatctcaactctagggacagtggcttttccagtggcaatactgacacctcttcagagaggggtcgatactcagacagaagcaggaacaaatatggacgtggtagtatatcactcaattcttctcctagaggaagatacagtggaaagagtcagcattccactccttcaagaggaagataccctggaaagttctacagggtttctcagtcagcactcaatcctcaccagtcgcctgacttcaagagaagccccagggacctccaccaacccaacaccataccagggatgcctttgcaccctgagactgactcaagagccagtgaagaggacagcaaagtcagcgaagggggctggacaaaagtggaataccggaaaaagccccacaggccatctcccgccaaaaccaataaagagagagccagaggggaccaccgtggatggagaaacttttgatgaattgaactacatagcttttctaagcaggttaaaaaaaaaaaaaaaaagaaatgtaatggtttttgataatatgatcccttcagattgaattaacgaaaagacaacacttccagtttttggattgggaaataccttctaattgagactatagccaaaccagggccaaaattatggatattggtcacccagtgatcataactaggcttgaaaatcactacacatattttctgccttgagtgaacatttttagaggaaaggttatgccatctttttaccctaaccactgatattctggttagcagggccaggacaaggggaaggaaaatgaggtcaacaaaaaaatcaaatttttaggaaaagataagatgaatgttactgatttttccttttggctgaggctgcaatatggcctggcaaggcactgttactgatcttgtctttaacattttgatattttgttcatcataatttttgcatttatttttttaaatattgcattaaaatatcatttagcttgattatcgagttttttggtttgaggttttttgttgcttcttttttcttttctttctttccccctcttttttttggatgtccccttaaattttgtgcccaaggcaggtacctcactcatctcatccttggctcagccctgctggttagtatttagtatttattttagtaagatatttgtgtctgtatgatggtcagagttgaactgatctggcttgtcatttttcagtaataaaaaaagttactgaatttaatgttgaatatgatgcatatctcattcattacgatttatcagaaaccaaagatttaaattgcctagatttgtggttctttctcttcctaagttcccagcgactgctttcaaatactattttctaaatttcaccaaaggagcaaagaggataaaacaacactccataaaggcctcttgggatgtcagaaatctaaaatctaaaagaaaacagacacagagcaagacaataacatcacaagctaaaagccagagaaatttaaaattaccaacatccttgttggagtaagacagtaaatatcagccttgcagcaagacagctctgagcagctgtgggcaaagaggtaaaccagtgggggtgcaaggagactgtctgcagcttagggcagaaatggtgggatccaacttgtgaaatgcttcatgttttacaaaccaaaaagtcaggtagcaacaaacttattgtatgtcaaatcaataaatgttactttcaatat

SEQ ID NO: 1952 - DNA, 1406 bp, Homo sapiens
  source 1..1406: mol_type = genomic DNA
ggaggtgagcaggaaggagacggccgcccagcagcccgtgggcaggcgcggcggagcgagcggggccggcggcgggcgccgagggacgccgaggcctcgggcgggggctggcccggggttccaggtctccagtgggggctgcagactaagcaaaatgaggcggttcctgaggccagggcatgaccctgtgcgggagaggctcaagcgggacctgttccagtttaacaagacggtggagcatggcttcccgcaccagcccagcgccctcggctacagcccgtccctgcgcatcctggccatcggcacccgttctggagccatcaagctctacggagccccaggcgtggagttcatggggctgcaccaggagaacaacgctgtgacgcagatccacctcctgcccggccagtgccagctggtcaccctgctggatgacaacagcctgcacctttggagcctgaaggtcaagggcggggcatcggagctgcaggaggatgagagcttcacactgcgtggacccccaggggctgcccccagtgccacacagatcaccgtggtcctgccacattcctcctgcgagctgctctacctgggcaccgagagtggcaacgtgtttgtggtgcagctgccagcttttcgtgcgctggaggaccggaccatcagctcggacgcggtgctgcagcggttgccagaggaggcccgccaccggcgtgtgttcgagatggtggaggcactgcaggagcaccctcgagaccccaaccagatcctgatcggctacagccgaggcctcgttgtcatctgggacctacagggcagccgcgtgctctaccacttcctcagcagccagcaactggagaacatctggtggcagcgggacggccgcctgctcgtcagctgtcactctgacggcagctactgccagtggcccgtgtccagcgaagcccagcaaccagagcccctccgcagcctcgtgccttacggtccctttccttgcaaagcgattaccagaatcctctggctgaccactaggcaggggttgcccttcaccatcttccagggtggcatgccacgggccagctacggggaccgccactgcatctcagtgatccacgatggccagcagacggccttcgacttcacctcccgtgtcatcggcttcactgtcctcacagaggcagaccctgcagccagtaggagagcttcgggagtgggtgcccagggttaggtgtgggaggcatggggcaggaccatcagtaaagacagggccaggtgcagtggctcctgcctgtaaccccagtgctgtgggaggccaaggtggtaggatcgcttgaacccaggagttcaagtccagcctggacaacgtagggagacccttgtctctacaaaaaataaaaaaattagccagg

SEQ ID NO: 1953 - DNA, 2526 bp, Homo sapiens
  source 1..2526: mol_type = genomic DNA
atgggagccagagctgctggaacatcctcaggaggtggccctcgcccctgcttggcaagaggcctctcagcaagcccatttccagccaagcagcagcaccctcaggcaggggctagtccagcagagctccagcagagggcttactacagagccaggcaagatgcagcatctcaaccaggccttgggttcctcattagccccagttcatgttcctcttgggggcctggctcctttacgaggtcttgtggataccccaccctctgctcttcgtggatctcaaagcgtgagcctggggagctcagtggagtctggacgtcagcttggagaactcatgctgccttcacagggtctcaagacctctgcttatacaaagggttgggctccatatatgaggacaagactgctctcagcctcttgggtttaggagaagaaaccaatgaggaggatgaggaggaaagtgacaaccagagtgtccacagctcaagtgagcctcttaggaacctacacctggacattggggcactggggggtgactttgagtatgaggagtctctgagaacaagccagccagaggagaagaaggatgtttctctggattcagatgctgccggtccccctactccctgcaagccctccagcccaggtgcagacagcagtctgagcagtgctgttggcaaagggcgacagggaagtggagcaagacctggtcttccagaaaaagaggaaaatgagaagagtgaacctaagatttgcaggaatctggtgacccccaaggcagaccctacaggcagtgagcctgccaaagcctctgaaaaggaagcaccagaggacacagtagatgcaggagaggagggttccaggagggaagaggcagccaaggagccaaagaagaaggcttctgctctggaagagggcagttcagacgccagccaagaactggaaattagtgaacacatgaaggaaccacagctctcagactccatagcttctgaccccaagtccttccatggcctggacttcggttttcgcagccggatctcggagcacctgctggatgttgatgtgctttccccagtcctgggtggagcttgtcggcaggcccagcaaccactgggaatagaagacaaggatgacagccagtccagccaagatgagctgcagagcaagcagtccaaaggcctggaggagaggtaccataggttatctcctccacttccacacgaggagcgggcccagagtccccctcgcagcctggccactgaagaagagcctccccagggccccgaggggcagcccgagtggaaggaggcagaggagcttggggaggactctgcagccagcctcagcctgcagctgtccctccagaggcgatccacagagcctgtggctcccccagagcagctctcagaggctgcactaaaggccatggaagaggcagtggcccaagtactcgagcaagaccagaggcacctgctggaatccaagcaagagaagatgcagcaactgcgggagaagctgtgccaagaggaggaagaggagatcctccggcttcaccagcagaaagagcaatctctcagttccttgagggagcggctgcagaaagccattgaggaggaggaggcccggatgagagaggaggaaagccagaggctatcctggctccgagctcaggtccagtccagcacacaagcagatgaggaccaaatcagggctgagcaagaggcttccctgcagaaactgagagaagagttggagtctcaacagaaggctgagagggccagcttggaacagaaaaataggcaaatgctggagcagctcaaggaagagatagaggcttcggagaagagcgagcaggctgccctgaatgctgcaaaggagaaggctctgcagcagctgagggagcagctggaaggggagaggaaagaagctgtggcaacgctggagaaggagcacagtgctgagctggagcggctctgctcctcattggaggccaagcaccgggaggtggtctccagcctccagaagaagatacaggaagctcaacagaaagaggaggcccagctgcagaagtgccttgggcaagtggagcacagagttcaccagaagtcttatcacgtggctgggtatgagcacgagctcagcagtctcctgcgagagaagcgccaggaagtggaaggggagcatgagaggaggttggacaagatgaaggaggagcaccagcaagtgatggctaaggccagagagcagtatgaagctgaggagaggaagcagcgggctgagcttctggggcacctgaccggagagctggagcgcctgcagagggcccatgaacgagaactggagactgtgaggcaggagcaacacaagcgtcttgaggacttgcggcgccggcacagggagcaggaaaggaagctccaggatttagagttggaccttgaaaccagagctaaagatgtcaaggccagattggctctgctggaggtccaggtgagggatctgcaggagtccttgacctcagagtcatag

SEQ ID NO: 1954 - DNA, 3646 bp, Homo sapiens
  source 1..3646: mol_type = genomic DNA
gcgtcctgctttcctgtcaccgcaagggccgggccgcccgctgcttcccacccctgcagcctgcgctgcggagtacaaagagcggagggcgcgcttgacctggggctggggtccagccctgcccgccggtgccgtctgctcaactagttaggtggctgctgcgcaggattccgggaaacgtcagtctgccatgagccggcaggactgagcctgcgactcggagcagagcgagtgaggggcagagcggtgctcaggagtgcggcccggggccgccggagctgggggtcgggccgggcgatgatccggggcttcgaggcgcccatggcggagaacccgccgccgccgccgccgcccgtcatcttctgccacgactccccgaagcgggtgctggtgtcggtcatcaggacgaccccgatcaagccaacgtgcggcggtggaggggagccggagccgccgccgccgctcatccccaccagccccggcttcagcgacttcatggtgtacccgtggcgctggggcgagaacgcacacaacgtgacgctcagccctggggccgcgggggccgccgcctcggccgccctgcctgcagccgcagccgccgagcactcggggcttcgtggccggggcgcgcccccgcccgccgcctcggcctccgccgccgcctcgggaggtgaggacgaggaggaagcgagcagcccagacagcggccacctcaaggatggaatccgacgtggtaggcccagagcagatactgtccgcgatttaataaatgaaggagagcattcatccagcagaatccgttgtaacatctgtaatagggtgtttccacgggagaaatcgctccaggctcacaaaaggactcatacaggtgagaggccctatctgtgtgactatccagactgtggaaaagcctttgttcaaagtggacagctcaaaacacatcagcgtcttcacaccggagagaaaccttttgtttgttcagaaaatggctgcctgagcagattcacccatgcaaaccgccactgtccgaagcacccctacgccaggctgaagagagaggagcccacggacacactcagcaaacatcaggctgccgacaacaaggccgcggccgagtggctggcgaggtattgggaaatgagagagcagcgcacccccactttgaaaggcaagctggttcagaaggctgatcaggagcagcaggaccctctggaataccttcagtctgatgaagaggacgacgagaagagaggggcccagcgccggctgcaggagcagcgggagcgcctgcatggagccctcgcgctcatagagcttgccaacctgactggggcgccactccgacagtagcttggacactgactcttccactgtacaaaagtactgcccagcatacttaaaaagtagatccttgggcataagctaagcaccttatttgcttatcataggctgctattctgtagaaatttatgaagaatgttattgccccagaatatggggtgagagagaactgcacttttttaatatggaaatgaattcatcgtaaagtttaaaatattttgtaaatatggactgcacagtacagggtagaaaactacatattgtgggaagctagattttgcaagtttaatgcattcattggaagcagttctcacaggaagcactttctgaataagacacttgtttgaaaaacagaatggtacaaatagccaaagaagattaaaacagattatttataagatcatttttaacaatatatattagtatgtttaacaatactgtaaacactgaagcaagcaagaaagtataaaatatgtaagatagataattttaattgcaaaatactgtgcccactaaggctagagaaatgggaggctattttggaagatgttctaagtaatggacttagaagaaaatagatatttgaggctcttggtaagatgcacaatagttcagaatttttgaaattggagcaaaatcagtcttattctatctggggctttacaactcagtataatgtttaagtttgaaaagcacttgtcatccctagcatgttaacttgggaacttttgcacatttcatatttctcatttgctgaaattgagtgattaatcttgcaaagtctaggtaacatagtaattggtaattttaaaaatacatattaagggccctgtaatgagatttggcacttggatttttactaaagggacacctgcagggttgttttgtagtgaaatgttttagatcttttgttagcaaacactacattttaattgtactgcttgtttagaattattagcaaatggaagcctccatatttatattttcagtgcataaagccaccttcttgctttacttcagagtaacatgccaagctattttgtgttcactaaatttagctatcagttaaacactgcagaaaatattagctactcaaataagtaggcttctgaaatagttttaactgcaagtgtgttaacttgtgtggtggtttgaagccatttttccaaataaagttattaaacaccactttatgtactgaagcatgaacagaaaaatcaagagctgagcagaccacctcctttatgtaggcaaaacttccatcattttggcttttgttctaaacagaactaaatgacatgcatagcatggtaacttacagatcgcttaattggagtaaaactcagagtaatagagggaaatatgggctcttcagtgcctttttagcttttttgagttgaagacgttcctacagatgtagtttaaacattacaaagtaggcttctttatccaaaaatcccaatgtgtcatagtacacagatagtttaaaatatgtagccacggggaaggggaggcatgtaaatgtcttgaagaggagaaaaagtatgaaagaagatacgatagttacgaataatgtgtatgatgaggacatactttaaaaatgtaattcctctgtacagtaaattacaaatctttagggatttttttgtaataagagaatttatatttgtaatggtctaagaatttttttgtaatgtggtatatagaattttaatttggagcacttataagctggtaagagagactatagcatctgaattatcttggtttatgtttcagcatttcctctagaatttttgctctcaaatatgtgatttaatgaactaaaaacaacactcatcagtcttgggaaatttgaactttgatcaacttaactaaagaaggaagggtagtaagaatttttcaaatacaaatatttgccaattcacagatgataacatttaaggccttcaaaagtaagggtttttccttgtttctccagtcagcttttgtcaactctaatagttttttcataaacattttttatttgtataattgcaacagtttaagaaattatcacaactatttagaaacatttaaaatgttctttttgatataagctatatacttggaaaaatacattggtatctaaaatttgaggtgtgttaagactgctttttgttttaaaaaatggtttacattcaaatttttgaagtgttttatgcttcatatggctaagttgtagtttggcagagttaacagcataagaataaacatgctgtaattttaaaagatgctttgaataaaaatttattttaatttaaaa

SEQ ID NO: 1955 - DNA, 1825 bp, Homo sapiens
  source 1..1825: mol_type = genomic DNA
gctgggcagagccctgggggcgcggtgctgccgcctccaggtctccgccccgtgtgtgcgccctgcacttagggatccctccctcactgccccggtactcacaagcttctcggccccgaccttcgccctgggaggttctggccaggtgccgggaggggcgctgtgtcgagggcgatccccccaaagcagcgtcccgtgctaaaggtactgcttaggatgaatatgatttggagaaattccatttcttgtctaaggctaggaaaggtgccacacagataccaaagtggttaccacccagtggcccctctgggatcaaggattttaactgacccagccaaagtttttgaacacaacatgtgggatcacatgcagtggtctaaggaagaagaagcagcagccagaaaaaaagtaaaagaaaactcagctgtgcgagtccttctggaagagcaagttaagtatgagagagaagctagtaaatactgggacacattttacaagattcataagaataagtttttcaaggatcgtaattggctgttgagggaatttcctgaaattcttccagttgatcaaaaacctgaagagaaggcgagagaatcatcatgggatcatgtaaaaactagtgctacaaatcgtttctcaagaatgcactgtcctactgtgcctgatgaaaaaaatcattatgagaaaagttctggttcttcagaaggtcaaagcaaaacagaatctgatttttccaacctagactctgaaaaacacaaaaaaggacctatggagactggattgtttcctggtagcaatgccactttcaggatactagaggttggttgtggagctggaaatagtgtgtttccaattttgaacactttggagaactctccggagtcctttctgtattgttgtgattttgcttctggagctgtggagctcgtaaagtcacactcgtcctacagagcaacccagtgttttgcctttgttcatgatgtatgtgatgatggcttaccttacccttttccagatgggatcctggatgtcattctccttgtctttgtgctctcttctattcatcctgacaggatgcaaggtgttgtaaaccgactgtccaagttactgaaacctgggggaatgctgttatttcgagactatggaagatatgataagactcagcttcgttttaaaaagggacattgtttatctgaaaatttttatgttcgaggagatggtaccagagcatatttctttacaaaaggggaagtccacagtatgttctgcaaagccagtttagatgaaaagcaaaatctggttgatcgccgcttacaagttaataggaaaaaacaagtgaaaatgcactgagtgtggattcaaggcaaattccagaaaccattgcaccagactcagaatagctccaatatggtatctacactcctttcacaagactgaactttgtaacatgttaaggtacaaagccagaggactgtgctattcaaggactactgtaagtctattgtttctcaaaagacaatgagaaaaaaagaagagaatttgtatttcctgccgttttgtcataggtgagctcctttgtgcattttaagcacatgtaagtggttcagcacagtatgcctttttctgtgctttgaaaacttgatatgctcaagcttgtttgaatttattacatctaaccattttgcttgttccttgatttttataagcattcaattaagttagtattatgtcaagtaattttgagaaaatgtaacttgacattttttgcaagtaaaaaaaattgtttatttgtttaggcttagtaaaccagttcccaaacaca

SEQ ID NO: 1956 - DNA, 5777 bp, Homo sapiens
  source 1..5777: mol_type = genomic DNA
cagccgcgtcccccagccccggcctcccgcggacccatgcccgcccgtatcggctactacgagatcgaccgcaccatcggcaagggcaacttcgcggtggtcaagcgggccacgcacctcgtcaccaaggccaaggttgctatcaagatcatagataagacccagctggatgaagaaaacttgaagaagattttccgggaagttcaaattatgaagatgctttgccacccccatatcatcaggctctaccaggttatggagacagaacggatgatttatctggtgacagaatatgctagtggaggggaaatatttgaccacctggtggcccatggtagaatggcagaaaaggaggcacgtcggaagttcaaacagatcgtcacagctgtctatttttgtcactgtcggaacattgttcatcgtgatttaaaagctgaaaatttacttctggatgccaatctgaatatcaaaatagcagattttggtttcagtaacctcttcactcctgggcagctgctgaagacctggtgtggcagccctccctatgctgcacctgaactctttgaaggaaaagaatatgatgggcccaaagtggacatctggagccttggagttgtcctctacgtgcttgtgtgcggtgccctgccatttgatggaagcacactgcagaatctgcgggcccgcgtgctgagtggaaagttccgcatcccattttttatgtccacagaatgtgagcatttgatccgccatatgttggtgttagatcccaataagcgcctctccatggagcagatctgcaagcacaagtggatgaagctaggggacgccgatcccaactttgacaggttaatagctgaatgccaacaactaaaggaagaaagacaggtggaccccctgaatgaggatgtcctcttggccatggaggacatgggactggacaaagaacagacactgcagtcattaagatcagatgcctatgatcactatagtgcaatctacagcctgctgtgtgatcgacataagagacataaaaccctgcgtctcggagcacttcctagcatgccccgagccctggcctttcaagcaccagtcaatatccaggcggagcaggcaggtactgctatgaacatcagcgttccccaggtgcagctgatcaacccagagaaccaaattgtggagccggatgggacactgaatttggacagtgatgagggtgaagagccttcccctgaagcattggtgcgctatttgtcaatgaggaggcacacagtgggtgtggctgacccacgcacggaagttatggaagatctgcagaagctcctacctggctttcctggagtcaacccccaggctccattcctgcaggtggcccctaatgtgaacttcatgcacaacctgttgcctatgcaaaacttgcaaccaaccgggcaacttgagtacaaggagcagtctctcctacagccgcccacgctacagctgttgaatggaatgggcccccttggccggagggcatcagatggaggagccaacatccaactgcatgcccagcagctgctgaagcgcccacggggaccctctccgcttgtcaccatgacaccagcagtgccagcagttacccctgtggacgaggagagctcagacggggagccagaccaggaagctgtgcagagctctacctacaaggactccaacactctgcacctccctacggagcgtttctcccctgtgcgccggttctcagatggggctgcgagcatccaggccttcaaagctcacctggaaaaaatgggcaacaacagcagcatcaaacagctgcagcaggagtgtgagcagctgcagaagatgtacggggggcagattgatgaaagaaccctggagaagacccagcagcagcatatgttataccagcaggagcagcaccatcaaattctccagcaacaaattcaagactctatctgtcctcctcagccatctccacctcttcaggctgcatgtgaaaatcagccagccctccttacccatcagctccagaggggctgcatcttcttcccagtttcaaggcttaccttcccgcagtgcaatctttcagcagcaacctgagaactgttcctctcctcccaacgtggcactaacctgcttgggtatgcagcagcctgctcagtcacagcaggtcaccatccaagtccaagagcctgttgacatgctcagcaacatgccaggcacagctgcaggctccagtgggcgcggcatctccatcagccccagtgctggtcagatgcagatgcagcaccgtaccaacctgatggccaccctcagctatgggcaccgtcccttgtccaagcagctgagtgctgacagtgcagaggctcacagtgcacatcagcagccgccacactataccacgtcggcactacagcaggccctgctgtctcccacgccgccagactatacaagacaccagcaggtaccccacatccttcaaggactgctttctccccggcattcgctcaccggccactcggacatccggctgcccccaacagagtttgcacagctcattaaaaggcagcagcaacaacggcagcagcagcagcaacagcagcaacagcaagaataccaggaactgttcaggcacatgaaccaaggggatgcggggagtctggctcccagccttgggggacagagcatgacagagcgccaggctttatcttatcaaaatgctgactcttatcaccatcacaccagcccccagcatctgctacaaatcagggcacaagaatgtgtctcacaggcttcctcacccaccccgccccacgggtatgctcaccagccggcactgatgcattcagagagcatggaggaggactgctcgtgtgagggggccaaggatggcttccaagacagtaagagttcaagtacattgaccaaaggttgccatgacagccctctgctcttgagtaccggtggacctggggaccctgaatctttgctaggaactgtgagtcatgcccaagaattggggatacatccctatggtcatcagccaactgctgcattcagtaaaaataaggtgcccagcagagagcctgtcatagggaactgcatggatagaagttctccaggacaagcagtggagctgccggatcacaatgggctcgggtacccagcacgcccctccgtccatgagcaccacaggccccgggccctccagagacaccacacgatccagaacagcgacgatgcttatgtacagctggataacttgccaggaatgagtctcgtggctgggaaagcacttagctctgcccggatgtcggatgcagttctcagtcagtcttcgctcatgggcagccagcagtttcaggatggggaaaatgaggaatgtggggcaagcctgggaggtcatgagcacccagacctgagtgatggcagccagcatttaaactcctcttgctatccatctacgtgtattacagacattctgctcagctacaagcaccccgaagtctccttcagcatggagcaggcaggcgtgtaacaagaaacagagagttttgtgtacagcttgggaatgaaaaggttgattgtaaacccacagtatctagcagcgttgtgccaaattgcccttgtgtttctctccacccaaaatatcacagctgctttcctcacatttggttcatccgtgtgctgttcttttgggttctgagagggttttgccatgtttgcttgtatgaccaagtcaccaaggaaataaacaggaaggaaatccatgttctccatcttttgtgaaagtatatttgagttggtggttttttgttttgtttgggggtttgtgttttgttttgtttttggtatgttttcttccagaggtgatatactttcttttttttcttcctttcttttttttctttcgttccttttttgaaacaggagagcaaagcagttagagttcagaggccagcggcctcagggccactccctccctagccttcatcagcagagcaccctccatccccctgcattgctcttctgtgaaagcaaatactaaaggatgccatcctctggaatcctaatggcaggcaaagggagagaggaagggtgacggcttctggcacttagaaaacaaaaagaacaaaaaaagagaaacccccaagcctggaacgcagagaggtctttactgctgggatccacggaaaacatgtctgtcctagccaagatcatatgaagagtttggcacggaggctgagaatgacctggcatagatggtttgccagttaggatgtctcaatttgagcctttgcttttggtggataactcagctcccctcttgtaacctggaaagttggttgcctttatcatcctgctggttttatccatggactgaacacccaacagcagtgcactatgctttctatggcatctttcattctcattttatattgtgctataaaaaggattgtttctccatatatatattatatatgtgtgtatatatataatataatatatgtgtatatatatattatatatataatatataatataatatattatatatatattatatatataatatatatataaaatatatatatatatgctctcctctttcagcctctttgtcacagggaagaagtgtaggaggttgccttgggccctgcctctctcctaacctcctcttccccactgggtaccctcagcccctatattttaattcttgatcatgtagaaattgtttttggtaaatgttgatattattgttattatcattattaataaataaagagaaaaggaatttttgtttaaatgagaaatgtttaaccagattctgttctatttgaattgtgacttgcaccttttgttcaaagtatttcctttaggcattgtaattgtgaacagctcttacttgtgccagtgacagatgcagtggtctcctttccccagttgaagcagtgcatacgcagtagctattatttgtgttatctttatttctcttcattgttagaaaccaaagtcttctctgctggctggggctgagagagggtctgggttatctccttctgatcttcaaaacaagagagagaccttgaatacactgactcttccaccctttttttttctgggaaaggagagcaagaggtcccgagtcccctcctagtctttcatcctgaatttgcacagaggaaagcgggtgcccggcatggccatcctgatgttgctggcgggatccccatgcaccttgtccttctccactgatactggcagctcggctcctggacccaagatcccttgagtggaattctgcagtgcaagagcccttcgtgggagctgtcccatgtttccatggtccccagtctcccctccacttggtggggtcaccaactactcaccagaagggggcttaccaagaaagccctaaaaagctgttgacttatctgcgcttgttccaactcttatgcccccaacctgccctaccaccaccacgcgctcagcctgatgtgtttacatggtactgtatgtatgggagagcagactgcaccctccagcaacaacagatgaaagccagtgagcctactaaccgtgccatcttgcaaactacactttaaaaaaaactcattgctttgtattgtagtaaccaatatgtgcagtatacgttgaatgtatatgaacatactttcctatttctgttctttgaaaatgtcagaaatatttttttctttctcattttatgttgaactaaaaaggattaaaaaaaaaatctccagactcaagttgct

SEQ ID NO: 1957 - DNA, 6213 bp, Homo sapiens
  source 1..6213: mol_type = genomic DNA
aacaagatggcggcggcggcggcgagcggagctggcggggctgccggggccgggactgggggagccgggcccgcgggccgcctgctgcctccgcccgcgccggggtccccagccgcccccgctgccgtgtcccctgcggccggccagccgcgtcccccagccccggcctcccgcggacccatgcccgcccgtatcggctactacgagatcgaccgcaccatcggcaagggcaacttcgcggtggtcaagcgggccacgcacctcgtcaccaaggccaaggttgctatcaagatcatagataagacccagctggatgaagaaaacttgaagaagattttccgggaagttcaaattatgaagatgctttgccacccccatatcatcaggctctaccaggttatggagacagaacggatgatttatctggtgacagaatatgctagtggaggggaaatatttgaccacctggtggcccatggtagaatggcagaaaaggaggcacgtcggaagttcaaacagatcgtcacagctgtctatttttgtcactgtcggaacattgttcatcgtgatttaaaagctgaaaatttacttctggatgccaatctgaatatcaaaatagcagattttggtttcagtaacctcttcactcctgggcagctgctgaagacctggtgtggcagccctccctatgctgcacctgaactctttgaaggaaaagaatatgatgggcccaaagtggacatctggagccttggagttgtcctctacgtgcttgtgtgcggtgccctgccatttgatggaagcacactgcagaatctgcgggcccgcgtgctgagtggaaagttccgcatcccattttttatgtccacagaatgtgagcatttgatccgccatatgttggtgttagatcccaataagcgcctctccatggagcagatctgcaagcacaagtggatgaagctaggggacgccgatcccaactttgacaggttaatagctgaatgccaacaactaaaggaagaaagacaggtggaccccctgaatgaggatgtcctcttggccatggaggacatgggactggacaaagaacagacactgcagtcattaagatcagatgcctatgatcactatagtgcaatctacagcctgctgtgtgatcgacataagagacataaaaccctgcgtctcggagcacttcctagcatgccccgagccctggcctttcaagcaccagtcaatatccaggcggagcaggcaggtactgctatgaacatcagcgttccccaggtgcagctgatcaacccagagaaccaaattgtggagccggatgggacactgaatttggacagtgatgagggtgaagagccttcccctgaagcattggtgcgctatttgtcaatgaggaggcacacagtgggtgtggctgacccacgcacggaagttatggaagatctgcagaagctcctacctggctttcctggagtcaacccccaggctccattcctgcaggtggcccctaatgtgaacttcatgcacaacctgttgcctatgcaaaacttgcaaccaaccgggcaacttgagtacaaggagcagtctctcctacagccgcccacgctacagctgttgaatggaatgggcccccttggccggagggcatcagatggaggagccaacatccaactgcatgcccagcagctgctgaagcgcccacggggaccctctccgcttgtcaccatgacaccagcagtgccagcagttacccctgtggacgaggagagctcagacggggagccagaccaggaagctgtgcagagctctacctacaaggactccaacactctgcacctccctacggagcgtttctcccctgtgcgccggttctcagatggggctgcgagcatccaggccttcaaagctcacctggaaaaaatgggcaacaacagcagcatcaaacagctgcagcaggagtgtgagcagctgcagaagatgtacggggggcagattgatgaaagaaccctggagaagacccagcagcagcatatgttataccagcaggagcagcaccatcaaattctccagcaacaaattcaagactctatctgtcctcctcagccatctccacctcttcaggctgcatgtgaaaatcagccagccctccttacccatcagctccagaggttaaggattcagccttcaagcccaccccccaaccaccccaacaaccatctcttcaggcagcccagtaatagtcctccccccatgagcagtgccatgatccagcctcacggggctgcatcttcttcccagtttcaaggcttaccttcccgcagtgcaatctttcagcagcaacctgagaactgttcctctcctcccaacgtggcactaacctgcttgggtatgcagcagcctgctcagtcacagcaggtcaccatccaagtccaagagcctgttgacatgctcagcaacatgccaggcacagctgcaggctccagtgggcgcggcatctccatcagccccagtgctggtcagatgcagatgcagcaccgtaccaacctgatggccaccctcagctatgggcaccgtcccttgtccaagcagctgagtgctgacagtgcagaggctcacagcttgaacgtgaatcggttctcccctgctaactacgaccaggcgcatttacacccccatctgttttcggaccagtcccggggttcccccagcagctacagcccttcaacaggagtggggttctctccaacccaagccctgaaagtccctccacttgaccaattccccaccttccctcccagtgcacatcagcagccgccacactataccacgtcggcactacagcaggccctgctgtctcccacgccgccagactatacaagacaccagcaggtaccccacatccttcaaggactgctttctccccggcattcgctcaccggccactcggacatccggctgcccccaacagagtttgcacagctcattaaaaggcagcagcaacaacggcagcagcagcagcaacagcagcaacagcaagaataccaggaactgttcaggcacatgaaccaaggggatgcggggagtctggctcccagccttgggggacagagcatgacagagcgccaggctttatcttatcaaaatgctgactcttatcaccatcacaccagcccccagcatctgctacaaatcagggcacaagaatgtgtctcacaggcttcctcacccaccccgccccacgggtatgctcaccagccggcactgatgcattcagagagcatggaggaggactgctcgtgtgagggggccaaggatggcttccaagacagtaagagttcaagtacattgaccaaaggttgccatgacagccctctgctcttgagtaccggtggacctggggaccctgaatctttgctaggaactgtgagtcatgcccaagaattggggatacatccctatggtcatcagccaactgctgcattcagtaaaaataaggtgcccagcagagagcctgtcatagggaactgcatggatagaagttctccaggacaagcagtggagctgccggatcacaatgggctcgggtacccagcacgcccctccgtccatgagcaccacaggccccgggccctccagagacaccacacgatccagaacagcgacgatgcttatgtacagctggataacttgccaggaatgagtctcgtggctgggaaagcacttagctctgcccggatgtcggatgcagttctcagtcagtcttcgctcatgggcagccagcagtttcaggatggggaaaatgaggaatgtggggcaagcctgggaggtcatgagcacccagacctgagtgatggcagccagcatttaaactcctcttgctatccatctacgtgtattacagacattctgctcagctacaagcaccccgaagtctccttcagcatggagcaggcaggcgtgtaacaagaaacagagagttttgtgtacagcttgggaatgaaaaggttgattgtaaacccacagtatctagcagcgttgtgccaaattgcccttgtgtttctctccacccaaaatatcacagctgctttcctcacatttggttcatccgtgtgctgttcttttgggttctgagagggttttgccatgtttgcttgtatgaccaagtcaccaaggaaataaacaggaaggaaatccatgttctccatcttttgtgaaagtatatttgagttggtggttttttgttttgtttgggggtttgtgttttgttttgtttttggtatgttttcttccagaggtgatatactttcttttttttcttcctttcttttttttctttcgttccttttttgaaacaggagagcaaagcagttagagttcagaggccagcggcctcagggccactccctccctagccttcatcagcagagcaccctccatccccctgcattgctcttctgtgaaagcaaatactaaaggatgccatcctctggaatcctaatggcaggcaaagggagagaggaagggtgacggcttctggcacttagaaaacaaaaagaacaaaaaaagagaaacccccaagcctggaacgcagagaggtctttactgctgggatccacggaaaacatgtctgtcctagccaagatcatatgaagagtttggcacggaggctgagaatgacctggcatagatggtttgccagttaggatgtctcaatttgagcctttgcttttggtggataactcagctcccctcttgtaacctggaaagttggttgcctttatcatcctgctggttttatccatggactgaacacccaacagcagtgcactatgctttctatggcatctttcattctcattttatattgtgctataaaaaggattgtttctccatatatatattatatatgtgtgtatatatataatataatatatgtgtatatatatattatatatataatatataatataatatattatatatatattatatatataatatatatataaaatatatatatatatgctctcctctttcagcctctttgtcacagggaagaagtgtaggaggttgccttgggccctgcctctctcctaacctcctcttccccactgggtaccctcagcccctatattttaattcttgatcatgtagaaattgtttttggtaaatgttgatattattgttattatcattattaataaataaagagaaaaggaatttttgtttaaatgagaaatgtttaaccagattctgttctatttgaattgtgacttgcaccttttgttcaaagtatttcctttaggcattgtaattgtgaacagctcttacttgtgccagtgacagatgcagtggtctcctttccccagttgaagcagtgcatacgcagtagctattatttgtgttatctttatttctcttcattgttagaaaccaaagtcttctctgctggctggggctgagagagggtctgggttatctccttctgatcttcaaaacaagagagagaccttgaatacactgactcttccaccctttttttttctgggaaaggagagcaagaggtcccgagtcccctcctagtctttcatcctgaatttgcacagaggaaagcgggtgcccggcatggccatcctgatgttgctggcgggatccccatgcaccttgtccttctccactgatactggcagctcggctcctggacccaagatcccttgagtggaattctgcagtgcaagagcccttcgtgggagctgtcccatgtttccatggtccccagtctcccctccacttggtggggtcaccaactactcaccagaagggggcttaccaagaaagccctaaaaagctgttgacttatctgcgcttgttccaactcttatgcccccaacctgccctaccaccaccacgcgctcagcctgatgtgtttacatggtactgtatgtatgggagagcagactgcaccctccagcaacaacagatgaaagccagtgagcctactaaccgtgccatcttgcaaactacactttaaaaaaaactcattgctttgtattgtagtaaccaatatgtgcagtatacgttgaatgtatatgaacatactttcctatttctgttctttgaaaatgtcagaaatatttttttctttctcattttatgttgaactaaaaaggattaaaaaaaaaatctccagactcaagttgctaa

SEQ ID NO: 1958 - DNA, 2030 bp, Homo sapiens
  source 1..2030: mol_type = genomic DNA
cccgtccattgtgcgccgctgccccgtgtctccctccagccgcgaccatgcccaggaagaaggcggcggcggcggcctgggaggagccgagctcgggcaacggcactgcccgcgccgggcccaggaaacgcggcggcccggcgggcaggaagcgcgagcggcccgagcgctgcagtagcagcagcggcggcggcagcagcggcgacgaggacggcctggagctcgacggggcccccggcgggggcaagcgcgcggcgcggccggcgacagcaggcaaggcgggcggcgcggccgtggtcatcaccgaacccgagcacaccaaggagcgcgtcaaacttgaagggtcaaagtgcaaagggcagcttttgatttttggggcaaccaactgggacttgattggtcgaaaagaagtgcctaaacagcaagctgcttaccgcaatctcggtcagaatttgtgggggccccacagatatgggtgcctggcgggggtccgggtgcggacagtggtctcgggctcgtgtgctgcacacagcctcctcatcaccacggaagggaagctgtggagctggggtcgaaatgagaaggggcagctgggacatggtgacaccaagagagtagaagcccctagactcatcgagggtcttagccacgaagtgattgtgtctgcagcatgtgggcggaaccacaccttggccttgacggaaacgggctccgtgtttgcgtttggggaaaacaagatggggcagctgggccttggcaaccagacagacgctgttcccagccccgcgcagataatgtacaacggccagccaattaccaaaatggcctgtggggctgaattcagtatgataatggactgcaaaggaaacctctattcctttgggtgccctgaatatggtcagctgggacacaactcagatgggaagttcatcgcccgggcacagcggatagagtacgactgtgaactagttccccggcgagtggccatcttcattgagaagacgaaagatggacagattctgcctgtaccaaacgtggttgtacgagacgtggcctgtggcgctaaccacacgctggtcctggactcccagaagcgagtcttctcctggggctttggtggctatggccggctgggccacgcagagcagaaggatgagatggtcccccgcctggtgaagctgtttgacttccctgggcgtggggcttcccagatctatgctggttacacctgctcctttgctgtcagtgaagtgggtggtctgtttttctggggggccaccaacacctcccgtgaatctaccatgtacccaaaagcagtgcaggacctctgcggctggagaatccggagcctggcttgtgggaagagcagcatcattgtggccgccgatgagagcaccatcagctggggtccgtcaccgacctttggggaactgggctacggggaccacaagcccaagtcttccactgcagcccaggaggtaaagactctggatggcattttctcagagcaggtcgccatgggctactcacactccttggtgatagcaagagatgaaagtgagactgagaaagagaagatcaagaaactgccagaatacaacccccgaaccctctgatgctcccggagactcctccgactccacacctctcgcggcagctgtcatttccatgtgcactgggacgggaagtcaaacgaggaatttaaaaaagcaaaagttgaccgaaggtgcatttttgtttagactccctgaggttccgttttacacatgatccaacgttaactacctttttttctgtatgctttccaaagtccttttttttcccttaatgttgaattaaaatacttgctcatagttgatttaccattcctacaaaagaggcagaaactttgagcaatctaggttttttttttttttaagttttttctttcttcctctcctgaatacactccccaaaacacccctttccagttacaattagcatcgtgatccaagcagatgccacatggaagaggaatcgccatttactca

SEQ ID NO: 1959 - DNA, 4087 bp, Homo sapiens
  source 1..4087: mol_type = genomic DNA
cgcacatgtgtttctgttttgtgttgtagcatttgttctggaagctcgtatttacattttaagtgtatctggtgagtgggctggagccctcgtctgggccggaaaaaaaaaagccctccgatccgtcttttagttgcttctcttccttttttctctccggtttctcatcactccaaccagccgcgaccatgcccaggaagaaggcggcggcggcggcctgggaggagccgagctcgggcaacggcactgcccgcgccgggcccaggaaacgcggcggcccggcgggcaggaagcgcgagcggcccgagcgctgcagtagcagcagcggcggcggcagcagcggcgacgaggacggcctggagctcgacggggcccccggcgggggcaagcgcgcggcgcggccggcgacagcaggcaaggcgggcggcgcggccgtggtcatcaccgaacccgagcacaccaaggagcgcgtcaaacttgaagggtcaaagtgcaaagggcagcttttgatttttggggcaaccaactgggacttgattggtcgaaaagaagtgcctaaacagcaagctgcttaccgcaatctcggtcagaatttgtgggggccccacagatatgggtgcctggcgggggtccgggtgcggacagtggtctcgggctcgtgtgctgcacacagcctcctcatcaccacggaagggaagctgtggagctggggtcgaaatgagaaggggcagctgggacatggtgacaccaagagagtagaagcccctagactcatcgagggtcttagccacgaagtgattgtgtctgcagcatgtgggcggaaccacaccttggccttgacggaaacgggctccgtgtttgcgtttggggaaaacaagatggggcagctgggccttggcaaccagacagacgctgttcccagccccgcgcagataatgtacaacggccagccaattaccaaaatggcctgtggggctgaattcagtatgataatggactgcaaaggaaacctctattcctttgggtgccctgaatatggtcagctgggacacaactcagatgggaagttcatcgcccgggcacagcggatagagtacgactgtgaactagttccccggcgagtggccatcttcattgagaagacgaaagatggacagattctgcctgtaccaaacgtggttgtacgagacgtggcctgtggcgctaaccacacgctggtcctggactcccagaagcgagtcttctcctggggctttggtggctatggccggctgggccacgcagagcagaaggatgagatggtcccccgcctggtgaagctgtttgacttccctgggcgtggggcttcccagatctatgctggttacacctgctcctttgctgtcagtgaagtgggtggtctgtttttctggggggccaccaacacctcccgtgaatctaccatgtacccaaaagcagtgcaggacctctgcggctggagaatccggagcctggcttgtgggaagagcagcatcattgtggccgccgatgagagcaccatcagctggggtccgtcaccgacctttggggaactgggctacggggaccacaagcccaagtcttccactgcagcccaggaggtaaagactctggatggcattttctcagagcaggtcgccatgggctactcacactccttggtgatagcaagagatgaaagtgagactgagaaagagaagatcaagaaactgccagaatacaacccccgaaccctctgatgctcccggagactcctccgactccacacctctcgcggcagctgtcatttccatgtgcactgggacgggaagtcaaacgaggaatttaaaaaagcaaaagttgaccgaaggtgcatttttgtttagactccctgaggttccgttttacacatgatccaacgttaactacctttttttctgtatgctttccaaagtccttttttttcccttaatgttgaattaaaatacttgctcatagttgatttaccattcctacaaaagaggcagaaactttgagcaatctaggttttttttttttttaagttttttctttcttcctctcctgaatacactccccaaaacacccctttccagttacaattagcatcgtgatccaagcagatgccacatggaagaggaatcgccatttactcagaaaaaatgtcccttacaggaaccggcagcagctaggcagtcaccggcccgcctccatccaaaatcacgctcgcgtgcttcggaagcatccgggtcactccttctccgctttttcttgcagatgggcctaggccggtgtcggttctgtttctccccttggctgcctgtacgcccacagccttctggctgcgacattatagaatcggccgtgtcccccctggtgggggattggggatctgtgtttagccatttatatctactttagctgttaaagaggtccaaatgaaaatcaggtgattgtggaaccatggggacttgggggtggggcagaggtgggaacatttgtatcagttgagtcagcttggtggctccctgtggagccagggctgagccttgtcacgcgcactcgccaattaagagatggaccagccagcagtcaagtgcattctccagtccttgcaagaaggatcagccctttctgtgccagcctcgatcgccttgtgctttggtctctttttctcccccccgcctggatcctgcctcgcgcgggccgtcctgttgctgagactcggggtaccgttctgctgacccagctccctttagtcacgtttgcttggctctggtaccaaatagttgggattaccgaagagtccccttccttgcgtgtcagcacggatgctgtgactgccacctgcgtcctcgtcaagtgcccgagctcgccgccgtgtgtgctgcgctgagtgagttatgaggtgcctttcccggaaccctcctctcgcctggacccaagagaggcgacagctgtggctggggctcttggtttccagagggtctggactggtttgggtgctttaaaatagatatttagttcagtggtgcttatgggggagatgggactagaacttaagtgtgagacttgggtggatgggaaagttaaatattggtctcttcaagttttttttttcttttgctttgttaccacttgtcactgtctccatgttaaaatgccaaaaatgatgtagttgttgttgcttttttccctattttccaccccagtcgctccttaccgtgactcctgcccttggagggcatgtagcagtgtctgtcctgccagtcccaaggccctgtgggaggagactggcctgcatctctctaagacttagtctgacgccacgcgcatctcttgttctgtgttcaatcagtagtccaggggagaagcttctgctacttcagagctttgctaaactaacctaatttgtccaaatcaccccaaaaccaccatctctgacgtaagcttccatgcgacagcctgatccgtttccctggacaggtctctttcctggaatgcagcccaggcacctgtgctcctggcacccttgaggtctctcctttgagccgtggtcaccgagagggttgaggacgcagcacccgaggtcccagcctttgcaggagcctccctgggcttagctggacttagatcttcggtggcctcatgtaaacgtggcagccagcctcttctagaaccctagcccagggactggagcaggaaagggaccttcaaagtgaagactgccttgtcccgcagctccttctggcttagattgaaaaatgggcttcctaatgggttaaatcctttaaaacaaggagttgtgggggaagggtgtcgtgcactcctagagaaaggtacacagttgcccggttgggaatgtgcttggcgctgaccctgcgggcatctgactggtcttccagctcaggaaaaagaatttgaaagaggcttagcgtgaaggggaatcaaagaggaggttgtgatttggtcgaaggtgcctggtttagtgctgtaattgtcttattattttttttatatatatatttcttggagtaaacattttaaataaacaacaacattgtctactgtc

SEQ ID NO: 1960 - DNA, 855 bp, Homo sapiens
  source 1..855: mol_type = genomic DNA
aaaaggggcgggcgagcacggcccgcgggcggcgttcgctggagctggtggaccgggcggctgaccgaggggcggacgcgcggcggggcagaccgctggggactgcgggcggcgctgtgtccgtcgccatgacagatcagacctattgtgaccgcctggtgcaggacacgcctttcctgacaggccatgggcgcttgagtgagcagcaggtggacaggatcatcctccagctgaaccgttactacccacagatccttaccaacaaggaggcggaaaagttccggaaccccaaggcatccttgcgtgtgcggctctgtgacctcctgagccacctgcagcggagcggtgagcgggactgccaggagttctaccgagccctgtatatccatgcccagcccctgcacagccgcctgcccagccgccacgctctgcagaactcagattgcacagagctagactcgggcagccagagcggcgagctgagtaacaggggacccatgagcttcctggctggcctgggccttgctgtgggactggccctgctcctgtactgctatccgccagaccccaagggcctgccagggacccggcgcgtcctcggtttctcgcctgtcatcatcgacagacatgtcagccgctacctgctggccttcctggcagatgacctaggggggctctgacagaccctggacccagggcctcacctgccactcaaccaaagagtcctcgagccggcccgccaaggggactgctgcttctttttctaaatgcatatttttcattatttataatttgtgtaaaaaacacaccttcaccttacaaggtgctgaccatattaaatgttcaggttctctc

SEQ ID NO: 1961 - DNA, 882 bp, Homo sapiens
  source 1..882: mol_type = genomic DNA
accctgagtccggggctcgggcctcagggcccgcgagtctgcgaagccagccctttcagtaggagccttcgctgccaaggtgcagatgttggacctgctggacatcgaaggcctctaccctctgtacaaccgggttgagcgatacctggaagagtttcccgaggagagaaaaaccttacaaatagatgggccttatgatgaagcattttaccagaagctgcttgacctttccactgaggatgacgggacagtggccttcgcgctaacgaaggtgcagcagtaccgcgtcgccatgactgccaaggactgctccatcatgattgcactgtctccctgtctgcaggatgccagctctgatcaaaggcctgtcgtcccttcatcgaggtccaggtttgccttttccgtgtctgtgctggaccttgacctcaagccctacgagagcattccccatcagtataaactggacggcaagatcgtcaactattattcaaagactgtacgtgccaaagacaacgccgtgatgtcgactcggttcaaggaaagcgaagattgcacattagttctccacaaggtctaactctttccctgcagtgtctttgaaacttgaacataatgtgaaggctgaatgatagagatattttctgttgtgttgggtgacctttggttgtgaatgtttttgcttttaaccccttttgaggtgggattgcctcttggagacatggaattgaagagcactagaaacaacttcctggacaaggaatgtaggaagtgagtgctgtgtcccaggaagctgctcacactcttaaaatggaagtgtccgttaagccctgggaagacgttctggatagttcttctttcccaaccagggctcatgtctgattc

SEQ ID NO: 1962 - DNA, 1334 bp, Homo sapiens
  source 1..1334: mol_type = genomic DNA
ataccctccatgggcagtaatgggatgactatccccagggagcattgcgaaggagagaggcggctgagggactgcactttctggggccccccgggagagtcagagggcagttaagagggatcacaggcccggcttggtactgtcactccccttcccactccctgctctcagcattctgtcacctccctaccccgtcgcggtgcccagccatggccagacctcccgtgcccggttcggtggttgtcccaaactggcacgagagtgccgagggcaaggagtacctggcttgcattctgcgcaagaaccgccggcgggtgtttgggctgcttgagcggccagtgctgctgccgcctgtgtccattgacactgccagctacaagatctttgtgtccgggaagagtggtgtgggcaagacggcgctggtggccaagctggctggcctggaggtgcctgtggtgcaccacgagaccaccggcatccagaccaccgtggtattttggccagccaagctgcaggccagcagccgtgtcgtcatgtttcgttttgagttctgggactgtggagagtctgcactcaaaaagttcgatcatatgctgctggcttgcatggagaacacagatgccttcctcttcctcttctccttcactgaccgtgcctcctttgaagacctccctggacagctggcccgcatagcaggtgaggcccctggtgtcgtcaggatggtcatcggctccaaatttgaccagtacatgcacacggacgtgcccgagcgggacctcacagccttccggcaggcctgggagctgcccctgctacgggtgaagagtgtgccggggcggcggctggctgatgggcgcacactggacgggcgggctgggctggccgacgttgcccacatactcaatggccttgctgagcagctgtggcaccaggaccaggtggcggctggcctgcttcccaaccccccagagagtgctcctgaatgagtcacgagtggttgcctgtgatcccacccccaaccctcaggtctcgacatagggctggaggctggggcaggaacatggatcctatctggaggactggccagcatggcctgatcagggaggatgtggccagagaaggcccacccgcgagcagcgctttccttgcagaattcatggcagggaggtggggaccaaggccctgagctcgaacatctcccgtggcctttccccctttggcagcaccgatggaggatgactgggagagggggtgcctctcaagttacttcaatcaagaacctgtattggttgaggtgacaccatctgttgtaacagataaaccccgaaatccca

SEQ ID NO: 1963 - DNA, 466 bp, Homo sapiens
  source 1..466: mol_type = genomic DNA
gggaggagagaaaagccatggccgacaaggtcctgaaggagaagagaaagcagtttatccgttcagtgggcgaaggtacaataaatggcttactgggtgaattattggagacaagggtgctgagccaggaagagatagagatagtaaaatgtgaaaatgctacagttatggataaggcccgagctttgcttgactctgttattcggaaaggggctccagcatgccaaatttgcatcacatacatttgtgaagaagacagtcacctggcagggacgctgggactctcagcaggtccaacatctggaaatcaccttactacacaagattctcaaatagtacttccttcctaggttcaactttcatttgagcagccagatgataaagcacagatgcccagcactgaaagagttacttcgacaagacgtttctatctcttcccagtacattaaaataaggaagctgtatg

SEQ ID NO: 1964 - DNA, 1257 bp, Homo sapiens
  source 1..1257: mol_type = genomic DNA
ggcctgtacattttcaaggaattcttgagaggttcttggagagattctgggagccaaacactccattgggatcctagctgttttagagaacaacttgtaatggagccttcatctcttgagctgccggctgacacagtgcagcgcattgcggctgaactcaaatgccacccaacggatgagagggtggctctccacctagatgaggaagataagctgaggcacttcagggagtgcttttatattcccaaaatacaggatctgcctccagttgatttatcattagtgaataaagatgaaaatgccatctatttcttgggaaattctcttggccttcaaccaaaaatggttaaaacatatcttgaagaagaactagataagtgggccaaaatagcagcctatggtcatgaagtggggaagcgtccttggattacaggagatgagagtattgtaggccttatgaaggacattgtaggagccaatgagaaagaaatagccctaatgaatgctttgactgtaaatttacatcttctaatgttatcattttttaagcctacgccaaaacgatataaaattcttctagaagccaaagccttcccttctgatcattatgctattgagtcacaactacaacttcacggacttaacattgaagaaagtatgcggatgataaagccaagagagggggaagaaaccttaagaatagaggatatccttgaagtaattgagaaggaaggagactcaattgcagtgatcctgttcagtggggtgcatttttacactggacagcactttaatattcctgccatcacaaaagctggacaagcgaagggttgttatgttggctttgatctagcacatgcagttggaaatgttgaactctacttacatgactggggagttgattttgcctgctggtgttcctacaagtatttaaatgcaggagcaggaggaattgctggtgccttcattcatgaaaagcatgcccatacgattaaacctgcgagatcggagttctttaattaggaatggaatgcaacagatttggacaagtcaaggacaagagctttagagagaccaaagagtttttcactgttaaagtgtccagtatgtagccgagaaccatatggagaacatcaaatacagtggaacaaatgtaactgctattgatgtcacactttgtgaagtagtctttgttgcttaaaaagggtgacatctagtggctaaacatgttatttcaaataaataatatcgaaataa

SEQ ID NO: 1965 - DNA, 4122 bp, Homo sapiens
  source 1..4122: mol_type = genomic DNA
gcctccttccccgccggccgcgctccggagcctccgggccgcggtggagcgagggcccaggcgaggcgagggccgggcggcgggcgccgggccccgcggccggcacgacggagcccccgtacggccggcggcagcggttggcggcggcccccggcccccggcgcgggaagcggcggcggggcggcggcggcggtggcggtggcggtggcggcgacggtggcagcgccatggagccgggggaggtgaaggaccggatcctggagaacatctcgctgtcggtgaagaagttgcagagctattttgctgcatgtgaggatgagatccctgccatccggaaccatgacaaggtcctacagcgtctgtgtgagcacctggaccacgccctgctgtacggactgcaagacctctcctctggctactgggtgctcgtggtgcattttactcggagagaggccatcaagcagatcgaggtgctgcagcacgtggccaccaacctggggcgcagccgtgcctggctgtacctggccctcaacgagaactccttggagagctacctgcggttgttccaggagaacctgggcctgctgcataagtactacgtcaagaatgccctggtctgcagccacgatcacctgacgctcttcctgaccttggtgtccgggctagagttcattcgtttcgagctggatctggatgccccttacctagacctggccccctacatgcccgactactacaaacctcagtacctgctggactttgaagaccgccttcccagctcggtccacggctcagacagtctgtccctcaactctttcaactccgtcacctccaccaacctggagtgggatgacagtgcgattgccccatctagtgaggattatgattttggagatgtgtttccagcagtgccgtctgtacccagcacagactgggaagatggagacctcacagacacggtcagtggtccccgctccacagcctccgacctgaccagcagcaaggcctccaccaggagccccacccagcgccagaaccccttcaacgaggagccggcagagactgtgtcctcctctgacaccacccccgtgcacaccacctctcaggagaaggaggaggcccaggccctggacccgccggatgcctgcacggagctcgaggtcatcagggtcaccaagaagaagaaaattggcaagaagaaaaagagcagatcagatgaggaggcaagtccactccaccccgcctgcagccagaagaaatgtgccaagcagggggacggtgacagccgcaacggcagcccaagccttgggcgggactcgccagacactatgcttgcctccccccaggaggagggagaggggccgagcagcaccacggagagcagcgagcgctccgagccgggcctgctgatccctgagatgaaggacacctccatggagcgcttggggcagcccctgagcaaggttatcgaccagctcaacgggcagctggaccccagcacctggtgctcccgtgctgagcccccagaccagtcctttcggaccggctctcccggggatgccccggagaggccgccgctttgcgactttagtgaggggctttcagccccaatggacttctaccgctttaccgtcgagagtccaagcactgttacatcaggtggcggccaccatgaccctgcagggcttggccaaccgctgcatgttcctagtagccctgaggctgctggccaagaagaagagggaggaggaggagagggacagacgcctcggcccctagaggataccacgagggaggctcaggagctggaggcccagctgtccctggtcagggaggggcctgtgtctgagccagagcctgggacccaggaggttctctgccagctcaagcgagaccagcccagcccgtgtctgagtagcgctgaggattctggggtggatgagggacaggggagcccttcggagatggtccattcctcggagttcagagtagacaacaatcacctgctcctgctcatgatccacgtgttccgagaaaacgaagagcagctgttcaaaatgatccggatgagcaccgggcacatggagggcaacctgcagctgctgtacgtgctgctcacagactgctatgtctacctgctccggaaaggggccacagagaagccatacctggtggaagaggccgtttcttacaatgaacttgactatgtgtcggttggccttgaccagcagacggtgaagctggtgtgcaccaaccgcaggaagcagtttctgctggacacggctgatgtggcgctggctgagttctttttggcttctttgaagtcagccatgatcaaaggctgtcgagaacctccctaccccagcatcctgacggatgccaccatggagaagctggcactggccaaatttgtggcccaagaatcgaagtgtgaggcatctgctgtcaccgtgcgcttctacggccttgtgcactgggaggaccccacagacgagtccctgggccccacgccctgccactgctcaccccccgagggcaccatcaccaaagaaggcatgctgcactacaaggcgggcacctcctacctgggcaaggaacactggaagacgtgcttcgtggtgctcagcaacgggatcctctaccagtacccggaccgcaccgacgtcatccctctgctctcggtgaacatggggggggagcagtgcggtggctgccggagagccaacaccacggatcggccccacgccttccaggtcattctctccgaccggccctgcctggagctaagtgccgagagcgaggccgagatggccgagtggatgcagcatctctgccaggctgtgtccaaaggggtcatcccccagggcgtagctcccagcccctgcataccctgctgcctggtcctcacggatgaccgcctctttacgtgccatgaggattgccagaccagcttcttccgctctttgggcacagccaagctgggcgacatcagcgccgtctccaccgagccgggcaaggagtactgcgtcttggagttctcccaggacagccagcagctcctcccgccctgggtcatctacctgagctgcacttctgaactggaccgattgctgtctgcactgaactctgggtggaaaaccatctatcaggtggacctcccccacacggcgatccaggaagcctccaacaagaagaaattcgaggatgccttgagcctcatccacagcgcctggcagcggagcgacagtctctgccgcggccgagcctcccgagacccctggtgctgaggcagagctggttggcgtccctggtgggcaggaaaggaaggcacgccagccggcaggcacactgtcacggctgttgtcatgctgtcgggagcctacagtccacccctgccctgggcggcagaaccaccgagtgtggcttaagacagggtccctccactccagggatccagatcaggtgcccggcacccctgggcatcctgcccgacaggtagcgaatggaggtcgctgggggcagagggtccgagccctgtgggctctgcggatgcacgccctcctcccgggcctccgcctcagtctgcagaatttctgccgagtggcaccgagaacaccatccatctaaggacgaacaaaagaaccaggagggcgggacccccctcttcctctcctgggttgggggctggggccctgagtgcccagccatccttgttcgtgtttgaacactctcctggccacgtggggaagcgggaacacggggtgtctgcgcatgtttcctcctcctagctccatcactgcgcacacagctgcctgcctcgccagatgcaggggggcgggcagccctccctggctgccaggaggctctgcatgcccacagtcctgccctgcctgtcccctcaacccggcagtgcctgtagcaccgaggagcaaagggggtggatggggggcttggagaagggcggagcccaccagcctggcatccatgttgacatcttctgactgtcccctgcttggctggagccaggcccttccctagagtttcgtcaagagcctcctggggaaggggtcaggtggtttgggttttgttttttaaaataaaatagacatgttatattgccaa

SEQ ID NO: 1966 - DNA, 1981 bp, Homo sapiens
  source 1..1981: mol_type = genomic DNA
tgcttttgctgtgagcagccccaagcagctgggcgctccatcagaggcaactatgacttttgcaaagcaaacgtgcaaccccaagcagcggtctcccgggccggggctgcgcggccgccgctgtgctggcttttaacggtgggagggcaccatcctcttgctctgctctcgttctccagaaggctgtcccggggcccccactctccgtcccgctccggggacagtggctcgcctgctatgcgcggcagcccgcgccggggccggcaccagcagcgcccgggcggatgcagcgagcccacggaggggcatgcttccacgcaccaagtataaccgcttcaggaatgactcggtgacatcggtcgatgaccttctccacagcctgtcggtgagcggcggcggaggcaaggtttcggcggcgcgcgcgaccccggcggcggctccctacttggtgtccggcgaggcgctgcgcaaggcgcccgacgatgggcccggcagcctgggccacctgctccacaaggtgtcccacctgaaactctccagctcgggcctccgcggcctgtcgtcggccgcccgggagcgggcgggcgcgcggctctcgggcagctgcagcgcgcccagcctggccgccccggacggcagtgcgccctcggcgccccgcgccccggccatgagcgccgccaggaagggccggcccggcgacgagccgctgcccaggccccctcggggggcgccgcacgccagcgaccaggtgctggggcccggagtcacctacgtggtcaagtacttggggtgcattgaagttctgcgctcaatgaggtctcttgacttcagtacaagaacacaaattaccagggaagccatcagccgcgtctgtgaagctgtgcctggtgcgaagggagccttcaagaagagaaagcctccaagcaaaatgctgtccagcatcttgggaaagagcaacctccagtttgcgggaatgagcatctctctgaccatctccacggccagtctgaacctgcgaactccggactccaaacagatcatagcgaatcaccacatgcggtccatctccttcgcctctgggggagacccggacacaactgactatgttgcatatgtggctaaggaccctgttaatcgcagagcttgtcacattttggaatgctgtgatgggctggcccaggatgtcatcggctccatcggacaagcctttgagctccggtttaagcaatatttacagtgtcctaccaagattcccgctctccatgatcgaatgcagagtctggatgagccatggacggaagaggagggagatggctcagaccacccatactacaacagcatcccaagcaagatgcctcctccagggggctttcttgatactagactgaaacccagaccccatgctcctgacacagcccagtttgcaggaaaagagcagacttattaccagggaagacacttaggagacacttttggcgaagactggcagcaaacacctttaaggcaagggtcctcggacatctacagcacgccagaagggaaactgcacgtggcccccacgggagaagcacccacctacgtcaacactcagcagatcccaccacaggcctggccggctgcggtcagcagtgctgagagcagcccaaggaaagacctctttgacatgaaaccttttgaagatgctctcaagaaccagcccttggggcccgtgttaagcaaggcagcctccgtggagtgcatcagccctgtgtcacctagagccccagatgccaagatgctggaggaactgcaagccgagacttggtaccaaggagagatgagcaggaaggaggcagaggggctgctggagaaagacggagacttcctggtcaggaagagcaccaccaacccgggctcctttgtcctcacgggcatgcacaatggccaggccaagcacctgctgctcgtggacccagaaggcacgagaagtaactcctactga

SEQ ID NO: 1967 - DNA, 569 bp, Homo sapiens
  source 1..569: mol_type = genomic DNA
cccacgggagaagcacccacctacgtcaacactcagcagatcccaccacaggcctggccggctgcggtcagcagtgctgagagcagcccaaggaaagacctctttgacatgaaaccttttgaagatgctctcaagaaccagcccttggggcccgtgttaagcaaggcagcctccgtggagtgcatcagccctgtgtcacctagagccccagatgccaagatgctggaggaactgcaagccgagacttggtaccaaggagagatgagcaggaaggaggcagaggggctgctggagaaagacggagacttcctggtcaggaagagcaccaccaacccgggctcctttgtcctcacgggcatgcacaatggccaggccaagcacctgctgctcgtggacccagaaggcacgagaagtaactcctactgatgttggccatccctggcactacagctgtatctgaataatcccgtaggtttggctgaatttttcatcttcccgtcaagaaagacattcatctttacctggggcatagtccaagaattgctaagtttaataaatgcagttaaatc

SEQ ID NO: 1968 - DNA, 2394 bp, Homo sapiens
  source 1..2394: mol_type = genomic DNA
tgcttttgctgtgagcagccccaagcagctgggcgctccatcagaggcaactatgacttttgcaaagcaaacgtgcaaccccaagcagcggtctcccgggccggggctgcgcggccgccgctgtgctggcttttaacggtgggagggcaccatcctcttgctctgctctcgttctccagaaggctgtcccggggcccccactctccgtcccgctccggggacagtggctcgcctgctatgcgcggcagcccgcgccggggccggcaccagcagcgcccgggcggatgcagcgagcccacggaggggcatgcttccacgcaccaagtataaccgcttcaggaatgactcggtgacatcggtcgatgaccttctccacagcctgtcggtgagcggcggcggaggcaaggtttcggcggcgcgcgcgaccccggcggcggctccctacttggtgtccggcgaggcgctgcgcaaggcgcccgacgatgggcccggcagcctgggccacctgctccacaaggtgtcccacctgaaactctccagctcgggcctccgcggcctgtcgtcggccgcccgggagcgggcgggcgcgcggctctcgggcagctgcagcgcgcccagcctggccgccccggacggcagtgcgccctcggcgccccgcgccccggccatgagcgccgccaggaagggccggcccggcgacgagccgctgcccaggccccctcggggggcgccgcacgccagcgaccaggtgctggggcccggagtcacctacgtggtcaagtacttggggtgcattgaagttctgcgctcaatgaggtctcttgacttcagtacaagaacacaaattaccagggaagccatcagccgcgtctgtgaagctgtgcctggtgcgaagggagccttcaagaagagaaagcctccaagcaaaatgctgtccagcatcttgggaaagagcaacctccagtttgcgggaatgagcatctctctgaccatctccacggccagtctgaacctgcgaactccggactccaaacagatcatagcgaatcaccacatgcggtccatctccttcgcctctgggggagacccggacacaactgactatgttgcatatgtggctaaggaccctgttaatcgcagagcttgtcacattttggaatgctgtgatgggctggcccaggatgtcatcggctccatcggacaagcctttgagctccggtttaagcaatatttacagtgtcctaccaagattcccgctctccatgatcgaatgcagagtctggatgagccatggacggaagaggagggagatggctcagaccacccatactacaacagcatcccaagcaagatgcctcctccagggggctttcttgatactagactgaaacccagaccccatgctcctgacacagcccagtttgcaggaaaagagcagacttattaccagggaagacacttaggagacacttttggcgaagactggcagcaaacacctttaaggcaagggtcctcggacatctacagcacgccagaagggaaactgcacgtggcccccacgggagaagcacccacctacgtcaacactcagcagatcccaccacaggcctggccggctgcggtcagcagtgctgagagcagcccaaggaaagacctctttgacatgaaaccttttgaagatgctctcaagaaccagcccttggggcccgtgttaagcaaggcagcctccgtggagtgcatcagccctgtgtcacctagagccccagatgccaagatgctggaggaactgcaagccgagacttggtaccaaggagagatgagcaggaaggaggcagaggggctgctggagaaagacggagacttcctggtcaggaagagcaccaccaacccgggctcctttgtcctcacgggcatgcacaatggccaggccaagcacctgctgctcgtggacccagaaggcacgatccggacaaaggacagagtctttgacagtatcagccacctcatcaaccaccacctagaaagcagcctgcccattgtctctgcagggagtgagctgtgtctccagcagccagtggagaggaagcagtgacctggccagcactgctcccagcactgcgcaccaggtcaggaggacctggagtggactagaatcggggctgctggaactgggacagctgcctgtggctcagagccttcttcaaaagcttcaaaaggaaggcttcctttaaggtcaagtttcataaacttggttctgaatttctcatatgcatattaaaggtgtacatacctatacatcctgtacaaattatccctctatatttatattttttaagactaagaaagatgtaagactaatgttctgtgctgtatgtttttaatgaaaaaaaaaaa

SEQ ID NO: 1969 - DNA, 2402 bp, Homo sapiens
  source 1..2402: mol_type = genomic DNA
gaggtgggggcgggggccttaccccaccctggcaccggcaggcgcgggcggatggggggatgtcgcctagagccccccggccggcccacaaactcccgtcccccttccggctctgcctggacgtccctgcgggccccgggggaaagcacccaacttctcccgcctcggcttctagcagaaacgtgacggggctggactttgatcgccgagggctctctgctcttcagagtctgcttggaacgggataagagggatggtgccatccagggaagctctgctgggaccaggcacaactgccattaggtgccccaagaaattacagaaccaaaattacaagggccatggattgtcaaagggaaaagagcgagagcagagagcatcgatccggttcaagaccaccctcatgaacacactcatggacgtccttcgccacaggccaggatgggtggaagtgaaggacgaaggggagtgggatttctactggtgtgacgtcagctggctccgggagaacttcgaccacacctacatggatgaacatgtgcggatcagtcacttccggaaccactatgagctgacccggaagaactacatggtgaagaacctgaagcggttccggaagcagctggagcgtgaggcaggaaagctggaggcagccaagtgtgacttcttccccaaaacctttgagatgccttgcgagtaccacctgtttgtagaggagtttcgcaaaaacccaggaatcacctggatcatgaagcctgacacaagaagctctgacgaccagaaagatgatattcccgtggagaactatgtggctcagcgttacattgaaaatccttacctgataggaggccgcaagtttgacctgcgtgtctatgtgctggtgatgtcgtacatcccgctgcgggcctggctctaccgggatggctttgcccgattctccaacacccgcttcacactgaacagcattgatgaccagtatgttcacctcaccaacgtggctgtgcaaaaaacatctcccgactaccacccaaagaaggtggctcctggaggtcaatgcgtccccatcactgacagccagcagccaggaagactatgagctcaagacctgcctcctggaagacaccctgcatgttgtggacatggaagcgaggctcacgggaagggagaagcgagtcgggggctttgacctcatgtggaatgatggccctgttagcagagaggagggggctcctgacctgtcgggaatgggaaactttgtgaccaacacacatctcggctgcgtcaacgatcggaagaaacaactgaggcagctcttctgctcccttcaagttcagaagaaagcttccagttgatccccagctgccaggaggaaatcagccttagcaggccttgtgtttgagattgggagctgagccagaaaccggaaaaccctgggctcatgggcaggacagcttcgggagttgagtgtcaagcccgaagggaagacttttggaaggaaaatactggcaaatccaagaagtgaaccagccgactttaggaaagccagaagccaggctactctagaccttctgccttcagagcatgaggacttctcccactcatccctgtacctgaggcacaccaacccagacaggtccaggcatggactccaggttccctatttccagaaggaatgcgattagctttttttggcccagcacccaccctgccagggaggaaggggcaattttccagtgatgaaattgtgaatcaggcagtcacactggacaacatctagcaaggtgaattctgcaactccctactttatttacattttaaaataagcaatatattcatacggtttaaaatccaaagtttacaaaagggtatagggtgacatctccttccctcccacctgtgcgccccaaccctgcaggtgctgttctgagggaatcacactgtgcttgcacaaaaattattagcttataagacaccagccttccccttgctttcctcacttgatgtatcttggagcttgttccttattcttgattatagttgtatggtattgcactatctggagctaacacctgtgacccacactcatgttttaaaagtttctgcattagtcaaaaatatttaaaaggagattcaacttcacaacccatatgtctagcttctcttgaaaacacgtaagaactggccatgacagcctgtgtttctatgtaactatgagccagagccaaggagcggggggaccaggagaggtgtgcccctgccatgctgccatttgttatcacccgcctgtcaaatcacaggtttatttcaaggcaagaaccatgttcataggttgtattctaaatggagtggcgtgcccttactgaaggactagatgaggcaaataaagactagttgctgctatt

SEQ ID NO: 1970 - DNA, 1514 bp, Homo sapiens
  source 1..1514: mol_type = genomic DNA
aagcacgcgaggcgcgcggtggcggtttggatctggcccctggggaatcgcgttatgtcgcgaccgaagagagcagagagcatcgatccggttcaagaccaccctcatgaacacactcatggacgtccttcgccacaggccaggatgggtggaagtgaaggacgaaggggagtgggatttctactggtgtgacgtcagctggctccgggagaacttcgaccacacctacatggatgaacatgtgcggatcagtcacttccggaaccactatgagctgacccggaagaactacatggtgaagaacctgaagcggttccggaagcagctggagcgtgaggcaggaaagctggaggcagccaagtgtgacttcttccccaaaacctttgagatgccttgcgagtaccacctgtttgtagaggagtttcgcaaaaacccaggaatcacctggatcatgaagcctgacacaagaagctctgacgaccagaaagatgatattcccgtggagaactatgtggctcagcgttacattgaaaatccttacctgataggaggccgcaagtttgacctgcgtgtctatgtgctggtgatgtcgtacatcccgctgcgggcctggctctaccgggatggctttgcccgattctccaacacccgcttcacactgaacagcattgatgaccagtatgttcacctcaccaacgtggctgtgcaaaaaacatctcccgactaccacccaaagaagggctgcaagtggacgctgcagcgcttccggcagtacctggcgtccaaacacgggcccgaggcagtggagacactcttcagggacatcgacaacatctttgtcaaaagcctgcagagtgtgcagaaggtgatcatcagtgacaagcactgcttcgagctgtacggctatgacatcctcatcgaccaggacctcaagccgtggctcctggaggtcaatgcgtccccatcactgacagccagcagccaggaagactatgagctcaagacctgcctcctggaagacaccctgcatgttgtggacatggaagcgaggctgcgtcaacgatcggaagaaacaactgaggcagctcttctgctcccttcaagttcagaagaaagcttccagttgatccccagctgccaggaggaaatcagccttagcaggccttgtgtttgagattgggagctgagccagaaaccggaaaaccctgggctcatgggcaggacagcttcgggagttgagtgtcaagcccgaagggaagacttttggaaggaaaatactggcaaatccaagaagtgaaccagccgactttaggaaagccagaagccaggctactctagaccttctgccttcagagcatgaggacttctcccactcatccctgtacctgaggcacaccaacccagacaggtccaggcatggactccaggttccctatttccagaaggaatgcgattagctttttttggcccagcacccaccctgccagggaggaaggggcaattttccagtgatg

SEQ ID NO: 1971 - DNA, 1263 bp, Homo sapiens
  source 1..1263: mol_type = genomic DNA
aagcacgcgaggcgcgcggtggcggtttggatctggcccctggggaatcgcgttatgtcgcgaccgaagaaccaaaattacaagggccatggattgtcaaagggaaaagagcgagagcagagagcatcgatccggttcaagaccaccctcatgaacacactcatggacgtccttcgccacaggccaggatgggtggaagtgaaggacgaaggggagtgggatttctactggtgtgacgtcagctggctccgggagaacttcgaccacacctacatggatgaacatgtgcggatcagtcacttccggaaccactatgagctgacccggaagaactacatggtgaagaacctgaagcggttccggaagcagctggagcgtgaggcaggaaagctggaggcagccaagtgtgacttcttccccaaaacctttgagatgccttgcgagtaccacctgtttgtagaggagtttcgcaaaaacccaggaatcacctggatcatgaagcctgtagcccggtctcaagggaaaggcatcttcctcttccgtaggctgaaggacatcgtggactggaggaaggacacaagaagctctgacgaccagaaagatgatattcccgtggagaactatgtggctcagcgttacattgaaaatccttacctgataggaggccgcaagtttgacctgcgtgtctatgtgctggtgatgtcgatgttcacctcaccaacgtggctgtgcaaaaaacatctcccgactaccacccaaagaagggctgcaagtggacgctgcagcgcttccggcagtacctggcgtccaaacacgggcccgaggcagtggagacactcttcagggacatcgacaacatctttgtcaaaagcctgcagagtgtgcagaaggtgatcatcagtgacaagcactgcttcgagctgtacggctatgacatcctcatcgaccaggacctcaagccgtggctcctggaggtcaatgcgtccccatcactgacagccagcagccaggaagactatgagctcaagacctgcctcctggaagacaccctgcatgttgtggacatggaagcgaggctcacgggaagggagaagcgagtcgggggctttgacctcatgtggaatgatggccctgttagcagagaggagggggctcctgacctgtcgggaatgggaaactttgtgaccaacacacatctcggctgcgtcaacgatcggaagaaacaactgaggcagctcttctgctcccttcaagttcagaaga

SEQ ID NO: 1972 - DNA, 1290 bp, Homo sapiens
  source 1..1290: mol_type = genomic DNA
ataagcacgcgaggcgcgcggtggcggtttggatctggcccctggggaatcgcgttatgtcgcgaccgaagaaccaaaattacaagggccatggattgtcaaagggaaaagagcgagagcagagagcatcgatccggttcaagaccaccctcatgaacacactcatggacgtccttcgccacaggccaggatgggtggaagtgaaggacgaaggggagtgggatttctactggtgtgacgtcagctggctccgggagaacctggagcgtgaggcaggaaagctggaggcagccaagtgtgacttcttccccaaaacctttgagatgccttgcgagtaccacctgtttgtagaggagtttcgcaaaaacccaggaatcacctggatcatgaagcctgtagcccggtctcaagggaaaggcatcttcctcttccgtaggctgaaggacatcgtggactggaggaaggacacaagaagctctgacgaccagaaagatgatattcccgtggagaactatgtggctcagcgttacattgaaaatccttacctgataggaggccgcaagtttgacctgcgtgtctatgtgctggtgatgtcgtacatcccgctgcgggcctggctctaccgggatggctttgcccgattctccaacacccgcttcacactgaacagcattgatgaccagtatgttcacctcaccaacgtggctgtgcaaaaaacatctcccgactaccacccaaagaagctccatcccacagtggggcccttgtgcatacacagccctgaaaatggcagcctgtcggtcactccttggccttgggatgcacacatgggctgcaagtggacgctgcagcgcttccggcagtacctggcgtccaaacacgggcccgaggcagtggagacactcttcagggacatcgacaacatctttgtcaaaagcctgcagagtgtgcagaaggtgatcatcagtgacaagcactgcttcgagctgtacggctatgacatcctcatcgaccaggacctcaagccgtggctcctggaggtcaatgcgtccccatcactgacagccagcagccaggaagactatgagctcaagacctgcctcctggaagacaccctgcatgttgtggacatggaagcgagcttttccccgattattccagcagaagtttgagggctgattctccttgctggtaactgggacacattcccattcctaaaccactcactgtgactctgcttgaccaggctcacgggaagggagaagcgagtcgggggctttgacctcatgt

SEQ ID NO: 1973 - DNA, 2623 bp, Homo sapiens
  source 1..2623: mol_type = genomic DNA
gaggtgggggcgggggccttaccccaccctggcaccggcaggcgcgggcggatggggggatgtcgcctagagccccccggccggcccacaaactcccgtcccccttccggctctgcctggacgtccctgcgggccccgggggaaagcacccaacttctcccgcctcggcttctagcagaaacgtgacggggctggactttgatcgccgagggctctctgctcttcagagtctgcttggaacgggataagagggatggtgccatccagggaagctctgctgggaccaggcacaactgccattaggtgccccaagaaattacagaaccaaaattacaagggccatggattgtcaaagggaaaagagcgagagcagagagcatcgatccggttcaagaccaccctcatgaacacactcatggacgtccttcgccacaggccaggatgggtggaagtgaaggacgaaggggagtgggatttctactggtgtgacgtcagctggctccgggagaacttcgaccacacctacatggatgaacatgtgcggatcagtcacttccggaaccactatgagctgacccggaagaactacatggtgaagaacctgaagcggttccggaagcagctggagcgtgaggcaggaaagctggaggcagccaagtgtgacttcttccccaaaacctttgagatgccttgcgagtaccacctgtttgtagaggagtttcgcaaaaacccaggaatcacctggatcatgaagcctgtagcccggtctcaagggaaaggcatcttcctcttccgtaggctgaaggacatcgtggactggaggaaggacacaagaagctctgacgaccagaaagatgatattcccgtggagaactatgtggctcagcgttacattgaaaatccttacctgataggaggccgcaagtttgacctgcgtgtctatgtgctggtgatgtcggtgtttgctgaatgcctgctgtggtctgggcacaggagacaggatgttcacctcaccaacgtggctgtgcaaaaaacatctcccgactaccacccaaagaagggctgcaagtggacgctgcagcgcttccggcagtacctggcgtccaaacacgggcccgaggcagtggagacactcttcagggacatcgacaacatctttgtcaaaagcctgcagagtgtgcagaaggtgatcatcagtgacaagcactgcttcgagctgtacggctatgacatcctcatcgaccaggacctcaagccgtggctcctggaggtcaatgcgtccccatcactgacagccagcagccaggaagactatgagctcaagacctgcctcctggaagacaccctgcatgttgtggacatggaagcgaggctcacgggaagggagaagcgagtcgggggctttgacctcatgtggaatgatggccctgttagcagagaggagggggctcctgacctgtcgggaatgggaaactttgtgaccaacacacatctcggctgcgtcaacgatcggaagaaacaactgaggcagctcttctgctcccttcaagttcagaagaaagcttccagttgatccccagctgccaggaggaaatcagccttagcaggccttgtgtttgagattgggagctgagccagaaaccggaaaaccctgggctcatgggcaggacagcttcgggagttgagtgtcaagcccgaagggaagacttttggaaggaaaatactggcaaatccaagaagtgaaccagccgactttaggaaagccagaagccaggctactctagaccttctgccttcagagcatgaggacttctcccactcatccctgtacctgaggcacaccaacccagacaggtccaggcatggactccaggttccctatttccagaaggaatgcgattagctttttttggcccagcacccaccctgccagggaggaaggggcaattttccagtgatgaaattgtgaatcaggcagtcacactggacaacatctagcaaggtgaattctgcaactccctactttatttacattttaaaataagcaatatattcatacggtttaaaatccaaagtttacaaaagggtatagggtgacatctccttccctcccacctgtgcgccccaaccctgcaggtgctgttctgagggaatcacactgtgcttgcacaaaaattattagcttataagacaccagccttccccttgctttcctcacttgatgtatcttggagcttgttccttattcttgattatagttgtatggtattgcactatctggagctaacacctgtgacccacactcatgttttaaaagtttctgcattagtcaaaaatatttaaaaggagattcaacttcacaacccatatgtctagcttctcttgaaaacacgtaagaactggccatgacagcctgtgtttctatgtaactatgagccagagccaaggagcggggggaccaggagaggtgtgcccctgccatgctgccatttgttatcacccgcctgtcaaatcacaggtttatttcaaggcaagaaccatgttcataggttgtattctaaatggagtggcgtgcccttactgaaggactagatgaggcaaataaagactagttgctgctatt

SEQ ID NO: 1974 - DNA, 800 bp, Homo sapiens
  source 1..800: mol_type = genomic DNA
gggagagggaaggtcaggcttgcctcctgttcacaaggacaacctctgtctcccttgtggcggcttctatgaaggtggggactccaggctttctctcgtctgctttttggatgccttcaagagaggccagttagaggatatcaattgtggcaattccccagagccctcatcagatggcattagcccgtcatgtgctgcagtggcacccagtttggaggaaattcggaaccagaagagtgtgacagtgctcctgcgggaagaagtgtcgcggctccaggaggaagttcaccttctccggcagatgaaggagatgttggcgaaggacctggaggagtcgcagggcggcaagtcctctgaggtcctctcggccaccgagctcagggtccagctggcccagaaggagcaggagctagccagagccaaagaagccttgcaggccatgaaagctgatcggaagcgcttaaagggcgagaagacagacctggtgagccagatgcagcagctgtatgccacactggagagccgcgaggagcagctccgagacttcatccgcaactatgagcagcaccgcaaggagagcgaggatgcggtcaaagcgctggccaaggagaaggacctgctggagcgtgagaagtgggagctgcggcgccaagccaaggaggccacagaccacgccacggcactgcgctcccagctggacctcaaggacaaccggatgaaggagctggaggccgagctggccatggccaaacagtccttagctacgctgaccaaggacgtccccaagcggcattccctcg

SEQ ID NO: 1975 - DNA, 6030 bp, Homo sapiens
  source 1..6030: mol_type = genomic DNA
gcgcccgcccgccggggtctcggcgatcgctgctcctcctcctccttctcctcctcttttttctcctccgcctcctccccccgccgcctcgccaccgccgcggctagggctggaggcgccgctgtcattcctgtgccggaggaaccggcgctgccggtgcctgggggtcggggcgcgggcgaagccgggccgcggaggacacaacaggtagagccgggggtgcccggccgcgcgccccccgcgcatcatgcagctctttgtcacctctctcgcccccaggccaaaatcctgagcatgatggaagacaataagcagctcgcgctccgcatcgatggggcggtccagtcggccagccaggaggtgaccaacctgcgagccgaactcacggccaccaaccggagactggcggaactgagcggcggcggcggccccggcccgggcccgggagccgcggccagcgcctcggcggcgggggactcggcggcgacgaacatggagaacccccagcttggagcgcaagtgctcctgcgggaagaagtgtcgcggctccaggaggaagttcaccttctccggcagatgaaggagatgttggcgaaggacctggaggagtcgcagggcggcaagtcctctgaggtcctctcggccaccgagctcagggtccagctggcccagaaggagcaggagctagccagagccaaagaagccttgcaggccatgaaagctgatcggaagcgcttaaagggcgagaagacagacctggtgagccagatgcagcagctgtatgccacactggagagccgcgaggagcagctccgagacttcatccgcaactatgagcagcaccgcaaggagagcgaggatgcggtcaaagcgctggccaaggagaaggacctgctggagcgtgagaagtgggagctgcggcgccaagccaaggaggccacagaccacgccacggcactgcgctcccagctggacctcaaggacaaccggatgaaggagctggaggccgagctggccatggccaaacagtccttagctacgctgaccaaggacgtccccaagcggcattccctcgccatgccgggcgagacggtgctcaatggcaaccaggagtgggtggtgcaggcggacctcccgctgaccgcagccatccggcagagtcaacagactctctaccactcacacccccctcaccctgcggaccggcaagcggtcagggtgagcccctgccactcccggcagccctctgtcatctccgacgcatctgccgccgaaggcgaccggtcgtccacaccgagcgacatcaactcccctcgacaccggacacactccctctgcaacggcgacagtcccggcccagttcagaagaacctgcacaaccctattgtacagtcactagaggatcttgaagaccaaaaacggaaaaagaagaaagagaagatgggattcggctccatctcccgcgtcttcgccagagggaagcagcggaagtccctcgaccccggcctctttgatgactcggacagccagtgcagccccacgcggcagagcctcagcctgtcggaaggcgaggagcagatggaccggctgcagcaggtggagctggtgaggaccacccctatgtcccactggaaggcgggcaccgtccaggcctggctggaggtggtgatggccatgcctatgtacgtcaaggcctgcacggagaacgtgaagagcgggaaggtgctgctgagcctgagtgacgaggacctgcagctgggccttggggtgtgcagctccctgcaccggcgcaagctgcgcctggccatcgaggactaccgtgatgccgaggcaggccgcagcctgtccaaagctgccgagctggaccatcactgggtggccaaggcctggctgaatgacattggcctgtcccagtactcccaggcctttcagaaccacctggttgatgggcggatgctgaattccctgatgaagcgagacctggagaagcacctgaacgtgtccaagaagttccaccaggtcagcatcctgctggggatcgagctgctgtaccaagtgaacttcagcagggaggccctccaggagcgccgggcccgctgcgagacgcagaacattgaccccgtggtgtggaccaaccagcgggtgctcaagtgggttcgagacatcgacctgaaggagtacgcagacaacctgaccaacagcggcgtccatggtgctgtgctggtgctggagcccacattcaatgccgaggccatggccactgccctgggcatccccagtgggaagcacatcctccggagacacctggcagaggagatgagcgccgtcttccacccagccaactccacaggcatccgggaggctgagcgttttggaacgccccctggcagggcctccagcgtcacgcgggcaggaaaggaggagaacagcagcggtctcaagtacaaggctggccggctgcccctggggaagataggaaggggcttcagcagcaaagatcccgatttccatgatgactatggctctcttcaaaacgaagattgcggagacgatgacccccagagcaggctggaacagtgccgtctggaaggctacaacagcctggaggtcaccaacgtgtaaggaactggtggctccaccagacccaacgtgagagacccaggaaggaagagaagccagatggccccaggtgtcgttctcactgtacatagcggccgcaggctgaggatgtcccttgctcctgggcaaaatcccgatggactctgcggtttcagctccacagcgcccaggagagagaagacaccagcccacctgtcttgggtgggccatggactttcctgttcagctggagatgggcccagaggacctgtcacagtgtccggccctgcctccatccaggatacacaggctccacctcagagtgaccgtcactgtggagcagccaagcagtccctggagccttaaacggagctgccaaggtgggaggaggcccacagttccctaaaacacccttccggcgggagcaggggggaccccaaccccacaccccagcgcccagtgcattggcagagccgggtgcaggaagtgctgcctcttgccgagacgtcggacagggcgggggttggggaactctcggctacagcatcttacccttgactgagaacttgggtcctgacttggctcactgaatctctcttgggagaatgcaaaatccttccacctgaaaagctctgtgacacatgggggtggacgtattgaagagctgtttgccgatccacccaggagtggctacgctgagtggggagccggtgaatgatccgtgcaggagtggggcttagcagccacatttctaggagatgcagatatcctatcaccagaatgaaagctattgggacaacaggatcggggatgaccgacggccccatatggtgaatctctggcctgtggtttggctttactgagattccaaaccccactatctgcactccgtgacagtggtatggagtgtggcaatgagtttggggtctggggcagggaaatgcttgacattgttaacccaacaaacctttgttgtgatgtccctgtcacctgaaacataggtgacatagctcaccaatgtcctaaccgagacacaaactccacagagcaaaatcatttggtattggtggggagaaccccagcccttttcttgacctgccactgttatgctgtgtggcttcttcccagtggcctcacctctctgtgcctcgatgtcttcatctacgatacttctggttccctcccagggacatcgtgaggattaacacttgctaatatctgtaacacaatttgtaacctctcaggagacaatgggaagttatggggtagctaatttcccatttacaacacagaaatgatatagagctagttcgctccaactctttaggttgaagcagtgtgcaaaaggaagaaaagaaatgtttaatgttcagacctgccaagagcctccaacagggctcaagaaacatataaatcccatgagcacagccttgaaaaccagtttgactcaagccttcgggcctcagttcattgaccagatgacagccacgtgatgattagggaaggacggatgcattgcgattctgcttacacatcgggttatcaaagcgagtcacttgttggaaccatgatgctcgacctccttcaaggccgtttgcactggggcttgagtttccaagattcacaacaggtgtcagcctctgagaaccctcaaagcgtgtgttcttcaacctggcaaattgtttcctctcatgggggaagccgagctctgatgaacttgagaattacacctctctcatgccgaagaccgtggtgttccccctaatgacataaacgcagcctttcttgctgtctgagaccaaatgtctagttggtagacaggtggatgtttggcctcctaagggcacacttctgatcctgggccccaggtggtgaatctctggcatgtggcttggctttgttgagactccaaattccattatcttcatgacattcggcctcatccatagggtcctgaagctgcagtccacagctcagaaaggagaggtgagacctccctccaacctggtgccacaggtctctcccaagccacatccagcctggatgacctgggaccccagaaactgccgtttgggaggcagcaacagcaacgtgcccaggcaggcagttattcccacagagtgagccagaattgtagcagggcacttgaatgcagagctgatgatttgaaaccaacgttcacccaacttgtcagaaatggcacttacatggttcgatcttgctggagacaagtggacaattgggggtcactggcagagacagtattgcccaaaatgttcacagcaggaggccagcaggcctgaggcaacacgggcaaccgcgaatgcctcttttggtttaaattatgccatcacaaccctctttcacccatgaggctccccatccctgacagccaggtgagcatttggagctggtttctcaacatgaggatgggttggttgttaaattaacaacctccacagtatcagattgagtgagctttgtctgctggaaaaacctgaaacgtcaactctgcttcaaggtcggcaagaagaacagaaggcggagacttggcagagagactcaagctgattgtcacaggctacagaggggccagctccagaacagtgaccagctacatcctgtccaagcagcccgagtgtggtcttggtccctgcagggcaatgtgggcatctggacctggggacgatgtggatgcacttcttggaaagctgttgtagcttgtgcctgtgggtggagaaggcacctgcctggtagactctcagctttctgacccccaggagcctctgcgaggcccctttgtccttggctgagccggacctttcttttggaaatctgtctgtctgttggcatcgctgttttcagaccccaggctgcagaggaggggagaagccacacaacaatctggacccaataaagtggagagaagggcgtctctacacagcccggccagcgtggagggccccaggacagggacccaaaagcttgacgtcactgaacagggctgggtactggcagaacaggaagatttggccagaggtgacctcagtgttccctccaggggcatccaggcccctctgacctggggagaagaaggcccatgctcaggcccacctccctcttcccatcagagcccatgcgtcctgggcaccaccacttccactctgcttttcgaggctccggagggctcttcctgctgtgaaaggaaaggagaagaaagcctgtgggcaatggcaacctctgagtctggcattcttgccaatggctggccagcgaggagaatctcccgagccctgacacacaaaggcattttgtggctgcagaggaaatgggttggctctgaacaaagatgcagtttctagggccgtggccccaaatcgcttccccgagagtgaattttaacactgtaacaataaatactactgcacagca

SEQ ID NO: 1976 - DNA, 1030 bp, Homo sapiens
  source 1..1030: mol_type = genomic DNA
ggggaatcacttgcaaggtccacacaagtccgcctatgtactctctggatcgaatatttgctggatttcgaacacgaagtcagatgctgttgggtcacatagaagaacaagataaggtcctccactgccaattttctgataacagtgatgatgaagaatcagaaggccaagagaaatctggaactagatgtagaagtcgttcatggattcagaagccagactctgtttgttcccttgttgaattgagtgatactcaggatgaaacacaaaagtcagatttggagaatgaagatttaaagattgattgtctccaggagagtcaagaattgaatttgcaaaaattaaagaattcagaacgcatacttactgaagctaaacaaaaaatgagagaacttacaattaacatcaagatgaaggaagatctgattaaagaattaataaaaacaggtaatgatgccaagtctgtaagcaagcagtattctttgaaagtaacaaagctagagcatgatgcagaacaggcaaaagtcgaactgattgaaacacaaaagcagctacaggagctggaaaacaaagatctttctgatgttgcaatgaaggtaaaattacagaaagagtttcgtaaaaagatggatgctgcaaagctgagagttcaggtcttgcagaagaagcaacaagatagtaagaaactggcatcactgtcaatccaaaatgagaaacgtgctaatgagctagagcagagtgtagatcacatgaaatatcaaaagatacagctacaaagaaaactacgagaagaaaatgaaaaaaggaagcaactggatgcagtaattaagcgggaccagcaaaaaatcaaagtaatattgtcatacattcctgctaagtataatatgaaatgttaaacggctcagagctaacgaatccatggtcttcattcagttggcttgtgaagtatctatccttgacctgcccttcactgctgtccttattcactttaaagctttgttcatctacgtagtaaaacctacttattgaa

SEQ ID NO: 1977 - DNA, 6243 bp, Homo sapiens
  source 1..6243: mol_type = genomic DNA
aggtggcagcgcttgcagtcgggctacggaggccgggttgccagattacgggaaagccatttaagaagttcctggaataatattagtcagagtaatataggatctgcaggaagtgtctcaagatagttggaaaagaagaatttctagactcttcatcaagatcttcatttatacagctgttaaatccaaggctactttggtgaaagcatgaataaaaatacatctactgtagtatcacccagtctacttgaaaaggatcctgcctttcagatgattacaattgccaaggaaacaggccttggcctgaaggtactaggaggaattaaccggaatgaaggcccattggtatatattcaggaaattattcctggaggagactgttataaggatggtcgtttgaagccaggagatcaacttgtctcagtcaacaaggaatctatgattggtgtatcatttgaagaagcaaaaagcataattaccggagccaagttgaggttagaatctgcttgggagatagcattcataagacaaaaatccgacaacattcagccagaaaatctgtcatgtacatcacttatagaagcttcaggagaatatggacctcaagcctcaacattaagtcttttttcttctcctcctgaaatactaatcccaaagacctcatccactcccaaaacaaataatgacattttatcttcttgtgagataaaaactggatacaacaaaacagtacagattccaattacttcagaaaacagtactgtgggtttgtctaatacagatgttgcttctgcctggactgaaaattatgggctacaagaaaagatctccctaaatccctctgttcgctttaaggcagagaaactggaaatggctctaaattatcttggtattcagcccacaaaggaacaacaccaagccctgagacagcaagtacaagcagactcaaaagggacagtgtcttttggagattttgtccaggttgccagaaacttgttttgcttgcagttggatgaagtaaatgttggtgcacatgaaatttccaatatattagattcacagcttcttccttgtgattcttcagaagcagatgaaatggaaaggctcaagtgtgaaagagatgatgccttgaaagaagtaaatacacttaaggaaaaattattggaatcagataagcaaaggaaacaattgacagaagagctccagaatgtgaaacaagaagccaaagctgtagttgaagaaacaagagccctgcgtagtcggattcatcttgctgaagctgctcagagacaggcacatggaatggaaatggactatgaagaagtgatccgtctgttagaggccaagattacagagctaaaggctcagcttgctgattattctgaccaaaataaagaaagtgttcaggatttaaaaaagagaatcatggtactcgactgccaattacgaaaatcagaaatggctcgaaaaacttttgaggcatccactgaaaagcttcttcattttgtagaggctattcaagaagtattttctgataattctactcctttatcaaatttaagtgaaagaagagctgtgttagcttctcagacttccctcacaccactgggaaggaatggacgtagcatcccagcaacgctggcgcttgaatctaaggaacttgttaaatctgttcgtgccttacttgatatggattgtttaccttatgggtgggaggaagcttacacagcagatggaatcaagtacttcatcaatcatgtaacacagactacatcctggatccatcccgtgatgagtgtcctgaatctatctcgctcagaggagaatgaagaggattgctctagagaactccccaaccagaaaagttgatggttttccttaggaagtggagctacatggatgatgtgagcagagacgcataacatccaattctgagatgaaacagtctaaaataggagtaaagcatgcactacttgttgaagtgtgaaatggagactctggactttgggtatttttgtaaaacttttgatatttctgtatacatttaaaaaatcaattgccactacagtagttccttaagaataatctagttatattttttgaaatcacatataattagactttataatatatatactttttcatatataattagatctttctttgtaatttcatatgtagttcttcatagggtctcagatacaatggtttttataattgacatattgaaaaagtatatgaacataatgaaacacctcatttatttgataattcactaatgttttatattcatatattaggaaagtgaacttagcaagctttttggaatttaaggatcacatttagacatctcatgggctgatgaatacagctggtatctttgtggagctttctaatttacaaaatgctttgtagaccccattgtctttaaaccatacaacatgcccgtgaagctgatctggtgggtatgtttattcttggttttcagtagggaaatagcagttcagagagaggaagctctctgtcccagcaccgagactcactcctaagtcttctgattccatgagcagtcccccttcccccataccctgctgtctccacggagggaggtcacagcccatcacgcaggacactgtgattgtgttgatgcagctggctccacagctgtgcattccacagagattcagaaggcacctcttcggtcaaacatggcccctctataaccccactattcttctcctataaacccttcccccttctctgcacccaagccttcgccaagtaggcgcactctttgtgatattgtttcagcagacttctttcagcagctcgtgtttttctaaagtgaaaggcatggtttgtcctgcttaggttgcccttcccagagggatggtttgaggggagctgatgagaagagaggtatctgttaaaacattactgctctactcgaaacaagatggaagcctaaagcccaagtcgagcagctcccagcactgctgtgcagacctagaggtccttagaacatagtctaagaaccattcattgtagccattttatagttgagtaaactgagatcttaagtctcctagtctactgaatttcatatggtgtataatacagatttatatggtaaagatatacatatacattgtgctcaactatacattcctgaatccatttaggatttgtgatttatgtcttgagtaataatataaagtcaactccagactgataggtagtcattagccatgagaaatgtttcaggatggctagggaagacttgtgttttgcctgacagccatttgaatgttaggaagcttcggggagacaagttttgagagaagccccagagggagctatttccttgcaccccccagaggtgaatgaggtattctataagttagtgtctataattgtgaaagtacaaacttcttgtttttgtcaaattaatggtatgaaatttctctccccctgcttgaagagttttctaattcgtttctagtgagcaaaacaaagaaggtgcttgagtcactgaaatcaaagtactcaggcacacagcccactgacaagagacacctcatccattaactgctgttttgtaccacttgccgccctgtttctgtcaaatacctagtgaaaaaggcctaaacaattgtaatgatattatttattgggcattttgtgccatacatggtgatgagcagtttgcatatatttatttatgatcttcttaaaaccattccatgaaataggaactgtaattatccccaattctaaaagaaaaaacttagttttagagagttagtaatctttgcctaagggtcacaaagcacctatgtgtagaagctagggttcaaggcagatctgtgattccagaagctgttctctaaaccactatggagaactgcttagattcattgtctatgggtacattttataaaaaggcagattctagttcagtgtcataaggaactttctagtaattagagctgataagaaaagaattccccaggagaaaatggaaacactatcccagcaatctgaattccttacttggggaatgttgctgaggaggttcagtgtgtgaatggactgaaccagttggccactctctcagattccctcttcataaagcttccgtgacttctaaaccatcaggtcggtgccataagagatgctcaaaaaagcatggtcagggcttagcaagaatccttttccagtgcaaatacgaccctcatattatgttttggcgagtagccagtctttctttaacatcaatcaaccgtagcaatgtggtcatcacgaagtcttcattgactcactggcttggattttagggttagaaaatctgaatgttcttatgtccttccgtctcactttactagagtgcccaagttgactcatccttactcactcattccctcaaaatatttattgagcaccaacaatgtcacaagcactgtgctaaacactgtggtgaagtagaacaattgctaatcatttcctgggttccacttactcttgatttaaaaaaaaaaaaacaacaaaagagtttgtgtgtggccaggactaaacagctgcttcttaatttttgaattttaaaactaatctattttatttaaaaaaaatcaagtactttggaagtgaataaagtaagagatagcctgtctcactttccagaggtagcagtcactaatactgtggtgagtgattttactcaaaggaaatcacactattaagcagcttggttttgacatgttatgttgtggtcatcttttcatgtcaatacatagattaatcttttatttcaaatgtctacataaaatatcactacccacataacctataatttgtgtggccagcaatttattgaacactaaaatgttttaagttttcttattgctaacaatgtcacagtgaacatttatatattcattaaatccttttcctcatgtatctttgcactcttgtgctagtatgtctatagtgtgaatacattcataaatttcttgatcaaagctaggtcaaagttacattcattttaattttggtacatatccataaattctccataaaagtaggaccaacttacattaccaccaatagtgtatgtgagccttatttttatgtatgataggactttttttagtccaaatgttcctatagattttctgggttttttttttttttttgtccttggaagaataaccttccttccaccaagtccaagaacctgagatttttaatcattaggttttagatttcctttagcagcagagactgacttgctgtatagagggaagtcaagtagtgactaactcactatatgtcaaacacatcattactcttctcttttcctactttacatgtaatggttgcgaggaccaactttcaaatgagctaacttgggtgagacgttcactaaagtaccaagcacaatacaaatgcatcttcgagttctttgggcctcactttccctatctgaataataaggatagtaatcccttgccttttctcaaaccagttcaactcagcaaacacttcctgagcacctgctacatgccaggcaaaatgtgaaatttgcatgctatgaggctaaatggtactgattctcaaaacaaggagctcatagtctaaaaccatttttctttcttttttttccccctaaacaacctcttaaaggggtaagaagttagggggttgtttattaagaacccctgaagagcaaccctttaccactctcttaaatttgaaaaattccaaaataatattaacacctcttgactagaaaaggaaaaaaaaggaacatgccgtatgaagagcctctccaataataaatgcaaagcagctgtcaaaatatagagtcaagtgatactttcataaagtgtttgcacaattagaaaatgttatcctttttctcgggagaaatgggacatttttattttctctgctaagtgaaatgcaactttttgaagaatcaacacgcttgacatttttacaatgtacataaagaactgaactattattaaaacaacttacacactccattgcttataacttttgagagaatgaaaagaaccttaaacagaatgtgcctgtggagcttcgctttagaaatgaaatacccaaggtgttttaactacaactgtctacatgtaatagtgtgtctgcataatgactttgtaaatattaactgcaattctgtatttgctttcttgatatgacttttaacatttaaactta

SEQ ID NO: 1978 - DNA, 692 bp, Homo sapiens
  source 1..692: mol_type = genomic DNA
ggttatggcggcgccgggcgcgctgctggtgatgggcgtgagcggctcggggaaatccaccgtgggcgccctgctggcatctgagctgggatggaaattctatgatgctgatgattatcacccggaggaaaatcgaaggaagatgggaaaaggcataccgctcaatgaccaggaccggattccatggctctgtaacttgcatgacattttactaagagatgtagcctcgggacagcgtgtggttctagcctgttcagccctgaagaaaacgtacagagacatattaacacaaggaaaagatggtgtagctctgaagtgtgaggagtcgggaaaggaagcaaagcaggctgagatgcagctcctggtggtccatctgagcgggtcgtttgaggtcatctctggacgcttactcaaaagagagggacattttatgccccctgaattattgcagtcccagtttgagactctggagcccccagcagctccagaaaactttatccaaataagtgtggacaaaaatgtttcagagataattgctacaattatggaaaccctaaaaatgaaatgacaatgattttgtatcagtggtccaaacagaactaagcataaatcattgtgccatcccaaacctcgttccagccgccttgcccatactagattctaaatgtttctaaaggcaaaccccaatgtgt

SEQ ID NO: 1979 - DNA, 1134 bp, Homo sapiens
  source 1..1134: mol_type = genomic DNA
atggccaccatcccagactggaagctacagctgctagcccggcgccggcaggaggaggcgtccgttcgaggccgagagaaagcagaacgggagcgcctgtcccagatgccagcctggaaacgagggctcctggagcgccgccgggccaagcttgggctgtcccctggggagcctagccctgtgctagggactgtagaggctggacctccagacccggatgagtctgcggtccttctggaggccatcgggccagtgcaccagaaccgattcatccggcaggagcggcagcagcagcagcagcaacaacaacggagtgaagagctgctagcagagagaaagcctgggcctctggaggcccgggagcggagacccagccctggggagatgcgggatcagagccccaagggaagagagtcaagagaagagagactaagtccgagggagaccagagagaggaggctggggatagggggagcccaagagttgagcctgaggcctctggaggctcgggactggaggcaaagcccaggagaggtgggagacaggagctcccgactgtcagaggcatggaaatggaggctgagtcctggagaaactccagagcggagtctgagactagcagagtctcgagagcaaagccccaggagaaaagaggtggaaagtagactgagcccaggggaatctgcctaccagaagttgggcctgacagaggcccataaatggagacctgactccagagagtctcaggaacagagtttggtacaactggaggcaacagagtggaggctgaggtcaggagaagaaagacaagactactcggaagaatgtgggagaaaagaagagtggccagttccaggggtagctccaaaagagactgcagagctgtccgagaccctgacaagggaggcccaaggcaacagttccgcaggagtggaggcagcagagcagaggcctgtggaagatggcgagaggggcatgaagccaacagaagggtggaaatggaccctgataatgagcctggcagggaagggcaaccaacatcttgtaacttgctttccccaccctgtttctgggggcagagccaattgcccaatttctaccctaatccaaagtccctggtgtgggtggggttaa

SEQ ID NO: 1980 - DNA, 5576 bp, Homo sapiens
  source 1..5576: mol_type = genomic DNA
ctccttggcggtgcctggagcccgggcgcaccccaccgctcccgggacctgttgggggctggcccgaaccgtcgtcgaagggagccgctcggccacccccgacgttcctcgccccgcccgacgttccctcaagtggccgaaccagccggacgagccaaactcgccgggcctcccggcggcagcaggtggccccgtccttccagggagggccctgcgccccgcggcgctccggagccctctcggccgcccccgccaggcgggatggaggcggatggggacggagaggagctggcccggctgcgctcagtcttcgccgcctgcgacgcgaaccgctcggggcgcctggagcgcgaggagttccgggcactgtgcacggagctgcgggtgcggccggccgacgccgaggcagtattccagcggctggacgccgaccgtgacggcgccatcaccttccaggagttcgcgcgtggcttcctcgggtccctccgcggggggcggcgccgggactggggtcctctggatcccgcgcccgccgtgtctgaggcggggccggagacacacgacagcgaggaggacgaaggcgacgaggacgcggcggcggcgctggccacctcgtgcggcccggcgagtcccggccgggcttggcaggatttccaggcgcgacttggggacgaagccaagttcattcccagagaagagcaagttagtaccttgtaccaaaacatcaaccttgtggagccaagattaattcagccatatgaacatgttataaagaacttcatccgtgagatcagacttcaaagcacagaaatggaaaatttggccattgcggtgaagagagcccaggacaaggcagctatgcagttgagtgagttggaagaggaaatggatcagaggattcaggctgcagaacataagacacggaaagacgaaaaacgcaaagctgaggaagccctcagtgacctcagacgtcagtatgaaactgaagtaggagatctgcaggtgaccattaaaaagctaagaaagctcgaagaacaatcaaaacgcgtaagtcaaaaggaagatgtggctgcattgaaaaaacaaatttatgatttatcaatggaaaaccagaaagttaagaaagaccttttagaagcacagacaaacatagcctttcttcagagtgagttagatgctttgaaaagtgattatgctgatcagagtctgaatactgaaagggatctggaaataatccgagcatacacagaagatcgaaatagtcttgagaggcaaattgaaatactccaaacagctaaccggaagctacatgacagtaatgatggccttagaagtgcccttgaaaacagttatagcaagttcaacagatctttgcatataaataatatctcaccagggaatacaatttctagaagcagtcccaaattcattggtcattcccctcaacctctaggctatgacaggtcatcccgctcttcctatgtggatgaggactgtgactccctggccctctgtgatcctctgcagaggacaaattgtgaagttgacagcctgcctgaaagctgcttcgacagcggcttgtctaccttgagagatcccaatgagtatgactcagaagtggaatacaagcaccagaggggatttcagaggtcacacggggtgcaggagagctttggaggtgatgcttcagacacagatgttcctgacataagggatgaagagacatttggtttagaagatgtggcttccgtcttagactggaagccccaagggtctgttagtgaaggcagcattgttagttcatcaagaaagcccatctcagcactctcgccccagacagacctggtagatgacaacgctaaatcttttagctcacagaaggcttacaagattgtacttgctggggacgctgcagtggggaagtctagtttcctcatgagactttgcaagaatgaatttcgagaaaatataagcgccaccctgggagttgatttccaaatgaaaaccctcattgtggatggagaacgaacagttctgcagctctgggatacagctggtcaggagagattcagaagtattgccaagtcttacttcagaaaggcagatggtgttttgctgctgtatgatgttacatgtgagaaaagctttcttaacatacgagaatgggtagatatgattgaggatgcagcccatgagactgttcccattatgctggtaggaaacaaggctgacattcgtgacactgctgctacagagggacaaaaatgtgtcccagggcactttggagagaaactggccatgacgtatggggcattattctgtgaaacaagtgccaaagatggttctaacatagtggaggctgttctgcaccttgctcgagaagtgaaaaagagaactgacaaggatgacagcagatccattaccaatctaaccgggaccaattccaaaaagtcaccacagatgaagaattgttgcaatggctaaatcccaaacatccttggcctgtgaagtcttcatttccagaatactgaatttgtgtgacttatttggctcttaacagagtggcacatcctactgacactgtcctatggagagttacagtgcaggaaacctgaacccagctctcaggtccctctggaactttggctcttctttgttttgtctcagtgagtgatttgggccctctggctaaatagactagtcatgtccttacaggtcttaaaagataacatgtaaatgtttttaaaatggtaaaaaaaaagaaaagaaaagaaatcacatgctcagatcaaagctgtagaggaaactgacataattagattcatgtggtagctgaattaggttacccacaaagtcagcatttaaatatttgatactaaagttctagtaagaagggattctcatcctagctttgctgttaactggccttgtgaccttggacatgtcacaagcccatgtcggatctgtttcttcatctgtaaaatgtgcagcttgccctcaaaggccttgcagcccttggcacctcagattctgtgggaagcagtaggacagagagtgtggtggcccacagttaataatagaactatggttattcctgctttttaatattggagtattgatttttctcacttctgaaataaggacagaatttgattaaaaaatggaaacagaaatatctattttttatgtataaagaaacatgtttgagacaaaaatagttgtatataaaaggatatttcataatctcagaatagttacaaagctcactgcttgaatttggtgttaaaaattctaatggaaacatgtaaagccacatactactgaaagcacaatgcccaggaaagttgtcactcttcacttaagggagtggttgccaggggctgagaaagggaggatggggagtgactgctaataggtatgtggtttctttgggcgatgatgagaatgttctggaattggaatagtggtgatagttgtataactgtttgaatgtactaggaaccactgaattgtatactttgaaagggtgaattttatggttgtgaattatctcactaaaaaaaatgctagtacttagagtgatgtaacattttgcaaaattttcattttcgtatccctgctgatttcaaaccttcccatggtttagaagcataacctgtaatgtaatgcaagtcccctaactccctggttgctaacattaacttccttaagtaataatcaatgaaagaaattctatgcatggttttgaaataatatccttgaaagaggaatcaccattaggaaaggtgagtcagggtcctttgtttaatgtgactagtggctcatcatcaccagtgacctggttgggcctactctccttccagaacctgcattgcttcccagacctccccactgagatgcctctaagagccaaaggagtcaacacttgagcctagggtgggctacaacaaaagattctaatttaccttgcttcatctaggtccaggccccaagtagcttgctgaaggaacttaaaaagtagctgttatttattgtattgtataagctaaaaacatttatttttgttgaatcgaaacaattccatgtagcaatcttttttctgttcacggtgtttgtgatagaaccttaaattccgcaagcatcagttttttgaaaaaatgggaattgaccggatagttacaggcaaagattataaatagctacaacatcatttaacttttataaacatgccttctctctattgaagacatctgatatttttgctggaaagttggatctatcctcagtaactctgccatgaattcctgtttcctggttccagaaaaagaaaagattacatttctgatcataaagaatgtcttgcatatgggaaatttttcaaaataaggggggtattatttatgtggcatgggaaaacttttgccatggctgtttgtcttagtggcatcttttgatgacattggatcagatatatgtagatgctgatatatgggacacatgtttaggttttggtgcagttgcacaaaactgtgttagtttatatgttactgtgttgcctttatttattctctccaaagtgtctctttatatttgttttacaatctgtgaaagagtataccataatacagaagtattttcatagtctttacctctggattgtcctgtcagtatagccacgttgatgagattacaccagtgcctttgatggtcaaccaatcatctttaagtatttgagccctgataaatattttggtaacataatccaaattagagacttagagctctggttagcaatcatgtttaaagagaagcttcttaaagctctgtatgctgggagattcatgattattaccaacgttttgatttcatgaaggtgttctcaaatttaaagcacattttcagtaagaacaaaaatatttaatgtttttatcttagacttgatacatttgcatattactatggaagttattcaccttgtccctgtttttctttaagatattttaaaatcatagttatactacagtccttttttaaatgtatcctgatacattgtaaaatattttaatttcattgtggaaaataatgttggataaggagatatttttcactgttaacttttagcccatgcattttcataatttatttttttcacttgctgctttatatgacatatgtgacatttgattatttaacacttgatgtgatctgcataaacccaagttgcacaaccctcctgctgaagataaaattgaggttaaagataaagatttattttcatatttgtacagtgatcggcttcagtgatggtttttgtgggcatttattgtgtgtgtgtaagaaatttcatatgtatatattaagtaggcctctgagtattgaataattgttttatgattttgatttatatggtttacattttcattgtgtgggccatatttcgtttatactgtttatttctcttcaaaccttaataattataccataaagtgtaatttttatagcaatgcaaatgtctaaggaactacaaatattttctacgttgtaaattcaataaagcttgcttcctttggcctttt

SEQ ID NO: 1981 - DNA, 5520 bp, Homo sapiens
  source 1..5520: mol_type = genomic DNA
cttttgcggcaggcagagacaatggaagaaaatgaaagccagaaatgtgagccgtgccttccttactcagcagacagaagacagatgcaggaacaaggcaaaggcaatctgcatgtaacatcaccagaagatgcagaatgccgcagaaccaaggaacgcctttctaatggaaacagtcgtggttcagtttccaagtcttcccgcaatatcccaaggagacacaccctaggggggccccgaagttccaaggaaatactgggaatgcaaacatctgagatggatcggaagagagaagcgttcctagaacatctgaagcagaagtacccccaccacgcctctgcaatcatgggtcaccaagagaggctgagagaccagacaaggagccccaaactgtctcacagtcctcaaccacccagtctgggtgacccggtcgagcatttatcagagacgtccgctgattctttggaagccatgtctgagggggatgctccaacccctttttccagaggcagccggactcgtgcgagccttcctgtggtgaggtcaaccaaccagacgaaagaaagatctctgggggttctctatctccagtatggagatgaaaccaagcagctcaggatgccgaatgaaatcacaagtgcagacacaatccgtgctctcttcgtaagtgcctttccacagcagctcaccatgaaaatgctggaatcgcccagtgtcgccatttacatcaaagatgaaagcagaaatgtctattatgaattaaatgatgtaaggaacattcaagacagatcactcctcaaagtgtacaacaaggatcctgcacatgcgtttaatcacacaccaaaaactatgaatggagacatgaggatgcagagagaacttgtttatgcaagaggagatggccctggggcccctcgccccggatctactgctcatccaccccatgcgattccaaattccccaccgtctactccagtgccccattccatgcccccctccccgtccagaattccttatgggggcacccgctccatggttgttcctggcaatgccaccatccccagggacagaatctccagcctgccagtctccagacccatctctccaagcccaagcgccattttagaaagaagagatgtcaagcctgatgaagacatgagtggcaaaaacattgcaatgtacagaaatgagggtttctatgctgatccttacctttatcacgagggacggatgagcatagcctcatcccatggtggacacccactggatgtccccgaccacatcattgcatatcaccgcaccgccatccggtcagcgagtgcttattgtaacccctcaatgcaagcggaaatgcatatggaacaatcactgtacagacagaaatcaaggaaatatccggatagccatttgcctacactgggctccaaaacaccccctgcctctcctcacagagtcagtgacctgaggatgatagacatgcacgctcactataatgcccacggcccccctcacaccatgcagccagaccgggcctctccgagccgccaggcctttaaaaaggagccaggcaccttggtgtatatagaaaagccacggagcgctgcaggattatccagccttgtagacctcggccctcctctaatggagaagcaagtttttgcctacagcacggcgacaatacccaaagacagagagaccagcgagaaaatgatgaaaaccacagccaacaggaaccacacagatagtgcaggaacgccccatgtgtctggtgggaagatgctcagtgctctggagtccacggtgcctcccagccagcctccacctgtgggcacctcagccatccacatgagcctgcttgagatgaggcggagcgtggcggaactcaggctccagctccagcagatgcggcagctccagctgcagaaccaggagttgctgagggcaatgatgaagaaggccgagctggaaatcagtggcaaagtgatggaaacaatgaagagactggaggatcccgtgcagcgacagcgcgtcctagtggagcaagagagacaaaaatatcttcatgaggaagagaagatcgtcaagaagttgtgcgagttggaagactttgttgaagacttgaagaaggactccacggcagccagccgattggttactctgaaagacgtggaagacggggctttcctcctgcgtcaagtgggagaggctgtagctaccctgaaaggagaatttccaaccttacaaaacaagatgcgagccatcctgcgcatagaagtggaggccgtgcggtttctgaaggaggagccacacaagctggacagtctcctgaagcgtgtgcgcagcatgacagacgtcctgaccatgctgcggagacatgtcactgatgggctcctgaaaggcacggacgcagcccaagccgcacagtacatggctatggaaaaggccacagccgcagaagtcctgaagagtcaggaggaggcagcccacacctccggccagcccttccacagcacaggtgcccctggcgatgcgaagtcggaagtggtgcctttgtccggcatgatggttcgccacgcgcagagctcccctgtggtcatccagccctcccagcactccgtggccctgctgaaccctgctcagaacttgcctcacgtggccagctccccagccgtcccccaggaagcaacctccactctgcagatgtcgcaggctccgcagtccccacagatacccatgaatgggtctgccatgcagagcttgttcattgaagaaatccacagtgtgagtgccaagaacagggcagtgtctatcgagaaagcagaaaagaaatgggaggaaaaaaggcaaaatctggatcactataatgggaaagagtttgagaagctcctagaagaagctcaggccaatatcatgaagtcaataccaaatctggagatgccgccagccacaggcccactgccaaggggagatgccccagtggacaaggtggaactttcagattctccaaattcggaacaggacttggaaaagctggggggaaagtcgccccctcctcctccgccacctcctcgtcgaagctacctgccaggatcgggactcaccaccacgaggtcaggcgatgtggtctacaccggcagaaaggagaacatcaccgctaaggcaagcagtgaagatgctggaccaagcccacagaccagagctacaaaatatccagcagaggagcctgcttcagcctggaccccatccccaccgcctgtcaccacctcctcctcaaaggatgaggaggaagaagaagaagaaggagacaaaataatggcagaactccaggcattccagaagtgttcctttatggatgtaaattcaaacagtcatgctgagccatcccgggctgacagtcacgttaaagacactaggtcgggcgccacagtgccacccaaggagaagaagaatttggaatttttccatgaagatgtacggaaatctgatgttgaatatgaaaatggcccccaaatggaattccaaaagggctccagcggggccccacagacgagcaggatgcctgtccccatgagtgccaagaacagacccggaaccctggacaaacccggcaagcagtccaaactgcaggatccccgccaatatcgtcaggctaatggaagtgctaagaaatctggtggggactttaagcctacttccccctccttacctgcttctaagattccagccctttctcccagctctgggaaaagcagttctctgccctcttctagtggtgacagctctaacctccctaatccacctgctactaaaccatcgattgcttctaaccctctcagcccccaaacaggaccacctgctcactctgcctccctcatcccttctgtctctaatggctctttgaagtttcagagcctcactcatacaggtaaaggtcaccatctttcattctcaccgcagagtcaaaatggccgagcaccccctcctttgtcattttcctcctcccctccttctcctgcctcctccgtctcactgaatcaaggtgccaagggcaccaggaccatccatactcccagcctcaccagctacaaggcacagaatggaagttcaagcaaagccaccccatccacagcaaaagaaacctcttaaaggtcaaatcctattaggcacaagtcggagttacatttaaaaaaaattaacagtctacaacaactgttttcacaagagaatgtaacatattgctgtatcgtttgaggcttaatgctaaatatgtgctaaatactggattaatagatttcagtaaagctcgttcgttttgtttggttttctttttacctagttgctatagtgtctacagtctatactcaatacctataaaatgcagtaagcatgtgttacagaaagaggttctggtgggagagaaaggtgcgtgtgagacaggagaattgtcttaagcatataaaacatgtatgattccagaattttagtatgttttgtataaaactatttttcattacggagactagaagtgaacagagaattacacaagtgtgactatacaaattgtaaaacagatactataatatttccttttattttagtgttatttagctttattacagatttctatttttgtcaaaacttcatggttcctttcaagatcttttttgccaaaacattttgatactatagcattgtacatttgaaagtagtgttctagactataaaaccaatgaacttctacatgagccctacagacaggcatgtgtagaaggcaatttatcaaacctattgcactgccatgaaaagtgtgtataataatttgctagcccaagcaagctagttttctttgcttgcttcttttctttcttttttccttccttttttttttttttttcttttttaacatgttgagattctctagttgttttctttggcgtatctaaccccttcttttgttttctgagacctggtaacccacgctcttgcattgtggattttaaaatgtatactctgtacggttctgtaaaccgaaaaacttttgtaaatatataaatatacatagacataaaaatactgtatgtgacagcacatagagtagttttcccacaccaaagttaatttttatgcatgctttaaaagtatatatcgggaccggcagaaatggaagtatccatacatttttaaaaagcaacaagtttgcacagctagagtgtttttgtaaataaatgtatttgtataacacagtcatgtaatatacagaactataagcagagactttgcaaaactaaataaagggctgcatgcttattattttttgtaccttgtcactataactacttcctagtcaaagaacgaaatgtaactgttaccgagttaaatgtttttccgctttgagggatgtaaccacatccactcagaggacactacttttctgaaagctctggggtgactaatgatgagttcctaataaattaattgcaagtgtggtgccttggatgtggcctgttggctcgctttctt

SEQ ID NO: 1982 - DNA, 7381 bp, Homo sapiens
  source 1..7381: mol_type = genomic DNA
agcgaggagcttttgcggcaggcagagacaatggaagaaaatgaaagccagaaatgtgagccgtgccttccttactcagcagacagaagacagatgcaggaacaaggcaaaggcaatctgcatgtaacatcaccagaagatgcagaatgccgcagaaccaaggaacgcctttctaatggaaacagtcgtggttcagtttccaagtcttcccgcaatatcccaaggagacacaccctaggggggccccgaagttccaaggaaatactgggaatgcaaacatctgagatggatcggaagagagaagcgttcctagaacatctgaagcagaagtacccccaccacgcctctgcaatcatgggtcaccaagagaggctgagagaccagacaaggagccccaaactgtctcacagtcctcaaccacccagtctgggtgacccggtcgagcatttatcagagacgtccgctgattctttggaagccatgtctgagggggatgctccaacccctttttccagaggcagccggactcgtgcgagccttcctgtggtgaggtcaaccaaccagacgaaagaaagatctctgggggttctctatctccagtatggagatgaaaccaagcagctcaggatgccgaatgaaatcacaagtgcagacacaatccgtgctctcttcgtaagtgcctttccacagcagctcaccatgaaaatgctggaatcgcccagtgtcgccatttacatcaaagatgaaagcagaaatgtctattatgaattaaatgatgtaaggaacattcaagacagatcactcctcaaagtgtacaacaaggatcctgcacatgcgtttaatcacacaccaaaaactatgaatggagacatgaggatgcagagagaacttgtttatgcaagaggagatggccctggggcccctcgccccggatctactgctcatccaccccatgcgattccaaattccccaccgtctactccagtgccccattccatgcccccctccccgtccagaattccttatgggggcacccgctccatggttgttcctggcaatgccaccatccccagggacagaatctccagcctgccagtctccagacccatctctccaagcccaagcgccattttagaaagaagagatgtcaagcctgatgaagacatgagtggcaaaaacattgcaatgtacagaaatgagggtttctatgctgatccttacctttatcacgagggacggatgagcatagcctcatcccatggtggacacccactggatgtccccgaccacatcattgcatatcaccgcaccgccatccggtcagcgagtgcttattgtaacccctcaatgcaagcggaaatgcatatggaacaatcactgtacagacagaaatcaaggaaatatccggatagccatttgcctacactgggctccaaaacaccccctgcctctcctcacagagtcagtgacctgaggatgatagacatgcacgctcactataatgcccacggcccccctcacaccatgcagccagaccgggcctctccgagccgccaggcctttaaaaaggagccaggcaccttggtgtatatagaaaagccacggagcgctgcaggattatccagccttgtagacctcggccctcctctaatggagaagcaagtttttgcctacagcacggcgacaatacccaaagacagagagaccagagagaggatgcaagccatggagaaacagattgccagtttaactggccttgttcagtctgcgctttttaaagggcccattacaagttatagcaaagatgcgtctagcgagaaaatgatgaaaaccacagccaacaggaaccacacagatagtgcaggaacgccccatgtgtctggtgggaagatgctcagtgctctggagtccacggtgcctcccagccagcctccacctgtgggcacctcagccatccacatgagcctgcttgagatgaggcggagcgtggcggaactcaggctccagctccagcagatgcggcagctccagctgcagaaccaggagttgctgagggcaatgatgaagaaggccgagctggaaatcagtggcaaagtgatggaaacaatgaagagactggaggatcccgtgcagcgacagcgcgtcctagtggagcaagagagacaaaaatatcttcatgaggaagagaagatcgtcaagaagttgtgcgagttggaagactttgttgaagacttgaagaaggactccacggcagccagccgattggttactctgaaagacgtggaagacggggctttcctcctgcgtcaagtgggagaggctgtagctaccctgaaaggagaatttccaaccttacaaaacaagatgcgagccatcctgcgcatagaagtggaggccgtgcggtttctgaaggaggagccacacaagctggacagtctcctgaagcgtgtgcgcagcatgacagacgtcctgaccatgctgcggagacatgtcactgatgggctcctgaaaggcacggacgcagcccaagccgcacagtacatggctatggaaaaggccacagccgcagaagtcctgaagagtcaggaggaggcagcccacacctccggccagcccttccacagcacaggtgcccctggcgatgcgaagtcggaagtggtgcctttgtccggcatgatggttcgccacgcgcagagctcccctgtggtcatccagccctcccagcactccgtggccctgctgaaccctgctcagaacttgcctcacgtggccagctccccagccgtcccccaggaagcaacctccactctgcagatgtcgcaggctccgcagtccccacagatacccatgaatgggtctgccatgcagagcttgttcattgaagaaatccacagtgtgagtgccaagaacagggcagtgtctatcgagaaagcagaaaagaaatgggaggaaaaaaggcaaaatctggatcactataatgggaaagagtttgagaagctcctagaagaagctcaggccaatatcatgaagtcaataccaaatctggagatgccgccagccacaggcccactgccaaggggagatgccccagtggacaaggtggaactttcagaagattctccaaattcggaacaggacttggaaaagctggggggaaagtcgccccctcctcctccgccacctcctcgtcgaagctacctgccaggatcgggactcaccaccacgaggtcaggcgatgtggtctacaccggcagaaaggagaacatcaccgctaaggcaagcagtgaagatgctggaccaagcccacagaccagagctacaaaatatccagcagaggagcctgcttcagcctggaccccatccccaccgcctgtcaccacctcctcctcaaaggatgaggaggaagaagaagaagaaggagacaaaataatggcagaactccaggcattccagaagtgttcctttatggatgtaaattcaaacagtcatgctgagccatcccgggctgacagtcacgttaaagacactaggtcgggcgccacagtgccacccaaggagaagaagaatttggaatttttccatgaagatgtacggaaatctgatgttgaatatgaaaatggcccccaaatggaattccaaaaggttaccacaggggctgtaagacctagtgaccctcctaagtgggaaagaggaatggagaatagtatttctgatgcatcaagaacatcagaatataaaactgagatcataatgaaggaaaattccatatccaatatgagtttactcagagacagtagaaactattcccaggaaactgtgcctaaggccagtttcggtttctctggcattagtccattagaagatgaaataaacaaagggtctaaaatctcaggcctgcaatactctatacctgacaccgagaaccagacgctgaattacggaaagacaaaggagatggaaaagcaaaatacggataagtgtcacgtttcctctcacactagactaacagaatcaagcgtgcatgattttaaaacagaagatcaagaggttatcacgacagattttggccaagttgttctaagacccaaggaggcaaggcatgctaacgtgaaccctaatgaggatggagaatcaagttcaagttctcccactgaagaaaatgcagccactgacaatattgccttcatgattaccgaaaccactgtccaggttctttccagtggggaggtgcatgatattgttagccaaaagggagaagacatacagacggttaatatcgatgccagaaaagagatgaccccccgacaagaagggactgacaatgaggatccagtcgtgtgcctggacaagaaaccagtgatcatcattttcgatgagcccatggacatccggtctgcctataagagactttcaactatctttgaggaatgtgatgaggaattagagagaatgatgatggaggaaaagatagaggaggaggaagaggaggaaaatggggattctgtagtccagaataataacacttcccagatgtctcataagaaggtggccccaggcaatcttagaaccggacaacaggtggaaacaaagtcacagccacactccctggccacagagaccagaaacccaggaggacaggaaatgaacagaacggagctgaacaagttcagccacgtggattctccaaattcggaatgcaagggtgaggacgcgaccgatgaccagtttgaaagccccaagaaaaagtttaaattcaaattccctaagaagcaactcgccgctctcactcaagccattcgcaccggaactaaaacagggaagaagactttgcaagtggtagtctatgaagaagaggaagaggatggcaccctgaaacagcacaaagaagccaagcgcttcgaaatcgctaggtctcaacctgaagacacccctgaaaacacagtgaggaggcaagagcagcccagcatcgagagtacatctccgatttcaagaactgatgaaattagaaaaaacacctacagaacattggatagcctggagcagaccattaaacagctcgaaaatacaatcagtgaaatgagtcccaaagccctagttgatacctcatgttcttccaacagagattctgttgcaagttcatcccacatagcccaagaggcctctccccgacccttgctagttccggatgaaggtcccactgccctagagccccctacgtcgataccttcagcttcacgtaagggctccagcggggccccacagacgagcaggatgcctgtccccatgagtgccaagaacagacccggaaccctggacaaacccggcaagcagtccaaactgcaggatccccgccaatatcgtcaggctaatggaagtgctaagaaatctggtggggactttaagcctacttccccctccttacctgcttctaagattccagccctttctcccagctctgggaaaagcagttctctgccctcttctagtggtgacagctctaacctccctaatccacctgctactaaaccatcgattgcttctaaccctctcagcccccaaacaggaccacctgctcactctgcctccctcatcccttctgtctctaatggctctttgaagtttcagagcctcactcatacaggtaaaggtcaccatctttcattctcaccgcagagtcaaaatggccgagcaccccctcctttgtcattttcctcctcccctccttctcctgcctcctccgtctcactgaatcaaggtgccaagggcaccaggaccatccatactcccagcctcaccagctacaaggcacagaatggaagttcaagcaaagccaccccatccacagcaaaagaaacctcttaaaggtcaaatcctattaggcacaagtcggagttacatttaaaaaaaattaacagtctacaacaactgttttcacaagagaatgtaacatattgctgtatcgtttgaggcttaatgctaaatatgtgctaaatactggattaatagatttcagtaaagctcgttcgttttgtttggttttctttttacctagttgctatagtgtctacagtctatactcaatacctataaaatgcagtaagcatgtgttacagaaagaggttctggtgggagagaaaggtgcgtgtgagacaggagaattgtcttaagcatataaaacatgtatgattccagaattttagtatgttttgtataaaactatttttcattacggagactagaagtgaacagagaattacacaagtgtgactatacaaattgtaaaacagatactataatatttccttttattttagtgttatttagctttattacagatttctatttttgtcaaaacttcatggttcctttcaagatcttttttgccaaaacattttgatactatagcattgtacatttgaaagtagtgttctagactataaaaccaatgaacttctacatgagccctacagacaggcatgtgtagaaggcaatttatcaaacctattgcactgccatgaaaagtgtgtataataatttgctagcccaagcaagctagttttctttgcttgcttcttttctttcttttttccttccttttttttttttttttcttttttaacatgttgagattctctagttgttttctttggcgtatctaaccccttcttttgttttctgagacctggtaacccacgctcttgcattgtggattttaaaatgtatactctgtacggttctgtaaaccgaaaaacttttgtaaatatataaatatacatagacataaaaatactgtatgtgacagcacatagagtagttttcccacaccaaagttaatttttatgcatgctttaaaagtatatatcgggaccggcagaaatggaagtatccatacatttttaaaaagcaacaagtttgcacagctagagtgtttttgtaaataaatgtatttgtataacacagtcatgtaatatacagaactataagcagagactttgcaaaactaaataaagggctgcatgcttattattttttgtaccttgtcactataactacttcctagtcaaagaacgaaatgtaactgttaccgagttaaatgtttttccgctttgagggatgtaaccacatccactcagaggacactacttttctgaaagctctggggtgactaatgatgagttcctaataaattaattgcaagtgtggtgccttggatgtggcctgttggctcgctttcttctctgtggcttatcaaggtgtagatgacagaaagcaaacctggatacagagtttccaccctcagttcctggaggggctcttattattttctctctttttaaaaaacttccagtagaagtaaagtggaaataaaatgtctttatca

SEQ ID NO: 1983 - DNA, 6123 bp, Homo sapiens
  source 1..6123: mol_type = genomic DNA
ggagagggctgcgcgcttctcgccaagcaagcgggaggcgcactggggccgccgccgttcccgcgctcctccctctcctctgcacccactgtcacgctacccgcccgcgggggagcctcgagagcctccaggtgaattgaaagtcgtttccgggggaggacggagagggtgctgcagtcctggcatgccctgaaactgcaagtcgggcagaaacgacccggcggaggagcagggcgcgcagcgccctgcgcagcatccccgggctgccagaagaggccaccactcggctggcagccgcgagcggcggccgaacctcggccccagactcgggcccccggcacgctcgcccgggagataccccttccccctcttgcgcatttcgcagctgcgctggtgtggggcatgagagcgaggtggctccaggtctccgcggagcagctgccagtgggagagcgaggagaggcgagggggcggcagcctcggcccgaaacggagatcctggggtcctaaatttgtggccgattgcactgtgtcctggagacggagtggaaccacagcccagagcccctgggaatcatccctgaaagactgcattacttctccatggagtcttcctcctcctgcttattttctttttggaacaaggcaaaggcaatctgcatgtaacatcaccagaagatgcagaatgccgcagaaccaaggaacgcctttctaatggaaacagtcgtggttcagtttccaagtcttcccgcaatatcccaaggagacacaccctaggggggccccgaagttccaaggaaatactgggaatgcaaacatctgagatggatcggaagagagaagcgttcctagaacatctgaagcagaagtacccccaccacgcctctgcaatcatgggtcaccaagagaggctgagagaccagacaaggagccccaaactgtctcacagtcctcaaccacccagtctgggtgacccggtcgagcatttatcagagacgtccgctgattctttggaagccatgtctgagggggatgctccaacccctttttccagaggcagccggactcgtgcgagccttcctgtggtgaggtcaaccaaccagacgaaagaaagatctctgggggttctctatctccagtatggagatgaaaccaagcagctcaggatgccgaatgaaatcacaagtgcagacacaatccgtgctctcttcgtaagtgcctttccacagcagctcaccatgaaaatgctggaatcgcccagtgtcgccatttacatcaaagatgaaagcagaaatgtctattatgaattaaatgatgtaaggaacattcaagacagatcactcctcaaagtgtacaacaaggatcctgcacatgcgtttaatcacacaccaaaaactatgaatggagacatgaggatgcagagagaacttgtttatgcaagaggagatggccctggggcccctcgccccggatctactgctcatccaccccatgcgattccaaattccccaccgtctactccagtgccccattccatgcccccctccccgtccagaattccttatgggggcacccgctccatggttgttcctggcaatgccaccatccccagggacagaatctccagcctgccagtctccagacccatctctccaagcccaagcgccattttagaaagaagagatgtcaagcctgatgaagacatgagtggcaaaaacattgcaatgtacagaaatgagggtttctatgctgatccttacctttatcacgagggacggatgagcatagcctcatcccatggtggacacccactggatgtccccgaccacatcattgcatatcaccgcaccgccatccggtcagcgagtgcttattgtaacccctcaatgcaagcggaaatgcatatggaacaatcactgtacagacagaaatcaaggaaatatccggatagccatttgcctacactgggctccaaaacaccccctgcctctcctcacagagtcagtgacctgaggatgatagacatgcacgctcactataatgcccacggcccccctcacaccatgcagccagaccgggcctctccgagccgccaggcctttaaaaaggagccaggcaccttggtgtatatagaaaagccacggagcgctgcaggattatccagccttgtagacctcggccctcctctaatggagaagcaagtttttgcctacagcacggcgacaatacccaaagacagagagaccagagagaggatgcaagccatggagaaacagattgccagtttaactggccttgttcagtctgcgctttttaaagggcccattacaagttatagcaaagatgcgtctagcgagaaaatgatgaaaaccacagccaacaggaaccacacagatagtgcaggaacgccccatgtgtctggtgggaagatgctcagtgctctggagtccacggtgcctcccagccagcctccacctgtgggcacctcagccatccacatgagcctgcttgagatgaggcggagcgtggcggaactcaggctccagctccagcagatgcggcagctccagctgcagaaccaggagttgctgagggcaatgatgaagaaggccgagctggaaatcagtggcaaagtgatggaaacaatgaagagactggaggatcccgtgcagcgacagcgcgtcctagtggagcaagagagacaaaaatatcttcatgaggaagagaagatcgtcaagaagttgtgcgagttggaagactttgttgaagacttgaagaaggactccacggcagccagccgattggttactctgaaagacgtggaagacggggctttcctcctgcgtcaagtgggagaggctgtagctaccctgaaaggagaatttccaaccttacaaaacaagatgcgagccatcctgcgcatagaagtggaggccgtgcggtttctgaaggaggagccacacaagctggacagtctcctgaagcgtgtgcgcagcatgacagacgtcctgaccatgctgcggagacatgtcactgatgggctcctgaaaggcacggacgcagcccaagccgcacagtacatggctatggaaaaggccacagccgcagaagtcctgaagagtcaggaggaggcagcccacacctccggccagcccttccacagcacaggtgcccctggcgatgcgaagtcggaagtggtgcctttgtccggcatgatggttcgccacgcgcagagctcccctgtggtcatccagccctcccagcactccgtggccctgctgaaccctgctcagaacttgcctcacgtggccagctccccagccgtcccccaggaagcaacctccactctgcagatgtcgcaggctccgcagtccccacagatacccatgaatgggtctgccatgcagagcttgttcattgaagaaatccacagtgtgagtgccaagaacagggcagtgtctatcgagaaagcagaaaagaaatgggaggaaaaaaggcaaaatctggatcactataatgggaaagagtttgagaagctcctagaagaagctcaggccaatatcatgaagtcaataccaaatctggagatgccgccagccacaggcccactgccaaggggagatgccccagtggacaaggtggaactttcagaagattctccaaattcggaacaggacttggaaaagctggggggaaagtcgccccctcctcctccgccacctcctcgtcgaagctacctgccaggatcgggactcaccaccacgaggtcaggcgatgtggtctacaccggcagaaaggagaacatcaccgctaaggcaagcagtgaagatgctggaccaagcccacagaccagagctacaaaatatccagcagaggagcctgcttcagcctggaccccatccccaccgcctgtcaccacctcctcctcaaaggatgaggaggaagaagaagaagaaggagacaaaataatggcagaactccagggctccagcggggccccacagacgagcaggatgcctgtccccatgagtgccaagaacagacccggaaccctggacaaacccggcaagcagtccaaactgcaggatccccgccaatatcgtcaggctaatggaagtgctaagaaatctggtggggactttaagcctacttccccctccttacctgcttctaagattccagccctttctcccagctctgggaaaagcagttctctgccctcttctagtggtgacagctctaacctccctaatccacctgctactaaaccatcgattgcttctaaccctctcagcccccaaacaggaccacctgctcactctgcctccctcatcccttctgtctctaatggctctttgaagtttcagagcctcactcatacaggtaaaggtcaccatctttcattctcaccgcagagtcaaaatggccgagcaccccctcctttgtcattttcctcctcccctccttctcctgcctcctccgtctcactgaatcaaggtgccaagggcaccaggaccatccatactcccagcctcaccagctacaaggcacagaatggaagttcaagcaaagccaccccatccacagcaaaagaaacctcttaaaggtcaaatcctattaggcacaagtcggagttacatttaaaaaaaattaacagtctacaacaactgttttcacaagagaatgtaacatattgctgtatcgtttgaggcttaatgctaaatatgtgctaaatactggattaatagatttcagtaaagctcgttcgttttgtttggttttctttttacctagttgctatagtgtctacagtctatactcaatacctataaaatgcagtaagcatgtgttacagaaagaggttctggtgggagagaaaggtgcgtgtgagacaggagaattgtcttaagcatataaaacatgtatgattccagaattttagtatgttttgtataaaactatttttcattacggagactagaagtgaacagagaattacacaagtgtgactatacaaattgtaaaacagatactataatatttccttttattttagtgttatttagctttattacagatttctatttttgtcaaaacttcatggttcctttcaagatcttttttgccaaaacattttgatactatagcattgtacatttgaaagtagtgttctagactataaaaccaatgaacttctacatgagccctacagacaggcatgtgtagaaggcaatttatcaaacctattgcactgccatgaaaagtgtgtataataatttgctagcccaagcaagctagttttctttgcttgcttcttttctttcttttttccttccttttttttttttttttcttttttaacatgttgagattctctagttgttttctttggcgtatctaaccccttcttttgttttctgagacctggtaacccacgctcttgcattgtggattttaaaatgtatactctgtacggttctgtaaaccgaaaaacttttgtaaatatataaatatacatagacataaaaatactgtatgtgacagcacatagagtagttttcccacaccaaagttaatttttatgcatgctttaaaagtatatatcgggaccggcagaaatggaagtatccatacatttttaaaaagcaacaagtttgcacagctagagtgtttttgtaaataaatgtatttgtataacacagtcatgtaatatacagaactataagcagagactttgcaaaactaaataaagggctgcatgcttattattttttgtaccttgtcactataactacttcctagtcaaagaacgaaatgtaactgttaccgagttaaatgtttttccgctttgagggatgtaaccacatccactcagaggacactacttttctgaaagctctggggtgactaatgatgagttcctaataaattaattgcaagtgtggtgccttggatgtggcctgttggctcgctttcttctctgtggcttatcaaggtgtagatgacagaaagcaaacctggatacagagtttccaccctcagttcctggaggggctcttattattttctctctttttaaaaaacttccagtagaagtaaagtggaaataaaatgtctttatca

SEQ ID NO: 1984 - DNA, 531 bp, Homo sapiens
  source 1..531: mol_type = genomic DNA
atgggctgctgtggctgttctggaggctgtggctctggctgtgggggctgtggctccggcagtgggggctgtggctctggctgtgggggctgtggctccagctgctgtgtgcccatttgctgctgcaagcctgtgtgctgctgtgtgccagcctgttcctgctccagctgtggctcctgtgggggctccaaagggggctgtggctcttgtgggagctccaagggtgggtgtggttcttgtggctgctcccagtccaactgctgtaagccctgctgctcctcctcaggctgtgggtcattctgctgccagtccagctgctccaaaccctgctgctgccaatccagctgctgccagtccagctgctgcaagccctgctgctgccaatccagctgctgccagtctagctgcttcaagccctgctgctgccagtccagctgctgtgtccccgtgtgctgccagtccagctgctgcaagccctgctgctcccagtccagctgctgtgtccctatttgctgtcagtacaagatctga

SEQ ID NO: 1985 - DNA, 513 bp, Homo sapiens
  source 1..513: mol_type = genomic DNA
atgggctgctgtggctgctccggaggctgtggctccggctgtgggggttgtggctccggctgtgggggctgtggctccggctgtgggggctatggctctggctgtgggggctgtggctccagctgctgtgtgcccgtctgctgctgcaagcccgtgtgctgctgtgtgccagcctgttcctgctccagctgtggctcctgtgggggctccaagggggactgtggctgtggttcctgtgggggctccaaggggggctgtggttcttgtggctgctcccagtgcaattgctgtaagccctgctgctgctcctcaggctgtggatcctgctgccagtccagctgctgcaatccctgctgctgccagtccagctgctgtgtccccgtgtgctgccagtctagctgctgcaagccctgctgctgtcagtccagctgctgtgtcccctccagctgctgcaggtcctgctgctccaagtccagctgctgtgtccctatttgctgtcagtacaagatctga

SEQ ID NO: 1986 - DNA, 2618 bp, Homo sapiens
  source 1..2618: mol_type = genomic DNA
cgaatcaccgctcctgagcccggtgcggggctgccgctatcgcctggccgtgggtgccggagcggccgggttgcgactcagcgttcttgggtgggcgcgggcggcgtctccgcggcgggcatcccccgaggccgccctcgggccatgatcgactccgtgaagctgcgccgcgacagcgcggcggacttcttctcccactacgagtacctgtgcgcgctgcagaactcggtgccgctgcccgccgtgcgcgcctgtctccgggagggcgtgctggatttcaacgccgaccgcctccgcggggtggactgggcgcctctgctgagcaccctcaagatcaataaagacctgcccttggtctccatcaagagcttcttccagccctggctgggggacacaggttctgacatgaataaattttgcagaagtcgtgttcctgcgataagatacaaagatgtgaccttccagttgtgtaaagctcttaaaggctgtttaagtatatcaagtgtgctaaagaacctggagctaaatggactaattctgagagagagggatttaactattctagcaaagggattgaataaatcggcttctttggtgcacctgtctcttgcaaattgtccaattggagatggaggtttagaaattatttgtcaaggtataaagagctctatcactcttaagacagtcaacttcacaggatgtaatctgacatggcagggagcagatcacatggccaagatcttaaagtatcagaccatgagaaggcatgaagaaacctgggctgagagtcttcgctataggagacctgatcttgactgtatggctggcttaagacgtatcacactgaattgcaacacacttattggtgacctaggtgcatgtgcttttgcagactctctcagtgaggatttatggctgagagctcttgacctgcaacagtgcggcctcaccaatgaaggagcaaaggctttgctagaggcccttgaaaccaatacaactctggtcgttctggatataagaaaaaatccactcattgatcattctatgatgaaagcagttatcaaaaaagtcctccagaatggaaggagtgccaaatcagagtaccagtggataacttctccatcagtgaaggaaccatccaaaactgctaaacagaaaaggagaactataattctaggaagtggtcacaaaggaaaagctactattagaattgtaggattggctacaaagaaacctgtaagtagtggcagaaaacactcccttggtaaagaatattatgcgcccgcacctcttccacctggtgtgtctggtttcttgccgtggcgtactgcagaacgtgcaaaaagacacaggggtttcccattaatcaaaacacgtgatatatgtaatcagttgcagcaaccaggttttcctgtgactgtgacagtagagagtccttcatcctctgaagttgaagaggttgatgattcttcagagagtgttcatgaagtgcctgagaaaactagtatagaacaagaagcattacaggaaaaactggaggagtgcctaaagcagttaaaggaagaaagagtgataaggcttaaggttgataaacgagtcagtgagctggaacatgaaaatgcccagttaagaaatataaatttctctttgtctgaagcccttcatgcacagtcattgacaaatatgatcctggatgatgaaggtgttttgggcagcattgagaattcttttcagaagtttcatgctttcttggatctccttaaagatgctgggcttgggcagcttgccacaatggctgggatagatcagtcagattttcaattactaggtcatccccagatgacttctactgttagtaatccacctaaagaagaaaagaaggcgcttgaagatgaaaaaccagaaccgaagcagaatgccctagggcaaatgcaaaatatccaggtttctatttgtatgcagtcagcttacaatgaaggaacactaatgaagtttcagaaaattacaggtgatgctagaattcctttgcctctcgactcctttcctgtcccagtttctactccagagggcttaggaacttccagcaacaacctaggagtcccagctactgagcagcggcaggagtcttttgaaggattcattgctagaatgtgttctccttcaccagatgcgacttctggaactggaagtcaaagaaaagaagaggagttgtccagaaatagcagatcttcttcagagaaaaagaccaaaacaggtgaatataccaaaaaacactctgataagcaacaccctggaaaggacctgcattcctgatctgactgtcctgaaaaccagaaaagcaaagaaactagggaaactagttctttggttaatgaaccaattaaaagtaggtctttgaaaaaatacgtttctgtcaagaaagaaaatagaatagtgactgtttcatccaagacaaataaaagtaaatccagtccactagaacattctgaaagtgatactcttggatgtgattttgaatttcaagaaagcatccattctctatcacacctttcatatgactaaatcttttgaaactatgtttttacctttaaattttaataaattttcttatgttttta

SEQ ID NO: 1987 - DNA, 4574 bp, Homo sapiens
  source 1..4574: mol_type = genomic DNA
tgaaggtaaaattttccagatacggcagacggctttcagagtacaataaacagggaatgagaactatttacatggaagtttctttctcatgatgcggtggagaagcctcggccacttggttctgccagatgttcctggggttactgtaaatgggaaggacaggcagagctaaacaaggtttatcatttaaaagtgcctgtgtgaagtcacttttgctggaaaactgcagcttgggagctttctttgtattcacatcccactcttctgtcaagtacactttaccctgaccttatgagtggatgaagatacctcagttgtctgactttgccaattgcttaatttcagaatttaaaaaggggaaagaaaaacatcctgctaaaatatgaacatctgagtgtcttattttccaacatcgtcaatagctgtgagcgtcagcattaaatattctcccaaggagtgccatgatattgaagtcactttattaataacagctgtatctgcaaaacagtcaagagactcggacgttgaaagccagagatgacactgagcatgcttttattgcggcctaccatctttaagtgggacatattgattgatgagtgattgcctgtccatacactctctcatcatcctgttccttggattggacttcactaagcaatttatcactcaccttcagacttacatgtgggagttttcacaacagtagttttggaatcattagaacttggattgatttcatcatttaacagaaacaaacagcccaaattactttatcaccatggctttgaacgttgccccagtcagagatacaaaatggctgacattagaagtctgcagacagtttcaaagaggaacatgctcacgctctgatgaagaatgcaaatttgctcatccccccaaaagttgtcaggttgaaaatggaagagtaattgcctgctttgattccctaaagggccgttgttcgagagagaactgcaagtatcttcaccctccgacacacttaaaaactcaactagaaattaatggaaggaacaatttgattcagcaaaaaactgcagcagcaatgcttgcccagcagatgcaatttatgtttccaggaacaccacttcatccagtgcccactttccctgtaggtcccgcgatagggacaaatacggctattagctttgctccttacctagcacctgtaacccctggagttgggttggtcccaacggaaattctgcccaccacgcctgttattgttcccggaagtccaccggtcactgtcccgggctcaactgcaactcagaaacttctcaggactgacaaactggaggtatgcagggagttccagcgaggaaactgtgcccggggagagaccgactgccgctttgcacaccccgcagacagcaccatgatcgacacaagtgacaacaccgtaaccgtttgtatggattacataaaggggcgttgcatgagggagaaatgcaaatattttcaccctcctgcacacttgcaggccaaaatcaaagctgcgcagcaccaagccaaccaagctgcggtggccgcccaggcagccgcggccgcggccacagtcatggcctttccccctggtgctcttcatcctttaccaaagagacaagcacttgaaaaaagcaatggtaccagcgcggtctttaaccccagcgtcttgcactaccagcaggctctcaccagcgcacagttgcagcaacacgccgcgttcattccaacagggtcagttttgtgcatgacacccgctaccagtattgataattctgaaataatcagcagaaacggaatggaatgccaagaatctgcattgagaataactaaacattgttactgtacatactatcctgtttcctcctcaatagaattgccacaaactgcatgctaaataaagatgtagttcttctggacagaccacaactctaagaagctagtgctgctatctcatatatgagtattaaatatggtatgcttagtatattccaacctaagatagttaactacctgagaccagctgtgatgtttaaagacataaaggataaagtttacttttaaagggtttctaaacatagtttctgtcctaggaatattgtcttatctccataactatagctgatgcagaaagtccagccagtttactcatttcgattcagaatatttcaaatttagcaataaacaattagcattagttaaaaaagaaacatattccaagggcaggttcgattctagctctaattactgtcatgtcatttacccactggatcaaagggtatgtttcacttcttgacaatataaatgctgcagcaaagatgagaggtgaagtaaaaccgatacctgtcctgcaggtctaaaatttgaatggaaattcaagcacaagtactggggacacatcaaagtgtggtgtttggtttgcctggagatgccacgttgaatcatgtgattctagattaacattaaatagattgaaaaagaaactttgcacggtatgagcttcataccccaccaaacaaagtcttgaaggtattattttacaagtatatttttaaagttgttttataagagagactttgtagaagtgcctagattttgccagacttcatccagcttgacaagattgagaggcccatgccaacagtctaatctaagagattagtctttcaaactcaccatccagttgcctgttacagaataactcttcttaactaaaaacctagtcaaacaaggaagctgtaggtgaggagatctgtataatattctaatttaagtaagtttgagtttagtcactgcaaatttgactgtgactttaatctaaattactatgtaaacaaaaagtagatagtttcactttttaaaaaatccattactgttttgcatttcaaaagttggattaaagggttgtaactgactacagcatggaaaaaaatagttcttttaattctttcaccttaaagcatattttatgtctcaaaagtataaaaaactttaatacaagtacatacatattatatatacacatacatatatatactatatatggatgaaacatattttaatgttgtttacttttttaaatacttggttgatcttcaaggtaatagcgatacaattaaattttgttcagaaagtttgttttaaagtttattttaagcactatcgtaccaaatatttcatatttcacattttatatgttgcacatagcctatacagtacctacatagtttttaaattattgtttaaaaaacaaaacagctgttataaatgaatattatgtgtaattgtttcaaacatccattttctttgtgaacatattagtgattgaagtattttgacttttgagattgaatgtaaaatattttaaatttgggatcatcgcctgttctgaaaactagatgcaccaaccgtatcattatttgtttgaggaaaaaaagaaatctgcattttaattcatgttggtcaaagtcgaattactatctatttatcttatatcgtagatctgataaccctatctaaaagaaagtcacacgctaaatgtattcttacatagtgcttgtatcgttgcatttgttttaatttgtggaaaagtattgtatctaacttgtattactttggtagtttcatctttatgtattattgatatttgtaattttctcaactataacaatgtagttacgctacaacttgcctaaaacattcaaacttgttttcttttttctgtttttttctttgttaattcatttaaactcattgaaaacatagtatacattactaaaaggtaaattatgggaatcactgaaatatttttgtagattaattgttgtaacattgtctttcttttttttcttttgtttcatgattttgatttttaaaattattagcacacaactattttcagccctttaataatggagcatcaaaaacatcacctgtaaccccaagcaaatatagaagactgtattttttactatgatatccattttccagaattgtgattacaatatgcaaagagtcataaatatgccatttacaataaggaggaggcaaggcaaatgcatagatgtacaaatatatgtacaacagattttgctttttatttatttataatgtaattttatagaataattctgggatttgagaggatctaaaactatttttctgtataaatattatttgccaaaagtttgtttatattcagaagtctgactatgatgaataaatcttaaatgctttgtttaattaaaaaacaaaaatcaccaatatccaagacatgaagatatcagttcaacaaatactgtagttaagagactaactctccacttgtatgggaactacatttcactcttggttttcaggatataacagcacttcaccgaaatattctttcagccataccactggtaacatttctactaaatctttctgtaacacttaaagaattccctcattcattaccttacagtgtaaacaggagtctaatttgtatcaatactatgttttggttgtaatattcagttcactcacccaatgtacaaccaatgaaataaaagaagcatttaaaagga

SEQ ID NO: 1988 - DNA, 1864 bp, Homo sapiens
  source 1..1864: mol_type = genomic DNA
ctgaaggtaaaattttccagatacggcagacggctttcagagtacaataaacagggaatgagaactatttacatggaagtttctttctcatgatgcggtggagaagcctcggccacttggttctgccagatgttcctggggttactgtaaatgggaaggacaggcagagctaaacaaggtttatcatttaaaagtgcctgtgtgaagtcacttttgctggaaaactgcagcttgggagctttctttgtattcacatcccactcttctgtcaagtacactttaccctgaccttatgagtggatgaagatacctcagttgtctgactttgccaattgcttaatttcagaatttaaaaaggggaaagaaaaacatcctgctaaaatatgaacatctgagtgtcttattttccaacatcgtcaatagctgtgagcgtcagcattaaatattctcccaaggagtgccatgatattgaagtcactttattaataacagctgtatctgcaaaacagtcaagagactcggacgttgaaagccagagatgacactgagcatgcttttattgcggcctaccatctttaagtgggacatattgattgatgagtgattgcctgtccatacactctctcatcatcctgttccttggattggacttcactaagcaatttatcactcaccttcagacttacatgtgggagttttcacaacagtagttttggaatcattagaacttggattgatttcatcatttaacagaaacaaacagcccaaattactttatcaccatggctttgaacgttgccccagtcagagatacaaaatggctgacattagaagtctgcagacagtttcaaagaggaacatgctcacgctctgatgaagaatgcaaatttgctcatccccccaaaagttgtcaggttgaaaatggaagagtaattgcctgctttgattccctaaagggccgttgttcgagagagaactgcaagtatcttcaccctccgacacacttaaaaactcaactagaaattaatggaaggaacaatttgattcagcaaaaaactgcagcagcaatgcttgcccagcagatgcaatttatgtttccaggaacaccacttcatccagtgcccactttccctgtaggtcccgcgatagggacaaatacggctattagctttgctccttacctagcacctgtaacccctggagttgggttggtcccaacggaaattctgcccaccacgcctgttattgttcccggaagtccaccggtcactgtcccgggctcaactgcaactcagaaacttctcaggactgacaaactggaggtatgcagggagttccagcgaggaaactgtgcccggggagagaccgactgccgctttgcacaccccgcagacagcaccatgatcgacacaagtgacaacaccgtaaccgtttgtatggattacataaaggggcgttgcatgagggagaaatgcaaatattttcaccctcctgcacacttgcaggccaaaatcaaagctgcgcagccgcggccgcggccacagtcatgactcagtcgactgccaaagcaatgaagcgacctctcgaagcaactgtagacctggcctttccccctggtgctcttcatcctttaccaaagagacaagcacttgaaaaaagcaatggtaccagcgcggtctttaaccccagcgtcttgcactaccagcaggctctcaccagcgcacagttgcagcaacacgccgcgttcattccaacagtacccatgatgcacagcgctacgtccgccactgtctctgcagcaacaactcctgcaacaagtgtccccttcgcagcaacagccacagccaatcagttagtttatagc

SEQ ID NO: 1989 - DNA, 915 bp, Homo sapiens
  source 1..915: mol_type = genomic DNA
atggcgaagattgagaaaaacgctcccacgatggaaaaaaagccagaactgtttaacatcatggaagtagatggagtccctacgttgatattatcaaaagaatggtgggaaaaagtatgtaatttccaagccaagcctgatgatcttattctggcaacttacccaaagtcaggtacaacatggatgcatgaaattttagacatgattctaaatgatggtgatgtggagaaatgcaaaagagcccagactctagatagacacgctttccttgaactgaaatttccccataaagaaaaaccagatttggagttcgttcttgaaatgtcctcaccacaactgataaaaacacatctcccttcacatctgattccaccatctatctggaaagaaaactgcaagattgtctatgtggccagaaatcccaaggattgcctggtgtcctactaccactttcacaggatggcttcctttatgcctgatcctcagaacttagaggaattttatgagaaattcatgtccggaaaagttgttggcgggtcctggtttgaccatgtgaaaggatggtgggctgcaaaagacatgcaccggatcctctacctcttctacgaggatattaaaaaaaatccaaaacatgagatccacaaggtgttggaattcttggagaaaacttggtcaggtgatgttataaacaagattgtccaccatacctcatttgatgtaatgaaggataatcccatggccaaccatactgcggtacctgctcacatattcaatcactccatctcaaaatttatgaggaaagggatgcctggagactggaagaaccactttactgtggctttgaatgagaactttgataagcattatgaaaagaagatggcagggtccacactgaacttctgcctggagatctga

SEQ ID NO: 1990 - DNA, 3007 bp, Homo sapiens
  source 1..3007: mol_type = genomic DNA
gagtgtgtgacccagcccttcccccgtggccaagcagagagagtggccttgaggaagccatagcagcaggaccagcatggcctctgctgcctctgtgaccagcctggcagatgaagtcaactgccccatctgtcagggtaccctgagggagccggtcactatcgactgcggccacaacttctgccgggcctgccttacccgctactgtgagataccaggcccagacctggaggagtcccctacttgcccactctgcaaagaacccttccgtcctgggagcttccggcccaactggcagctggctaacgtggtggagaacattgagcgcctccagctggtgtccacactgggtttgggagaggaggatgtctgccaagagcacggagagaagatctacttcttctgtgaggatgatgagatgcagttgtgcgtggtgtgccgggaggctggggagcacgctacccacaccatgcgcttcctggaggatgcagcggctccctatagggaacaaatccataagtgtcttaaatgtctaagaaaagagagagaggagattcaagaaatccagtcaagagaaaataaaaggatgcaagtcctcctgactcaggtgtccaccaagagacaacaggtgatttctgagttcgcacacctgaggaagtttctagaggaacagcagagcatcctcttagcacaattggagagccaggatggggacatcttgaggcaacgggatgaatttgatttgctggttgctggggagatctgccggtttagtgctcttattgaagaactggaggagaagaatgagaggccagcaagggagctcctgacggacatcagaagcactctaataagatgtgaaaccagaaagtgccggaaaccggtggctgtgtcgccagagctgggccagaggattcgggactttccccagcaggccctcccgctgcagagggagatgaagatgtttctggaaaaactatgctttgagttggactatgagccagctcacatttctctagaccctcagacttcccaccccaagctcctcttgtccgaggaccaccagcgagctcagttctcctacaaatggcagaactcaccagacaacccccaacgttttgaccgggccacctgtgttctggcccacactggcatcacaggggggagacacacgtgggtgtggatggccagggtacctggggactcaggctgctgccagttctgctcaccaccatccgtgcttggcacagaagtagctgcatagaaagggcactggatttgaagtcagaagacctgggttcttgaaccagcctgtcaaccagttgtatgactttaaacaaggcatctcacctcttttcatcttgttttcttccaataatgttagagttcatgtaatcacattctctagaaccatttagtttgtgttaactatgaaccaagcagtgtggtggccactggtgacttgaaaatatagagaaaaaaaaaacctgctctatatctgaaagagctcttgggaagacagagaaacataaagaggaaattacagcacagtgtggtgggtgttacgggaagtccaaccccagcattatgggagttcaggggaaggggcatagcccagcctggaaggagagggtgagtgggggatggctttctgaaaagggtggtctaaaggatgcctatggtcaatagggaaaagaggggaagaagcatcttaagaagaggaaacagcagagaactggctggatgacctgtgactctggagcactgggttgtctccattgtcattatgggcagatgtgtgccatccccagccgacgccactcactgcctccttcctcctggtgttgccacttctgggtgagattaaggtgcagggcctgggggcaggaggacataaggtatagccataaatcataacccagggaccacactcaaccctagggaaattgtcttcctgatcagttgattaccatctgaggtcaagaaatgagatagtgggagcaaatgggtcacaaatagctcagctgtgggctcagaaactgctaggtaaaagaattccagaaggaggccagggcataagttggatgacctatgaactttagtctaaagaattgagactaccgtaattgagactactgtagtgacatctgagaaatgggatggaagagtgaccatgttttattttcttgttcttgtcactattgtattttattttgcataatcatgcccttcactgacagtctccttaacatcatctgtttactctgctcagtgtaaactacaatgctctgtcatctccctactgggtctcctgggaggaggggagccatccagggtgcaaactcaaaggcagagggcacagcgtgcttaggcccaagcttagaattcaattgagaagttctgttgttcatccttacctcagcaggtagaaaagaggtggagatcagaagccagggattagagattgaattgctttccctgggagtgtgcagtatctcattaaaatgttgtatattcaaaaaaatacagacacacacaagtgcctatataatgataaaacatatccaaagcacccaaacctgtgattccagaaaagtagatcctatttttgtttatttttattggctttagctgtgtcttttgaaaggactattatcctctaaaatgtatgtgtatgaagatcctggcttgcagctcgggagctttacacaccttgtgtcactttatcttggtaacgagccaagatcatgcaaccagttcatccatgtctgacccaagagctcttaactgctatgctgcactgcctcattcagagatagatgcctgcatgggtcctggcgattattttaatgctggctacacccccacaggtgacttggattcagaaatacaatttatatttcttctttttaaattgttttattttatttttcttttaatagttatatgtcagtgagaacaatttatatgtcttacactgagaaataaaactgctcataagtgaaaa

SEQ ID NO: 1991 - DNA, 1522 bp, Homo sapiens
  source 1..1522: mol_type = genomic DNA
gagtgtgtgacccagcccttcccccgtggccaagcagagagagtggccttgaggaagccatagcagcaggaccagcatggcctctgctgcctctgtgaccagcctggcagatgaagtcaactgccccatctgtcagggtaccctgagggagccggtcactatcgactgcggccacaacttctgccgggcctgccttacccgctactgtgagataccaggcccagacctggaggagtcccctacttgcccactctgcaaagaacccttccgtcctgggagcttccggcccaactggcagctggctaacgtggtggagaacattgagcgcctccagctggtgtccacactgggtttgggagaggaggatgtctgccaagagcacggagagaagatctacttcttctgtgaggatgatgagatgcagttgtgcgtggtgtgccgggaggctggggagcacgctacccacaccatgcgcttcctggaggatgcagcggctccctatagggaacaaatccataagtgtcttaaatgtctaagaaaagagagagaggagattcaagaaatccagtcaagagaaaataaaaggatgcaagtcctcctgactcaggtgtccaccaagagacaacaggtgatttctgagttcgcacacctgaggaagtttctagaggaacagcagagcatcctcttagcacaattggagagccaggatggggacatcttgaggcaacgggatgaatttgatttgctggttgctggggagatctgccggtttagtgctcttattgaagaactggaggagaagaatgagaggccagcaagggagctcctgacggacatcagaagcactctaataagatgtgaaaccagaaagtgccggaaaccggtggctgtgtcgccagagctgggccagaggattcgggactttccccagcaggccctcccgctgcagagggagatgaagatgtttctggaaaatctgcctaatcacctggttatccccacagctcacatttctctagaccctcagacttcccaccccaagctcctcttgtccgaggaccaccagcgagctcagttctcctacaaatggcagaactcaccagacaacccccaacgttttgaccgggccacctgtgttctggcccacactggcatcacaggggggagacacacgtgggtggtgagtatagacctggcccatgggggcagctgcaccgtgggcgtggtgagcgaggatgtgcagcggaagggggagcttcggctgcggccagaggagggggtgtgggctgtgaggctggcttggggcttcgtctcggctctgggctccttccccacacggctgaccctgaaggagcagccccggcaggtgagggtgtctcttgactatgaggtgggctgggtgaccttcaccaacgctgtcacccgagagcccatctacaccttcactgcctccttcactaggaaggtcattcccttctttgggctctggggccgagggtccagtttctccctgagctcctga

SEQ ID NO: 1992 - DNA, 3738 bp, Homo sapiens
  source 1..3738: mol_type = genomic DNA
ggagccgggacaccgagggaagaggccggagggagatcgcggaggggagggggcgggaggggggtggggtatcctgagtcgtccgtggtccggagtctggaaggccctagagcggcgccagtcgacccgcctcgccacaacttgcccagaccagacacgtttcatcctgcgccctgcaagaaggagccggcctgcctctctccgctttgctgctcctcggcctccgcgggcccggcccgcgtcagcagcgaccctggggtctgggtcccctgtgtcgcccccgcccgcctgcagcgcccggcacccgcccaggagcgcgcagctggggttctagggacgtatacttgagcaagagagaccacagctcttgttcccgctgatcctgcagcccagtggatggagtccagaatctacagacctgccaggaaagaaaaaaaaattcctgatgtctggtccaagcaggaattccccggtggattggggaatgtctggcttttcctcagcttattgatctctgtggtaaccactggaggcccccagaagacccatagaaatgagaggcctgaggtctacaagtcgctgctagaaatattttagcctctccaaagcccagaatgcagccccgacccaagtttgtaagggttctgggtgcacgctgaccctgcgcgggcagacgcgccctttgctccaggtccggacctgggcgctgctatagcaacgtcctggacgcccagaccttaggccgccgccgccgcggaagcgaggaacccggccttctcccgctcctgagggctgtggcggcggcggcccgggaggcggcccaggctgggtaaagaccgcccggctcctcctatgcaagctgaggcagcggattggttttcaagcatgcccttccagaagcatgtctactacccgctcgccagcggcccagaggggcccgacgtcgctgtggccgccgccgccgcgggtgcggcctccatggcctgtgcgccccccagcgcggcttcggggcccctgcccttcttccagttcaggccgcggctggagagtgtggactggcggcggctgagcgccatcgacgtggacaaggtggcgggggctgtggacgtgctgacgctgcaggagaacatcatgaacatcaccttctgcaagctggaagacgagaagtgcccacactgccagtcgggggtggacccggtgctgctgaagctcatccgtctggcgcagttcaccatcgagtacttgctgcactcacaagagttcctcacctcgcagctgcacaccctggaggagcggctgcgcctgagccactgcgacggcgagcagagcaagaagctgctcaccaagcaggcgggggagatcaagacgctcaaggaagagtgcaaacgccggaagaagatgatctccacccagcagctgatgatcgaggccaaagccaactattaccagtgccatttttgtgacaaggcctttatgaaccaagcttttctacaaagtcacattcaacgccgccacactgaagaaaattctcattttgagtatcagaaaaatgcacagattgagaagctccggagtgagatcgtcgtattgaaggaagagctgcagctcaccaggtctgagctagaggctgcacaccatgccagtgcagtcagattctccaaggaatatgaaatgcagaaaacaaaagaggaagactttttgaagttatttgacaggtggaaagaagaagaaaaggagaaactagttgatgaaatggaaaaagtcaaggagatgtttatgaaggaatttaaagaattaacttcgaagaattcagcattagaatatcaactgtcagaaatccagaagtccaatatgcagatcaagtccaacataggcacattaaaagatgcacacgagtttaaagaagaccgttctccatatccccaggatttccataatgtcatgcagcttcttgatagtcaggaaagcaaatggacagctcgagttcaagctattcatcaagaacacaagaaagagaagggtcggctcctgtcacatatagagaaacttcgaacctcaatgatagatgatctaaatgcaagcaatgttttctataagaaaaggatagaagagctagggcagagactccaggagcagaatgagctgattataactcagagacagcagattaaagactttacctgtaatccattaaacagtatcagtgaacccaaaggaaatcctttagcctggcaggcttttgaatctcagccagctgctccagctgtgcctatgaatgccccagccctgcacactttggaaactaaatcaagtctgccaatggtgcatgaacaggcattctcgtcgcacatactggaaccaatagaagaactttcagaggaagaaaaaggaagggaaaatgaacagaaattaaataacaacaaaatgcatttaaggaaagctttgaagagtaactcctccctcactaagggactaagaacaatggtggagcagaacttgatggagaaactggaaaccttggggattaatgcagatatacgtggcatttcaagtgatcagttgcatagagtactaaaaagtgtggaatcagaaagacataagcaagaaagagaaatacctaactttcatcaaattcgagaattccttgaacatcaagtcagctgtaaaattgaggagaaagcactactctcttcagatcagtgcagtgtttctcaaatggataccctttcaactggagaagtacccaaaatgatacaacttccttccaaaaacagacaactgattagacaaaaagctgtttctactgataggacatctgttccaaaaattaagaaaaatgtcatggaagatccttttcccagaaagtcttcaactattacgacccctccttttagttcagaggaggagcaggaggacgacgacctcatccgggcatacgcatccccaggcccacttcctgtgccgccaccacaaaacaagggcagcttcgggaagaacacagtgaaaagtgacgcggacgggaccgagggaagcgaaatcgaggacactgatgattctcccaagcccgcaggagtcgccgttaaaacacctactgaaaaagttgaaaagatgtttccacatcgcaaaaatgtgaacaaaccagtcggtggaactaatgtccctgagatgtttatcaaaaaagaagaattacaagaactaaagtgtgcggatgtggaggatgaagactgggacatatcatccctagaggaagagatatctttgggaaaaaaatctgggaaagaacagaaggaacctccacctgcgaaaaatgaaccacattttgctcatgtgctaaatgcctggggcgcatttaatcctaaggggccaaagggagaaggacttcaagaaaatgaatcaagcacattaaaaagcagcttagtaactgtgactgattggagcgacacttcagatgtctaattccacatgtcagaagattattccagaagccagcagtatttcagtatcacagtgtttcagtaatttgcctccatgattctagtgcttctgccttaccgtgtttcccacagcaacacagagactgattcaaagaacaatggtctctttaatggcacccaatacagtattgaaaatcagatcatcaacagtatttcgaagcatgtaaaggtgtttaagacttccgctgctgcttaaaaataacatgtcattgaagtcataaaaagttttttcttcagaaaggta

SEQ ID NO: 1993 - DNA, 894 bp, Homo sapiens
  source 1..894: mol_type = genomic DNA
cggttcctaccaaccgttcttattgctggcggcctgaggagcccatcatggcgacgccccctaagcggcgggcggtggaggccacgggggagaaagtgctgcgctacgagaccttcatcagtgacgtgctgcagcgggacttgcgaaaggtgctggaccatcgagacaaggtatatgagcagctggccaaataccttcaactgagaaatgtcattgagcgactccaggtaaagactatgggattgggtaccatttttttggtatgtgtgggcaagggagggaaatgggaagagagactccagacccaaccctgtcacctgacctaagagttcaccactgacccctacctctttttccctggccccacaggaagctaagcactcggagttatatatgcaggtggatttgggctgtaacttcttcgttgacacagtggtgtgagtgtctacccgcccctctgagcccacagggttcagcttaccccttccctcatgcaacttatatttttttgagtatcttctatgtaccaggcactatgcgaggttttatatcccagtaggatataagctaggtgctggggatgtgacagtgaataaaataggacaaaatccctgccttcccagagcctcaatttggggaagggtggggagcaaaacataaactatgctaaacagtgataaggacttctccccacttcctctaacctctctttcctcagcccagatacttcacgcatctatgtggccctgggatatggttttttcctggagttgacactggcagaagctctcaagttcattgatcgtaagagctctctcctcacagagtaagtccattccatgaggatagtgtgtaaaaacaccaccatttccaacactcttctccctttaccca

SEQ ID NO: 1994 - DNA, 2548 bp, Homo sapiens
  source 1..2548: mol_type = genomic DNA
aggtgtcaccacagtgatggcagtggaggacagcacgctgcaagtagtggtacgggtgcggccccccacccctcgggagctggacagtcagcggcggccagtggttcaggtggtggacgagcgggtgctggtgtttaaccctgaggagcccgatggagggttccctggcctgaaatggggtggcacccatgatggccccaagaagaagggcaaagacctgacgtttgtctttgaccgggtctttggcgaggcggccacccaacaggacgtgttccagcacaccacgcacagcgtcctggacagcttcctccagggctacaactgctcagtgtttgcctacggggccaccggggctgggaagacacacaccatgctgggaagggagggggaccccggcatcatgtacctgaccaccgtggaactgtacaggcgcctggaggcccgccagcaggagaagcacttcgaggtgctcatcagctaccaggaggtgtataatgaacagatccatgacctcctggagcccaaggggccccttgccatccgcgaggaccccgacaagggggtggtggtgcaaggactttctttccaccagccagcctcagccgagcagctgctggagatactgaccagggggaaccgtaaccgcacgcagcaccccactgatgccaacgcgacttcctcccgctcccatgccatcttccagatctttgtgaagcagcaggaccgggttccaggactgacccaggctgtccaggtggccaagatgagcctgattgacctggctggctcagagcgggcatccagcacccatgcgaagggggagcggctgcgggagggggccaacatcaaccgctctctgctggcgctcatcaacgtcctcaatgccttggccgatgcaaagggccgcaagacccatgtgccctaccgggacagcaaactgacccgcctgctcaaagactccctcgggggcaactgccgcacagtgatgatcgctgccatcagcccctccagcctgacctacgaggacacgtacaacaccctcaaatatgccgaccgggccaaggagatcaggctctcgctgaagagcaatgtgaccagcctggactgtcacatcagccagtatgctaccatctgccaacagctccaggctgaggtagccgctctgaggaagaagctccaagtgtatgaggggggaggccagcccccaccacaggacctcccaggatctcccaagtcgggaccaccaccagaacaccttcccagctcccccttgccaccccaccctcccagccagccctgcaccccagagctccctgcagggcctagagcccttcaagaggagagtctggggatggaggcccaggtggagagggccatggaagggaactcttcagaccaggagcagtccccagaggatgaggatgaaggcccagctgaggaggttccaacccagatgccagagcagaaccccacacatgcactgccagagtcccctcgcctgaccctgcagcccaagccagtcgtgggccacttctcagcacgggaactggatggggaccgttctaagcagttggccctaaaggtgctgtgcgttgcccagcggcagtactccctgctccaagcagccaacctcctgacgcccgacatgatcacagagtttgagaccctacagcagctggtgcaagaggaaaaaattgagcctggggcagaggccttgaggacttcaggcctggccaggggggcacctctggctcaggagctgtgttcagagtcaatccctgtgccgtctcctctctgcccagagcctccaggatacactggccctgtgacccggactatggcgaggcgactgagtggccccctgcacaccctgggaatcccgcctggacccaactgcaccccagcccaggggtcccgatggcccatggagaagaagaggaggagaccaagcgccttggaggcagacagtcccatggccccaaagcggggcaccaagcgccagcgccagtccttcctgccctgcctaaggagagggtctctgcctgacacccaaccttcacaggggcccagcacccccaaaggagaaagggcctcctccccctgccattcccctcgcgtttgcccagccacagtcatcaaaagccgggtgcccctgggcccttccgccatgcagaactgctccaccccgctggctctgcccactcgagacctcaatgccacctttgatctctctgaggagcctccctcaaagcccagtttccatgaatgcattggctgggacaaaataccccaggagctgagcaggctggaccagcccttcatccccagggcacctgtgcccctgttcaccatgaagggccccaagccaacatcttccctccctgggacctctgcctgcaagaagaagcgcgttgcgagttcctcagtctcccatggccgcagccgcatcgcccgcctccccagcagcactttgaagaggccaggccccttgtactcccaggtgactggcactagggacagggatagcctgggccatggaggccgatga

SEQ ID NO: 1995 - DNA, 978 bp, Homo sapiens
  source 1..978: mol_type = genomic DNA
gagacggcggcggctgtagcggcgtgacaggagccccatggcacctgcccagccccacctcagcccatcttgacaaaatctaaggctccatggagccaccacggggcccccctgccaatggggccgagccatcccgggcagtgggcaccgtcaaagtatacctgcccaacaagcaacgcacggtggtgactgtccgggatggcatgagtgtctacgactctctagacaaggccctgaaggtgcggggtctaaatcaggactgctgtgtggtctaccgactcatcaagggacgaaagacggtcactgcctgggacacagccattgctcccctggatggcgaggagctcattgtcgaggtccttgaagatgtcccgctgaccatgcacaattttgtacggaagaccttcttcagcctggcgttctgtgacttctgccttaagtttctgttccatggcttccgttgccaaacctgtggctacaagttccaccagcattgttcctccaaggtccccacagtctgtgttgacatgagtaccaaccgccaacagttctaccacagtgtccaggatttgtccggaggctccagacagcatgaggctccctcgaaccgccccctgaatgagttgctaaccccccagggtcccaggtagggatgccttagctgaagagctgctgggggagaaaaagatcttggggctcttgtagaccacgagccatactttattcatttgtttacttgacaaacatttattgagcacctacaagtgtgagtaagggcatgaaactgggaccttgggcaagtcacctcatttctctgggcctcagttttctcatctgtaaagaggggatgatgatactttctaccatataaaggttctggtgaggcttaaatgagttaagacatgttcagtgcctagaacaggatctggtacagtgtaaataatcaatttttttgttattaattataaatatatttat

SEQ ID NO: 1996 - DNA, 2458 bp, Homo sapiens
  source 1..2458: mol_type = genomic DNA
tgacccaataagggtggaaggctgagtcccgcagagccaataacgagagtccgagaggcgacggaggcggactctgtgaggaaacaagaagagaggcccaagatggagacggcggcggctgtagcggcgtgacaggagccccatggcacctgcccagccccacctcagcccatcttgacaaaatctaaggctccatggagccaccacggggcccccctgccaatggggccgagccatcccgggcagtgggcaccgtcaaagtatacctgcccaacaagcaacgcacggtggtgactgtccgggatggcatgagtgtctacgactctctagacaaggccctgaaggtgcggggtctaaatcaggactgctgtgtggtctaccgactcatcaagggacgaaagacggtcactgcctgggacacagccattgctcccctggatggcgaggagctcattgtcgaggtccttgaagatgtcccgctgaccatgcacaattttgtacggaagaccttcttcagcctggcgttctgtgacttctgccttaagtttctgttccatggcttccgttgccaaacctgtggctacaagttccaccagcattgttcctccaaggtccccacagtctgtgttgacatgagtaccaaccgccaacagttctaccacagtgtccaggatttgtccggaggctccagacagcatgaggctccctcgaaccgccccctgaatgagttgctaaccccccagggtcccagcccccgcacccagcactgtgacccggagcacttccccttccctgccccagccaatgcccccctacagcgcatccgctccacgtccactcccaacgtccatatggtcagcaccacggcccccatggactccaacctcatccagctcactggccagagtttcagcactgatgctgccggtagtagaggaggtagtgatggaaccccccgggggagccccagcccagccagcgtgtcctcggggaggaagtccccacattccaagtcaccagcagagcagcgcgagcggaagtccttggccgatgacaagaagaaagtgaagaacctggggtaccgggactcaggctattactgggaggtaccacccagtgaggtgcagctgctgaagaggatcgggacgggctcgtttggcaccgtgtttcgagggcggtggcatggcgatgtggccgtgaaggtgctcaaggtgtcccagcccacagctgagcaggcccaggctttcaagaatgagatgcaggtgctcaggaagacgcgacatgtcaacatcttgctgtttatgggcttcatgacccggccgggatttgccatcatcacacagtggtgtgagggctccagcctctaccatcacctgcatgtggccgacacacgcttcgacatggtccagctcatcgacgtggcccggcagactgcccagggcatggactacctccatgccaagaacatcatccaccgagatctcaagtctaacaacatcttcctacatgaggggctcacggtgaagatcggtgactttggcttggccacagtgaagactcgatggagcggggcccagcccttggagcagccctcaggatctgtgctgtggatggcagctgaggtgatccgtatgcaggacccgaacccctacagcttccagtcagacgtctatgcctacggggttgtgctctacgagcttatgactggctcactgccttacagccacattggctgccgtgaccagattatctttatggtgggccgtggctatctgtccccggacctcagcaaaatctccagcaactgccccaaggccatgcggcgcctgctgtctgactgcctcaagttccagcgggaggagcggcccctcttcccccagatcctggccacaattgagctgctgcaacggtcactccccaagattgagcggagtgcctcggaaccctccttgcaccgcacccaggccgatgagttgcctgcctgcctactcagcgcagcccgccttgtgccttaggccccgcccaagccaccagggagccaatctcagccctccacgccaaggagccttgcccaccagccaatcaatgttcgtctctgccctgatgctgcctcaggatcccccattccccaccctgggagatgagggggtccccatgtgcttttccagttcttctggaattgggggacccccgccaaagactgagccccctgtctcctccatcatttggtttcctcttggctttggggatacttctaaattttgggagctcctccatctccaatggctgggatttgtggcagggattccactcagaacctctctggaatttgtgcctgatgtgccttccactggattttggggttcccagcaccccatgtggattttggggggtcccttttgtgtctcccccgccattcaaggactcctctctttcttcaccaagaagcacagaattc

SEQ ID NO: 1997 - DNA, 4725 bp, Homo sapiens
  source 1..4725: mol_type = genomic DNA
atggtctctagcgaccggcccgtgtcactggaggacgaggtctcccatagtatgaaggagatgattggaggctgttgcgtttgctcagacgagagaggctgggccgagaacccgctggtttattgcgacgggcacggctgcagcgtcgcggtgcatcaagcttgctatggcattgttcaagtacccactggaccgtggttttgcaggaaatgtgaatctcaggagagagcagccagagtgagatgtgaactttgtccccataaggatggagctttaaaaagaacagataatgggggttgggcccatgtggtttgtgccctgtatattccagaggtacaatttgccaatgtttccacaatggaaccaattgttttacagtctgttccgcatgatcgttataataagacttgctacatttgtgatgaacaaggaagagaaagcaaagcagccactggtgcttgcatgacatgtaataaacatggatgtcgacaggctttccatgtaacatgcgctcagtttgccggactgctttgtgaagaagaaggtaatggtgccgataatgtccaatactgtggctactgtaaataccattttagtaagctgaaaaagagcaaacggggatctaataggtcatatgatcaaagtttaagtgattcttcctctcactctcaggataaacatcatgagaaagagaaaaaaaaatataaagagaaggacaaacacaaacagaaacacaagaagcagccagaaccatcacctgcattggttccatccttgactgttactacagaaaaaacttatacaagcactagcaacaactctatatctggatcattgaagcgcttggaagatactactgcacgatttacaaatgcaaatttccaggaagtctctgcacacacctctagtggaaaagatgtttcagagactagagggtcagagggcaaagggaagaaatcttcagctcacagctcaggtcaaaggggaagaaagcctggtggtggaagaaatccaggaacaactgtgtcagcagctagcccttttcctcaaggcagtttttcaggaactccaggcagtgtaaagtcatcttctggaagttcagtgcagtctccccaggatttcctgagctttacagactcagatctgcgtaatgacagttactctcactcccaacagtcatcagcaaccaaagatgtacataaaggagagtctggaagccaggaagggggggtaaatagttttagtaccttaattggcctcccttcaacctcagctgttacttcacagcctaaaagctttgaaaattcacctggagatttgggtaattccagccttcctacagcaggatataagcgggctcaaacttctggcatagaagaagaaactgtaaaggaaaagaaaaggaaaggaaataaacaaagtaagcatgggcctggcagacccaaaggaaacaaaaatcaagagaatgtttctcatctctcagtttcttctgcttcaccaacatcatctgtagcatcagctgcaggaagcataacaagctctagtctgcagaaatctcctacattgctcaggaatggaagtttacagagcctcagtgttggctcatctccagttggttcagaaatttccatgcagtatcggcatgatggagcttgcccaacaactacgttctcagagttgctgaatgcaatacacaacggtatttataacagcaatgatgtagcagtatcgtttccaaatgtagtatctggctcgggatctagtactcctgtctccagctctcacttacctcagcagtcttctgggcatttgcaacaagtaggagcgctctctccctcagctgtgtcatctgcagcccctgctgttgctacaactcaggcaaatactctatctggatcttctctcagtcaggcaccatctcatatgtatggcaatagatcaaattcatcaatggcagctcttatagctcagtctgaaaacaatcaaacagatcaagatcttggagacaatagccgcaacctagttggcagaggaagctcaccccgaggaagtctctcgccacgatcccctgtaagcagcttacagattcgctatgatcaaccaggcaacagcagtttggaaaatctgcctccagtagcagccagcatagaacagcttttggagaggcagtggagtgaaggacagcaatttttactagaacagggtactcctagtgacattttaggaatgctgaagtcattacaccaacttcaagttgaaaaccgaagattagaggaacaaattaaaaacttgactgccaaaaaggaacggcttcagttattgaatgcacagctttcagtgccttttccaacaataacagcaaatcctagtccgtctcatcaaatacacacattttcagcacagactgctcctactactgattccttgaacagcagtaagagccctcatataggaaacagctttttacctgataattctcttcctgtattaaatcaggacttaacctccagtggacaaagtaccagcagctcatcagctctttctaccccacctcctgctgggcagagtccggctcaacaaggctcaggagtgagtggagttcagcaggtcaatggcgtgacagtgggggcactagctagtggaatgcagcctgtaacttccaccattcctgccgtgtctgcagtgggtggaataattggagctttgccaggtaaccaactggcaattaatggcattgtaggagctttaaatggggttatgcagactcctgtcacaatgtcccagaaccctacccctctcacccacacaaccgtaccacctaatgcaacacatccaatgccagctacactgactaacagtgcctcaggactaggattactttctgaccagcaacgacaaatacttattcatcaacagcagtttcagcagttgttaaattctcaacagctcacaccagtacacaggcacccccacttcacacagctaccaccaacccatttctcaccatccatggagataatgcaagtcagaaagtagcaagacttagtgataaaactgggcctgtagctcaagagaaaagttgacacctgagaaacatctagaaattgcctatcctgctgttctagcacttcatctggctgcctttgcagtccttttactacagctatgaagaaacgcaacaagaaactcaatgcacaacaaaggattaattgctgcaaggacattcttgtaaggctttgattagttttcttgttgctttgttgcactgaaatggaattcccatgcccctaccccttaccccagttttttgaacatggaaagaaaatttaataactttttaaagtgacataatttacatgcaatatgtttatcaactcaagaatttaatatagttggtacacaactagttttgtttataaattggagatgcaaatagcaaaactaaatacttgctccatttacaaactacttgattttattgtacaagttgaaatatgctcttttgtttgggttacagtatgcttgctctaagtcaaattccaaggaactaatttcttctcctggagttgcattgattcagtattacaaatatatagcacatcacctgggacttggcaatctttgttaaaaaaaaatttcctttctaatgggatttggccaattttggtaatgaagttaggatggtaatgtctgcatctgctaaaggtaattttcttttgagaattgctttctttagtgttaagacctactcatattttgaagaaatcttgagttaagtgagttctgaggctgctgggggaaccagatcaattcaaagctaaatacttctttcagaaaggggccactgtggaaagtgctggtggggtttgcccttgatcaagtgcctccattgtgctgcaagggctgtagacagcagggtgggacagtcagtcctccgagcagcaggaatcatcccgtcacctgcagccttcccatgcttccgcctttattcagaactttctgtgccactgtagatagctcaggcaaaactattacctgggtatttatccactaatgagtcacaagaaaaggagtggatttggtaagaatagagatttgttttatttaaaccacttcccattactgaccattaaaagctcaccactagagttcctgaaacaggtgaaacctgtatgacagcccttccactttggggagccacgcttttgatgtgacagtaccgcagagtgattcccccactgaggatgtcatcatcaaactcttctttggtgtgtgaattattagtggaaaagacccagctgtaattagacctccactgtgtacttagctggaagaacatgttaattctgcaatatgtttcttggttaaacattgcacagttcttacctcatttctgtaaataaagttttgtgaatctgttttgtattgtgacaaattcataagataacattgatattttgatttgtaatatttctaattggtagatttaattgaaaagtaaaattaatttatttttatatgttcaggggaattttaaagtcaaatcttttgtagataatttaaaaaatcagtgtggtttattttacttatttaacccactggttgttattctgtaacagtttgtataaatggtaaattttgaatgtgttgttattttacctagatgtaaaattccacatgtattaaaatgtacaaaatgttttgttaataaaatttaataatgtt

SEQ ID NO: 1998 - DNA, 5126 bp, Homo sapiens
  source 1..5126: mol_type = genomic DNA
cgcgcacgcagggctagcctcgcccaggcctcctccctcacgccggccgcaggacgggcgcgcacgccaagtgacgctccgaggaggaagcgcagcccccttcccctccctcgctgcccctggcccagcgggagccccccctccccccagtgcgcctgtgcggaggccctcttgattatgtgtgccctctccgggcgcccgcgttagcggccgggtggaggtggggagggaagacgctgaggaggaggaggaggcggaggaggcggtggaggggaggtggggggaatcagcaaggacatggctcctgactcctgtgcggaacgtgagtgactgagcggcaaagcccgaatggtctctagcgaccggcccgtgtcactggaggacgaggtctcccatagtatgaaggagatgattggaggctgttgcgtttgctcagacgagagaggctgggccgagaacccgctggtttattgcgacgggcacggctgcagcgtcgcggtgcatcaagcttgctatggcattgttcaagtacccactggaccgtggttttgcaggaaatgtgaatctcaggagagagcagccagagtgagatgtgaactttgtccccataaggatggagctttaaaaagaacagataatgggggttgggcccatgtggtttgtgccctgtatattccagaggtacaatttgccaatgtttccacaatggaaccaattgttttacagtctgttccgcatgatcgttataataagacttgctacatttgtgatgaacaaggaagagaaagcaaagcagccactggtgcttgcatgacatgtaataaacatggatgtcgacaggctttccatgtaacatgcgctcagtttgccggactgctttgtgaagaagaaggtaatggtgccgataatgtccaatactgtggctactgtaaataccattttagtaagctgaaaaagagcaaacggggatctaataggtcatatgatcaaagtttaagtgattcttcctctcactctcaggataaacatcatgagaaagagaaaaaaaaatataaagagaaggacaaacacaaacagaaacacaagaagcagccagaaccatcacctgcattggttccatccttgactgttactacagaaaaaacttatacaagcactagcaacaactctatatctggatcattgaagcgcttggaagatactactgcacgatttacaaatgcaaatttccaggaagtctctgcacacacctctagtggaaaagatgtttcagagactagagggtcagagggcaaagggaagaaatcttcagctcacagctcaggtcaaaggggaagaaagcctggtggtggaagaaatccaggaacaactgtgtcagcagctagcccttttcctcaaggcagtttttcaggaactccaggcagtgtaaagtcatcttctggaagttcagtgcagtctccccaggatttcctgagctttacagactcagatctgcgtaatgacagttactctcactcccaacagtcatcagcaaccaaagatgtacataaaggagagtctggaagccaggaagggggggtaaatagttttagtaccttaattggcctcccttcaacctcagctgttacttcacagcctaaaagctttgaaaattcacctggagatttgggtaattccagccttcctacagcaggatataagcgggctcaaacttctggcatagaagaagaaactgtaaaggaaaagaaaaggaaaggaaataaacaaagtaagcatgggcctggcagacccaaaggaaacaaaaatcaagagaatgtttctcatctctcagtttcttctgcttcaccaacatcatctgtagcatcagctgcaggaagcataacaagctctagtctgcagaaatctcctacattgctcaggaatggaagtttacagagcctcagtgttggctcatctccagttggttcagaaatttccatgcagtatcggcatgatggagcttgcccaacaactacgttctcagagttgctgaatgcaatacacaacgacagaggtgacagttctacactaacaaagcaagaacttaaattcataggtatttataacagcaatgatgtagcagtatcgtttccaaatgtagtatctggctcgggatctagtactcctgtctccagctctcacttacctcagcagtcttctgggcatttgcaacaagtaggagcgctctctccctcagctgtgtcatctgcagcccctgctgttgctacaactcaggcaaatactctatctggatcttctctcagtcaggcaccatctcatatgtatggcaatagatcaaattcatcaatggcagctcttatagctcagtctgaaaacaatcaaacagatcaagatcttggagacaatagccgcaacctagttggcagaggaagctcaccccgaggaagtctctcgccacgatcccctgtaagcagcttacagattcgctatgatcaaccaggcaacagcagtttggaaaatctgcctccagtagcagccagcatagaacagcttttggagaggcagtggagtgaaggacagcaatttttactagaacagggtactcctagtgacattttaggaatgctgaagtcattacaccaacttcaagttgaaaaccgaagattagaggaacaaattaaaaacttgactgccaaaaaggaacggcttcagttattgaatgcacagctttcagtgccttttccaacaataacagcaaatcctagtccgtctcatcaaatacacacattttcagcacagactgctcctactactgattccttgaacagcagtaagagccctcatataggaaacagctttttacctgataattctcttcctgtattaaatcaggacttaacctccagtggacaaagtaccagcagctcatcagctctttctaccccacctcctgctgggcagagtccggctcaacaaggctcaggagtgagtggagttcagcaggtcaatggcgtgacagtgggggcactagctagtggaatgcagcctgtaacttccaccattcctgccgtgtctgcagtgggtggaataattggagctttgccaggtaaccaactggcaattaatggcattgtaggagctttaaatggggttatgcagactcctgtcacaatgtcccagaaccctacccctctcacccacacaaccgtaccacctaatgcaacacatccaatgccagctacactgactaacagtgcctcaggactaggattactttctgaccagcaacgacaaatacttattcatcaacagcagtttcagcagttgttaaattctcaacagctcacaccagtacacaggcacccccacttcacacagctaccaccaacccatttctcaccatccatggagataatgcaagtcagaaagtagcaagacttagtgataaaactgggcctgtagctcaagagaaaagttgacacctgagaaacatctagaaattgcctatcctgctgttctagcacttcatctggctgcctttgcagtccttttactacagctatgaagaaacgcaacaagaaactcaatgcacaacaaaggattaattgctgcaaggacattcttgtaaggctttgattagttttcttgttgctttgttgcactgaaatggaattcccatgcccctaccccttaccccagttttttgaacatggaaagaaaatttaataactttttaaagtgacataatttacatgcaatatgtttatcaactcaagaatttaatatagttggtacacaactagttttgtttataaattggagatgcaaatagcaaaactaaatacttgctccatttacaaactacttgattttattgtacaagttgaaatatgctcttttgtttgggttacagtatgcttgctctaagtcaaattccaaggaactaatttcttctcctggagttgcattgattcagtattacaaatatatagcacatcacctgggacttggcaatctttgttaaaaaaaaatttcctttctaatgggatttggccaattttggtaatgaagttaggatggtaatgtctgcatctgctaaaggtaattttcttttgagaattgctttctttagtgttaagacctactcatattttgaagaaatcttgagttaagtgagttctgaggctgctgggggaaccagatcaattcaaagctaaatacttctttcagaaaggggccactgtggaaagtgctggtggggtttgcccttgatcaagtgcctccattgtgctgcaagggctgtagacagcagggtgggacagtcagtcctccgagcagcaggaatcatcccgtcacctgcagccttcccatgcttccgcctttattcagaactttctgtgccactgtagatagctcaggcaaaactattacctgggtatttatccactaatgagtcacaagaaaaggagtggatttggtaagaatagagatttgttttatttaaaccacttcccattactgaccattaaaagctcaccactagagttcctgaaacaggtgaaacctgtatgacagcccttccactttggggagccacgcttttgatgtgacagtaccgcagagtgattcccccactgaggatgtcatcatcaaactcttctttggtgtgtgaattattagtggaaaagacccagctgtaattagacctccactgtgtacttagctggaagaacatgttaattctgcaatatgtttcttggttaaacattgcacagttcttacctcatttctgtaaataaagttttgtgaatctgttttgtattgtgacaaattcataagataacattgatattttgatttgtaatatttctaattggtagatttaattgaaaagtaaaattaatttatttttatatgttcaggggaattttaaagtcaaatcttttgtagataatttaaaaaatcagtgtggtttattttacttatttaacccactggttgttattctgtaacagtttgtataaatggtaaattttgaatgtgttgttattttacctagatgtaaaattccacatgtattaaaatgtacaaaatgttttgttaataaaatttaataatgtttataa

SEQ ID NO: 1999 - DNA, 1732 bp, Homo sapiens
  source 1..1732: mol_type = genomic DNA
gttgccgtagagatgggcagggctggatggagtggggtgcggtgagctgagctgaccctgcttcgccacggggactgcagtgaccccggcttgccggcagggcgggtaacaggttgagccagggtggggctgctcaggggcgtggagccgaggccaggatttctctgaagacccggcacaggctattcctttctgcgacgagcccattgctatggaaaccaaagcgttaggccagcggggattgaggctgcgggatcatgacgggtctctctcccgaagaaccttgcctaaggcttccccaagcggctacttcctgagcgaacccgcccacccgcctgaaggagagagttttccatggacacagcctagcagaaagacgcagccttcgtgcttcgctgactgctgaccactgacccaccgccttgatgacagcaccctcgtgtgccttcccagttcagttccggcagccctcagtcagcggcctctcgcagataaccaaaagcctgtatatcagcaatggtgtggccgccaacaacaagctcatgctgtctagcaaccagatcaccatggtcatcaatgtctcagtggaggtagtgaacaccttgtatgaggatatccagtacatgcaggtacctgtggctgactcccctaactcacgtctctgtgacttctttgaccctattgctgaccatatccacagcgtggagatgaagcagggccgtactttgctgcactgtgctgctggtgtgagccgctcagctgccctgtgcctcgcctacctcatgaagtaccacgccatgtccctgctggacgcccacacgtggaccaagtcatgccggcccatcatccgacccaacagcggcttttgggagcagctcatccactatgagttccaattgtttggcaagaacactgtgcacatggtcagttccccagtgggaatgatccctgacatctatgagaaggaagtccgtttgatgattccactgtgagccatcccacgagcccctgcattggagtcagaggtacagatctattgttgatcttacaccaagatccaaacttgaacattctacttttgttgatacagaaaaaaacagatgatgccttttatgagcacaaaaaagagttgctgtagcttttaactttataatccattttttttaagattaaactaattgtgagatggtgaagataaattttctgccctgtgagtgacactggccaggggataggttgaggcagatggtgcccagaagaaagagggcagcacccattgcacatggcaggcctggaatcctgcagccctccccaaaaacagattgacccaggaatgaatctgctacaattccacctcattctttcacacccagagccagagccttaagcatcatggtacctcttgcgcttcttacagtggtggttcctgctgccctccaggttgtgcatctgaagcctacaagaaagtttgcctacctggggcagctggatcacaaagttggctggaagtaccagacagtgacagccaccctggaggagaagaggaaggagaaggccaagatccactaccagaataagaaacagctcatgggatggccgggcgcggtggctcacgcctgtaatcctagcactttgggaggcggaggcgggcagatcaggaggtcaggagattgagaccatcctggctaacatggtgaaacccagtctctactaaaaaaataaaaaataaaaa

SEQ ID NO: 2000 - DNA, 905 bp, Homo sapiens
  source 1..905: mol_type = genomic DNA
tgattatgtgtgccctctccgggcgcccgcgttagcggccgggtggaggtggggagggaagacgctgaggaggaggaggaggcggaggaggcggtggaggggaggtggggggaatcagcaaggacatggctcctgactcctgtgcggaacgtgagtgactgagcggcaaagcccgaatggtctctagcgaccggcccgtgtcactggaggacgaggtctcccatagtatgaaggagatgattggaggctgttgcgtttgctcagacgagagaggctgggccgagaacccgctggtttattgcgacgggcacggctgcagcgtcgcggtgcatcaagcttgctatggcattgttcaagtacccactggaccgtggttttgcaggaaatgtgaatctcaggagagagcagccagagtggcagagtctcgctctgttgcccaggctaaagtgcagtggtgtgatctcagcccactgcaacctctgctccccgggttcaagcgattctcctgcctcagcctcccaaatggtatgcaattcctgttggttagcctcatctgaaaacgtcactcctggatacatagaacatcactgcgcatgtgcatctccccacccccgatgcctggtgtctaacgttcctccagtttctggtgctctgatgcattgcttttgggcttgtcttactacagcagctttcttcggtcctcagtcatttaccacttgtcatatgtcctttctagtttccagggatattcttttttatatttatggctttatgccatttatctcagttgtcatttggcgtttcaagaaggagaggtggtagtgtttaagtggaattaactacttgtgtttctgatgtggtcttttatatttcttacagggttttgttttaccaagtactagtct

SEQ ID NO: 2001 - DNA, 1136 bp, Homo sapiens
  source 1..1136: mol_type = genomic DNA
cgcggcagcgcgcacgcagggctagcctcgcccaggcctcctccctcacgccggccgcaggacgggcgcgcacgccaagtgacgctccgaggaggaagcgcagcccccttcccctccctcgctgcccctggcccagcgggagccccccctccccccagtgcgcctgtgcggaggccctcttgattatgtgtgccctctccgggcgcccgcgttagcggccgggtggaggtggggagggaagacgctgaggaggaggaggaggcggaggaggcggtggaggggaggtggggggaatcagcaaggacatggctcctgactcctgtgcggaacgtgagtgactgagcggcaaagcccgaatggtctctagcgaccggcccgtgtcactggaggacgaggtctcccatagtatgaaggagatgattggaggctgttgcgtttgctcagacgagagaggctgggccgagaacccgctggtttattgcgacgggcacggctgcagcgtcgcggtgcatcaagcttgctatggcattgttcaagtacccactggaccgtggttttgcaggaaatgtgaatctcaggagagagcagccagagtgatggtatgcaattcctgttggttagcctcatctgaaaacgtcactcctggatacatagaacatcactgcgcatgtgcatctccccacccccgatgcctggtgtctaacgttcctccagtttctggtgctctgatgcattgcttttgggcttgtcttactacagcagctttcttcggtcctcagtcatttaccacttgtcatatgtcctttctagtttccagggatattcttttttatatttatggctttatgccatttatctcagttgtcatttggcgtttcaagaaggagaggtggtagtgtttaagtggaattaactacttgtgtttctgatgtggtcttttatatttcttacagggttttgttttaccaagtactagtcttcagtctatcctgtttacttgattttttcccactcaactcacaaacatttttgaatcatctcatgaattctgctttccatttacatttttgcccttttgtcttttcctcttcgctgttaaacttcctgaaaaaataaaactagttgattcacttctt

SEQ ID NO: 2002 - DNA, 7196 bp, Homo sapiens
  source 1..7196: mol_type = genomic DNA
ggggactacgggtcggcgttgggctcagtgggctcgaaacaaagggctgtccggtggggattcgtcgcggcgccttctgagtggtcgggtcgaggcttctcggcctagcagtgccctcgctgcgcgatctcaggcgggttctcctcggctccgcgcagcccgcgccgcggtgggggacccggcgcagcggcacctgctgccgagggaccccgcggcccgccccggtgctcgtgatggggctgatcttcgccaaactgtggagcctcttctgtaaccaagaacacaaagtaattatagtgggactggataatgcagggaaaaccaccattctttaccaattcttaatgaatgaagtggttcatacttctccaaccataggaagcaatgttgaagaaatagttgtgaagaacactcattttcttatgtgggatattggtggtcaggagtctctgcgatcatcctggaacacatattactcaaatacagagttcatcattcttgttgttgatagcattgacagggaacgactagctattacaaaagaagaattatacagaatgttggctcatgaggatttacggaaggctgcagtccttatctttgcaaataaacaggatatgaaagggtgtatgacagcagctgaaatctcgaaatacctcacccttagttcaattaaggatcatccatggcacattcaatcctgctgtgctctcacaggagaagggttatgccaaggtctagagtggatgacctcccggattggtgtgagataacttttttgcttgaaagagactgctctatttattctgtgacatgaacattttttcctagtacctttggctgctaaggcagcagcatgtttaatttataacaacacaaacctctgagagcaacacttgaatcaagtgcagctgaactggaacataaaagattttttcttaactttttttttttaacacactaatcttcagttggatgaatgtaatgtataactatgttttcagcaacaattcttctgtttattctaattaatcagtgactgccttgtaagaaatgtttgtcatatgcgtgatgtcttctgaaatattcttataaccttaatgaccaattgctttcaattcttgaccagcactccctcccaaccagagaattactggtttgatagagtagtcttggaaaccatcaggtactgcctgcagacttctccagcactaaatatatttgttccctctataaaccattcatctttcggacagaacttactgtaaagaaagaaatctgcctagaggatatatgtaaggaagattccacatcatgagtacttgccttttaactttcccccacattactgttgagtcatggaataatgtttaagttgttatttgcatggaaattaagtaggctgtttatttatctaaaggaatcaagtccactcttctgcctgcaacatttgttcaaaaactaaccaaggtaaaatatttatttgaaagcccaactttgatgttaaatattcttgaataaatctgttattttaagaatatcacattattcaatgcatataaaactatcagaagttagtaaatcataccagcactaaaaataagacaattggaatatattttagcatcagtttacaaacaactttattatcaacagaaattttagctcttttctttgcaagatatatcacagctgctttgggcagtagctgaagccgaagtatgaacagtccattttgtttcttaaaatttgaagtcgtgtctgtcatagcatttttactaccagcagtatgttacttaaaaaactacatggctttccttgaatttatttgacggtattatgtaatagacttgaaacaattgccatctttgtagttatgccttgggttctaaaatgttataggaaactgctgaattgaatcctagcttttagaatattaataggagactcaaagttaatattcttaacaacttaaaattaaaaaaagtcataatctatcaaaagtttatttattggatggcattaaaacatttttgaggcagttgtctaatatgaacaataatctaaacaatatattccttaaattaagaggaaagacaagtgtcgtatttcgatcctgtttattcaaatgtgtgattttgctgaaatgaaagggataaaatgaatacttagagaataatacttcatttttgcagtactttttaattttgataaaaaagatacaaagttcataatatcaaaatatgtgttcaaaattggtattttaattttaatatttttgtaagttgatttaaattttgctcttttttcaggtgtgcttggtttattatatttagtcaagttaatttagtcgaatgtggtaacatttttctgatttatctttagttggagcacacccttgaactgaacagtggccaaaggaaagctttctgggctttggaaagtagttgtttaactttgttttaagccgttttcttagtgattctgtatcaagtagaggataagtgtagtttaacttagtttttaatataacccataatcaagaacatgagcgaaaagcagacataaatcgatatggatggtttgtggtgtgtgtgggatgtgggggaattaagaaaatgccatttacctaagcacagtttgcctgaatttctgcttggttgtgttgtttaccgtaagtactgagggtagtttccctaagtctgtcctgagaaaaagcatacttagtactcctgtatttgttcttatgaaatgactatctgccttcttgtatctagtaagattggctggctcaattttcttctgtcaaattatatggttattttttatattaccacatcagcattatattaaaagtgtttttaatagttgattgtattttgccaactactagtatagactcaaatttgctatttaatttttaaaatacaatttattttgtaaatcctttaaaaaatatttggttagttttggattagaaatgatttatgttagccatgtgttgaagatgaaattggcatcagtgtagacggtgctgattgggaaaagttcatgattaggaaattcatgtaagactttttaagagtattttttaggttttcactcaatctttcctgtcacagtaacgtgaaaactgattattctttactccaagagaatgttttaacccaagcaagtatctaatactagagcattggttctgacattcattgtaaatcagtgaactgtaagatactgtctaaaaaatgtacatttgtaattagtgcctttattcatattttgaaataagttcttagttttatattatacctgttctttagaagtcatgttagcagctaattatttcagtgatgaaataatttgtgttttatatcccccttcacctccatgtattggttagcacagtttatagtaagtgaaaagcaagggacccacctacattaccttcaggagactgttctaccttttaatttgaaaacaaggaaattaaattttaacagaaatcttttaagtatgttataaccaaagtgttcaattatccttgcaagttcaaatacagcatttttcttaattttgagcgtgtcatgtccttcatctttaaacccatcattcttattgaagcccatttgagaactcttagaattaatagaaccttttataagggaatatatggaatattttttattgttaatgtaacttaattccttaaaacctggaatattaatatatataatctattaaaagctgaagattaaatatgtaatttttgcttttagtttcttgtgttagtatgcttaaaggtatcaatacttttattctatattcattagaagaaaggtaataaatttaagtttcattgctgaaaaattttaaatgagtgccaccccatagccatagtcattttgattaagcataatttaactttcattatagcataaagagaaaataattattttagtatggaaacagtgataggcagtgctgtaaacaatattctctgaaaagttgtgggggtcacaaagaaaattttaaagaatatagaagcttttttaaaaaatctttttagtgtagtttcttagaacaaattataaacataatcattctgaataatcaatttttatttagtccttaactatgtaaaaccgtatcagtagaaaaatgtgctggtgtcgtgtctaaagatggataaatttctttggaatttatctttggagaccaactttatgaggcagactttttgtctacagctttggaaccaaaaaaacttcactctaattcagtcctaaaggctattttacattttgccggggtaaagtgacttcaagatacagcatggtgtcttgtatctagtagaatattgtgctagccatctaaaaaagtggatttgagccttaatttggccgtttctcaattgtctagttgaccttagacaattagtgtccatggctttccttttgtttttcccatactgaggaacttaaactacagctctaaaatgtcttttggttttaaaattctgaatgcttatatactactattaaaaattaaaaatccctcaaatagtagggcaatacaggtaatatgaaattaaatgtatttttatccattatttgattcccacctgttattttatttagaatacgaatacaaccaagtagggaaaaacgtatcagtaactgctattcaacttaaattcagcgaattaatagctgaatagaaatagctaatgacaatgcaaaagagaaaacaagccatattgctaagaaaaggatagtaagctgcttagaaagaaccagcctgtgttggaaataattctcttctagataatttaccttattttcttggcttgtactaattgaatggaagtggttaatttgttcagagtttattgccgtttgatgccaccccagtctatagttctgtgtgactttccatattgaaagagtagggttagtagccaggttgtcagtcttttacaaatgtctacataaatgtctacataaatctgaaagtggtttatattcaaggttagtttttcagtagcgtctcctccttattcattcacttttactgtgaagactgaaatccaaaagccaggttccccaaaaaagtatttttaaaaaattttaggggaccaaaataaatagaggaagaccaatataaaaaaatatgttcaactattccattttaaatttaaagcagaaaaaaaaattgtgcccctcagacctaaaggcagctttaaatgtatatagtttggtgaaacatttgggaaatattaatttggaggtttagaagcatacgaaaaacaaattcaaagcacttgaaagtaaagacaatatcatgaggtcgaaaaaacttcaaaaggatattaggtaagagaaaatgtgaatgaaagcagtgaatttctgcctctcctcgtatttagggtacttaaaattactaaaaaatactgtctttttaccatacagctagatggcctgtattattcttaatgtggccaaaggagtgaagactgattagggttttagaatttggaactgtagtcacataaaggcatcttttgcatttcttaaaccagtaatctacattttctcctggaaatggagaaatatgaaatgtgctgtgcatagcttttggaatagaaaacaaagttttaaaagaatggatatgttttcttgcacaacttgtaaaattttaattaaaaaattacctcatttttcaatccataaggtgctttgctcaagtttgtgggatgtttgtaccatcccataaaaacccccttcacccaaactgtatttgaaatatgcaaaattcataactaagggatagcattccttggagactttgttttgttttactcttgtttaccagctgggccaacatggtagatatatgagattcacatatggtttcattaaagcacataggaaagtgctcagtcaatatttaattagtttaattagataagggaaaggagaaatcctaaatttgatggattcttttatactgtgaatatatttccatcagtgttggtaagatatcaaatgactatcagttgatcccagtcatcagtgacttatttgcatatttaagccctattcacaagagaccataatcattttaatcttatattttccctcaggaaatttagggactctgaagcccctattttattctcttggagtaaactgttgagtgtagttacaaaaacttttatttatgacttaaaaaaagtttagctgctatttcagtgaaagtgtaaaataaaacggtcatgatttttttcaattacagaatagttacaaattttaccatgttcatctattccacagagcatgttaaaaacaacaacaacaaaaacctaacagcaattacaaccttggtgttgcgtttattctaatcagagtgaatgattataatcacactttgctattttaacataaattggtgctttagagcattaaagaggaagcagcaggccctgtactcagtatttattatttcttgcctcagaatgcaaaacaactttaaagtgtctatattcatatatatgtgcatttcttaagatttaaatacaaactgttgttactccttaagcttcaggctttctgcgaaagctctaagaatatcttcattactatgcttggtcaactggaagatggtattaataaggtcagaattaggaattggattgctctgtgggtcctccggtattgtgcagaggaaagaaaaatgtctttcacaccacaaactgtgtgtctgaaccccagccaaacaaatgtgttccattggtccaatatataagcattaacaacaacaacaaaaaatttaaaacaagtaaattaatgcattcacatgatcacttcttgaaaatggttcaaagcatgttttcctgatggtgggattgtttaaatgacatgttttaaagtttttaatactttattagttatgaagtgcttcttttatatgttaagtttaggttgccagtactcataatttttatttctgcaattatgttataatgagttgtttgcatgcctacttaacccaagtaaaacgatgctgtttgctctggaatgttcatcttttagacaggttttggctcatttccaatcatggtgcaatatagtgtaacattcatttgttttcattcaacagttttatttttgtcataataaataattacttttccaata

SEQ ID NO: 2003 - DNA, 4673 bp, Homo sapiens
  source 1..4673: mol_type = genomic DNA
gcagtgcggcaccttcccgtctgatgctggcgttgtgcgtatggtgccctgacgtctgtccacgtgggcgcggaagcaaacagcgatgtcccagacgcaggactacgagtgcaggagccataatgtcgacctgccggagtcgaggattccagggtcgaacactcggttggagtgggtggagatcatcgaaccgcgcacccgcgagcgcatgtacgccaacctggtcaccggtgagtgcgtgtgggacccgccggccggcgtccgcatcaagcgcaccagcgagaaccagtggtgggagctgttcgaccccaacacgtcccgcttctactactacaatgccagcacgcagcgcacggtgtggcaccggccgcagggctgcgacatcatcccgctggccaagctgcagacgctgaagcagaacacggagtccccgcgcgcctcggcggagagcagccccgggcgcggcagcagcgtcagccgtgagggcagcaccagctcctccctggagcccgagcccgacactgagaaagcgcaggagttgccagcgagggccgggcggcccgcggcgtttgggacagtgaaggaggacagcggcagctcttcaccaccaggagtgttccttgagaaggactatgagatttaccgggattacagtgcggacggccagcttcttcactacaggacctcctcgctgcggtggaactcgggcgccaaagagcgcatgctcatcaaggtcgctgatcgggagcccagcttcctcgccgcccagggcaatggctacgccccagacggcccacctggggtccgctcccgcagaccctccggcagccagcactcacccagcctgcagaccttcgccccggaggctgacggcaccatcttcttcccagagaggaggccgtcacccttcctgaagagggccgagctcccagggagcagctccccgctgctggcccagccccgaaagccctccggggactcgcagccctcctccccgcgctatggctatgaacccccgctctacgaggagcccccagtggagtaccaggcccccatctacgatgagccccccatggacgtgcaattcgaggctggcgggggctaccaggccggctctccccagcggtcgccgggccgtaagccccggccgttcctccagcccaacaagcagggccccccctcgccctgccagcagctggtgctcaccaagcagaagtgtcccgagcgcttcctgagcctggagtacagtcccgccggcaaggagtacgtgcggcagctggtctacgtggagcaggcgggctccagccccaagctgcgcgccggcccgcggcacaagtacgcgcccaaccccggcggtggttcgtactccttgcagcccagcccctgcctgctgagggaccagcgcctgggcgtcaagtccggagactacagcaccatggagggacctgagctgcggcacagccagccgcccacgccgctgccacaggcccaggaggatgccatgtcctggtccagccagcaggacaccctgtcctccacaggctactccccgggcacgcgcaagcggaagagcagaaagccctctttgtgccaagccaccagcgccacccccactgagggccccggggacctgcttgtggagcagcccctggccgaggaacagcccccgtgcgggaccagcctcgcccccgtgaagcgagcggaaggtgaggccgaaggggcgcggggcgcggccgagcccttcctggcgcaggctcggctggcctgggaggcgcagcaggcccacttccacatgaagcagaggagcagctgggactcccagcaggacggctctggctacgagagcgacggcgccctgccactgcccatgcccgggccggtggtgcgggccttcagcgaggacgaggcgctggcccagcaggagaacaggcactggaggaggggcaccttcgagaagctaggcttcccccagatcctgctggagaagagcgtctccgtgcagaccaacctggcctcaccagagccctacctccacccctcacagtctgaggacctcgctgcctgtgcccagttcgagagcagccggcagagccgcagcggcgttcccagctccagctgcgtcttccccactttcacgctgcgcaagccctcctcggagacggacatcgagaactgggcctccaagcacttcaacaagcacacgcagggcctcttccggcggaaggtgtccatcgccaacatgctggcctggagcagcgagtccatcaagaagcccatgatcgtgacaagcgaccggcacgtgaagaaggaggcctgcgagctcttcaagctgatccagatgtacatgggtgaccggcgggccaaggccgacccactgcacgtggccctggaggtggccaccaagggctggagcgtgcagggcctgcgggacgagctctacatccagctgtgccggcagaccaccgagaacttccgcctggagagcctggcccgcggctgggagctcatggccatctgcctggcctttttcccgcccacccccaagttccactcctacctggaaggctacatctaccggcacatggaccccgtcaatgacactaaagtgacacagcacataaaagagctcctggaaagaaacactaagaagaagtccaaattgagaaagaaacccaagccttatgttgaagagccggatggggtggcgataagcacgtatgccaagtactgttaccacaagctacagaaggcagccctgaccggggccaagaaggggctgaagaagcccaacgtggaggagatccggcatgccaagaacgccgtgttcagcccgtccatgttcggcagcgcactgcaggaggtcatgggcatgcagagagagcgctaccccgagcgccagctgccctgggtgcagacacggctctctgaggaggtgctggcgctcaacggtgaccagacagagggcatcttcagggtccctggggacattgacgaggtgaatgccctgaagctgcaggtggaccagtggaaggtgcccacaggcctggaagacccccacgtccctgcgtccctgctgaagctgtggtaccgggagctggaggagcccctgatcccgcacgagttctacgagcagtgcatcgcgcactacgacagccccgaggcggcggtggccgtggtgcacgcgctgccccgcatcaaccgcatggtgctgtgctacctcatccgcttcctgcaggtcttcgtgcagccggccaacgtcgcggtcaccaagatggatgtcagcaacctggccatggtgatggcgcccaactgcttgcgctgccagtccgacgacccgcgcgtcatcttcgagaacacccgcaaggagatgtccttcctgcgggtgctcatccagcacctggacaccagcttcatggagggtgtgctgtagcgggggcgcccggggacaggagggatgtcctgccgcccccagccaggccgaactccgcactcgctctcccggcagaggggccagaatcgcccggcccagccctggagccccctccactcccccaggcccctggccccggcgctccccacgtcttctgcctggtctgagggtgcagccagggcacagcagcggcggggagggcgcctctggccccccacctcacggccagttcccgcgggcaccgcctcgccctccgctggccgcgggtcagctccgagaaagtgccttctgtgtcctggagccgagcgacgctgcctccttggggccgggctgcctccctgtggctcctgcgcgccctggcctgggccttgcccagccgccccggtctctccttccctttctcctgtcctcgtcctggcctgcagctcttcccagccccgagagagcttcccgacctgtccccgcctcctctccctccctcggcccgtggtccccagctggtgactgctcaggagtttgggggctccaggacagtgggcccggggcctggcaggctctcggtgggtggggtgggggcccccaaaccaaagtcctctggggtagggagcagggctgggcaggcattctgggggcagggtgggggaggggcgagagtatttttttcttcgtgtaactgtaaatccagaatctatcctgcatcgcagcccaccgtgtatagagatataaatagagggaaagatataagaactaaatttgctaatgacatagttttaacctaaatgctatttatctctgagccgtccccgtcctccgtgcagagcaagttgaggtcattccttcttttcttctccgatcttttttcttggcttctgaccaaaaaccaagctctaccccatccccatcccagacctgcaggagacgagcgagcgggaaggcgccgggcccgggactgtccgttctcggggccagagctgctgggggaccgagtttgtacattttccattttggaattttgagttccaattgttgtaaaacttaatttctccccagtttttatatatatattttttagagttccgtttttatttattaaaaacaaaagccccagccctgccgaggcctgggcggcgtcctcagtcgggtggtcccggggcctttgcggtcccgcccggctgagacgctcgccccgacgcatggacccgagaggcgacgacacgagtgaataaagtgcacatggaccctg

SEQ ID NO: 2004 - DNA, 1007 bp, Homo sapiens
  source 1..1007: mol_type = genomic DNA
tcctgctcaccggttgtttgtctttccgtccattaggcaatactgaacactgcgcagcttgcagaggtctcctggcagccctcattaggaattctgtctggccccgatcagaatactggagacgagaccacgagattgatgagtttgccttgggagtcggtaagaaggtgaagccaggggcgaacatgggtcagaaggtcactggagggatcaagactgtggacatgagggaccccacgtacaggcccctgaagcaggagctccagggtctggattactgcaagcccacccggctggatctgctactggacatgccccctgtgtcctatgatgtccagctgctgcattcatggaacaacaacgaccgatcgctcaatgtctttgtgaaggaggacgacaagctcatctttcaccggcatccggtggcccagagcacggacgctatcaggggcaaagtcgggtatacccgtgggctgcacgtgtggcagatcacgtgggccatgagacagcggggcacacacgccgtggtgggggtggcgacggcagacgcccccctgcactctgtcgggtacacaaccctcgtggggaataaccacgagtcctggggctgggacttggggcgcaaccggctctaccacgatggcaagaaccagccaagcaaaacatacccagcctttctggaaccagatgagacattcattgtccctgactccttcctggtagccctggacatggacgacgggactctgagcttcattgtggatggacagtacatgggagtggcttttcggggactcaagggcaaaaaactgtatcctgtagtgagtgccgtctggggccactgtgagatccgaatgcgctacttgaacggactcgatcccgagccgctgccgctcatggatttgtgccgtcgctcggtgcgcctggccctggggagggagcgcctgggggagatccacacgctgccgctgccggcttccctcaaggcctacctcctctaccagtga

SEQ ID NO: 2005 - DNA, 6279 bp, Homo sapiens
  source 1..6279: mol_type = genomic DNA
gccggagtcctgaaagtcgagcgagctccgggttttgaaaatgttggagggaaaagctcctcggagatgagcgtgaccccctggctcgtggtggccgcctgttctcactaacgccatggcggggaccggagtgagaaaccggtgtctgtcactgactgcaaagtgagcgagaagcaggctgcgggccgtcccagcacgacgtggagccccgcggagacctcgagatgccccgcggggaagctcctggccccgggagacggggggctaaggacgaggccctgggcgaagaatcgggggagcggtggagccccgagttccatctgcagaggaaattggcggacagcagccacagtgaacagcaagatcgaaacagagtttctgaagaacttatcatggttgtccaagaaatgaaaaaatacttcccctcggagagacgcaataaaccaagcactctagatgccctcaactatgctctccgctgtgtccacagcgttcaagcaaacagtgagtttttccagattctcagtcagaatggagcacctcaggcagatgtgagcatgtacagtcttgaggagctggccactatcgcttcagaacacacttccaaaaacacagatacctttgtggcagtattttcatttctgtctggaaggttagtgcacatttctgaacaggctgctttgatcctgaatcgtaagaaagatgtcctggcgtcttctcactttgttgacctgcttgcacctcaagacatgagggtattctacgcgcacactgccagagctcagcttcctttctggaacaactggacccaaagagcagctgcacggtatgaatgtgctccggtgaaaccttttttctgcaggatccgtggaggtgaagacagaaagcaagagaagtgtcactccccattccggatcatcccctatctgattcatgtacatcaccctgcccagccagaattggaatcggaaccttgctgtctcactgtggttgaaaagattcactctggttatgaagctcctcggatcccagtgaataaaagaatcttcaccaccacacacaccccagggtgtgtttttcttgaagtagatgaaaaagcagtgcctttgctgggttacctacctcaggacctgattggaacatcgatcctaagctacctgcaccctgaagatcgttctctgatggttgccatacaccaaaaagttttgaagtatgcagggcatcctccctttgaacattctcccattcgattttgtactcaaaacggagactacatcatactggattccagttggtccagctttgtgaatccctggagccggaagatttctttcatcattggtcggcataaagttcgaacgagcccactaaatgaggatgtttttgctaccaaaattaaaaagatgaacgataatgacaaagacataacagaattacaagaacaaatttacaaacttctcttacagccagttcacgtgagcgtgtccagcggctacgggagcctggggagcagcgggtcgcaggagcagcttgtcagcatcgcctcctccagtgaggccagtgggcaccgtgtggaggagacgaaggcggagcagatgaccttgcagcaggtctatgccagtgtgaacaaaattaaaaatctgggtcagcagctctacattgagtcaatgaccaaatcatcattcaagccagtgacggggacacgcacagaaccgaatggtggtggtgagtcagcgaatggtggtggtgaatgtaagacctttacttccttccaccaaacactgaaaaacaatagtgtgtacactgagccctgtgaggatttgaggaacgatgagcacagcccatcctatcaacagatcaactgtatcgacagtgtcatcagatacctgaagagctacaacattccagctttgaaaagaaagtgtatctcctgtacaaatacaacttcttcctcctcagaagaagacaaacagaaccacaaggcagatgatgtccaagccttacaagctggtttgcaaatcccagccatacctaaatcagaaatgccaacaaatggacggtccatagacacaggaggaggagctccacagatcctgtccacggcgatgctgagcttggggtcgggcataagccaatgcggttacagcagcaccattgtccatgtcccacccccagagacagccagggatgctaccctcttctgtgagccctggaccctgaacatgcagccagcccctttgacctcggaagaatttaaacacgtggggctcacagcggctgttctgtcagcgcacacccagaaggaagagcagaattatgttgataaattccgagaaaagatcctgtcatcaccctacagctcctatcttcagcaagaaagcaggagcaaagctaaatattcatattttcaaggagattctacttccaagcagacgcggtcggccggctgcaggaaagggaagcacaagcggaagaagctgccggagccgccagacagcagcagctcgaacaccggctctggtccccgcaggggagcgcatcagaacgcacagccctgctgcccctccgcggcctcctctccgcacacctcgagcccgaccttcccacctgccgccatggtgcccagccaggccccttacctcgtcccagcttttcccctcccagccgcgacctcacccggaagagaatacgcagcccccggaactgcaccggaaggcctgcatgggctgcccttgtccgagggcttgcagccttacccagctttcccttttccttacttggatacttttatgaccgttttcctgcctgacccccctgtctgtcctctgttgtcgccatcgtttttgccatgtccattcctgggggcgacagcctcttctgcgatatcaccctcaatgtcgtcagcaatgagtccaactctggacccacccccttcagtcaccagccaaaggagagaggaggaaaagtgggaggcacaaagcgaggggcacccgttcattacttcgagaagcagctcacccttgcagttaaacttacttcaggaagagatgcccagaccctctgaatctccagatcagatgagaaggaacacgtgcccacaaactgagtatcagtgtgttacaggcaacaatggcagtgagagcagtcctgctactaccggtgcactgtccacggggtcacctcccagggagaatccatcccatcctactgccagcgctctgtccacaggatcgcctcccatgaagaatccatcccatcctactgccagcgctctgtccacaggatcgcctcccatgaagaatccatcccatcctactgccagcacactgtccatgggattgcctcccagcaggactccatcccatcctactgccactgttctgtccacggggtcacctcccagcgaatccccatccagaactggttcagcagcatcaggaagcagcgacagcagtatataccttactagtagtgtttattcttctaaaatctcccaaaatgggcagcaatctcaggacgtacagaaaaaagaaacatttcctaatgtcgccgaagagcccatctggagaatgatacggcagacacctgagcgcattctcatgacataccaggtacctgagagggttaaagaagttgtactaaaagaagacctggaaaagctagaaagtatgaggcagcagcagccccagttttctcatgggcaaaaggaggagctggctaaggtgtataattggattcaaagccagactgtcactcaagaaatcgacattcaagcctgtgtcacttgtgaaaatgaagattcagctgatggtgcggccacatcctgtggtcaggttctggtagaagacagctgttgagtgactgtgaggatgaaccttcataccctttccaagacgtgttacacagacagacctttttaagtcctggacttttaaatgaccatgaagttatcattgaatgttaagattttttcttcttgattttttaatacacgtaatctttttgaagcagacattgtatacagaatcttacttctctttgttcctgatatattaaaatggccagttaggctctttttgtagttgaattgtcttctaaagagattggatggcctctaaagaggtatgtgtatctttatttcagatgtcacccagagtaaattataattagaagtatagctagaatgagccccaaaccttagcctcatttattttgttctgttacataagtcattttccccttagagtgcttgaagaaatgccacctacaggttgtgtacttttcataatggtttccatgaatgtagtacgttcatacaggcttcattcaacctggcgttcccctccataattaagatgaaacattccggttttctcacaacacattagcacatactgtccattagcatatctgggataaccaggttttgggggttgagttttggccttcatccttgtagatccctttcctattgatttcccaccttccagtgaaattctgaaagtcttatcttaaaaatcgatccgcttaccatgggcctattcttgtaagtttcagttagcatttgcatgtgtaatattaaaatgaaagagcttcttacccagtgctgttgcccttttgagtatttttgtttttaaaataatgattgtaaaatgttttacaagtaatgtaaaagctagtatcattcttacatacttctgtgtttaaattttcattcttaccaaaacagttaactctttctttccaatcaatttatacaaaagaggtcgctccagccctaccacaggtctgactggcactgccttttgtttgcccttgaacagggcagtgttgtggggactgcaaaagagaaaacgtccaggcgagcccagttgtcctcgcccacagggtcctgcaggctccatcagtcaccgctttctatggcgtttgtagttgtgtcttttaagaagtgagtgtgattgtttacttgataaatcagctcactctctggtgctttttagagaagtccctgattccttcttaaacttggaatgatagatgaaattcacacccctgcagatcagaaaaaacaaatagaagaaaatgagggttacagtaacctgttgtctttatataacttgcaacaaactaatttatttttttttcctttttttgtttttggttttttatggttttttaaggaaaatacttttctcctttgaagttttacagctttttgtaaatgcgtcctgataatgattaggaaaatcgaccttttcatccatgatgaccatcctcatagctcagatctcctttcaaagtagtggctttctggatggtaattccatcttaaggtgtcagaactattttcaaatgctgcctttgacagttcttggaattttctgatattaagcagttccatgcaaatattcgtgttttataaatagctctcatagtctgctccatcttgatagttaagtgatttctgaagcgtttgtgtgtgtgttgatcaggttgtgtgatatttttgcttgatagagaatcaaatttgaaacaattaaccagccagtagattgtctgtcagtgaccttctgtagtaataaagtttttgccactgtaaataaaaacagtatccgtagctatcaggatcattgcgcactcatatatgctaagccttctgttctctaatagaagcctttcttttccattgtttctggatatttgtattatccaaatgtgcttatttctttgccttagcacacgttttatggagtacttgttatactaggtttgatttgaaactggtgcttgtcgcagaactgtcagagcatgaggagcgctcctcctgtgggtggacgcattcacgcactcccaggttgcacctgctgctggcggtgagcagggggttcagcagcttgaccgatgccccccgagggggctctccccagcttaaactttgttgtttaaatttgttaactttttatattaatgactattgaaagtggtaataaaaatttatattataggcttcaatgttttcatgaatgttacccaaaaagctgtgttttctttggtcagaggtcaaaatttatgaaaaacaaaatgctgtatgaatggaaatcattttgcaattgagtgacacttcattgtaattcacagtgtaaatttaatccaaactgaaattttgtttcaactgaatttgtaattaactctgaatttgtttttaatcattagtaatatttcagttgggtatctttttaagtaaaaacaacaaataaactctgtacatgtaaaacgtga

SEQ ID NO: 2006 - DNA, 1524 bp, Homo sapiens
  source 1..1524: mol_type = genomic DNA
gcgagggcggccccgggggcgagcggctgtgcgcggggccaagggcgggggcagcaggccggagtcctgaaagtcgagcgagctccgggttttgaaaatgttggagggaaaagctcctcggagatgagcgtgaccccctggctcgtggtggccgcctgttctcactaacgccatggcggggaccggagtgagaaaccggtgtctgtcactgactgcaaagtgagcgagaagcaggctgcgggccgtcccagcacgacgtggagccccgcggagacctcgagatgccccgcggggaagctcctggccccgggagacggggggctaaggacgaggccctgggcgaagaatcgggggagcggtggagccccgagttccatctgcagaggaaattggcggacagcagccacagtgaacagcaagatcgaaacagagtttctgaagaacttatcatggttgtccaagaaatgaaaaaatacttcccctcggagagacgcaataaaccaagcactctagatgccctcaactatgctctccgctgtgtccacagcgttcaagcaaacagtgagtttttccagattctcagtcagaatggagcacctcaggcagatgtgagcatgtacagtcttgaggagctggccactatcgcttcagaacacacttccaaaaacacagatacctttgtggcagtattttcatttctgtctggaaggttagtgcacatttctgaacaggctgctttgatcctgaatcgtaagaaagatgtcctggcgtcttctcactttgttgacctgcttgcacctcaagacatgagggtattctacgcgcacactgccagagctcagcttcctttctggaacaactggacccaaagagctgcacggtatgaatgtgctccggtgaaaccttttttctgcaggatccgtggaggtgaagacagaaagcaagagaagtgtcactccccattccggatcatcccctatctgattcatgtacatcaccctgcccagccagaattggaatcggaaccttgctgtctcactgtggttgaaaagattcactctggttatgaagctcctcggatcccagtgaataaaagaatcttcaccaccacacacaccccagggtgtgtttttcttgaagtagatgaaaaagcagtgcctttgctgggttacctacctcaggacctgattggaacatcgatcctaagctacctgcaccctgaagatcgttctctgatggttgccatacaccaaaaagttttgaagtatgcagggcatcctccctttgaacattctcccattcgattttgtactcaaaacggagactacatcatactggattccagttggtccagctttgtgaatccctggagccggaagatttctttcatcattggtcggcataaagttcgaacgtaagccagtcagttttcatattttctaaaacatctcttgtatcaaataatattccttagcttattgactgccctctgactcaattgacacataaactaaataaagcaca

SEQ ID NO: 2007 - DNA, 4487 bp, Homo sapiens
  source 1..4487: mol_type = genomic DNA
gtctctccgcaggccccggccgcggcgtcctcgacaacctatcgaaggcgccatggagcgaccggcgcccctggccgtgcttcccttctcggaccccgcgcacgccctgagcctgctgcgcggcctgagccagctgcgcgccgagcgcaagttcctggacgtgaccctggaggcggcgggcgggcgcgacttcccggcgcaccgtgcggtgctggccgccgccagcccctacttccgcgccatgttcgcggggcagctgcgcgagagccgcgccgagcgggtgcgcctgcacggagtgcctcccgacatgctgcagctgctgctggacttcagctacacgggccgcgtggcggtaagcggcgacaacgctgagccgctgctgcgcgccgccgacctgctgcagttcccggccgtgaaggaggcgtgcggggccttcctgcagcagcagctcgacctggccaactgcctggacatgcaggacttcgctgaggccttcagctgctcgggactggcgagcgcggcgcagcggttcattctgcgccacgtgggcgagctgggcgccgagcagctggagcggctgccactggcgcgcctgctgcgctacctgcgggacgacgggctgtgtgtgcccaaggaggaggccgcctaccagctggcgctgcgctgggtccgcgctgacccgccgcgccgcgccgcgcactggccgcagctgctggaggccgtgcgcctgcccttcgtgcgccgcttctacctgttggcgcacgtcgaggccgagccgctggtggcgcgctgcccaccctgcctgcgcctgctgcgcgaggcgcgcgacttccaggcggcgcgctacgaccgccacgaccgcgggccctgtccccgaatgcgtcctcgcccgtccaccggtctcgccgagatcctcgtgctcgtgggcggctgcgaccaggactgtgacgagctggtcactgtcgactgctacaacccgcagacgggtcagtggcgctacctggccgagttcccagaccacctgggcggaggctacagcatcgtggcgctgggcaatgacatctacgtgacgggtgggtccgatggctcccggctctatgactgcgtgtggaggtacaactcaagcgtgaatgagtgggcggaggtggcgcccatgctgaaggcccgcgagtaccacagctcctctgtgctggacggactgctgtacgtggtggccgccgacagcaccgagcgctatgaccacaccactgactcctgggaggccctgcagcccatgacctaccccatggacaactgctccaccactgcgtgccgtggccggctctatgccatcggctccctggctggcaaggagaccatggtgatgcagtgctacgacccggacaccgacctgtggtcgctggtggactgcggccagctcccgccctggtccttcgcccccaagactgcgactctaaacggactcatgtactttgtcagggatgactccgctgaggtggacgtgtacaacccgacgaggaacgaatgggacaagatcccgtccatgaatcaggtacatgtggggggcagcctggccgtccttggggggaagctgtacgtctctgggggatacgacaatacatttgaactctcggacgtggtagaggcctatgacccagagactcgcgcgtggagcgtggtggggcggctcccagaacccaccttctggcatggcagtgtcagcatcttccgccagttcatgccccagaccttctcgggtgggcgtggcttcgagttggacagtggcagcgatgacatggacccaggccgaccccggccgccgcgggaccccgatgagctgcactagccccagtctggcccggcacgggcctcggtgcaggtaactggcacctctgcggggcagtgccccactcctttgtgcacaaggacacgttgggctcacaggaggagcacaggctcttgggtggcgaagccagcccaggatccattacctggaaggtttctgtaccttgagagcctgaatcagaggccgtcgggaacgccctccctgcagttgaggaagagccactttcctgccagcacatgtttctgggtcttggaggtcacccccaccccgcggatcacagctcacccacgcggcgcacacccctcctgccgttgtcatctgcacctacttgttcccaccttgggagaggacgatgacttgggagggacgcgtgaagggagaaggggtcctcccatgaggctgaggatggcctgaacctggagcagcggaccaggcagacgggctgaagtggggtcccaaattccatgtccagaggtgtggggagcctgcctccctagctcctggcccctgccaggggcttacatcaaaacacctcagagggctgccctccagaggctgcacccagaacagtgggacatgagcaggggtgtgggcttggagggtgaagaggatgtggtcctatcagatgctgggcctcctcagccatagccccctgctcctaccccctgactggctcttgcgtcctcacctctcaccctctccttcccgggaggccctgggaggtgatcattgacacccagccaagcagacagctgcgggtgcccaagcccttgctgggcctgcgcgtgaggagtcccactgcttctaaaggaagtcctgggcaggaggtggctttggtggttggttccaaagttgaaaatgcttgcagtttgaccttagaagaagtgggaagaagaaggagctctacagggtcagctttgtttgatttgtccagtctaagaagtcccattgccaaagctttctgcaggagggtgaatgccgcagcttggcagcccctgggtttctcttggaaatggtcagtttcccctcaaagtacccaaagtagccttggcttgagtttttgtccttgcctcctttttagagaagagggcatttagactgcattttcctggttaaagaaggttaaagcaaatgtttattgccttttctagtgaactaactcgtagagatgttctcagcaggaagacagtcttagcactgtcacttagcagattgcacttaagtcccttgtgctggccagatggcgtggctggttgccttaatatgtcccaggacccctgacagggctgcctggcctctccctcgtgctcctcaagagcccagtccatacactgtggatgtcattgctgtcgggttaggaagtcttgtcctagaacgccctggctggtatgaccacagttcatggcggctcttctcgcttgggtcatggtcatcttccagcacctgctgtgctgggaaggccgaggatgggggcccagcactgtccaggcctgctggggcctggctgggagtcctgtgggcagcatggaacatgcagctgggcttcctgtgaccaggcaccctctggcactgttgcttgccctgtgccctggaccttttcctgcccttctccttcctctgctcccttggggctaccccttggcccctcctggtctgtgcaaactccctcagggagcccccctgccctgtagctctcgcttaacttcctaggggctgctgagcccacccagaggttgttggagttcagcggggcagcttgtctcccttgtcagcaggggcgtaagggctgggtttggccatacaaggttggctacgccctcaatccctgaccgttccaggcactgagctgggcacccacggaaggacatgctgtccagactgtgatgactgccagcacagggcatctcgggcttggctggtctgcgaggccttgcccctgtggaactctgggttcctgttttctcagtcttttttgcggctttgctgtggttggcagctgccgtactccaggcttgtgtcggccactcagatgagggctgtggtgcgagccagtgcaggagagctgcgcttgggattgtgccctctcctgtgtctgtcctccggacctacccaggtctccaccatcaggaccctgtctttgggtttagaagaccaagtatggggaaaaccaggcaccagcctctgcagcaatgggtccctctagcctgtggacaccagctgggggatccagggtcaggccccctcctctccccagtttccctctgctgtgggttctgggctgtcatgtctccaccacttaaggatgtctttacactgacttcaggatagatgctgggatgcctgggcatggccacatgttacatgtacagaactttgtctacagcacaaattaagttatataaacacagtgactggtatttaatgctgatctactataaggtattctatatttatatgacttcagagacgcgtatgtaataaaggacgccctccctccagtgtccacatccagttcaccccagagggtcgggcaggttgacatatttatttttgtctattctgtaggcttccatgtccagaatcctgcttaaggttttagggtaccttcagtactttttgcaataaaagtatttcctatcca

SEQ ID NO: 2008 - DNA, 6445 bp, Homo sapiens
  source 1..6445: mol_type = genomic DNA
cgcgctcgcggggggcggtggcgcccggcacagaggggttaagggggcggtgcagacgtctccccgcccatcccgcccctcgagagccgcggcgccccgccctatttatagcagcggtgcctagcgcgccgcgtctctccgcaggccccggccgcggcgtcctcgacaacctatcgaaggcgccatggagcgaccggcgcccctggccgtgcttcccttctcggaccccgcgcacgccctgagcctgctgcgcggcctgagccagctgcgcgccgagcgcaagttcctggacgtgaccctggaggcggcgggcgggcgcgacttcccggcgcaccgtgcggtgctggccgccgccagcccctacttccgcgccatgttcgcggggcagctgcgcgagagccgcgccgagcgggtgcgcctgcacggagtgcctcccgacatgctgcagctgctgctggacttcagctacacgggccgcgtggcggtaagcggcgacaacgctgagccgctgctgcgcgccgccgacctgctgcagttcccggccgtgaaggaggcgtgcggggccttcctgcagcagcagctcgacctggccaactgcctggacatgcaggacttcgctgaggccttcagctgctcgggactggcgagcgcggcgcagcggttcattctgcgccacgtgggcgagctgggcgccgagcagctggagcggctgccactggcgcgcctgctgcgctacctgcgggacgacgggctgtgtgtgcccaaggaggaggccgcctaccagctggcgctgcgctgggtccgcgctgacccgccgcgccgcgccgcgcactggccgcagctgctggaggccgtgcgcctgcccttcgtgcgccgcttctacctgttggcgcacgtcgaggccgagccgctggtggcgcgctgcccaccctgcctgcgcctgctgcgcgaggcgcgcgacttccaggcggcgcgctacgaccgccacgaccgcgggccctgtccccgaatgcgtcctcgcccgtccaccggtctcgccgagatcctcgtgctcgtgggcggctgcgaccaggactgtgacgagctggtcactgtcgactgctacaacccgcagacgggtcagtggcgctacctggccgagttcccagaccacctgggcggaggctacagcatcgtggcgctgggcaatgacatctacgtgacgggtgggtccgatggctcccggctctatgactgcgtgtggaggtacaactcaagcgtgaatgagtgggcggaggtggcgcccatgctgaaggcccgcgagtaccacagctcctctgtgctggacggactgctgtacgtggtggccgccgacagcaccgagcgctatgaccacaccactgactcctgggaggccctgcagcccatgacctaccccatggacaactgctccaccactgcgtgccgtggccggctctatgccatcggctccctggctggcaaggagaccatggtgatgcagtgctacgacccggacaccgacctgtggtcgctggtggactgcggccagctcccgccctggtccttcgcccccaagactgcgactctaaacggactcatgtactttgtcagggatgactccgctgaggtggacgtgtacaacccgacgaggaacgaatgggacaagatcccgtccatgaatcaggtaaattttcaggcgggccagcattggaagcacaggctggtcctgattttgcaacccaagtgtcatcgtgatgagtgtttgggatccacagccatgatgggtgggtctcatctcaattaatagaaggctgctcttacccttattttgcacttaaggctcactgagacacagatgttaagtaataccctatgattacacagcttagtacacatttgagcagtgtttattgagtatctgctgtgagccagagagcagaaggaagtgagggagcaaggcatacagtcatctggggacacctgttccagagagggacagcaggtacagaggccctgcagcagggcaccctggcgtgttcttagatacaccagcagcccatgtggccggagcagagtcagcatgaggtctgtgacctaccttttttatttttgagacagggtcttgctctgtcacccaggctggagtgcagtggtacaatcatggctcactgcagcctccacctccttgactcgcagtcctcccaccgcaccttcctgaatagctgagactacaggcgtgtgccaccacacccagtaattttttttctcatatgtagatacaaaaggatattcttaaaatttttatagagacagggtcttgctgtgttacccaggctggtctcacactcctggcctcaagtgaccctcctgtctcagcctcccaaagtgctaggattataggcgtgaaccaccacgcccagctggttcctgaggaagtcagtgtgggaatactttttttttttttatacggagtctcgctctgtcacccaggctggagtgcagtggcacgatctcggctcactgcaagctccatctcccaggttcacgccattctcccgcctcaacctcccgagtagctgggactacaggtacccaccaccacgcccagctaattttgtttgtgtatttttagtagagacgggatttcactgtgttagccaggatggtctggatctcctgaccttgtgatctgcctggctcagcctcccaaagtgctgggattacaggcatgagccaccatgcccagcccactgtgggaatacttgtgttgagcacttgctgtgtgttctgaataggacaaccagggtccaccccttctctctgggcttgttgagaagaggggtgcccagcctgacagtgatgggacagggaggcttcagtgccatttggccatgtgagcagtgttagtctgaggtacacatcatattgcctacagccttctttcctgtgtgtctgttaacatttccaaacctacactccgtgacatccagcctcacagcttacatcacagcttaatgtcctggcatttaagagacccagcgttctgttttccccgcagtaagctgcacatagtcatagcgaatttgggaaagatggaaggaatcatccagcctcgcggttcagagcccagctctgccactgtcagccatgcaagcctcagttttcccatctgtaacatggggagaacagcactgctcagcccagagggccactgcagagattctgagagagaacgtaggaagcgctgctcggcacgacctgcacacggggaggcctggcgctgcagcgggcaccctcatcaccatagggaaggcccagctgcctccggggaggcccgttctcctaggcagggtgttggaaaggggttggcctctctgctgctttctgggagagccaaggccacccctctggggtactgacagggcatgccttgtctccagtggttccccaggtggggccctgccctaccctctcctctgacctccactcactcatccctttggcccacaggtacatgtggggggcagcctggccgtccttggggggaagctgtacgtctctgggggatacgacaatacatttgaactctcggacgtggtagaggcctatgacccagagactcgcgcgtggagcgtggtggggcggctcccagaacccaccttctggcatggcagtgtcagcatcttccgccagttcatgccccagaccttctcgggtgggcgtggcttcgagttggacagtggcagcgatgacatggacccaggccgaccccggccgccgcgggaccccgatgagctgcactagccccagtctggcccggcacgggcctcggtgcaggtaactggcacctctgcggggcagtgccccactcctttgtgcacaaggacacgttgggctcacaggaggagcacaggctcttgggtggcgaagccagcccaggatccattacctggaaggtttctgtaccttgagagcctgaatcagaggccgtcgggaacgccctccctgcagttgaggaagagccactttcctgccagcacatgtttctgggtcttggaggtcacccccaccccgcggatcacagctcacccacgcggcgcacacccctcctgccgttgtcatctgcacctacttgttcccaccttgggagaggacgatgacttgggagggacgcgtgaagggagaaggggtcctcccatgaggctgaggatggcctgaacctggagcagcggaccaggcagacgggctgaagtggggtcccaaattccatgtccagaggtgtggggagcctgcctccctagctcctggcccctgccaggggcttacatcaaaacacctcagagggctgccctccagaggctgcacccagaacagtgggacatgagcaggggtgtgggcttggagggtgaagaggatgtggtcctatcagatgctgggcctcctcagccatagccccctgctcctaccccctgactggctcttgcgtcctcacctctcaccctctccttcccgggaggccctgggaggtgatcattgacacccagccaagcagacagctgcgggtgcccaagcccttgctgggcctgcgcgtgaggagtcccactgcttctaaaggaagtcctgggcaggaggtggctttggtggttggttccaaagttgaaaatgcttgcagtttgaccttagaagaagtgggaagaagaaggagctctacagggtcagctttgtttgatttgtccagtctaagaagtcccattgccaaagctttctgcaggagggtgaatgccgcagcttggcagcccctgggtttctcttggaaatggtcagtttcccctcaaagtacccaaagtagccttggcttgagtttttgtccttgcctcctttttagagaagagggcatttagactgcattttcctggttaaagaaggttaaagcaaatgtttattgccttttctagtgaactaactcgtagagatgttctcagcaggaagacagtcttagcactgtcacttagcagattgcacttaagtcccttgtgctggccagatggcgtggctggttgccttaatatgtcccaggacccctgacagggctgcctggcctctccctcgtgctcctcaagagcccagtccatacactgtggatgtcattgctgtcgggttaggaagtcttgtcctagaacgccctggctggtatgaccacagttcatggcggctcttctcgcttgggtcatggtcatcttccagcacctgctgtgctgggaaggccgaggatgggggcccagcactgtccaggcctgctggggcctggctgggagtcctgtgggcagcatggaacatgcagctgggcttcctgtgaccaggcaccctctggcactgttgcttgccctgtgccctggaccttttcctgcccttctccttcctctgctcccttggggctaccccttggcccctcctggtctgtgcaaactccctcagggagcccccctgccctgtagctctcgcttaacttcctaggggctgctgagcccacccagaggttgttggagttcagcggggcagcttgtctcccttgtcagcaggggcgtaagggctgggtttggccatacaaggttggctacgccctcaatccctgaccgttccaggcactgagctgggcacccacggaaggacatgctgtccagactgtgatgactgccagcacagggcatctcgggcttggctggtctgcgaggccttgcccctgtggaactctgggttcctgttttctcagtcttttttgcggctttgctgtggttggcagctgccgtactccaggcttgtgtcggccactcagatgagggctgtggtgcgagccagtgcaggagagctgcgcttgggattgtgccctctcctgtgtctgtcctccggacctacccaggtctccaccatcaggaccctgtctttgggtttagaagaccaagtatggggaaaaccaggcaccagcctctgcagcaatgggtccctctagcctgtggacaccagctgggggatccagggtcaggccccctcctctccccagtttccctctgctgtgggttctgggctgtcatgtctccaccacttaaggatgtctttacactgacttcaggatagatgctgggatgcctgggcatggccacatgttacatgtacagaactttgtctacagcacaaattaagttatataaacacagtgactggtatttaatgctgatctactataaggtattctatatttatatgacttcagagacgcgtatgtaataaaggacgccctccctccagtgtccacatccagttcaccccagagggtcgggcaggttgacatatttatttttgtctattctgtaggcttccatgtccagaatcctgcttaaggttttagggtaccttcagtactttttgcaataaaagtatttcctatcca

SEQ ID NO: 2009 - DNA, 2293 bp, Homo sapiens
  source 1..2293: mol_type = genomic DNA
gggtacgcatagccgggcactaggttcgtgggctgtggaggcgacggagcagggggccagtggggccagctcagggaggacctgcctgggagctttctcttgcataccctcgcttaggctggccggggtgtcacttctgcctccctgccctccagaccatggacggctccttcgtccagcacagtgtgagggttctgcaggagctcaacaagcagcgggagaagggccagtactgcgacgccactctggacgtggggggcctggtgtttaaggcacactggagtgtccttgcctgctgcagtcactttttccagagcctctacggggatggctcagggggcagtgtcgtcctccctgctggcttcgctgagatctttggcctcttgttggactttttctacactggtcacctcgctctcacctcagggaaccgggatcaggtgctcctggcagccagggagttgcgagtgccagaggccgtagagctgtgccagagcttcaagcccaaaacttcagtgggacaggcagcaggtggccagagtgggctggggccccctgcctcccagaatgtgaacagccacgtcaaggagccggcaggcttggaagaagaggaagtttcgaggactctgggtctagtccccagggatcaggagcccagaggcagtcatagtcctcagaggccccagctccattccccagctcagagtgagggcccctcctccctctgtgggaaactgaagcaggccttgaagccttgtccccttgaggacaagaaacccgaggactgcaaagtgcccccaaggcccttagaggctgaaggtgcccagctgcagggcggcagtaatgagtgggaagtggtggttcaagtggaggatgatggggatggcgattacatgtctgagcctgaggctgtgctgaccaggaggaagtcaaatgtaatccgaaagccctgtgcagctgagccagccctgagcgcgggctccctagcagctgagcctgctgagaacagaaaaggtacagcggtgccggtcgaatgccccacatgtcataaaaagttcctcagcaaatattatctaaaagtccacaacaggaaacatactggggagaaaccctttgagtgtcccaaatgtgggaagtgttactttcggaaggagaacctcctggagcatgaagcccggaattgcatgaaccgctcggaacaggtcttcacgtgctctgtgtgccaggagacattccgccgaaggatggagctgcgggtgcacatggtgtctcacacaggggagatgccctacaagtgttcctcctgctcccagcagttcatgcagaagaaggacttgcagagccacatgatcaaacttcatggagcccccaagccccatgcatgccccacctgtgccaagtgcttcctgtctcggacagagctgcagctgcatgaagctttcaagcaccgtggtgagaagctgtttgtgtgtgaggagtgtgggcaccgggcctcgagccggaatggcctgcagatgcacatcaaggccaagcacaggaatgagaggccacacgtatgtgagttctgcagccacgccttcacccaaaaggccaatctcaacatgcacctgcgcacacacacgggtgagaagcccttccagtgccacctctgtggcaagaccttccgaacccaagccagcctggacaagcacaaccgcacccacaccggggaaaggcccttcagttgcgagttctgtgaacagcgcttcactgagaaggggcccctcctgaggcacgtggccagccgccatcaggagggccggccccacttctgccagatatgcggcaagaccttcaaagccgtggagcaactgcgtgtgcacgtcagacggcacaagggggtgaggaagtttgagtgcaccgagtgtggctacaagtttacccgacaggcccacctgcggaggcacatggagatccacgaccgggtagagaactacaacccgcggcagcgcaagctccgcaacctgatcatcgaggacgagaagatggtggtggtggcgctgcagccgcctgcagagctggaggtgggctcggcggaggtcattgtggagtccctggcccagggcggcctggcctcccagctccccggccagagactgtgtgcagaggagagcttcaccggcccaggtgtcctggagccctccctcatcatcacagctgctgtccccgaggactgtgacacatagcccattctggccaccagagcccacttggccccacccctcaataaaccgtgtggctttggactctcgta

SEQ ID NO: 2010 - DNA, 1005 bp, Homo sapiens
  source 1..1005: mol_type = genomic DNA
tgacaccatgacccactgttgctccccttgctgtcagcctacctgctgcaggaccacctgctgcaggaccacctgctggaagcccaccactgtgaccacctgcagcagcacaccctgctgccagcccgcctgctgtgtgtccagctgctgccagccttgctgccgcccaacttgctgtcaaaacacctgctgtaggaccacctgctgccagcccacctgtgtgaccagctgctgccagccttcctgctgcagcacaccctgctgccagcccacctgctgtgggtccagctgctgtggccaaaccagctgtgggtccagctgtggccagagcagctcctgtgcacctgtgtactgcagaagaacctgctactaccccacgactgtctgcctgcctggttgcctaaaccagagctgtggctccaactgctgccagccctgctgccgcccagcctgctgtgagaccacctgctgcaggaccacttgcttccagcccacctgtgtgtccagctgctgccagccttcttgctgctgatcacgttccaagagaaccaccatcctcacacaacaaatttctgctcaactgactcatcttttgggggactaatttaatttgctgctgacagccaccatgctctcacccaaatttttatgaattctctacatgtttaaaatcttggaaatctgcttgagggagggcagaatacttcatcctgattctctttttccttacaccttgtggatcatgtgccagcttcatctgttctcaagtttgagtcatggtctcagctttgactctaaagtcaagagcttcattccctgcttctaaggaatttaggtttctgcaactgatcgatgatctttgcaatcttttttttgttttcaatatcctcctcatcgttcttgtatccttctttcttcttttcatgataaatttgtgttgtgtccctggtagcagaaatccttacctatatgtttctgaataaattctgaaccatcctcatctca

SEQ ID NO: 2011 - DNA, 597 bp, Homo sapiens
  source 1..597: mol_type = genomic DNA
atggtcagctcctgttgtggctccgtgtgctctgaccagggctgcagccaagacctctgtcaggagacctgctgccgccccagctgctgtcagaccacctgttgcaggaccacctgctaccgccccagctgttgtgtgtccagctgctgcaggccccagtgctgccagtctgtgtgctgccaacccacctgctgtcgcccccctaggtgctgcatctccagctgctgccgccccagctgctgtatgtccagctgctgcaagccccagtgctgccagtctgtgtgctgccagcccaccacgacctgctgccaccctaggtgctgcatctccagctgctgtcgccccagctgctgtgtgtccagctgctgcaagccccagtgctgccagtctgtgtgctgccagcccaactgctgccgccccagctgcagcatctccagctgctgccgcccctcttgctgtgaatccagctgctgccgcccctgctgctgcgtgcgtccagtctgtggccgagtctcctgccacaccacttgctatcgcccaacctgtgtcatctccagctgcccccgccccttgtgctgtgcctcctcttgctgctga

SEQ ID NO: 2012 - DNA, 1812 bp, Homo sapiens
  source 1..1812: mol_type = genomic DNA
ttttgcagccagtctctgtctttgcttctggaaggatgacttctgactgctcctccacacactgctctcctgagtcctgtggcacggcttccggttgtgcacctgcctcaagctgctccgtggaaacagcttgtctccccggtacctgtgctacatcccgatgtcagactccaagcttcctatccaggtctcgcgggctgactggttgcctcctgccatgctactttactgggagttgtaatagtccctgcttggtggggaactgtgcctggtgtgaggatggggtgttcactagcaatgagaaggagacgatgcagttcctgaatgacagactcgccagctatctggagaaggtgcgcagcctggaggagaccaacgcagagctggaatccaggatccaagaacaatgtgaacaggatatcccaatggtgtgcccggattatcagcgttacttcaacaccattgaagatctccaacaaaagatcttatgcacgaaagcagagaattctagacttgctgtacagcttgacaactgcaaactggccactgatgactttaagtcaaagtacgagagtgaactgtcccttcgccagctgttagaggctgacatcagcagcctgcatgggatcctggaggaactgaccctgtgcaaatctgatctggaggcccatgtggagtctctgaaggaagatctcctttgccttaagaaaaaccatgaagaggaagtcaacttgcttcgtgaacagcttggcgaccgcctcagtgtggagctggacactgcccccacccttgacctcaacagggtcctggatgagatgcgctgtcagtgtgaaacggtgcttgccaacaatcgcagagaagctgaagaatggttggctgttcagacagaagagctgaatcagcagcaactgtccagcgcggagcagctgcagggctgccagatggagatcttggaactgaaacgcacagccagtgctctggaaattgagctccaagcacagcaaagcctgacagaatctctggaatgcaccgtggcagaaaccgaggcccagtacagctcccagctggcccaaattcagtgtctgatcgataacctggagaaccagctggccgagatccgctgcgacctggagcgacagaaccaggagtaccaggtgctcctggacgtgaaggcccggctggagggtgagatcaacacgtactggggcctgctggacagcgaggacagcaggctttcctgtagcccatgttcgaccacatgcacctcgagcaacacttgtgagccatgctcagcctatgtcatctgcactgttgaaaactgctgcttgtgaatgttaaggacagcaggtagaggaatcaaagccagcagcatcctagaaaggagatggggcttcaaccagggacatccaaaccggaagcacaaatccaggaggctctcatatcctggaattgccctccaggtatcctcagtctttctgctttactatttcctctccttccggcttatttgtggtatactggaagcccataaagcattcttgctcatctccaaataaaacgtgttttattcctttagcgtggtaaatatagctctatggctgattactgttgatagaatattcattttatggcaaggaaatcatctaaacccataaccatagtttcaatgtacataaacccaggctgaaaatattttttaactcctcaaatacaaataaattaatgaacccatgagaaatgtcatatatcttagaaaatagttgtgtgtatctttctgaggaaaaatattaggaataaaatatgataaaatgt

SEQ ID NO: 2013 - DNA, 1566 bp, Homo sapiens
  source 1..1566: mol_type = genomic DNA
agcatccgggctcccggcagcggcgctgcggcggctcgcgggagacgctgcgcgcggggctagcgggcggcggagcggacggcgacggggcgctctcgggctgccggcggggccgagcgccgcgcgtcccgagcatggcaggctccctgcctccctgcgtggtggactgtggcaccgggtataccaagcttggctacgcaggcaacactgagccccagttcattattccttcatgtattgccatcagagagtcagcaaaggtagttgaccaagctcaaaggagagtgttgaggggagttgatgaccttgactttttcataggagatgaagccatcgataaacctacatatgctacaaagtggccgatacgacatggaatcattgaagactgggatcttatggaaaggttcatggagcaagtggtttttaaatatcttcgagctgaacctgaggaccattattttttaatgacagaacctccactcaatacaccagaaaacagagagtatcttgcagaaattatgtttgaatcatttaacgtaccaggactctacattgcagttcaggcagtgctggccttggcggcatcttggacatctcgacaagtgggtgaacgtacgttaacggggatagtcattgacagcggagatggagtcacccatgttatcccagtggcagaaggttatgtaattggaagctgcatcaaacacatcccgattgcaggtagagatattacgtatttcattcaacagctgctaagggagagggaggtgggaatccctcctgagcagtcactggagaccgcaaaagccattaaggagaaatactgttacatttgccccgatatagtcaaggaatttgccaagtatgatgtggatccccggaagtggatcaaacagtacacgggtatcaatgcgatcaaccagaagaagtttgttatagacgttggttacgaaagattcctgggacctgaaatattctttcacccggagtttgccaacccagactttatggagtccatctcagatgttgttgatgaagtaatacagaactgccccatcgatgtgcggcgcccgctgtataagcccgagttctttcaggtctgccacaccaagaaggactatgaagagtacgggcccagcatctgccgccacaaccccgtctttggagtcatgtcctagtgtctgcctgaacgcgtcgttcgatggtgtcacgttggggaacaagtgtccttcagaacccagagaaggccgccgttctgtaaatagcgacgtcggtgttgctgcccagcagcgtgcttgcattgccggtgcatgaggcgcggcgcgggcccttcagtaaaagccatttatccgtgtgccgaccgctgtctgccagcctcctccttctcccgccctcctcaccctcgctctccctcctcctcctcctccgagctgctagctgacaaatacaattctgaaggaatccaaatgtgactttgaaaattgttagagaaaacaacattagaaaatggcgcaaaatcgttaggtcccaggagagaatgtgggggcgcaaacccttttcctc

SEQ ID NO: 2014 - DNA, 444 bp, Homo sapiens
  source 1..444: mol_type = genomic DNA
gatttgccccatgggcctaagacataagctgaacctctggcctgcagttccagatccaaggtgactgagacaaactgccagctgccactggcttatcaggagcacctggagatggacaacatgtctcccaggctgagagccttcctctccgaacccattggagaaaaggatgtctgctgggtggatggcatcagccatgagctcgcgatcaatttggtcaccaaaggtatcaataaggcctacatcctgctgggacaattccttctgatgcacaagaatgaagccgagtttcagaggtggctcatttgctgttttggtgccactgagtgtgaggcccagcagacttctcactgcctcaaggagtggtgtgcctgcttcctgtagacacaaacctcattgctgccccccaccaccctctggggaaaatgacgccttctccaccta

SEQ ID NO: 2015 - DNA, 2299 bp, Homo sapiens
  source 1..2299: mol_type = genomic DNA
gagacgcgctgtgtgattgcctcggagagaggaaggcgctccagttccgggtcaggcccttctcccgcctccctcggccttagccatggcgagtagcagcggtgctggggcggcggcggcggccgcggcggcgaatctgaatgcggtgcgggagaccatggacgttctgcttgagatttcaagaattttgaatactggcttagatatggaaactctgtctatttgtgtacggctttgtgaacaaggaattaacccagaagctttatcatcggttattaaggagcttcgcaaggctactgaagcactgaaggctgctgaaaatatgacaagctgactttctggagaaattctgatgagatatgtcaagctctgcaagagggtttgaagattgcattgtagttgagaatgtacaatgaaattactgcatgcagcagtgtagaaaaattttactttttaaaagaattataaaaccatagctttataaatcagtggaaagtggcttacagagagaactatcagatgtgtttacatcacatcttattcactttttttaacagctctaatgctttggcattgctatgttcatatttatgtattccttatttatagctctgatagctttaattttctaagcagtctgtctatcagatgtgcacatctgctgtgccaggttgaagtatagtggaacccatcagtagtaatgtgtagtagttatgacttgttgacatttccattataaactttaattttgaattgtttatgcattataactgtggatttatattgtattgggctgaaagttgacaggatttcagccaccacttgtgaatttttatttagattcattatgtatatcagaatcttgttttttgaaataagagcatggaaaacatttcttgtaatctactcttgaacaaagaatatttagtttttcaaacagtttgttgggcagctaatagtgtgaaccaggtcatttttgtattgagtaaaaaaatcaaactttgagaaacttggattttaaaagtaatgacaatgcttaggttagtattatttgtaatttgaatcatttacatctaatgagaatgttagttgagaatgttttcttaaagttttatatcctataaataacggaataaaaaaatttgtaaaatgaaacaacaaacatgcaaaattcctatttacttttattacataaaagtaattttagtgcttacctaataaatcttgaatggttatttaataaattattagatgggtgatgtgtttcaaaagatacttgctattttttgaagaaataaggatttccagtcattaaacaaaactaaacaatcttattagatgggtgatgtgtttcaaaggatacttgctattttttgaagaaataaggatttccagtcattaaacaaaactaaacaatcaaatgttctatattaggaatctcaagtatggctttttttaaaaaacctttttaacatcttgatgtcaaggattataagtatggcttttcagaattgttttgtttgtcattattcttgcctttaaaattttaactcatcaaagtgaagattagaaataaattttagaaaatgtagaatagtattgattctgttcctgtaatagaatctcagtggagtttttttgcaaaactaatatggatttcatctgattttattatttcttaaattttagattttattgagtaccatttatatgattgtacaagcattcactctttactagcattttttgtttttcagacaagctgaagtggttttattaagatttggtaatatttaaatagcaaccttctctgcctttttttttttttaatatagaattttgaccattttgactttttaaatgcctggcatctttaccaaccaagtaaactggaagatctgttactggtagaacaggttgaggagacagtaggaatttgtaaaaagtcatttgatttataatcaacactacaaatactatgtgttatttataaaatcataaagaacacttttgtcagactccaaaatttgtatatacttccaggccataagagttgatagtattatttatgactttgtagattaagttatttatgtatgaaacaaagcaggaaaatatattgagaagggatcgtgtttacagaggacttctttaaagtgtcacatttttaaaatgtaaacatatttttaatgcatacttaagtaatatttaagaaactaaacaaaataatgatacaattgcagtgttgtgcttgttgtcaatgacaaaaataaaaccattttggtggtattggcctgta

SEQ ID NO: 2016 - DNA, 4597 bp, Homo sapiens
  source 1..4597: mol_type = genomic DNA
agactccatccgccatgttggatgccgcagattcgccataacctcgccggctcttttcttaaaaaaataaaaataaaaagcgaagcgtcagcagggcgccccgccccctcggtcggcacgggagggggcccggaagagcccgaggcttttttttcctccgcggtggggcgttgccatggagacgcgggcggcagaaaacacggccatctttatgtgtaaatgttgtaacctcttctcaccaaatcagtcggaactcctctcccacgtttcagagaagcacatggaagaaggggttaatgttgatgagattattattccccttaggcctctgagtacacctgaaccccccaactcaagcaaaaccggagatgagtttttggtcatgaagaggaagagaggcaggcctaaggggtccacgaagaagtccagcacagaagaggagctggcagaaaacatcgtgagtccgactgaggacagcccgctggctccggaggaagggaacagcctgcctccaagcagcttggagtgtagcaagtgctgtcggaagttctccaacacgcgccagctgcggaagcacatctgcattatcgtgctgaatttgggtgaggaggaaggagaagcaggtaacgagtctgaccttgaactagaaaagaagtgtaaggaagatgatcgggaaaaagcctcgaaaagaccacggtcacagaaaacagagaaagtccagaagatctcaggaaaggaggccagacagctttctggggcgaagaaacccatcataagtgtggttttaactgcacacgaagcaattccaggtgctaccaagattgtgccagtggaggctgggccccctgaaacaggagctacaaattctgagaccacttcagcagacctggtgcctcggagaggctaccaggaatacgccattcagcagacaccttatgagcaaccaatgaagtcaagcaggctaggtcccactcagctcaaaatcttcacttgtgaatactgcaacaaggtcttcaagttcaagcactcgctgcaggcccacctgaggatccacaccaatgaaaagccatacaagtgcccccagtgcagctatgccagtgccatcaaggccaacctcaatgtgcacctgcgcaagcacactggagagaagttcgcctgcgactattgctcgttcacctgcctgagcaagggccacctcaaggtgcacatcgagcgagtgcacaagaagatcaagcagcactgccgcttctgcaagaagaagtactctgacgtcaagaacctcatcaagcacatccgagacgcgcatgacccacaggacaagaaggtcaaagaggccttggacgagctctgcctgatgacgagggagggcaagcggcagctgctctatgactgccacatctgtgagcgcaagttcaagaacgagctggaccgtgaccgccatatgctggtccacggagacaagtggccttttgcctgtgagctctgtggccatggggccaccaagtaccaggcgctggaactgcatgtcaggaagcaccccttcgtgtacgtctgtgccgtctgccgcaagaagttcgtcagctccatcaggctgcgcacccacatcaaagaggtgcacggggctgcccaggaggccttggtcttcaccagttccatcaaccagagcttctgcctcctggaacctggtggggacatccagcaagaagctctgggggaccagctacagctggtggaagaggagtttgccctccagggcgtgaatgcactcaaggaagaggcctgtcctggggacactcagctggaggagggccggaaggagccggaggcccctggggaaatgcctgccccagctgtgcacctggcctccccgcaggccgaaagcacagccctgccaccctgtgagctggaaaccaccgtggtctcctcctcagacctgcattctcaagaggtggtttcagatgattttttgttgaaaaatgatacctcctccgcagaggctcatgctgctcctgagaagcccccagacatgcagcacagaagctcagtccagacgcaaggtgaagtgatcacactactgctgtccaaggcccagagtgctgggtcagatcaggaaagccatggcgcccagagccccctaggggaagggcagaacatggctgtgctttcagctggtgacccagatcccagcaggtgtctcaggtcaaacccagctgaggcctcagacctcctccctccagtagctggtggtggggacaccatcacacatcagcctgactcttgcaaagctgcccctgagcaccggtcaggcatcaccgctttcatgaaggtcctgaacagtttacagaagaagcaaatgaacaccagcttgtgtgagcggatccggaaggtttatggagacctggagtgtgaatactgtggcaaacttttttggtaccaagtgcattttgatatgcatgtccgcacccacacccgggaacatctgtattattgctctcagtgtcattattcttccatcaccaaaaactgccttaaacgccacgtaattcagaaacacagtaacatcttgctgaagtgtcccaccgatggctgtgactactcaactccagataaatataagctacaggcacatcttaaagttcacacagcactggacaaaaggagttattcttgtcctgtttgtgaaaagtctttttcagaggatcgattgataaagtcacatatcaagaccaaccatcctgaggtctccatgagcaccatttctgaggttctcgggaggagggttcagctgaaagggctaattggaaagagagccatgaaatgcccatattgtgacttttatttcatgaagaatggctcagaccttcagcgtcatatttgggctcatgaaggtgtgaagcccttcaagtgttctttgtgtgagtatgcaactcgtagcaagagtaacctcaaggctcatatgaatcgtcacagcactgagaaaacccacctatgtgacatgtgtggcaagaaattcaaatcaaaagggacactgaaaagtcacaaactccttcacactgcagatgggaagcagtttaagtgcacggtgtgtgactacacagcggcccagaagccacagctgctgcggcacatggaacagcatgtctccttcaagcctttccgctgtgcccattgccattactcctgcaacatatctggctctctgaagcggcactacaacaggaagcaccctaatgaggagtatgccaacgtgggcaccggggagctggcagcggaggtgctcatccagcaaggtggtttgaagtgtcctgtttgcagctttgtatatggcaccaaatgggagttcaataggcacttgaagaacaaacatggcttgaaggtggtggaaattgatggagaccccaagtgggagacagcaacagaagctcctgaggagccctccacccagtatctccacatcacagaggccgaagaagacgttcaagggacacaggcagcggtggccgcgctccaggacctgagatacacctctgagagtggcgaccgactggaccccacggccgtgaacatcctgcagcagatcattgagctgggcgccgagacccatgacgccactgcccttgcctcggtggttgccatggcaccagggacggtgactgtggttaagcaggtcaccgaggaggagcccagctccaaccacacggtcatgatccaggagacggtccagcaagcgtccgtggagcttgccgagcagcaccacctggtggtgtcctccgacgacgtggagggcattgagacggtgactgtctacacgcagggcggggaggcctcggagttcatcgtctacgtgcaggaggccatgcagcctgtggaggagcaggctgtggagcagccggcccaggaactctagaggacatgtggcatcggatggccacagggcggggctgccaggctctgcaggcacccagggtggggaggccacccttcctgccctacccgcagaatggtgctctcctttgccctccctgcccagcagcctgataggactctcctagtccaacttggggtgggcaaggcagtcagcatcaccagcaataccacaggaccctcaccccagcatagacacacaccccctgacccttaccatctgcttcctgaaagacttcagtgtcagctcccctacacacaccccacaccttcaccccttgcttcaagattcaaacagagactcccagtccccctcagcatcttccctgaatcacagccccagctccttgacccccatctaggtgccaaatgttcatctgcaaccgctatgcagtctggtgagagggagacagccatcacatagaaagtgaccgtacgggtttttaatcactgctgggtggggtgggggtagggggattgtcctggctttgtcgacaaagtcccacttccccgagtattaagggcccttggtatcaagtgaggtaaattcacccatcacagggtctcgccctaccatcctggaattatttcacttttaagataaatgcactatttcactgttcgcctcccattctaaggaggtgaggtggttggaataaaaacagttcctgtc

SEQ ID NO: 2017 - DNA, 5847 bp, Homo sapiens
  source 1..5847: mol_type = genomic DNA
agcgcggccgaagggcgtggttggcgctcggtcctgccctgcgcgttttgggctgcggttggagggccgcagttgcagtcagggtccgccagctcggggccagcgcatggggctgctgagaccgctccggacgtgcgaagcgttcgcggtgcggtaggaagctgaagtcttcagcagaaccctgacctaggtagggagtctcaatggccctgggtgaagaaaaggcagaagcggaagcatctgaagacacaaaggcccagtcctatgggagagggagctgcagggagcgggagctggacatcccagggcccatgagtggggagcagcccccacgcctggaagctgagggagggctcatctcccctgtatggggggcagaagggatacctgcccctacttgctggattgggactgaccctggcggcccctctagagcccaccagccacaggccagtgatgccaacagagagcccgtagctgagaggtctgagcctgcactcagtggcctgcctcctgccaccatggggtctggagaccttctgctctccggggaaagccaggtggagaagaccaagctttcttcctccgaggagttccctcagactctgagccttcccagaacaacaactatttgctcaggacatgatgctgataccgaagatgatccatccctagcagatttgccccaggcactggacctcagccagcagcctcacagctcaggtctctcttgcctgtcacagtggaagtccgtgctgagcccaggttccgcagctcagccttccagctgcagcatctctgcttcctccacaggcagcagtctccagggtcaccaggagagggcggagcctcgtggtggttctctggccaaggtctcctcctccctggagccggtcgtcccccaggaaccttcctctgtggtggggctaggacctcggccccagtggtcaccacagcctgtgttctctgggggtgatgcttctgggctaggcaggagacgcctctccttccaggctgagtactgggcctgtgtgctgccagattccctgcctccatcacccgaccgccactcccctctctggaacccaaataaagagtatgaagatctgcttgactatacttacccactgaggcccgggcctcagctcccaaagcaccttgatagccgtgtgccagctgaccctgtcctgcaggactccggggtagacctggatagcttctctgtctctccagcaagcaccctcaaatcacctactaatgtctcccccaactgcccaccagcagaggccactgccctgccattttctgggcccagagagccaagccttaagcagtggccctccagagtaccccagaaacagggtggcatgggcttggcatcttggagccaacttgcatctacccccagagccccaggcagtagggatgctcgttgggagcgcagagagccagccctgaggggtgcgaaggaccggctgactataggcaagcaccttgatatgggctctccccagctaaggacacgggacagagggtggccctcgcccaggccagagagggagaagaggaccagccagagtgcccggcgccctacctgcacagagtctaggtggaaatcagaagaggaagtggaaagtgatgacgagtatcttgccctccccgctcggctgacacaggtttctagcctggtttcgtatctaggatccatttctaccttggttaccctgcccactggggatatcaaagggcagagccccttggaagtgtcagacagtgatgggccagcttccttcccttcaagctccagccaaagccagcttccccctggagctgccctccaaggatctggggatcctgagggccagaatccctgtttcctgcgctccttcgtccgtgcccacgactccgcaggggaaggcagtctggggagcagccaggccctcggggtctcctctggactgctgaaaacacgcccctccttgccagctaggttggaccggtggccattctcagacccagatgttgaagggcagcttcccaggaaaggaggagaacagggaaaagaatcactggtgcaatgtgtgaagacattttgctgtcagctggaagagctgatctgctggctgtataatgttgcagatgttactgaccacgggactgcagccaggtccaatcttacaagtctcaagtcttctctgcagctttaccggcaatttaagaaagatatagatgaacatcagtctctgacggagagtgtcttacagaagggggagattcttcttcagtgcctgttggagaacaccccagttttagaggatgtccttgggaggatcgcaaagcagtctggtgagctggagagccacgcagatcgcctgtatgactctatcttggcctctctggacatgctggctggctgcacccttatccctgacaaaaagcccatggcggcaatggagcacccatgtgaaggggtttaacctggcatcttctcaggcagaggtgcaacctgtcggccaaacactggctagtgagaaaaaaaaccttcaagaagtccttgcaagagccattcaacactgaagtcaagggggaaaccttcaatatactagctttaaaatgcctttctcctccctgaatggagggctgagttactatttttatttacaatgaatccttccaaactaaggttttccttttggtgcttctccacaaagagcgtgtagctttgcaatttttgataaaataagacgtgttgccttcccctctatcccattaaaaaagagcagataaagctcaaactattccacctggtagggtcatttaccaagggctggtaggagattccgaatactcaatattctcaggcatgcaagaggacctaagagactgaaaaaagtgaattgttggccagaaaccttgggtcttttcataaaaggaaatttgggcttgtcaatccctctttaaagatataggtagaaagaagagatttttaaccctttgtctgcaaaagaaaaagggttaaatgaagcatctatacagatgactttgggagattatgacaccttttgccatcttcagggcttacgtctttactttcttggctaaccagtttcttagaagaaaatgtgtcagggacttggggatctacagtcatgctttagcatggctatggagctaattatcaagcttaaagggtaactttgggaggactcctcccttcactcctagtctcccttggaagagcagtccaggctcagggaagggaacggataggatgacacagtaagtacagaaactgaagctgtcaatagtgaaggaaaaaggggaattcttcgttgctttggcattgacacataagtactttgattaaaaaaaaaaaaaactatggatcaaccattcaaagcatcaattctatagctttttgcagcaagatgatcagttattgctggtaactgcagattctacagaaaagcacttttaaagttctgttgggccatgaatgaacctggaaggaggaaagcacagtaacaatggaaactaaagtcctattattaatgtgacttttctgcttcagaatttctgagactttatagtcactggaaaatagccattaaattctttaaagattagctcttcaacagtagctacacataaaatgcagtatttcaagtgcctgatgctgctgtggtatgctttatcataatgcttaagggcatgatcaaaattaaaatggcttatgagtttgccatattaatcatcttagttccatacacactgagactttaaaagggaaaaaccactctagcaaataattgtcaattataaacctgtatgtaaaacattcttgaaaacctagagttggttaaaaaggtagagatgtctgacggcctcttcttaaattgatatattttaccttctcttagatgtacatttataagtaggaacatgtccttccactgagtatgttactgaatagcccttaggaaattaaacccatttatttactaatatttgacaggcatagaagtgtattaattagcataaaagttggagatgaaaaccctatagaaacaaattggccaatattatactaattgaatgcagaatgtggcattctattcccattcaactaataatcagcttcaactgacaggaatttgcacagaatgttacacaataccctgtttcccaagaaagtactaccttacctagagatgatctaagatatttttgttcatcctctgaataaggtgagactaaagggtgctaactccctggacctggctgtgaatgctactgaagagtatcaacacaactgttaattataccgccgtgctttaagtttaagacttaccttaaaactcaagctgaaggctgggcacggtggctcatgcctgtaatcccagcactttgggaggccgaggcgggtggatcacaaggtcaggagatcgagaccatcctggctaacacggtgaaaccccatctctactaaaaatacaaaaagaaattagccaggcgtggtgatgggcgcctgtagtcccagctacttgggaggctgaggcatgagaatggcatgaacccgggaggcggagcttgcagtgagctgagatggcaccactgcactccagcctgggcaacagagtgagactcttgtctcaaaaaaaaaaaatcaagctgaaattgtttcagcctagtaagatgctgccagcagcatttctatgagcaaacatggccaaattagagtcaagtagctgagcttgctaactgcactgtgatgccacactggaataacttagtagtcccttaaaattaatggaagttaaatccacagggaagtgatgatactcaaagctggatcagcagtttcaagatctgggttcttggagatccataggtaagctcagcaaatggaagacgacgtcaacacggctattttgaagcttaggtgggaatggaacacaaagaaggtttgaggtaagatatgctggaaaggcaagatgtaggctaagggaaattcaatccaaggtcgaagaataggaaattactgctcagaccacaatgactatcattctgaaaggatttcacagagtgtgcagctgcttagatttaagaacactcttcttcactatgtaaactaatttatggcagcaccttatatttagaacaagtggtaattccctttactaagtgaacagattattaaaacctgtagtagctttgaaccgtttgtacttgaaaatgggggtataaaggggtatatattttttccagaaccacatttattggcgtatacatagaagcaaatcttaaggcatgctgaaatttgttgtaaatcccaatctttactgccatggggaaaagaacgctggaattttccaaacttaagtctgtaaatatgctcatcttaagttcatgtaatgtttccgctaactcaccaagaataagctgacaatttaaacaacttttactgtgtaaaaatgaagtgcacggcatggcatcacagtatcttgacatttgttttgtgtcatttagctactttagaaaatagtttctgaactctttccccctttatactgtattaaggcaaaaacaaaacttctgaagcattaaagatcttcaccaaaataactattggtaacttcaggaatttgtcagttgccttatgtgaggatgaatagatccaccaagcacgcctataatacaaagtaaactatgatttttattgtgaaattttcatagatggaaaattgaatattctgtccatttcattttacaattatcttaccacttatttttgtaccatgtatttcaattgcctgtttagtgaaaaataaaaattaaaaaaaccta

SEQ ID NO: 2018 - DNA, 653 bp, Homo sapiens
  source 1..653: mol_type = genomic DNA
gacgcgcggggccacactgcccgccccctagcctggcgctgggcctccgggacaagttggctgggtccgggcttggggactgcaacgcggtcttctgtgcttcaccatctacataatgaatcccagtatgaagcagaaacaagaagaaatcaaagagaatataaagaatagttctgtcccaagaagaactctgaagatgattcagccttctgcatctggatctcttgttggaagagaaaatgagctgtccgcaggcttgtccaaaaggaaacatcggaatgaccacttaacatctacaacttccagccctggggttattgtcccagaatctagtgaaaataaaaatcttggaggagtcacccaggagtcatttgatcttatgattaaagaaaatccatcctctcagtattggaaggaagtggcagaaaaacggagaaaggcgctgtatgaagcacttaaggaaaatgagaaacttcataaagaaattgaacaaaaggacaatgaaattgcccgcctgaaaaaggagaataaagaactggcagaagtagcagaacatgtacagtatatggcagagctaatagagagactgaatggtgaacctctggataattttgaatcactggataatcaggaatttgattctgaagaagaaa

SEQ ID NO: 2019 - DNA, 688 bp, Homo sapiens
  source 1..688: mol_type = genomic DNA
gatgctgctctttaggatggacctgggcataccctagtatctgtttattttgctttttctggtgactatttaatccaggacaatatgtttagaaattttaaaccagttttagaaattggtttaaaatacattaatttcattttttcagctataattattatgtgtgtatatatgtaaaatatagatatcaagagtcattaactttagtcaccttagtcattgacagggctgagtttggattaagagagaaaaaataatagttctactgtacaatagtataatttttatgattgtaagtattttaaacctagactccaccttcgggggtgcaaaccatattgttttttaattactagtcttctgtgcttcaccatctacataatgaatcccagtatgaagcagaaacaagaagaaatcaaagagaatataaagaatagttctgtcccaagaagaactctgaagatgattcagccttctgcatctggatctcttgttggaagagaaaatgagctgtccgcaggcttgtccaaaaggaaacatcggaatgaccacttaacatctacaacttccagccctggggttattgtcccagaatctagtgaaaataaaaatcttggaggagtcacccaggagtcatttgatcttatgattaaagaaaatccatcctctcagtattggaaggaagtgg

SEQ ID NO: 2020 - DNA, 3220 bp, Homo sapiens
  source 1..3220: mol_type = genomic DNA
gcgccgagtcccagcatgcaccgcgcccggccggctctgcctttgggggccagcagggctgtacctgggagttgggttggggcggagcggaggggaggccgtgccaggcagggccggttcgtgcggaaccgccatggccgagccggcttcggtaactgtgacatttgatgatgtggccttatatttttcggaacaagagtgggagatcctggagaagtggcagaagcaaatgtataagcaagagatgaagaccaattacgagacccttgattccctggggtatgctttttccaagccagatttgatcacatggatggaacaagggagaatgctattaatcagcgaacagggatgcttagataaaacaagaaggacaactagccctcctactgatgaacagttgaacatgaagaatactggaaagttgctatgttttgatgacgaaggaactcccaggacaaaagaagaggattgccgtttaaatggtcctcaaaaacaggacttgtgtgctgccttacgagggaaagagagaaagattttattagctcaaacagccaccttccagtctccaagtctccgagaaacagagattctaaataaaaaagtcagcatcacagcatatgatccagacaagaaagacctgcggcataagcctcgggagaccccagggcgcttagaaattcccacagggccaagatgctattcctgctatgtctgtaggaaagtcttccaagtaaggagggatttgctaaagcacaaacggagccactccaagagccagctctgcagatacccaaagtacaaaaactcgtccagagggaagtccgaactcaggcggacgcagaggctcctgtgtcagaagaagcggttccagtgcagtgagtgtgagaagagctacttcctgaagggcagcctcgtcactcatcaggttgtccacaccggccagcggccctacccatgccctgagtgcgacaagaccttccggtacagggccaacctgaagaagcacctgtgtctacaccgcggggagcggccgttctgctgcggggagtgcggccgggccttcgtgcagcagtgcgagctcacggagcacttgcggctgcacagcggagagaagcccttccagtgtccgcagtgtgaccggtgcttccgcctgaagaggggcatgaaggtccatctgacccagcacagcgggaagaggcccttccactgtcccgagtgtggccggagcttctcccggaaggctgccctgaagacccaccagaggacgcacagcgaggaaaagccgttttcttgtggtgaatgtggcaggaaattcatctacaagattaagctggacgagcacatcagagttcacacgggagagaagcccttttcgtgtcccgagtgtaacaaaagtttccgcctcaagagaagcctgaaagcccacgggctgcagcacattgggaagcggcccttccagtgcccggagtgcagcaggggcttcttctggaggaacgccatgcgcgcccaccagcgcctgcacagcgagcaaaagcccttcccctgcgccgagtgcggcaagcgcttcacgcggccttccaagctcgcctgccacaccagagtccacgacaggcagaaggagtttccctgcggcgagtgcaaaaagaccttttctcagcagtcgcggctcacgcagcacctgaaggtccacaccacggaaaagccgttctcctgcgccgagtgcggccgcagtttccgccgacgcgcgcatctcacagagcacacgaggcttcacagtggcgaggagcccttccagtgtcccgagtgcgacaagagcttctcctggaaggcctccatgaagttccaccagcggatgcacagggacgagaagcccttcgcgtgcggtgagtgtgacaagacctacacgcatcagtctcagctcaccgagcacctgaggctgcacagtggagagaagccctaccagtgtcctgaatgcgagaagactttccgcctcaagggaaacctgaaaagccacctgctgcagcacagtggccaaaagccattctcttgtgtgatgtgcggcaaaagtttcactcaacagtaccggctcacagaacacattcgagtccacagcggggagaagcccttccagtgtccggagtgtgacaagagctactgcatcaggggcagcttgaaggtccacttgtataagcacagtggagagaggcccttccagtgtcccgagtgtggcaaaggcttcctccagaagagaagcctgaaggcccatctgtgccttcacagtggggagaggcctttttcttgtgatgagtgtggaaggagcttcacgtacgtgggggcgctcaagacccacattgcagtgcatgccaaagagaagccctccagcctctaggtcaggccatgcagcagtcacgcagtcggctttcaggaggtgccagcagctctgttggctcaagttgaggcaggttgaaggattcacagggtaagatcgggcacagtggctcccgcctgtaatcccattactttgggaggcccaggtgggaggatcgcttgagcccagaagtttgagaccagcctaggcaacattgcaagactccatctctacaaaaaatataaaagtcagccaggcgttgtggtgcatgcttgtggtcccagctactttgggaggttgaggcaggaggatcgcttgagcccaggaggcagaggctgcagtgagccatgctcacaccactgcactccagcctgggtgacagagcaagatcttgtctcaaaaaagaaaaaaaatcacaaaatactggctacagacacactggacaggtgtgtggtctgcagaactctatggctccttgacaaaagttccaaataatccatagacagtcaaagagacatctccctcaataatcgtcataggaaagacgtgccagttgtggaggaaacattcacactgatctgctagtccaacgatctcttcagtgtcatccaataatcccttcattaaattcagaaactacagcctgagtgaagaaatgttacagccaggaacatattcctcagtcagcttttccattaccaggccattttacttaaatctgtattaaagtcttcagttttctctcatagtggattttcattttctctcagatggtgagagggcttctgtttcttggaatgtttccatattgctaaaaataaatgtcttccactatctcatttgttaaaa

SEQ ID NO: 2021 - DNA, 3101 bp, Homo sapiens
  source 1..3101: mol_type = genomic DNA
cgccatgcagagcactgacctaggcaacaaggagagcggcaagatatggcaccgcaagccgtccccggccacgcgggacggaattatagtgaacattattcacaacacttccgattaccatccaaaagttttgcgatttttgaatgtggcttttgatggcacaggcgactgcttaattgctggggaccaccaaggaaatatttatgtttttgacttacatggaaacagtcaccaaggagctagttagctggatgagaggacatgaatcatcagtattttcgatctctgtgcatgcatcagggaaatatgccatcacaacttcttctgatacagcacaattatgggacttggatacctttcagagaaaaagaaagctgaatattcgccagtctgtgggtatacagaaggttttctttctaccattaagtaataccatcctcagctgttttaaagataattccatttttgcctgggaatgtgacacacttttttgcaaatatcaattgccagctccacctgaaagctctagtatattatacaaagtgtttgctgtaaccagagatggccgaatcctggctgctggaggcaagtcaaatcatcttcatttgtggtgcttggaagctaggcagctctttagaattatccagatgcccactaaagttcgagccattcgccatctggaatttcttcctgatagttttgatgctggttctaatcaggttcttggagtactaagtcaagatggtattatgagatttatcaatatgcagacttgtaaacttctctttgagattgggagcctcgatgaaggaattagctcatcagcaattagcccacatggacggtacattgcatctattatggaaaatggaagtctaaacatatattcagttcaggctttaacacaagaaataaataagccacctccgcctttagtgaaagttattgaagatttgcccaagaataaactgagttccagtgatcttaagatgaaagtaacatcagggagagtacagcagccagcaaaatctagggaaagcaaaatgcaaactagaatattaaaacaagacctgactggtgattttgaaagtaaaaagaatgaattaccagatggattaaacaaaaagcgtttacaaatcttattaaaaggctatggtgaatatccaacaaaatacagaatgttcatttggcgctctctgctacaactgcctgaaaatcatactgcgtttagtaccctcatagataaggggactcatgtggcatttctcaaccttcagaagaaataccccatcaaaagtaggaagctactcagagtattacagagaaccttatctgcattagctcactggtctgtcatttttagtgacacaccatatcttccactcttggcatttccatttgtaaaattattccagaacaaccaactcatctgttttgaagttattgctactctcataatcaattggtgtcaacactggtttgaatattttcctaatcctcctatcaatattcttagcatgatagaaaatgttttggcatttcatgacaaggaactgctgcaacacttcatagatcatgatataacctcccagctatatgcatggcctcttcttgaaactgtgttctcagaagtgctgacaagagaggagtggctgaaattgttcgataatatcttttccaaccatccttccttccttctgatgactgttgtagcctacaacatatgttctagaacgcctctgctcagctgtaatcttaaagatgactttgagtttttttttcaccatcggaataacctggatataaatgttgtgattagacaagtttatcatctcatggagaccacgcctactgacattcatccagacagcatgcttaatgtttttgttgcactgacaaaagggcagtatccagtatttaatcaatatccaaagtttattgtggactatcaaacacaggaacgagaaagaataaggaatgatgaattggattacttaagagagagacagttgaagatatgcaagctaaagtcgaccagcaaagagttgaagatgaagcttggtaccagaaacaggagctgcttcgtaaagctgaagaaacaagaagagaaatgctcttacaagaggaggagaaaatgatacaacaaagacagaggctagctgctgtgaaaagagagctgaaagtaaaggaaatgcacttacaagatgctgcaagaaggcgttttctgaagcttcagcaagatcaacaggaaatggaactaagaagactggatgatgaaattgggagaaaggtatatatgagagatcgagaaattgctgccacagccagagacctagaaatgagacagctggaactcgaatcacaaaagagactttatgagaagaatcttactgaaaatcaagaagctcttgcaaaagaaatgcgagcagatgcagatgcctatagacgaaaagtggatcttgaagaacacatgtttcataagctgatagaagcaggtgaaacccagagccagaaaactcagaagtggaaggaagctgaaggaaaagagttccgtttgagatcagcaaagaaagcttctgctctttcagatgcgtctagaaagtggtttttaaagcaagagataaatgcggctgtagaacatgctgaaaatccatgtcataaagaagaacccaggttccaaaatgaacaggactcaagctgtttgcctagaacctcacaattaaatgactcttctgaaatggatccctcaacacagatttctttaaatagaagagcagtagaatgggacaccacgggacagaatcttattaagaaagtgagaaatcttcgccagagactcactgcccgggctcgtcacagatgtcaaacccctcatcttttggctgcatagaatgcatgtcaccttgagacggtcgagagagagacctattttgcaatcagtgacattgatttttagattatttatttaaaattcctataaagatcagccctttgtacagaaaaatgtgtctataaaaattatgtgttatttaattctgatactttttggcttgtaaatggcttcttgaactttttacaataaaaatgttttagaaactgtt

SEQ ID NO: 2022 - DNA, 1121 bp, Homo sapiens
  source 1..1121: mol_type = genomic DNA
cccagggctgggcttggttgtcatgagagtggaggctgcggccggggctatgggcagaggtggccgggtctgcttcttccctgtcactgccgcagcagcttggggtgcaaggcggcctggggcggcggaaggggcgccccccgagttccgtctgaggaagcggcggctgccgaggaagtccacgagagccgggtcccgcacgcccctggggtccgggtgctgaggcgccgcctggccgcctccccgggccgcggcaccgctccgacccagccgccctctccaccggggccgcggcagcgccagtcggggcccttccctctaagcagcccaaacgtgcagaatgccccacaagattggatttgtagtcgtcagctcatctggacacgaagacggcttcagtgcccgggagctcatgatccacgcgccaactgtcagtgggtggcggtcacctagattttgccagtttccacaagaaattgtccttcaaatggtggagagatgtcgaataaggaaactgcagttacttgctcaccagtatatgatttcaagtaaaattgagttctacattagtgaaagcttgcctgaatattttgcaccctatcaagcagagcggtttcgaagacttggctacgtgtctctctgtgataatgaaaagacaggttgcaaagcccgggaactaaaatcagtttatgtggatgcagtaggacaatttcttaaactgatttttcaccaaaaccatgtcaacaaatacaacatatataatcaggttgctttggttgccataaatatcattggagaccctgcagatttcagtgatgaaagcaatactgcctctcgagagaagttgattgaccactaccttgggcacaacagcgaggaccctgctctagaaggaacgtacgccagcagtgtaagaaccgggggtgaatccacttttggggagctaaagggccccgctgtgccatcctcggtcaccctctctgtcctgggcacctctttgggacagtggttcccttgccacctgcctgctgtggatgacaatgaggggactccattccagaggtgcctggtctaaaggaaagaagggaagggctgccatagttgccgcagtgagaaaaaaa

SEQ ID NO: 2023 - DNA, 6424 bp, Homo sapiens
  source 1..6424: mol_type = genomic DNA
ggttgtcatgagagtggaggctgcggccggggctatgggcagaggtggccgggtctgcttcttccctgtcactgccgcagcagcttggggtgcaaggcggcctggggcggcggaaggggcgccccccgagttccgtctgaggaagcggcggctgccgaggaagtccacgagagccgggtcccgcacgcccctggggtccgggtgctgaggcgccgcctggccgcctccccgggccgcggcaccgctccgacccagccgccctctccaccggggccgcggcagcgccagtcggggcccttccctctaagcagcccaaacgtgcagaatgccccacaagattggatttgtagtcgtcagctcatctggacacgaagacggcttcagtgcccgggagctcatgatccacgcgccaactgtcagtgggtggcggtcacctagattttgccagtttccacaagaaattgtccttcaaatggtggagagatgtcgaataaggaaactgcagttacttgctcaccagtatatgatttcaagtaaaattgagttctacattagtgaaagcttgcctgaatattttgcaccctatcaagcagagcggtttcgaagacttggctacgtgtctctctgtgataatgaaaagacaggttgcaaagcccgggaactaaaatcagtttatgtggatgcagtaggacaatttcttaaactgatttttcaccaaaaccatgtcaacaaatacaacatatataatcaggttgctttggttgccataaatatcattggagaccctgcagatttcagtgatgaaagcaatactgcctctcgagagaagttgattgaccactaccttgggcacaacagcgaggaccctgctctagaaggaacgtacgccaggaaatctgactatatctctccgctagatgacttagcttttgatatgtaccaagatccagaagttgcacagatcatacgaaaattagatgaaagaaaacgggaagctgtccaaaaggaacgctatgattatgccaagaaactaaaacaagccattgctgatttgcaaaaggttggtgaacgccttgggaggtatgaggtagagaaacgctgtgccgtggagaaggaagactacgatctcgccaaggagaagaagcagcagatggagcagtatcgtgccgaggtgtacgagcagctggagctgcacagcctcctggatgccgagctgatgcgaagaccttttgatttgcccctccagcccctcgctcgttctggcagtccttgccaccaaaagccaatgccctcactaccacaactggaagaaagaggaacagaaaaccagtttgcagaacctttccttcaggaaaagccttcatcatattctctaactatttctcctcagcattctgcagtagacccgttactccctgccacagatcctcatccaaagatcaatgcagagtccctgccctacgatgagcggcctcttccagctattcgtaagcattatggggaggcagtggtggagccggaaatgagtaatgcagacatcagcgatgctcggaggggaggcatgttaggggagccagagcccttaaccgagaaggccttgagagaagccagctctgccatcgatgtgttgggagaaaccttggttgctgaggcctattgtaagacgtggtcctaccgagaggatgcactgcttgccttgtctaagaagttaatggaaatgcctgttggaaccccaaaagaagatttaaagaacacactgagagcatccgtctttctcgttagaagagccataaaggacattgtgacctccgtttttcaggcttctttgaaattgttgaaaatgatcattacacaatatattcctaaacataaactgagtaaacttgaaacagctcactgtgtggagaggaccattcccgttttgctcaccagaactggagattcttctgcccgcctccgcgtcacagctgcaaattttattcaggaaatggccttgtttaaagaagttaagtctctccaaattattccatcctacctggtgcagccattgaaagcaaactcttcagttcacctggcaatgagtcagatgggcctcctggcccggctgctgaaagacctgggcactggcagctcgggcttcaccattgacaacgtgatgaagttttcagtgagtgccctggagcatagagtgtatgaggtccgcgagacggcggttcgaattattttggacatgtacagacagcaccaggcttccatcctggagtaccttcctccagacgacagcaacacacgcaggaacattctctacaaaacaatttttgagggatttgctaaaatagatggcagagctacagatgctgagatgagggcacggagaaaagcggctacagaagaagcagaaaaacaaaagaaagaagaaataaaagctttacaagggcagctggcagcactgaaagaaattcaggctgaagttcaggaaaaagaaagtgatgctgtgaagccaaagaatcaggacattcaaggagggaaagcagcccctgctgaagctctgggaatcccggatgagcactatctagataatttgtgtattttttgtggggaaaggagtgaatccttcacagaggaaggtctggatctccactactggaagcactgtctcatgctgacaagatgtgaccactgcaaacaggtggtcgagatatccagtctgacggagcacttgctgacggaatgtgacaaaaaagacgggtttggaaagtgttaccgttgcagtgaggctgttttcaaggaagagctgcccagacacataaaacacaaggattgcaaccctgccaaaccggagaagctggcaaaccggtgtcccctgtgtcatgagaacttcagccctggagaagaggcatggaaagctcacctgatgggcccagccggctgcacgatgaacctgcgcaagacacacattctgcagaaggccccggcactgcagccagggaaaagctcagctgtggccgcatcaggccccttggggtcaaaggccggaagcaagatccccaccccgaagggcggactgagcaagagctccagcaggacgtacgccaagcgctgacgcggcgctcgggctccttggtctctgtgagggatggagcgggtctcctgattctacaccatctctccagaactctctggccttggtggccccatgctctggctgctgtccccagctccccgccgtgcacgcctcttacgcgtctgtgccgtcagctctcgtgcaaacgatatggatgcagctaaccaaagatcctgcgtgcagtgccaggacctggccgcactgtacattaagccttcagggctgtctcaggccttccttagaatcagagaaggaagcgtcctgtttggagagagccagagagcaccgccgggaggcgctcgcgcaaggccacggtcagcacaggcacggtcccgctttccttagtgcttggagcaatttccataaaacattcaccagaaaccttttgcacatcggtctctgccacacgcagtagaatttccgcagggctgtggctcggccagcagcggttccaggagagtggcggtgcgcacgggcctccagccgtgccttccccctgcaggccccgtctgctgggcctgctgcccagtgcactcagccccaggtagcagaactcacgttcccactatagcaagaaataaaggcaaaagagaacatcttttttttaatcgtagtttttttgagaattggtcccacctcagccgcaccttgctggatgcttctccagtagtgctgcccctgtgacaggcatcagctccctgctggaactgaggtagacacaggtgtgggcccttcccgtgcctttgctcagaggcgcttcactttctccacactttcgaattcctaaagacatgtggaggaagtcactgttaaatgaatttccacctgatcaccctgtgttcacagcaggcagaagcccactggtatgggcctcccgccccttccacatccatgttgtgattggatccataagtttactttcttcaaagagttgataggatgtttaaaacatcaacacattgcttaaaatgatgaaaccaaccctcaaaaaacagtctcctaaccagccatcccctcctgtgggagtgagctgggggttttgtccatagctttggttgggcctgtgtcacatccaggcagccatgtggagggagtcagggtctgtctggaagcatccaccctctcgctgccccagcctgtgctcccaggggcctaggctaccatggactgaagggcagtcccctcccacctggtgcccagggcttctgcttgcctcgctgatgttgcatgggcagacttcaaaaaggatagttagaaaggtttgggttgatggagtttgcattaatgcaattagtgtataaatatgttttaattgccaaccgtgtgaaacaacaaaatatctaaaaactaatcccgatttgaacaatgtactccctggcctggatacattaataaccataaatttgcatgaattaatctccacgtttggtaaactaatacctctggttgactgagaatactgagtaagatataagacctaccaggaacctttaagaatatgctctgctcagtgttgtttgtctgcttgtttgcgacggagtctcactgtgtcgcccgggctgcagtgcaatggcgtgatcttggctcacagtaacctccacctcctgggttcaagcaattctcctgcctcagcctccctagtagctgggattacaggtgcacaccaccatgctcggctaattttttctatttttagtagagatggggtttcaccatgttggccaggctggtctcgaactcgtgacctcataatctgcccaccttggcctcccaaagtgctgggattacaggcgtgagccaccacgcccaggttaaatgtgtttataaggagagaggaggccaggcgcggtggctcacgctgtaatcccagcactttgggaggccgaggcgggcggaccacctgaggtcaggagttcgagaccagcctggccaacatggtgaaaccccatctctactaaaaatacaaaaatgagccaggcgtggtggcctgtagtcccagctacttgagaggctgaggcaggaaaattgcttgaacccgggaggtggaggttgcattgagcccacatcatgccattgcactccagcccaggcgacagagcgagactccgtctcgaaaaaaaaaaaaagtataaggagagaaataactttaaagtttattagacaaaacagagtatagatgccaagatgtctgtaaaatgattttttctggttttaaagagatgttggccattattttctaatccatttttaaaatacagacaaaacacttctttaaacagaacaagaatgagaaaagttaaccaaggaattattcttttctcaccaatcaacacttttaagaaatatatatatatatatacacacatatacacatgccttctatatattgtaacttaaagaaaatacttataaaaagacttcatttttagtgattgacaagcaaacgggttcatttaaaacaggttcctcttttgttagttacagggggtttttttgttgtttttttgtttttgtttttgttttgcgggggtggtggggtttgagacggagtcttgctctgttgcctaggctggagtgcagtggcgcgatcttggccccctgcaacctccgcctcccgggttcgagcaattctcctgcctcagcctcccgagtagctgggattacaggcgtgtgtcaccacgcctggctaatttttttgtatttttagtagagacggggtttcaccatattggccaggctggtctcaaactcctgaccttgtgatccacccacctcggcctcccaaagtgctggaattacaggcatgagccaccgcgcccggcccaatcatgtgtttttgttgaaatgatcctaccagtgattagtggctattgagagttttacagggttatacattgttaagggaccaagaatcaagtacaaaaaattaaaaaggaactgtaaaatcccttggtcattcataaataaatatctaaattaggaatactaattaattgaattttcactcatgagtatgttctgaatatttaatatttatttctattattttcatatgttaagatattccattaaatctaacttaaaagaattgtatgtataaattggcattaggatacaaatgtaaatgtttttaatgaaattttgcaactttttaatattttaacatagttttctatttgtctttatttcaagtaccagaattacaaaatatctaagtaatatatttttgttgtcgttttagggcttaagggttaattcacccagagtatattaatataataaaaagatcactaaatgttt

SEQ ID NO: 2024 - DNA, 3244 bp, Homo sapiens
  source 1..3244: mol_type = genomic DNA
cgcggctgcatggacgcgggtccggcgcgcgggaggcgatgacggccccgccatggcccgggcgggcagctgcggcggcgccgcggcgggcgcagggcggccggagccctgggagctgtccctggaggaggtgctgaaggcctacgagcagccgctcaacgaggagcaggcgtgggccgtgtgcttccagggctgccgcgggctgcggggctcgccgggccggcgcctgcgggataccggggacctcctgctgcgcggggacggctcggtcggggcgcgggagcccgaggccgcggaacctgcaaccatggtcgtgccactagccagctcggaagcccagaccgtgcagtccctcggcttcgccatctaccgcgcgctggactgggggctggacgagagcgaggagcgcgaactcagccctcagctggagcggctcatcgacctcatggccaacaacgacagcgaggacagcggctgcggtgccgccgatgagggctacgggggtcccgaggaggaggaggaggccgagggcgtcccccgcagcgtgcgcacctttgcccaggccatgcggctgtgcgcggcgcggctgaccgacccccggggcgcacaggcgcattaccaggccgtgtgccgcgcgctcttcgtggagacgctggagctgcgggccttcctggccagggtccgggaggccaaggagatgctgcagaagcttcgggaggacgagccgcatctggagacgcctcgggcagagctggacagcctgggtcacacagactgggcccgactgtgggttcagctcatgcgggagctccgccgcggagtgaagctgaagaaggtgcaagagcaggagttcaaccccctccccaccgagttccagctcacgcccttcgagatgctgatgcaggacatccgggcccggaactacaagctgcgcaaggtcatggtggatggggacatcccgccccgggtgaagaaggacgctcacgagctcatcctggactttatccgctcacggcctccactgaagcaggtctctgagaggcggctgcgcccgttgccaccaaagcaaaggtccctgcatgagaagatcctggaggagatcaagcaggagcggaggctgcgcccggtgcggggcgagggctgggctgcccgcgggtttggctctctgccctgcatcctcaacgcctgctccggagatgccaagtccacctcctgcatcaacctgtcagtcacagatgctgggggcagcgcccagcgcccgcggccccgcgtgctgctcaaggcgcctaccttggctgaaatggaagagatgaatacatctgaggaagaagagtctccgtgtggggaggtgacgctgaaacgggaccgctccttctcagagcatgacctggcccagctccgaagtgaggtggcctctggcctgcagtcggccacccaccccccaggagggacggagccaccacggccccgagctggcagtgcgcatgtgtggaggcccggctcccgagaccagggtacctgtcccgcgagtgtctctgaccccagccaccccctactcagcaaccggggctcctcgggggacagacccgaggcctccatgacccccgatgccaaacacctgtggctggagttcagccaccccgtggagagcctggcgctgactgtggaagaggtgatggacgtgcgccgtgtgctggtgaaggccgagatggaaaagtttttgcagaacaaggagctcttcagcagtctgaagaaggggaagatttgctgctgctgccgggccaagttcccgctgttctcgtggccgcccagctgtctcttctgcaagagagccgtctgcacttcctgtagcataaagatgaagatgccttctaagaaatttggacacatccctgtctacacactgggctttgagagtcctcagagggtatcagctgccaaaaccgcgccaatccagagaagagacatctttcagtctctgcaagggccacagtggcagagcgtggaggaggcgttcccccacatctactcccacggctgtgtcctgaaggatgtctgcagtgagtgcaccagctttgtggcagacgtggtgcgttccagccgcaagagcgtggacgtcctcaacactacgccacgacgcagtcgccagacccaatccctctacatccctaacaccaggactcttgacttcaagtgacagccccaggtggccaggcctccaggaggcaccaggcaggccctgtatcaggctaggacgctctgagctgtgcatgtacatatatacatatatagatacatttataatatatacacacagtctatatatttatatacactgtttcctggccccagagctcatttgggttcaggcgcacttcaaaaccctccctgggggaggctgtttcttctcaggattccttgccagggaggaaggggagggaacagggtgggttttctcactgaagagagaaagcagaaggttctagatcctggcacagactgcatcccatgttcccatgctcttctccgtccccaggaatgcgaacggcagtttcccttccccagtggacgtctaggtggggacagggtatcttggctcccagctggaccagagtgccctgcttgcctctgctctccctttgtggggactcaggcagcagaggcatctgggaagtctctgagtaggcagggtcctcctgggaggcacccccacctgtttgaaaggtctggccaggcgtggtggttcaggcctgtaattccagcactttgggaggccgaggagggaggatcacctgaggtcaggagtttgagaccagcctggccaacatgatgaaatgttgtctctactgaaaatgcaaaaattagccaggtatagtggcaggaacctgtaatcccagctacaggggaggctgaggcaggagaatcgcttgaacccgggaggtgtaggttgcagtgagccgagattgcaccactgcactccagcctgggcgacagagcgagactctgtctcgaaaaaaaaaaaggtccgtgccaagctgctccctgcccttgccctttccctttccctggggtccaaaccacatgtgtcctgcctctcctggccctaccacattctggtgctgtcctcactcgcccctggcccagaggctcctgaagatgctgggcggtcctggcacagggaggagcagctctgtaaatctgtgcacatggccactcttggcctaataaaggaggtctcacagtc

SEQ ID NO: 2025 - DNA, 1998 bp, Homo sapiens
  source 1..1998: mol_type = genomic DNA
gcgcccaggggtcccgcgggttttcgggcgcagggtggcgcccgcggcaggcggcggccatgaacttctccgaggtattcaagctctccagcttactctgcaagttctccccggacggcaagtacctggcttcctgtgtccagtaccggttagtggtccgggatgtgaacacccttcagatccttcagctgtacacgtgcctagaccagatccagcacatcgagtggtcggcagactcgctcttcatcctgtgcgccatgtacaagcgagggctggtgcaggtctggtctttagagcagcccgaatggcactgcaaaatagacgagggctcagccgggctggtggcctcgtgctggagcccggacgggcgccacattctcaacaccacggaattccatctgcggataaccgtctggtccttgtgcacaaaatccgtgtcttacatcaaatacccgaaagcttgtctgcagggaatcaccttcaccagggacggccgctacatggcgctggcagaacggcgcgactgcaaagattacgtgagcatcttcgtctgcagtgattggcagctcctgcggcattttgatacggacacccaggatctcacagggattgagtgggccccaaacggctgtgtgctggcagtgtgggacacctgcttggagtacaagattctgctgtactcattggatggccggttgttgtccacgtacagcgcttacgagtggtccctgggcatcaagtctgtggcctggagccccagcagtcagttcctggcagttgggagctatgatggaaaggtgcgcatccttaatcacgtgacttggaaaatgatcacggagtttgggcatcctgcagccattaatgatcccaagatagtggtgtataaggaggccgagaagagcccacagctgggactgggctgcctctccttcccgccgccccgggccggggccggccctctcccgagctcagagagtaaatatgagatcgcctctgtcccagtctccttacagacactgaaacctgttaccgacagagcaaacccgaaaatcggcataggaatgctggcatttagtcctgacagctacttcctggcgacaaggaacgacaacattcccaatgccgtctgggtctgggacattcagaagctgaggctgttcgcggtgctcgagcagctgtccccagtgcgcgcatttcagtgggacccgcagcagccgcggctggccatctgcacgggaggcagcaggctctacctgtggtccccagcgggctgcatgtcggtgcaggtgcctggggaaggtaagcacatccccgaggccacggacgtggcagccttgctgtgtgcagtctggcatcacacgggctgaactgttgaagcccagctgctgtctccggcagcactccagggaaactgccctcagagtctttgcgtaaacctcaagacggacacacaggggacccgctgccctcagctttatgggctagaagcagcctctccctgacttgaggcagctctggggctccaccctggctctgcctatgtgggtcactccaggcactgtgctggcctgcaggacaagggggtgcccatcccccagaatctgggcctcccctgctgtaatcctctggccacctgtctctctctaggcgactttgcagtgctctctctgtgctggcatttaagcggagactcgatggccctcctcagcaaggatcacttctgcctctgcttcctggagacagaggcagtggtcggcacagcctgcagacagctgggcggccacacgtagcagcggtgcactaacgtgtgcagaaacagggctactctgtgtttccagtgtgggaaaaaacacagcttcaccaggaggttctccactgtggtggtctggattcagtgattgattctatttttctatagcaaagcatttttgtaaatatgtatggtataaaactgtagttttattatttaaaataaatacttgctgatttatacaacta

SEQ ID NO: 2026 - DNA, 2414 bp, Homo sapiens
  source 1..2414: mol_type = genomic DNA
gggtggtggcggtggctgcggcgacggcggtcgcgtcggcgtcagggtcggggtcggtaaggggtgcggcaatgctgcaactgcgggactcggtggactcggccggtacgagccccacggcggtgctggcggccggcgaggaggtgggggcaggcggcggcccgggcggggggcggccgggggcggggacgccgctgcgccagacactctggcctctcagcatccacgaccccacgcgccgcgcccgcgtcaaggagtacttcgtgttccggcccggcagcatcgagcaggcagtggaggagatccgcgtggtggtgcggcccgtggaggacggcgagatccagggagtgtggctgcttaccgaggtggatcactggaacaatgagaaggagcggctggtgctggtcacggagcagtccctgcttatctgtaaatacgacttcatcagtctccagtgccagcaggtggtgcggatagcgctcaacgcagtagacaccatttcctacggagaattccagtttccccctaaatcgctcaacaagcgagaaggttttgggattcgaattcagtgggacaagcaaagtcgtccttccttcataaacagatggaatccctggtctaccaacgtgccctatgccactttcacagaacacccgatggctggcgcagatgagaagacagcatctctgtgtcagttggaaagcttcaaggctctgttaatccaagctgtcaaaaaagcccaaaaagaaagccctttgccaggacaggcgaatggcgtgctgatcctggagcgccccctgctcatcgagacctacgtgggactcatgtccttcattaacaacgaggcgaaactgggctactccatgaccaggggcaaaataggcttttagccgctgcgttctgggagctcctcccccttctgggagctcctccccctccccagaaggccaagggatgtgggggctgggggactgggaggcctggcagtcttcatgctgccctgctgctgctggaaggatggggatctttcacctttagggatctcagcacaattagaatcgtaaagtgaattctatctatttaattggatattggactctgctcatataagctacagacaaaagccaaaagactctcgctgtccctgtgctgctggtatttcattctctgtaacttcagttctggtgttttccttgagtatctacttggcttctcgtggtttttcccaccccagctgccccagcacgcgggacccatagcacaccccttagcgcttgcctaggttgctgaaaacagggaggcacctggtatctcgagtgcctgcagttgcaagtatgtttacacctggtgtccaattttgtattttaaaatgtaatccatttttacttcagctcatccaaaagcagccagcagaccggttgactgagaccggtctgtggctgtgggccccttggtgacccgctgctcttttggaaatgggtgacctgaagtgacactttttccacaattaacccaagttgtgttaatacttcaggtctgtttcccagacccagaaagctttacagaaaatcattgtaagacaatttattaatttgagaaagtcaccttgacagttctttgcacacaagttttacacctctctggattcgaagtttgtattgtattcatagttaaagggaatcgggtactttgcttgttgaataatgcactttaaaacaaggaaccgtatcaggccagcatggtggctcatgcctgtaatcccagcattttgggaggctcaggcagacaaatcgctctagctcagaagttgcagagcagcctgggcaacatggtgaaacccgtctctaccaaacagacaaaaagcagccaggcgtggtggcacatctgtggtcccagctacttgagaggctgagccaggaggatcgcttgagcccaggaggcggaggttgcagtgagctgagatggcaccacttattgcactccagcccgggcgacagagcgagactccatctaccagatccttatgacgcagctgatgcctgccttggttcctaccactctggtgtagacagaggactttgtccaagtctcacactaaacatgcccgggcttcgatgtgcctggaggatttccccacagggacccacgcacctccctgtatctgcgcagcttgctcgtgtggctggaagcgctgtcgataagcttcacgcactggcttgccagttcttcagctctaggacttgtagctttaagcaaacggtgtggcatgggttgagtgtggccacctgcaggatgtgcagggctgcctcagaagctggctggggactctagcctctgtgttcataaagacattaagaagtggatggatgttgttccttttttgaagttgtcattaaagtaggtgcaacaaccaa

SEQ ID NO: 2027 - DNA, 870 bp, Homo sapiens
  source 1..870: mol_type = genomic DNA
atgtggcccttcccgagccgctctctcttcccacccccgactcaggcctggctccagacggtctcctcagaccctgaggcccagggctggggggcctggaacgagaccaaggagattctggggccagagggtggggaagggaaggaggagaaagaggaggaagaggatgcagaggaagaccaggatggggatgcaggctttctgctgtctctgctggagcaagagaacctggctgagtgcccattgcctgaccaggagctggaggccatcaagatgaaggtgtgtgccatggagcaggccgaggggacgccacggcctccaggagtgcagcaacaggccgaggaagaggagggcaccgcggccgggcagctgctgagccctgagaccgtgggctgccccctctctgggacccccgaggagaaggtggaggctgaccacagatccgtctacgtgggcaacgtggactacgggggctccgccgaggagctggaggcccacttcagccgctgtggggaggtccaccgagtcacgatcctgtgtgacaagttctctggacaccccaagggttatgcctacatagagtttgccaccaagggctccgtgcaggccgccgtggagctggaccagagcctcttccggggccgggtcatcaaggtgctgccgaaaagaaccaacttccctgggatcagctccacagaccgcgggggccttcgaggacacccaggctccaggggggcacccttcccccacagcggcctccagggcaggccccggctcagaccacaagggcagaaccggacgccggcggcactgacgccactatgggctcggccgctgccctgggtggtagtcagccacgtcatcaagtga

SEQ ID NO: 2028 - DNA, 2219 bp, Homo sapiens
  source 1..2219: mol_type = genomic DNA
cccatttcaggtgggacttgtggcataggagaggtcttgggactggtgcccagcctggggcagtcccctcccaaagcctccctctcccacacagccgtgagagcctgtgggcctagaggactcagctggcgggttgcagggaggcgcagccttttgcaatcccccagggccacaggttaccctccttctctctctagacccccagctctaccaggagatccaggagcggggcctgaacaccagccaggagtctgatgacgacatcctcgatgagtcctccagccccgagggaacccagaaggtggacgccaccattgtggtcaagagctaccggcccgcccaggtcacctggagccagctcccagaggtggtggaattgggcatcctggaccagctctccactgaggagcggaaaaggcaggaggccatgttcgagatcctcacgtcggagttctcctaccagcacagcctgagcatcctggtggaggagttcctgcagtccaaggagctgcgggcgaccgtgacccagatggagcaccaccacctcttctccaacatcctggatgtcctgggtgccagtcagaggttcttcgaggacctggagcagcggcacaaggcccaggtgctggtcgaggacatcagtgacatcctggaggagcacgctgagaagcacttccacccctacatcgcctactgctccaacgaggtctaccaacagcgcacgctgcagaagctgataagcagcaacgccgccttccgagaggccctgagagagattgagaggcggccggcgtgcgggggcctgcccatgctctccttcctgatcctccccatgcagcgggtgacccggctgcccctcctgatggatacgctctgcctcaagacccagggccactccgaaaggtacaaggctgccagccgtgcactgaaggccatcagcaagctggtgaggcagtgcaacgagggggcccacaggatggagcgcatggagcagatgtacacgctgcacacacagctggacttcagcaaggtcaagtccctcccactgatctctgcctcccggtggctgctgaagcgcggagagctgttcttagtggaagaaaccggactttttcgaaaaattgccagccggccaacgtgctaccttttcctgttcaacgatgtcctggttgtgaccaagaagaagagcgaggagagctacatggtccaggactacgcccagatgaaccacatccaggtggagaagatagagccgtctgagctccctctgcccgggggcggcaaccgtagctcctccgtgccccaccccttccaggtgaccctgcttcgcaacagcgagggccgccaggagcagctcctgctctcctcggactccgcgagtgaccgggcacggtggatcgtggcgctcacacacagtgagagacagtggcagggcctctccagcaaaggagacctgccccaggtggagatcaccaaggccttcttcgcgaagcaagcagacgaggtcacactgcagcaggcggacgtggtcctggttctgcagcaggaggatgggtggctctatggcgagaggctccgggacggagagacgggatggttccccgaggactttgcccgcttcatcaccagccgtgtggccgtggagggcaatgtccgcaggatggagcgtctgcgggtggagacggacgtgtagccctggcgaggccagccggcggcagcacagcctgtctccaatcagcaagtggtcgtgcctggctctagagagcgtggggagctggtctcaaggacccagcatggttccctggggcttcccaagagcctgtggctgtggtgccgggctccagacacttcacggaaggaagatcacatgtccccagagaggcacccccaggcaagctcgagggggccacaccgtgtcccagggagcccagcctattcccgttggctggctgggcccctcagctgctgggccccacctccccactgcacccagggggcaactccacctggactgatgggcacaggaggcaccaatagcgattattgggggcaatgcgaggtctcctcctatgcccttcctacccctgagtgggacaagaagggccctgagtgcccaggagtgccccacgttctgagaaggggccggccggagggaggggacccggcagggagatttcggttttgaggtttctaaatacattaaagttatttcttaagaa

SEQ ID NO: 2029 - DNA, 2211 bp, Homo sapiens
  source 1..2211: mol_type = genomic DNA
cgtgaggccctgtggagctgacatctattgggcacagcttcgcatgtggagccgagaggtctctggggtcccagggcagaatcgccgtgggcaacacctgccccggctgacagctgcggtttctgtgtctctcttttgtgcagaagacgctggggaggaaacgtgggcacaagggttccttcaaggacgacccccagctctaccaggagatccaggagcggggcctgaacaccagccaggagtctgatgacgacatcctcgatgagtcctccagccccgagggaacccagaaggtggacgccaccattgtggtcaagagctaccggcccgcccaggtcacctggagccagctcccagaggtggtggaattgggcatcctggaccagctctccactgaggagcggaaaaggcaggaggccatgttcgagatcctcacgtcggagttctcctaccagcacagcctgagcatcctggtggaggagttcctgcagtccaaggagctgcgggcgaccgtgacccagatggagcaccaccacctcttctccaacatcctggatgtcctgggtgccagtcagaggttcttcgaggacctggagcagcggcacaaggcccaggtgctggtcgaggacatcagtgacatcctggaggagcacgctgagaagcacttccacccctacatcgcctactgctccaacgaggtctaccaacagcgcacgctgcagaagctgataagcagcaacgccgccttccgagaggccctgagagagattgagaggcggccggcgtgcgggggcctgcccatgctctccttcctgatcctccccatgcagcgggtgacccggctgcccctcctgatggatacgctctgcctcaagacccagggccactccgaaaggtacaaggctgccagccgtgcactgaaggccatcagcaagctggtgaggcagtgcaacgagggggcccacaggatggagcgcatggagcagatgtacacgctgcacacacagctggacttcagcaaggtcaagtccctcccactgatctctgcctcccggtggctgctgaagcgcggagagctgttcttagtggaagaaaccggactttttcgaaaaattgccagccggccaacgtgctaccttttcctgttcaacgatgtcctggttgtgaccaagaagaagagcgaggagagctacatggtccaggactacgcccagatgaaccacatccaggtggagaagatagagccgtctgagctccctctgcccgggggcggcaaccgtagctcctccgtgccccaccccttccaggtgaccctgcttcgcaacagcgagggccgccaggagcagctcctgctctcctcggactccgcgagtgaccgggcacggtggatcgtggcgctcacacacagtgagagacagtggcagggcctctccagcaaaggagacctgccccaggtggagatcaccaaggccttcttcgcgaagcaagcagacgaggtcacactgcagcaggcggacgtggtcctggttctgcagcaggaggatgggtggctctatggcgagaggctccgggacggagagacgggatggttccccgaggactttgcccgcttcatcaccagccgtgtggccgtggagggcaatgtccgcaggatggagcgtctgcgggtggagacggacgtgtagccctggcgaggccagccggcggcagcacagcctgtctccaatcagcaagtggtcgtgcctggctctagagagcgtggggagctggtctcaaggacccagcatggttccctggggcttcccaagagcctgtggctgtggtgccgggctccagacacttcacggaaggaagatcacatgtccccagagaggcacccccaggcaagctcgagggggccacaccgtgtcccagggagcccagcctattcccgttggctggctgggcccctcagctgctgggccccacctccccactgcacccagggggcaactccacctggactgatgggcacaggaggcaccaatagcgattattgggggcaatgcgaggtctcctcctatgcccttcctacccctgagtgggacaagaagggccctgagtgcccaggagtgccccacgttctgagaaggggccggccggagggaggggacccggcagggagatttcggttttgaggtttctaaatacattaaagttatttcttaagaa

SEQ ID NO: 2030 - DNA, 3061 bp, Homo sapiens
  source 1..3061: mol_type = genomic DNA
gaaggcgcaggcaccgggcggcggcggctcggcgggaatcgagaggcgcgatccagtccgggcgatcacgtgggctccagccggcccaggtggggctgtgacctgtgacgcaggcggcgccgccacaggtgcccgggacgcgccccgccccctccccggccctccccgcccgggccctcggacccggagcagccccgcccgcccagcgcccacctgcggggccgcagccgccgccctccagccagaccgcgcaggaagcggaggaggcgccccgggccggaccgcgctgccgcaggagcgaagcggctgcaggacaggacaggacccggcgctggaagctgcaccgccagcgcgccgcccctccgtccctccgccccgcggcgcaggaccccacagccgcccagcatggcccagcggcactcagacagctccttggaggagaagctcctgggacaccgcttccactcggagctccggctcgatgccggggggaacccagcctccgggctcccaatggtccgtggctccccgcgtgttagagacgatgccgccttccagccccaggtcccggcacccccacagcctcggcccccggggcacgaggagccatggcccatcgtcctgagcacagagagcccggcggccctcaagctgggcacccaacagctgatccctaagagcctggctgtggccagcaaggcaaagaccccagcccgccaccagagcttcggggcggctgtacttagcagggaggccgcccggcgggaccctaagctcctcccagcccccagcttctccctggatgacatggacgtggacaaggaccccgggggcatgctgaggcggaacctgcggaaccaatcctaccgggcggccatgaagggcctggggaagccaggtggccagggagatgccatccagctaagccctaagctccaggctctggctgaggaacccagccagcctcatactcggagcccggccaaaaacaagaagacgctggggaggaaacgtgggcacaagggttccttcaaggacgacccccagctctaccaggagatccaggagcggggcctgaacaccagccaggagtctgatgacgacatcctcgatgagtcctccagccccgagggaacccagaaggtggacgccaccattgtggtcaagagctaccggcccgcccaggtcacctggagccagctcccagaggtggtggaattgggcatcctggaccagctctccactgaggagcggaaaaggcaggaggccatgttcgagatcctcacgtcggagttctcctaccagcacagcctgagcatcctggtggaggagttcctgcagtccaaggagctgcgggcgaccgtgacccagatggagcaccaccacctcttctccaacatcctggatgtcctgggtgccagtcagaggttcttcgaggacctggagcagcggcacaaggcccaggtgctggtcgaggacatcagtgacatcctggaggagcacgctgagaagcacttccacccctacatcgcctactgctccaacgaggtctaccaacagcgcacgctgcagaagctgataagcagcaacgccgccttccgagaggccctgagagagattgagaggcggccggcgtgcgggggcctgcccatgctctccttcctgatcctccccatgcagcgggtgacccggctgcccctcctgatggatacgctctgcctcaagacccagggccactccgaaaggtacaaggctgccagccgtgcactgaaggccatcagcaagctggtgaggcagtgcaacgagggggcccacaggatggagcgcatggagcagatgtacacgctgcacacacagctggacttcagcaaggtcaagtccctcccactgatctctgcctcccggtggctgctgaagcgcggagagctgttcttagtggaagaaaccggactttttcgaaaaattgccagccggccaacgtgctaccttttcctgttcaacgatgtcctggttgtgaccaagaagaagagcgaggagagctacatggtccaggactacgcccagatgaaccacatccaggtggagaagatagagccgtctgagctccctctgcccgggggcggcaaccgtagctcctccgtgccccaccccttccaggtgaccctgcttcgcaacagcgagggccgccaggagcagctcctgctctcctcggactccgcgagtgaccgggcacggtggatcgtggcgctcacacacagtgagagacagtggcagggcctctccagcaaaggagacctgccccaggtggagatcaccaaggccttcttcgcgaagcaagcagacgaggtcacactgcagcaggcggacgtggtcctggttctgcagcaggaggatgggtggctctatggcgagaggctccgggacggagagacgggatggttccccgaggactttgcccgcttcatcaccagccgtgtggccgtggagggcaatgtccgcaggatggagcgtctgcgggtggagacggacgtgtagccctggcgaggccagccggcggcagcacagcctgtctccaatcagcaagtggtcgtgcctggctctagagagcgtggggagctggtctcaaggacccagcatggttccctggggcttcccaagagcctgtggctgtggtgccgggctccagacacttcacggaaggaagatcacatgtccccagagaggcacccccaggcaagctcgagggggccacaccgtgtcccagggagcccagcctattcccgttggctggctgggcccctcagctgctgggccccacctccccactgcacccagggggcaactccacctggactgatgggcacaggaggcaccaatagcgattattgggggcaatgcgaggtctcctcctatgcccttcctacccctgagtgggacaagaagggccctgagtgcccaggagtgccccacgttctgagaaggggccggccggagggaggggacccggcagggagatttcggttttgaggtttctaaatacattaaagttatttcttaagaa

SEQ ID NO: 2031 - DNA, 1586 bp, Homo sapiens
  source 1..1586: mol_type = genomic DNA
gccctcgcgctgtcgccgccacagtctgcgacgggacccggcgtgcccatgtgtcaggtgggcgaggactacggggagccggcgcctgaggagccgcccccggcgccgcggcccagccgtgagcagaagtgtgtgaagtgcaaggaagcgcagcccgttgtggtgatacgagccggagatgccttctgcaggtgctcttggcgtggtctggggggccttcgtccagctccatggtctggcaggttcttgagggcctgagccaagattctgccaaaagactgcgctttgtggcaggagtcatctttgttgacgagggagcagcctgtggccagagcctagaggagagatcaaagaccctggccgaagtgaagcccattctgcaagcaactgggttcccatggcatgtggtggccttagaggaggtgttcagcctgccaccgtcggtgctttggtgctctgcccaggagctggtgggatccgagggggcctacaaggcggccgtggacagcttcctccagcagcagcatgtgctgggggccgggggtggtcctggcccgactcaaggggaggaacagccaccccagcccccgctggacccccagaacctggcaagaccgcctgcccctgcccagactgaggctctttcccaactgttctgctcagtgaggacactgactgccaaggaggagcttctgcagaccctgcggacccacctgatcctccacatggcccgagcccacggctactccaaggtcatgactggggacagctgcacacgcttggctatcaagctcatgaccaacctggcgctgggtcgaggggccttcctggcctgggatacgggcttctcggatgagcggcacggggacgtggtggtggtgcggcccatgcgggaccacaccctgaaggaggtcgctttctacaaccgcctgttctccgttccttctgtcttcacaccagccgtcgacaccaaggcccctgaaaaggccagcatccaccggctgatggaggccttcatcctcaggctgcagacccagttcccctccactgtcagcactgtgtacaggacaagtgagaagctggtgaagggcccccgggatggccctgctgctggcgactccggcccccgctgcctcctctgcatgtgtgccctggacgtcgacgccgctgacagtgccacggcttttggggctcagacctcctcgcgtctctcccagatgcagtcacccatccccctgactgagacccggacacccccggggccctgctgttctccaggggtgggctgggcccagcgctgtggccagggggcctgcaggagggaggacccccaagcctgcattgaggagcagctgtgctacagctgccgcgtgaacatgaaggacttgccctcactggaccccctgccgccgtacatcctggctgaggcccagctccgcacacagagggcctggggcttgcaggagatccgggactgtctgattgaggacagtgacgacgaggcgggccagagctgagcgtgaggacgtgcttgccgggacagcaggcagtggccacctggtacaccacactggagccggaaggca

SEQ ID NO: 2032 - DNA, 1814 bp, Homo sapiens
  source 1..1814: mol_type = genomic DNA
gtggagctggggtcactgcgcggtgggaccatggcctcggagaagccgctggcggcagtcacttgtacagcgccggtcaacatcgcggtcatcaagtactggggcaagcgcgatgaagagctggttctgcccatcaactcctccctgagcgtcactctgcaccaggaccagttaaaaaccaccacaacagccgtcatcagcaaggacttcaccgaggaccggatttggctgaatggccgggaggaggatgtggggcagccgcggctgcaggcctgcctgcgggagatccgctgcctggcccggaagcggaggaactcacgggatggggacccgctgccctccagcctcagctgcaaggtgcacgtggcatcggtgaacaacttccccacggctgcgggcctggcctcctcagcggcgggctatgcctgcctagcctacaccctggcccgtgtctacggcgtggagagtgacctctcagaagtggctcgccggggctcaggcagcgcctgccggagcctgtatgggggctttgtggagtggcagatgggagagcaggccgacgggaaggacagcatcgctcggcaagtggcccccgagtcacactggcctgaactccgcgtgctcatccttgtggtgagcgctgagaagaagctgacaggcagtaccgtgggcatgcgggccagtgtggagaccagccccctgcttcggttccgggccgagtccgtggtgcccgcgcatggcggagatggcccgctgcatccgggagcgagacttccccagcttcgcccagctgaccatgaaggacagcaaccagttccacgccacctgcctcgacaccttcccccatctcttacctcaatgccatctcctggcgcatcatccacctggtgcaccgcttcaacgcccaccacggggacaccaaggtggcgtacacctttgacgcgggccccaatgccgtgatcttcaccctggacgacactgtggctgagtttgtggctgctgtgtggcacggctttcccccaggctcgaatggagacacgtttctgaaggggctgcaggtgaggccggcccctctctcagctgagcttcaggctgcgctggccatggagccgacccccggtggggtcaaatacatcattgtcactcaggtggggccagggcctcaaatcctggatgacccctgcgcccacctcctgggtcctgacggcctgccgaagccagctgcctgactgcctcagcagggaccgcatgccgcttggagaaggggtggcctcgccggagctagggagcggatgtggtgggctggccggactcctgggacatgtgggtggtggcttgaccccgggcccatgggcagcttgctgtggggcagtgcagggagtcctgcggccgcccaggtgtcaggagaggtccccgccgagtgcttcagctgccctaagctgcaccagcgctttgccaagatgggatggggagggggtatgagaactggcagagcctcggtgcagcagggctgaagggctttctcaccccagctctggctatgcccagttctctgagaaaggagctcagtggggaggtggtccctccagcggaccagggaaggggtcaccgtgctgggagcagcctccttgggcctcaggaaaccaccaagtgcctcggatggtggctgcccacggcgcttctgctgagaccctgcccccggcccaggtgtctcggagggtggctgcccacggcctgggtgtggctggaatggtggcaggagtgggcaccagtgcggccccggtggccatggggaataaaccagcattgctgcc

SEQ ID NO: 2033 - DNA, 2709 bp, Homo sapiens
  source 1..2709: mol_type = genomic DNA
gggatccaggagcgaggagccgggagcggggaacagggagtcggggagccgggaaccagggctggcagcggccgccatgagcacggtggaccttgctcgcgtgggcgcgtgcatcctgaagcatgcggtgaccggggaggccgtggagctgcggagcctgtggcgggagcacgcgtgcgtggtggccgggctgcggcgcttcgggtgcgtggtgtgccgctggatcgcccaggacctcagcagccttgctgggctcctggaccaacacggcgtgcgcctggtgggcgtagggcccgaggccctgggtctgcaggagttcctggacggcgactacttcgcgggagagctctacctggatgagagcaagcagctttacaaggagctaggcttcaagcggtacaacagcctgagcatcctcccagcagctctggggaagcccgtgcgtgatgtggctgccaaggccaaggctgttggcatccaggggaacttgtctggggacctgctgcagagcggagggctgctggtggtcagcaaaggtggtgataaagtgctcctgcatttcgtccagaagtccccaggcgactacgtccccaaggagcacatcctgcaggtcctgggcatctctgcggaggtctgtgccagcgacccgcctcagtgtgacagagaggtgtgagggaggcgaaggccctggcctccgaggatctgggtggcgtctgctgccctaggtgtgctggaagtccacttggaagaactgttccggaggcgctgggtcgggatgccgaacctctcctgatccgccggcagcaacgagccattaaaactgcagttcctgaccacgcactgcttcgcaggctccgagccctgcatcctccacagcccccgccttgctcactgttgggccctcagggcgggcagggtggctgtgagtcccaggtgtcatcttcctgctctgcgactttctctggagaccttgggcctttggcctgtggggcactggggatggtaacctcactgccccgtcactcccttcaaaggcgacagacccaagcccacgtcaggagaggagcgtggggtcagctccagcagggtcggggtcagtgcctgtgtctggtgggggccactcaggagagttgggttttcagggcagagatgggcttgattccacctggtggggtgggtggaccctggagactctcaggtgatgggccagcctgccccaaggctctttactgatgtcagaatcattgtttgcacctgctgggtatggcctttggggcggccggcccgggagggtcttagtctaattaggtgtgtccagcttcttggccacctttccctggggaccctaacaggcccagagcagagccccttacctcccaggtcagactacctgctcaggccctcccctcccatgcaggccgatgacaactgcagccctctctgcactccctagtccagacctggggaccactgtgggttcctgtgggtctcccggctcccttcctgcccccaatgccacccttgcagtggccatttaaaaatgcatagcaggtgacccactgcgtccctttgcgttcagcccctcctctggctttcagttacaccaagctaaaatttcaggttcccagctgcagctctctgggtcccccggtgccccagtggggctccccgcatctgaatgtgtggtccctgggggtgggcacttgggggcatcctggtcactgctggccctagcattggaccctaggagacctgactggaactggctccctccccatcagctcccagctgtcactctctcccacccccgggcagctgttttgcccaagaccactgctacctgtttacccaccctggtccctcccagacaagcaaggcctctgatttctttgaagcatttacttagctcaagtctgaagctgtagatactggaagacaatgcaccttggagggtgggcaggacacagttgattgtctctacagagctgtgacgggggcactgagccccgcgggtgtctgtggagggggctccggtccaggtactgcactggacactgctcatccctgggtgtcaggcaggtggctgcaccctaggccaggcgcagaggcctggcaggcaggcttggcatggttggccggggcgggacgtacactgggtcgccgctagctgcaccttcgcacagatgcctccgagcagcgggtgggcgtgggccgcacagcgcggcagggccttggctaccacacgcggcatcgctccttggggtgcatgggggtgccccgggcacagtggaacgtgtctgcgaaggcggccaggttctgcagcgaccccagtaccctgtgggtgggtgggtgtgacagcaggagcattgccatcttggacaaacatggccattttaagttctccgtgattaaaaaccagcccaaaacatcagcctaatggctcatgtcagtatgagcagaaacatttcaaccatgagataaacccccatctgaccagaaacatgccaatcctgagaataacctcccctccagccagagatattccaactctgcaataaaactctccttcacacagaaacattcgcagcctgcggtaggctcccccttcctaaacccttaaatgcccttagtctgtaagagaatgtccctgaccgaaatcggccagaagcccctctcaggtttattcccaaaataaacctgtctctgttg

SEQ ID NO: 2034 - DNA, 2689 bp, Homo sapiens
  source 1..2689: mol_type = genomic DNA
gagccgggagcggggatccaggagcgaggagccgggagcggggaacagggagtcggggagccgggaaccagggctggcagcggccgccatgagcacggtggaccttgctcgcgtgggcgcgtgcatcctgaagcatgcggtgaccggggaggccgtggagctgcggagcctgtggcgggagcacgcgtgcgtggtggccgggctgcggcgcttcgggtgcgtggtgtgccgctggatcgcccaggacctcagcagccttgctgggctcctggaccaacacggcgtgcgcctggtgggcgtagggcccgaggccctgggtctgcaggagttcctggacggcgactacttcgcgggagagctctacctggatgagagcaagcagctttacaaggagctaggcttcaagcggtacaacagcctgagcatcctcccagcagctctggggaagcccgtgcgtgatgtggctgccaaggccaaggctgttggcatccaggggaacttgtctggggacctgctgcagagcggagggctgctggtggtcagcaaagaagtccccaggcgactacgtccccaaggagcacatcctgcaggtcctgggcatctctgcggaggtctgtgccagcgacccgcctcagtgtgacagagaggtgtgagggaggcgaaggccctggcctccgaggatctgggtggcgtctgctgccctaggtgtgctggaagtccacttggaagaactgttccggaggcgctgggtcgggatgccgaacctctcctgatccgccggcagcaacgagccattaaaactgcagttcctgaccacgcactgcttcgcaggctccgagccctgcatcctccacagcccccgccttgctcactgttgggccctcagggcgggcagggtggctgtgagtcccaggtgtcatcttcctgctctgcgactttctctggagaccttgggcctttggcctgtggggcactggggatggtaacctcactgccccgtcactcccttcaaaggcgacagacccaagcccacgtcaggagaggagcgtggggtcagctccagcagggtcggggtcagtgcctgtgtctggtgggggccactcaggagagttgggttttcagggcagagatgggcttgattccacctggtggggtgggtggaccctggagactctcaggtgatgggccagcctgccccaaggctctttactgatgtcagaatcattgtttgcacctgctgggtatggcctttggggcggccggcccgggagggtcttagtctaattaggtgtgtccagcttcttggccacctttccctggggaccctaacaggcccagagcagagccccttacctcccaggtcagactacctgctcaggccctcccctcccatgcaggccgatgacaactgcagccctctctgcactccctagtccagacctggggaccactgtgggttcctgtgggtctcccggctcccttcctgcccccaatgccacccttgcagtggccatttaaaaatgcatagcaggtgacccactgcgtccctttgcgttcagcccctcctctggctttcagttacaccaagctaaaatttcaggttcccagctgcagctctctgggtcccccggtgccccagtggggctccccgcatctgaatgtgtggtccctgggggtgggcacttgggggcatcctggtcactgctggccctagcattggaccctaggagacctgactggaactggctccctccccatcagctcccagctgtcactctctcccacccccgggcagctgttttgcccaagaccactgctacctgtttacccaccctggtccctcccagacaagcaaggcctctgatttctttgaagcatttacttagctcaagtctgaagctgtagatactggaagacaatgcaccttggagggtgggcaggacacagttgattgtctctacagagctgtgacgggggcactgagccccgcgggtgtctgtggagggggctccggtccaggtactgcactggacactgctcatccctgggtgtcaggcaggtggctgcaccctaggccaggcgcagaggcctggcaggcaggcttggcatggttggccggggcgggacgtacactgggtcgccgctagctgcaccttcgcacagatgcctccgagcagcgggtgggcgtgggccgcacagcgcggcagggccttggctaccacacgcggcatcgctccttggggtgcatgggggtgccccgggcacagtggaacgtgtctgcgaaggcggccaggttctgcagcgaccccagtaccctgtgggtgggtgggtgtgacagcaggagcattgccatcttggacaaacatggccattttaagttctccgtgattaaaaaccagcccaaaacatcagcctaatggctcatgtcagtatgagcagaaacatttcaaccatgagataaacccccatctgaccagaaacatgccaatcctgagaataacctcccctccagccagagatattccaactctgcaataaaactctccttcacacagaaacattcgcagcctgcggtaggctcccccttcctaaacccttaaatgcccttagtctgtaagagaatgtccctgaccgaaatcggccagaagcccctctcaggtttattcccaaaataaacctgtctctgttg

SEQ ID NO: 2035 - DNA, 5432 bp, Homo sapiens
  source 1..5432: mol_type = genomic DNA
agactgaggctggctggctggaggttgacacaggagtgctcaggggagcagcatcacaagagggcagatcgaaagcatcgtccttgctgaaaaacagatggcagaggtggaagcggtacagctgaaggaggaaggaaaccggcatttccagctccaggactacaaggccgccacaaatagctacagccaggccctgaagctgaccaaggacaaggccctgctggccacgctttatcggaaccgggcagcctgtggcctgaaaacggagagctacgtccaggcagcttcagatgcctccagagccatcgacatcaactcctcggacatcaaggctctgtatcggcgatgccaggcactggagcacctggggaagctggaccaggccttcaaagacgtgcagcgttgtgccaccctcgagccacggaaccagaacttccaggagatgctgaggagactcaacaccagcattcaggagaagctccgagtgcagttctccacagactcgagggtacagaagatgtttgagatcctcttggatgaaaacagtgaggctgataagcgggaaaaggctgccaacaatctcattgtcctaggccgtgaggaagcaggggctgagaagatcttccagaacaatggagtagccttgctactgcagcttctggacactaagaagcctgagctggtgctggctgcagtgcggaccctgtcgggcatgtgcagcggccaccaagccagagccacagtgattctgcatgcagtgcggatagaccgaatctgtagcctcatggccgtggagaatgaggagatgtctctggctgtctgcaacctgctccaagccatcattgactccttgtctggggaggacaagcgggagcatcgagggaaggaggaggccctggttctagacaccaagaaggacctgaagcagatcaccagccacctgctggacatgctagtcagcaagaaggtgtctggccagggcagggatcaggcgctgaacctgctcaataagaatgttcccaggaaggaccttgccattcatgacaactcacgtaccatctatgtggtggataatggtctgaggaagatcctgaaggttgtggggcaggttccagatctgccatcctgcctgcccctgactgacaacacccgcatgctggcctctatcctcatcaacaagctctatgatgacctgcgctgtgacccggagcgcgatcacttccgcaagatctgtgaggaatatatcacgggcaagtttgacccccaggacatggacaagaacttgaatgccatccagacagtgtcagggatcctgcagggcccctttgacctgggcaaccagctgctgggactgaaaggtgtgatggagatgatggtggcactatgtggctcagagcgcgagacggaccagctggtggccgtggaggccctcatccatgcctccacgaagctcagccgcgccaccttcatcatcaccaatggagtgtcactgctcaaacagatctacaagaccaccaaaaatgagaagatcaagatccgcacactggtgaccagtgacaagaccatcctgtactcggtggccaccaccctggtgaactgcaccaacagctacgatgtcaaggaggtcatcccagagcttgtccagctcgccaagttctccaagcagcatgtgcccgaggaacaccccaaggacaagaaggactttatagacatgcgggtgaagcggcttctgaaggcgggtgtcatctctgccctggcttgcatggtgaaagcagatagtgccatcctcactgaccagaccaaggagctgctggccagggtattcctggcactgtgtgacaacccaaaggaccgaggcaccattgtggctcaaggtggtggcaaggccctgattcccctggctttggagggcacagatgtgggcaaggtgaaggcagcccacgctctagcaaagatcgctgctgtctccaatccggacattgcttttcctggggagcgggtgtatgaggtggtgcggccccttgtaagactcttggacacacagagggatgggcttcagaactatgaggctctcctaggcctcaccaacctgtctgggcggagtgacaaactccggcagaagatctttaaggagagggccttgccagacatcgagaactacatgtttgagaatcatgatcagctgcggcaggcggccaccgagtgcatgtgcaacatggtgctccacaaggaggtacaggaaaggttcttggctgacgggaatgaccggctgaagctggtggtgctgctctgcggggaggatgatgataaggtgcagaatgcggctgcaggggctctggccatgctgacagcagcacacaagaaactgtgcctcaagatgactcaagtgacaacccagtggttggagatcctccagcggctttgcctgcacgaccagctgtctgtccaacaccggggcctggtcattgcctacaacctactggcagccgatgctgagctggccaagaagctggtggagagtgagctgctggagatcctgactgtggtgggcaaacaggagccagatgagaagaaggcagaagtggttcagacagcccgagaatgtctcatcaagtgcatggattatggtttcattaaaccagtgtcttagacagcgaccctcagggatgctgggagtggtcctgtactgtgcagagtcctgggttggttgggttctcctgaagagtcaggtcatctagggatcatagcagtgacaatgaagtctcaatataaaggaaagacttgattgttctctgagttgtgagtcttctcctttgtcctgacagagtttggatgtttcactctctctcttgcttcctgtctccttatatttgtcatgtttcagaaattcccagaataattttcacccatgattagaaataggttggatcattctttctgtacccattctgaaggccaggataataggttgaagttctttatattttggaaaatggattttgtggtaaggtaggaactaacgggtgtgtgcatataaaggttaatgctgttgtatttggatgctgatctgtgctgttttcatgacctctctcccacactatttgaatcagtctgttcagaactgtgtgtttcacctgcagtgctctgtcccagtcccatgcccattcccatcacttcactgtgatggaaatagagtttatgttcaacagtggggcatgacctctgcaatttgcttgggaaagtcttccaagcaagatggacatgatgaatacaaataagatctactcaaagtacttcaaacaaaaaataaataattcattggctcatgtatcttggccacccagggaaggtctgacattgttagttagatccagagtttcaaatgtcatcaccatggatgtgtctttttctctctctcatttcccctccccatatcttgtcttttatttattataggtttgtctcattccctggcaggctctctccctgtgataggaaagagagtccccagcagccccagggtgacatagttgttatagttcattatggaatagaagagagaagagcattctcaataacccggcaaagttcccagggatgactctgatatgtctatgtctcaggtcacatttccatctatgaaccaatcatattcagaggtggaatgctaattggccaggcctgggtcatatatacaagtctagggaagaaatgagcttcatccctgtccaattgacatggactgattaggggtattaatggaagaggtgtgccaccacaaaagaatgtaccctgggcagatcaaagaacatattctgtatgtcaggcttggccacaaaagaatgacacaagtaatatgctgtagatcagaacctctctgctaatattgcctttttagcatggttaagatagctaagatctagtactgtcactccagtatgtcccaattctacctacgtttattgaagggtcaacagttctgatctcagcattgggtaaagggtgggacattcagatttacggtccttgataaaaacaatttacaacgttccgttgtgtaataaatgtaagtgtacatatgcctgggacatcagctggaaaagggacagactatcagagagttgcactgttgcggtatgggccaaatccaacataatacccgctgtacctctagagaactaaaaccttaatttctcagatcttttctgcactaatggtctttacatacagcctacattttaactaactcttgcatgggcttgtttcacagcaggaaactatattcatcatatccttattatgatagagaatgacaacattcaaaagggtgtggtgcttctgaaaatatacacaataaatggcatgatttgacctctgtcaaattcttctttcctgctttcctcatatgtgggcttgagtgggtgtatttagctcctttaaaggaaactctttcacaggcagggccacactcttactcgttttgatctcatgaggttacatctgccagtggcgttcagggccagttagataaagttcatcttgtttggattggagagactttttttttttttttttttgagacagggtcttgctctgtaacctaggctcaagtgcagtgcagtggtgcagtcatggctcaccgcagccttggtctcctgggctcaagtgatctttctacttcagcctcctcaatagctgggactacaggcacacaccaccacccccaggtaattaaaaaatttttttttgtagagacagggtctcactatgttgcccagtctgggagaccacattctttaacatgaatattttgtaaatagtccaagaagatctagaggaaagctgaattccttcatctgatttttgccactgggctgcctcccattgtctggctaagtcttcatgggaggcctttaagaaaagctgtgacaaatacctttgtttcccactgcctaggttacataagtagttggcttttccagcctagactcttatattgttgcttgtaagagggcccttctttgcagatttcttttttttttcatctatgctttcaaataggcagatgctagcctgagatcatctctttattgaggtagtttgcccaaaaacagcaaggaacagccaatacctgccaactttctaggtttttccaaccaattctcttacagaaaatctataaatatcttagaggtatgtttcttagtttcccaacatataatgggaaaattcatcatttatattattacttttaactgaagtatgttgttatcagagaacttggtctgtgtcatattaatcctttgccatttgagaagcatacagttttaaagtttatatctccaaaaggatattttgtaaaaatttaacccctttgactcttagtcttctcatttgtgaaaggtaaataataaagaatttctgttcctagt

SEQ ID NO: 2036 - DNA, 1889 bp, Homo sapiens
  source 1..1889: mol_type = genomic DNA
cggaccttttccttctggagtttccccggcgggttcacagtccagccactgaccgcagcagcgcccttgcgtagcagccgcttgcagcgagaacactgaattgccaacgagcaggagagtctcaaggcgcaagaggaggccagggctcgacccacagagcaccctcagccatcgcgagtttccgggcgccaaagccaggagaagccgcccatcccgcagggccggtctgccagcgagacgagagttggcgagggcggaggagtgccgggaatcccgccacaccggctatagccaggcccccagcgcgggccttggagagcgcgtgaaggcgggcatccccttgacccggccgaccatccccgtgcccctgcgtccctgcgctccaacgtccgcgcggccaccatgatgcaaatctgcgacacctacaaccagaagcactcgctctttaacgccatgaatcgcttcattggcgccgtgaacaacatggaccagacggtgatggtgcccagcttgctgcgcgacgtgcccctggctgaccccgggttagacaacgatgttggcgtggaggtaggcggcagtggcggctgcctggaggagcgcacgcccccagtccccgactcgggaagcgccaatggcagctttttcgcgccctctcgggacatgtacagccactacgtgcttctcaagtccatccgcaacgacatcgagtggggggtcctgcaccagccgcctccaccggctgggagcgaggagggcagtgcctggaagtccaaggacatcctggtggacctgggccacttggagggtgcggacgccggcgaagaagacctggaacagcagttccactaccacctgcgcgggctgcacactgtgctctcgaaactcacgcgcaaagccaacatcctcactaacagatacaagcaggagatcggcttcggcaattggggccactgaggcgtggcgcccgtggctgcccagcaccttcttcgacccatctcaccctctctcattcctcaaagctttttttttttttcctggctggggggcgggaagggcagactgcaaactggggggctgcgtacgtgcaggaggcgcggtggggctgcgtggaggagggggccacgtgtgagagagaagaaaatggtggccggagatgggagggcccaaggaacctcctgggagggggcctgcattctatgttggtgggaatgggactgggctgacgccctgcattcagcctgtgcctttcctggggtttcttttctgttcttttcggaggagagggcccgagaaggggccataccagggcgcggcgctgggttgccacacttgggaaagcagcccggagctgggtgctggggaaggcggggcgcgtagcctcccgccgccctgcggttgggccggtggaggcccaggcgttgctaggattgcatcagttttcctgtttgcactatttctttttgtaacattggccctgtgtgaagtatttcgaatctcctccttgctctgaaacttcagcgattccattgtgataagcgcacaaacagcactgtctgtcggtaatcggtactactttattaatgattttctgttacactgtatagtagtcctatggcacccccaccccatccctttcgtgccactcccgtccccacccccaccccagtgtgtataagctggcatttcgccagcttgtacgtagcttgccactcagtgaaaataataacattattatgagaaagtggacttaaccgaaatggaaccaactgacattctatcgtgttgtacatagaatgatgaagggttccactgttgttgtatgtcttaaatttatttaaaactttttttaatccagatgtagactatattctaaaaaataaaaaagcaaa

SEQ ID NO: 2037 - DNA, 3897 bp, Homo sapiens
  source 1..3897: mol_type = genomic DNA
gaaggtaaaaaaaagagggaggtctgagaaatagaaatatcagaggaaggaaataaaggagggtgagagtaaattctcttttagcattcagattccacagattccacaaatcacatttctttttttaccaactaaggaaaaataacacttgacctaacatttcattgcagttagctaaaggatgctagaaaaactatgttgcagtggtttgctctaatttcttcaggaatagagaaaagtgacaaaaagatcagagaagagaagaaaggaaactatcagaaaaatacagaattggagtaggatataacatatttgggttgaaggtaaaattttatattgtaatcttaagtatcttgctacttcagtttggtccctggaacagcagcatcagaatctgccgagggcttgttaaaaaggcagaatctcaggtcccatcccagactcactgaatcagaatataaatactgacaagatgccccgggattcatatgcacagtagagctggcgaagttccattgtagcctgtgattgttttctgcaacttagtatttctgagttttcccaaggaagaaaacccaggccttagcttctggcagacttgtgtttctcctttacttactagctgcatgactcatgagcaaggaaatcaaactttatgtgcctgagtttcctcatctataaaatggagactataataatcatctcctaggcttgttttgaggatgttcaacaaatgctcctttcattcctctatttacagacctgccgcagacaattctgctagcagcctttgtgctattatctgttttctaaacttagtaattgagtgtgatctggagactaactctgaaataaataagctgattatttatttattttctcaaaacaacagaatacgatttagcaaattacttcttaagatattattttacatttctatattctcctaccctgagttgatgtgtgagcaatatgtcactttcataaagccaggtatacattatggacaggtaagtaaaaaacatattatttattctacgtttttgtccaaaaattttaaatttcaactgttgcgcgtgtgttggtaatgtaaaacaaactcagtacagtagtattcagtacagtatttaagcccctgtacttaaacatattcctcgtaccaatgaagttacatgaaaagcaaatttgtgtgagatatcgtagatggaagtaaattagtctttatgttccccacaaattgaaatgcatttcaaaaactctgtgtgtgtatgtgtgtgtgtgacagagtgtgtgtgagagagagacagagagatacgctttggttgcctccataagctggctgctatgattaataagaccaagttttctaaagaaaatgagatcataacaaaagccctctttatgactatcttttatcaggggcaaaaaggaaagagacaaaacagcatgaaatgatgagaccaagtgatgaaaattcattcacaatgattgctttcaagagtaatttctcttgggtaattcagcagcctgttactatggctctctggagtgatagctaatgtaaatgaagcctctaaaagtggattatcctgacaagaatatactcagccaataatgcaacagaaatccattcaaagcattcgggaaaaattcaaaagaataaatattctttttttttttttaaagttaatgacctacgatccatttcttccctgactaacaagcagcaagcacttaaaaatatccagccaggatgaaatagaaacccacctgacttgttaatatttttgtttggtcccagggactcagattctaagccaaattctttgaatgatcttggcaaatgtctcgaattatttttgccaacttttctttatcttggaaaaaaagtttcatgaatgggtgtcaaaattgattagttttaaaaacctttcttgcagatacgtatggcaccctaaaactgtattagaaaaaaatttcatatctccaggcctttcattgggtcaggttggcatttcgctgccctttatgtgtgtgacaagtgaaaataaggaaagaaaaaaactcaagtgaagaaaatcagaatctgcgcagcagttcctgggcgtttcagctgcttcccacatcacctgcctcatcaagccccagcatccatctccttgctcatcttacaccctgtgtgcatgacaggcccaccattcatttatcagagcaaaggctctcccactattctggttcacccccctacttagccagatatacaagaatatctgcacggatgacctgcctcacctgggagctcagaggagctcagattccattactatcgcaccaaggacagatctcccagcaagaatgacagaaaagactaactgcccccaaaatctcccttccaaaacacagttctcttaattctcccaagaaaccagaatgtgactgctcacctctctaaggacctgaaaacaactggccatttcagctatttaaatcaactttaaaaaatccaaccgccaaaatattaaaccattttggttggaatgataacataactaacctgctgacagctgcttctgctaggtgcaaaaatggaaaaaaaaatacttctaatcaggtcaaatcactctacctttgggattctaaatttactcatattctcaaagaaatatattcagtcatagtggggaaaataggattattcctttagctcgataagcaaccagaagttcttccttcaaatcttgacatttaatcaatcagaaattgatttttggaaaactgtttcctatgaagctatctctgcctgaaggatttttcttttacaatccagactatagaaggaaattcacaacctggactttcacctccattggtcagagttttactgaccaattcccacctctgccttacacctaacggaagtttatgcctgttttctcttcacataccccaacagttacaaatggttgttattattaagcatcttttattttgtggcctctgattacatggtcccctaaattttgacctaatcacaaaagattggtaaaatttcttaacatattaataatattttgtttatgtgtcaatatcttagcatgtatcaattaagacagaggtcttaacgttctctttttgaaagagaatattaggattcagagatattaagagattctcccaggatcacagttaggtaacagagctggattttagtccaggtctgtctacagctctaacgtatatacaccctttgtataacatgtcacgaattcagcataaagggatcttcagtgatctaagtcaggggtcagcaaccttttctaaaaaggaccaaatagtaatatttcaggctttgtggaccctatggtctctatcataactgttcaaatcaccatgtagtgtaaaaggagccataagcaaaatataaactaacgaatgtggctgttttatgggatttttttttaactctttatttacaaaagcaggtggcagatcagaactcacttatgggccatagttctctgacccctgacctgagaaaatcttatatttatggacaacatttagactgtgacttgccaagtaagaacaagaagctctgtcaactgaaggtcaaggctggagttctgaaagcaaagagctgtctggtgttaatgataagtgaaatagttaaagttagaagatcccagttataagaagcacaaagaataatgaccatagactcctgaacaagaatgtctggacttctggcttaggcactcttgttgtatggtccaggccaagttacctaatctctccaggcctccattttcttatcattaaatgaagataataaaagtattttcctcagagagctgtaagaataaactgagctaacccatgtcaagcacatagaatagg

SEQ ID NO: 2038 - DNA, 1495 bp, Homo sapiens
  source 1..1495: mol_type = genomic DNA
gagctgcggcggtggcacctccgggtgtggaaggctccagtgagatggagtcgcgagtcgcggacgctgggaccggcgagaccgcgcgagcagcgggcgggagtccggcagttggctgcaccactcgggggcccgtagtctcggcgcccctgggagccgcccggtggaagctcctgcggcaggttctgaagcaaaaacacctggatgattgcctgcgacatgtatctgtaagaagatttgaatcatttaatctgttttcagtaacagaaggcaaagaaagggaaactgaagaggaggttggtgcatgggtccaatatacaagcatcttctgtcctgaatacagtatctccttaaggcataatagtggatccttgaatgttgaagatgtccttaccagctttgacaatacaggaaatgtttgcatctggccatctgaagaggttttggcttactactgcctcaagcacaataatatattcagggcccttgctgtgtgtgagctagggggtggcatgacatgcttggctgggctcatggttgctatttctgcagatgtcaaagaagttctgttaactgatgggaatgaaaaggccatcagaaatgtgcaagacatcatcacaaggaatcagaaggctggtgtgtttaagacccagaaaatatcaagctgcgttttacgatgggataatgagacagatgtctctcaactggaaggacattttgacattgttatgtgtgctgactgcctgtttctggaccagtacagagccagccttgttgatgcaataaagagattactccagcccagggggaaagcgatggtatttgccccacgccgagggaatactttaaaccagttttgcaatctagctgaaaaagctggtttctgtatccaaagacatgaaaattatgatgaacacatttcaaacttccactccaagttgaaaaaggaaaacccggacatatatgaagaaaaccttcattacccgcttctgcttattttgaccaaacatggatagaagattaagcttctcaaagacgaagaaacgtatcaagtgcatagggaatatttttacaaaaacggaaatctgtaaggggtataatcgcctgcctgcgccctttgcagcatttcacgtgtgggctatggactccacctgtcctcacccacgttattccccagctgccctctccagctccctccccgcctctttttacactctgcttgttgctcgtcctgccctaaacctttgtttgtctttaaatgtgtataagctgcctgtctgtgacttgaatttgactggtgaacaaactaaatatttttccctgtaattgagacagaatttcttttgatgatacccatccctccttcattttttttttttttttggtctttgttctgttttggtggtggtagtttttaatcagtaaacccagcaaatatcatgattctttcctggttagaaaaataaataaagtgtatctttttatctccctccaa

SEQ ID NO: 2039 - DNA, 3120 bp, Homo sapiens
  source 1..3120: mol_type = genomic DNA
atggcagtgcagctggtgcccgactcagctctcggcctgctgatgatgacggagggccgccgatgtcaagtacatcttcttgatgacaggaagctggaactcctagtacagcccaagctgttggccaaggagcttcttgaccttgtggcttctcacttcaatctgaaggaaaaggagtactttggaatagcattcacagatgaaacgggacacttaaactggcttcagctagatcgaagagtattggaacatgacttccctaaaaagtcaggacccgtggttttatacttttgtgtcaggttctatatagaaagcatttcatacctgaaggataatgctaccattgagcttttctttctgaacgcgaagtcctgcatctacaaggagcttattgacgttgacagcgaagtggtgtttgaattagcttcctatattttacaggaggcaaagggagatttttctagcaatgaagttgtgaggagtgacttgaagaagctgccagcccttcccacccaagccctgaaggagcacccttccctggcctactgtgaagacagagtcattgagcactacaagaaactgaacggtcagacaagaggtcaagcaatcgtaaactacatgagcatcgtggagtctctcccaacctacggggttcactattatgcagtgaaggacaagcagggcataccatggtggctgggcctgagctacaaagggatcttccagtatgactaccatgataaagtgaagccaagaaagatattccaatggagacagttggaaaacctgtacttcagagaaaagaagttttccgtggaagttcatgacccacgcagggcttcagtgacaaggaggacgtttgggcacagcggcattgcagtgcacacgtggtatgcatgtccggcattgatcaagtccatctgggctatggccataagccaacaccagttctatctggacagaaagcagagtaagtccaaaatccatgcagcacgcagcctgagtgagatcgccatcgacctgaccgagacggggacgctgaagacctcgaagctggccaacatgggtagcaaggggaagatcatcagcggcagcagcggcagcctgctgtcttcaggttctcaggaatcagatagctcgcagtcggccaagaaggacatgctggctgccttgaagtccaggcaggaagctctggaggaaaccctgcgtcagaggctggaggaactgaagaagctgtgtctccgagaagctgagctcacgggcaagctgccagtagaatatcccctggatccaggggaggaaccacccattgttcggagaagaataggaacagccttcaaactggatgaacagaaaatcctgcccaaaggagaggaagctgagctggaacgcctggaacgagagtttgccattcagtcccagattacggaggccgcccgccgcctagccagtgaccccaacgtcagcaaaaaactgaagaaacaaaggaaaacctcgtatctgaatgcactgaagaaactgcaggagattgaaaatgcaatcaatgagaaccgcatcaagtctgggaagaaacccacccagagggcttcgctgatcatagacgatggaaacattgccagtgaagacagctccctctcagatgcccttgttcttgaggatgaagactctcaggttaccagcacaatatcccccctacattctcctcacaagggactccctcctcggccaccgtcgcacaacaggcctcctcctccccagtccctggagggactccgacagatgcactatcaccgcaacgactatgacaagtcacccatcaagcccaaaatgtggagtgagtcctctttagatgaaccctatgagaaggtcaagaagcgctcctctcacagccattccagcagccacaagcgcttccccagcacaggaagctgtgcggaagccggcggaggaagcaactccttgcagaacagccccatccgcggcctcccgcactggaactcccagtccagcatgccgtccacgccagacctgcgggtccggagtccccactacgtccattccacgaggtcggtggacatcagccccacccgactgcacagcctcgcactgcactttaggcaccggagctccagcctggagtcccagggcaagctcctgggctcggaaaacgacaccgggagccccgacttctacaccccgcggactcgtagcagcaacggctcagaccccatggacgactgctcgtcgtgcaccagccactcgagctcggagcactactacccggcgcagatgaacgccaactactccacgctggccgaggactcgccgtccaaggcgcgccagaggcagaggcagcggcagcgggcggcgggcgcactgggctcagccagctcgggcagcatgcccaacctggcggcgcgcgggggtgcggggggcgcggggggcgcggggggcggtgtgtacctgcacagccagagccagcccagctcgcagtaccgcatcaaggagtacccgctgtacatcgagggcggcgccacgcccgtggtggtgcgcagcctggagagcgaccaggagggccactacagcgtcaaggctcagttcaagacgtccaactcctacacggcgggcggcctgttcaaggagagctggcgcggcggcggcggcgacgagggcgacacgggccgcctgacgccgtcgcgatcgcagatcctgcggactccgtcgctgggccgcgagggcgcccacgacaagggcgcgggccgtgccgccgtctcagacgagctgcgccagtggtaccagcgttccaccgcctcgcacaaggagcacagccgcctgtcgcacaccagctccacctcctcggacagcggctcgcagtacagcacctcctcccagagcaccttcgtggcgcacagcagggtcaccaggatgccccagatgtgcaaggccacgtcagctgccttacctcaaagccagagaagctcgacaccgtcaagtgaaattggagccacccccccaagcagcccccaccacatcctaacctggcagactggagaagcaacagaaaactcacccattctggatgggtctgagtctccacctcaccaaagtactgatgaatag

SEQ ID NO: 2040 - DNA, 2432 bp, Homo sapiens
  source 1..2432: mol_type = genomic DNA
tgtaaccagcgtgcagttttctccacatggaaacttattggcgtctgcctcacgagacagaaccgtgagactctggattcctgataagagaggaaaattctcagaatttaaagctcatacagctccagttcgaagtgtagacttttcagctgatggccagtttctagctacagcttctgaagacaaatccataaaagtatggagcatgtatcgccagcgcttcctgtattccttgtatcgacatacacactgggtacgctgtgccaaattttcacccgatggaagactaattgtgtcatgtagtgaggataaaactattaaaatttgggataccacaaataagcaatgtgttaataacttctcagattccgttggggacctgtctttactgtttcattttcaaaaggtggagagctatttgcatcaggaggtgcagacacacaggtcttattatggaggactaactttgatgaattgcattgtaaaggtcttaccaaaagaaatctcaaaagattacattttgattcaccaccacatcttcttgatatctacccaagaacaccacatccccatgaggaaaaagttgagactgtagaaattaatccaaagcttgaggtaatcgatttgcagatctctactccccctgttatggatatcctttcttttgattctaccacaacaacagaaaccagtggtaggactctgccagacaagggtgaagaggcctgtggatatttcttgaacccttccttaatgtcaccagaatgtttgccaacaaccacgaaaaagaaaacagaagacatgagtgacctcccctgtgaaagtcaaaggagcatacctctcgctgtgactgatgctttagagcatattatggaacaactcaatgttttgacacagactgtttcaatcttggagcagcgactgactttgacagaggataagctgaaagactgccttgaaaatcagcaaaagcttttcagtgctgtccaacagaaaagctgaataaaaaattcattttcatttgttgggcagaggcccaataaatgaacaaatgtacatacactcaggaaggtagtacaagatactccatacaacacaaccatgtgctatttatcatggcatttcttaaaagggtgagcaacagaacaaaaggcagaaaaggcatacctaaggactaatttaaacacatatcaatgtgaaggactaatttaaattactatcatttatgattgcagtaataaagtgataagcattcaagcaactctgtattttccccatattattttaaatgtccattttcatttataggccaaatcctgccaggaaagtaaccagatctctggatttcactgttaagtcatttcagattgaccatattcagacagtcatggggtgaaataattcacttacctccaaaatagcatcctatatgccaataatgagttattgatctgactagttgtatgtctttctgttcaaaatagaaattatcctttcttactaatgccttgaaagaatgaacaaataaaaattcccagaccacagaatttccacagcaagaatacacttattttaattaacaatagcacagatatagcatagggcagtgggttttttagttaatttatggcgtactttgtttatccattggccaacctgaaggaaatgaaactcacctatctttctatcacagatgaatgtgctagatgaatgatttgggttgtatctgatcatggttcacaaaaattatgttagtgtgttttcagtatgctaaaaagtcagagtgatacaaaagtgatatttaaaaatatacacacatgtatgtacacatgcttcagaaatattgttgcttagggtgatttgggcagctaaatagtaagtactttttaaaatttttgcatcatcatcttcctatttaatgaattgtgatttaaaacaaaatgaaaataagccaggtattctaaaagatcctggatacaaattaagaattttgctttattttaaaccaaattgagattaaattgaagaaaagcaagcaaattaatttcagcttgattatcaacctgtatcaagaacaaaaatgggaggaggtgtccacatttatggtgtgtataggtaacatggggaaaatgctattctgtgttttggaaaagaagaaatagtgccgtcctatttatttctatatttagaaatttttctcaaagaaatttcaattgtatctatgagatgggtttctaagtatcttattgtgtgttataagtgccttttaatatcatactaagtgtgagcttctggacattttcaagagcttacaaaaactaagtggcattgtatttttataaccccattgagaagactaagtaagaaatgaaatgtcctatcaattttattttgtcatgcttcaaacaataaagacatttctgctttaaaag

SEQ ID NO: 2041 - DNA, 3271 bp, Homo sapiens
  source 1..3271: mol_type = genomic DNA
gcgtgcgcagcggttgcctgggcgaccggggaagcgttgggctgtaaagactagggcgccagcggctggcgaagaaggaaagagggtactctctggctgggctggggccgtagcgacgtccgccgcgaacctgggccccccaaagctgcggggcgttcggtgtcgccgaagtaaacatgcaccctgagccctcggagcctgcgacaggtggtgcagcagagctggattgcgcgcaggagcccggcgtggaggagtctgcgggtgaccacgggagcgcaggccgagggggctgcaaggaagaaattaatgatcctaaggaaatatgtgtgggttcttctgacacatcctaccacagccagcagaaacagagtggtgataatgggtcaggtggtcacttcgcacacccaagagaagacagggaagatcggggccccagaatgactaaaagttccctgcaaaaactctgcaagcagcacaagctttatattaccccagcattgaatgatacgctgtatttacactttaaaggttttgatcgcattgagaacctggaagagtacacagggctgcgctgtctctggctgcagagcaatggaatacagaaaatcgaaaacctggaggcccaaactgagttgcgttgcctcttcttgcaaatgaacttgctccgtaaaattgagaacctggaacctctgcagaaactggatgctcttaacctcagcaacaattacatcaagaccattgaaaacctctcctgcctcccagtcctgaacacattgcagatggcccacaatcacctggagaccgtggaggacattcagcatctacaagagtgtttgaggctttgtgtccttgacctttcgcacaacaagctgagtgacccggagatcctgagcattctggaaagcatgcccgatttgcgtgtactgaatttgatgggaaacccggttatcagacagattcctaattacagaaggacagtcactgtacgactaaagcacttaacatacctggatgatagaccagtgtttccaaaggacagagcttgtgcggaggcctgggctaggggagggtacgcagctgaaaaggaggagagacagcagtgggagagcagggagcggaagaagatcacagacagcattgaagccttggccatgatcaagcagcgggcagaggagaggaaaagacagagagagagtcaagagagaggggagatgacatcttcagatgatggtgagaatgtgcccgccagtgcggaaggcaaggaggagcctcccggggacagagaaacaaggcagaagatggagctatttgttaaggaaagctttgaggccaaggacgagctctgcccggaaaagccaagtggagaggagccgcctgtggaggctaaaagagaggatggaggtccagagccagaggggaccctcccagctgagaccctgctactgtcgtcacctgtggaggttaaaggagaggacggagatggagagccagaggggaccctcccagctgaggccccaccacccccgccacctgtggaggttaaaggagaggatggagatcaagagccagaggggaccctcccagctgagaccctgctactgtcaccgcctgtgaaggttaaaggagaggatggagatcgagagccagaggggaccctcccagctgaggccccaccaccaccgcccctgggagctgccagggaagaaccgactccccaggctgtggccactgagggtgtattcgttacagaacttgatggaacgagaacggaagatttagaaaccattagactggagacaaaggagacattctgcattgatgacctacctgacttggaagatgatgatgaaacaggcaaatctctggaagaccagaatatgtgctttccgaagattgaggtcatctcgagcttgagtgatgacagtgaccctgaactggactacacgtcactccctgtgctggaaaacctccccacagacactctgtcaaatatatttgcagtctctaaagacacctcaaaggcggctcgggtgcccttcacagacatctttaaaaaagaagctaagagggacttggaaatccgaaaacaagacaccaagtccccaagacccctgatccaggagctcagcgacgaggacccctctggccagctactgatgccccccacctgccaaagagatgctgcaccactcacttccagtggagacagggacagcgacttccttgcagcctcttctccggtgccgactgagagcgccgccacacccccagagacgtgtgtcggagttgcccagcccagccaagctctgcccacgtgggacctcactgcattcccagcaccgaaagcatcatagttttccccagttatatgtagcataaatggtttaatcataaatgtctcccttaggcatgataaacattttaacacccacgcgagtcagtgtatgattgggctagctcctgtttgtgtgagtcacatgcaattcctttcaccagccaacctgaaaaaagacctttctcttactatgtcatcagaaaccagacagacccgggtccctgcaaaatctcaagtgagcattttccccacaggaaaacagaatcttccactgcagctagagaaactccgaggaagagggacttgatgctttagacatcaaaatgagaaggggagggaggaaagaaaggggggagtctgtgaggcacaacagagaattcccccaaactgacatgaccgtgaccctctgctcagagggcactatcgacagcccacaggtgccagacccatgtcccaagggagaaggaacatcagccatcatctctctgcatgagctcagtgtcaggtagtagctgtggcgggacgctgtccagcctaaaaaacgtgaccattccaattcatcttcagctgccaagtgtatttagtccctgaacctggatccaaggcatctccctgtaggaaacatcagaccggggcagagattgacaaagcaacccacaacagcagctgccaacggccgctgtgcccacctcatcagcagctctgcaggggcctcactccaccctcaccaaacacgaggagccagcactcctggcccccattccactggacaggaaggcgtgagaactgagggacctgcctgaggcccccacagctgaggcgcagcggagccctgcctcccagcacagactaaaatcccagcaacacaggcccaccggcacctccagcctgccttgcgggatgatcttcaggcgaatatacaaaatacaaaagaaa

SEQ ID NO: 2042 - DNA, 1253 bp, Homo sapiens
  source 1..1253: mol_type = genomic DNA
ggggaattaatggaagtgaaggtgatggagctgaaattgcagaaaaatttgttttcttcattggcagtaaaaatgggggaaagactactattattctaaggtgtcttgacagagatgaaccaccaaaaccaaccttagctttggaatatacatatggaagaagagcaaaagggcacaacacaccaaaagatatcgctcacttttgggaactcggtggaggaacctctttattggacttaatcagcatacccatcacaggtgacaccttacggacgttttctcttgttctcgttctggatctttcaaaacctaatgatctctggcccaccatggaaaatctcttgcaagccacaaaaagccatgtagacaaagtgataatgaaactgggaaagacaaatgctaaagcagtttctgaaatgagacagaagatctggaataatatgccgaaggatcatcctgatcatgaattaattgacccatttccggtacctctggtcataattggaagtaaatatgatgtttttcaggattttgagtctgagaagagaaaggtaatatgcaagacacttcgatttgttgcacattattatggagcatcattaatgtttaccagtaaatcagaagctctattactaaaaatacgtggagttatcaaccagttggcatttggcattgacaaaagcaaatcaatatgtgtggatcagaataaaccgctgtttatcacagcaggattggattctttcggtcaaataggatctcctcctgttcctgaaaatgacattggaaagcttcatgcccactcacctatggagttgtggaaaaaagtgtatgaaaagctctttccaccaaagagtattaacacgctgaaagatatcaaggaccctgcgagagatcctcagtatgctgaaaatgaagtcgatgagatgagaattcagaaggatctggtattatcctaaacatttacttaatttcatctgaaattttaacacaaaacctggggtgccttgggaattccttacatttttctctatgtatttacttagagtatcttctttactattaaaattatttaagtagtacatctatttaaataacacactaatagtatactgtagaaaaaataaaaatttgatatgaataaagaaaaatttttaaatcacctgtcatcccaccacccagacatgacttagtgttcacataaacctttttgattttccagttttcattatattaaagatgagtggtgattctta

SEQ ID NO: 2043 - DNA, 4019 bp, Homo sapiens
  source 1..4019: mol_type = genomic DNA
cggacgcgctggaggccggtgggcggtcgccgtagtcgccctcccaccacctcgctcaggtttctccggcctggggcaagaggcctgtggcccgcgcgggaacgcactgtccaccctcagacctgggactgggccggcgcgcggacgctaccaagaggctgcggctcccgcccccgcggccggacgtggcgcctcccctgaggccgcggccggagcctggaggtggggtcggagtcagagcccggggctctgatgtcaccgcgcggctgcgacggcccaggagcgcgtctcggcgggagcctcagagcctcactttgtcgccaggctggagtgcagtggcgcgatctcggctcactacaacttccgcctcccgggttcaagcgattcttctgcctcagcctcccgagtagctgggactacaggcgtgtgccaccacgcccagctaatttttgggaaagatcacatggagaagccaacagaacggccaggaagcagcctgggtggaacagggttggggaggaaaggaacatgggtacattctcagcgttccaggaggtctcagggtaaaggctgcttgtgtgggcaaggggagcctggcagggaatgagctggtcccaattccttcccctgagctgggccctcaaccttcagaggtgctccctgggactggtcctacttcctctgccacctctgatcccaaggtgactctgccaaaatctgggggatgccagcgcttgtgacggtgtgaccagggaggggaagtgacccacgcagccacccagcctcagcactcatctgcgcagccatggaggccctgggacctgggggcgaccgcgcctccccggcctcgtccactagcagcctggacctgtggcatctgtccatgcgcgcggactcggcctacagctctttctccgcagcctccggcggccccgagccgcgcacgcagtcgccggggacagacctccttccttacctagactgggactacgtgcgtgtggtttggggcggcccgggccccgccccgcccgacgctgccctttgcacatccccgcggccccggcccgcggttgcagcccgcagtgggccgcagccaacagaggtcccggggaccccgggaccactgaacaggcaggccaccccgctgctgtacgcgctggcggccgaggcggaggccgcggcgcaggctgccgagccgcccagcccgccggcctcgagggccgcctaccgccagcggcttcagggcgcgcagcggcgagtgctccgggagacgtcgttccagcgcaaggagctccgcatgagcctgcccgcccgtctgcggcccactgtcccagcgcggcccccggcgactcacccgcgctccgcctcgctcagccacccgggcggggagggggagccggcgcgctcccgggctcccgcgccaggaactgccggccggggtcccctcgccaaccagcagcggaagtggtgcttctcagagccaggaaagctggatcgtgtgggtcggggcggtgggccggcgcgggaatgcctgggtgaggcctgctccagctctggcctccctgggcccgagcccttggagttccagcatccggcgctggctaagtttgaagatcacgaggtcggatggctgcccgagacgcaaccccaaggctccatgaacctggactccgggtccttgaagctcggtgatgccttcaggcccgccagtcggagtcggagcgcttcaggcgaagtcttgggttcctggggaggatcaggagggaccatacccattgtccaggctgttccccaaggagcagaaacccccagaccattgtttcagaccaaactttccaggttcttgcctcagaaagaggctgcggtgatgtatcctgcagagttaccccagagcagccctgctgacagtgaacagagggtctcagagacctgcattgtgcctgcctggctcccctcccttcctgatgaagtgttcctagaagaggccccactggtcagaatgagatcaccaccagacccccatgcctcccaggggcccccagccagtgtccatgcctctgaccagccgtatggaactggcttaggccaaagaactggccaggttacagtccccacagagtacccgctccatgagtgtccaggaactgcaggggcagatgactgctggcagggggtgaatggttctgtaggtatttccaggcccacaagccacacccccactgggactgcaaatgataacatcccaactattgaccccactggactgaccaccaatccccccacagctgcagagagtgacctcctcaaacctgtcccagctgatgccttgggactttcaggcaatgatactccaggtccctctcacaatactgccctagccaggggcactggccagcctggttccaggcccacatggcctagtcagtgcctcgaggagctggttcaggagctggccagattagatccctctctatgtgaccctcttgcttcccagcccagcccagagccacccctgggcctgctggatggactgattcctttagcagaggtccgggctgcaatgcggcctgcctgtggggaggctggagaggaggctgccagtacttttgagccagggtcctatcagttcagcttcacccagctcctgccggctcctcgggaggagacaaggcttgaaaaccctgccacccaccctgtgcttgaccagccatgtgggcaggggctccctgcaccaaacaacagcatccagggcaagaaagtggagctggccgcccgcctccaaaagatgcttcaggaccttcacacggagcaggagcggctgcagggggaggcacaagcgtgggccaggcgccaagcggctctggaggctgcagtgcgccaggcctgtgcccctcaggagctggagcggttcagccggttcatggccgacctagagcgcgtgcttggccttctgctgctgctgggcagtcgcctggcgcgcgtgcgccgcgccctggcccgggcggcctcagacagcgaccctgatgagcaggcctccctgctgcagcgactccggctcctgcagcggcaggaggaggacgccaaggagctgaaggagcacgtagcgcggcgcgagcgggccgtgcgggaggtgctggtgcgagcactaccggtggaggagctgcgcgtctattgcgccctgctggcgggcaaggccgccgtcctggcccagcagcgcaacctggacgagcgcatccgcctccttcaggaccaactggacgccatcagggacgaccttggccatcatgccccgtctcccagcccggcgcggcccccagggacctgtcctccagttcagccgcccttccctcttctccttacatagttataggtggagagggtggggtgcaccgcccctatctctcacccacgtaagtggggtgatgctgatttagtctctgcttttcccttgagggattggggaggacccagtccaggcctttctaagatactcctccagccgggcgcggtggctcacgcctgtaatcccagcactttgggaggccgaggcgggcggatcacaaggtcaggagatcgagaccatcctggctaacacggtgaaaccccgtctctactaaaaatataaaaaattagccgggcgtggtggcgggtgcctgtattgccagctactcggaaggctgaggcaggagaatggcgtgaacctgggaggtggagcttgcagtgagcggacatcgcgccactgcactccagcctgggcgacagagcaagactccgtctcaaaaaaaaaaaaaaaaaaaaaaaaaaaaaagatacttctccaaagtgttctcatgtggcctcacccaggtcttgtgtattatttggtaattaatttatggatcttaaaaactgcagtattcccccattttgtgatgagagtgtggggctggcaggggttggttggagggaggagagaagacagaggagcacttaaggtgcaaagcagcctattttttcttcaataaaaattgttaagagaa

SEQ ID NO: 2044 - DNA, 2134 bp, Homo sapiens
  source 1..2134: mol_type = genomic DNA
gtcccgcgggcgcggagaaggcgggtgacggtgtgacccgaactgcctcttttctaaagaggactccaaaggaaggactggtcatctctttcatatctcaaaaccatggctcagggatcagtgtctttcaatgatgtgactgtggacttcactcaggaggagtggcagcacctggatcatgctcagaagactctatatatggatgtgatgttggaaaactattgccacctcatctctgtggggtgtcacatgaccaaacctgatgtgatcctcaagttggaacgaggagaagagccatggacatcatttgcaggtcatacctgcttggaagaaaactggaaagctgaagactttttagtgaaattcaaggaacaccaagagaagtattctagatcagttgtaagcatcaaccacaaaaaactggtgaaggagaagagtaaaatatatgaaaagacatttactctaggcaaaaaccctgtgaattcaaaaaatctacctcctgaatatgatactcatggaaggattttgaaaaatgtttcagaattaatcatcagtaatctaaatcctgcaagaaagagacttagtgagtataatggatatgggaaatcactcctgagtactaaacaagagactactcatcctgaagtcaaatcccataatcaaagtgccagagctttcagtcataatgaagttcttatgcagtatcagaaaacggaaactccagcacagtcatttggatataatgactgtgagaaatcattccttcaaaggggaggcctgattacacatagtagaccttacaaaggagaaaacccatctgtatataataaaaaaagaagagcaaccaatattgaaaaaaaacatacatgcaatgaatgtgggaaatctttctgcaggaaatcagtattgattctgcatcagggaattcactcagaagaaaaaccctatcaatgtcatcaatgtggaaatgcatttagaaggaaatcatatctcattgatcatcagagaactcacacaggagagaaaccatatgagtgtaatgactgtgggaagtccttccgccagaagacaacactctctctacatcagagaatccatacaggtgagaaaccctacatttgtaaagaatgtgggaagtcctttcaccagaaggcaaatcttactgtacatcagagaactcatacaggggaaaagccctatatttgtaatgaatgtgggaaatccttctcccagaagacaacccttgctcttcatgagaaaactcataatgaggagaaaccctatatttgtagtgaatgtggaaagtccttccgccagaagacaacccttgtagcacatcagagaacacatacaggggagaaatcttatgaatgtcctcactgtgggaaggcctttagaatgaagtcatacctcattgatcatcaccgaactcacacaggagagaaaccatatgaatgtaatgaatgtggtaaatcattcagtcaaaagacaaatctcaatctacatcagagaattcatacaggggagaaaccctatgtttgtaatgaatgtgggaagtcctttcgccagaaagcaaccctcactgtacatcagaaaatacataccggccagaaatcctatgaatgtcctcagtgtgggaaagcctttagcaggaagtcatatctcattcatcatcaaagaactcatacgggagagaaaccatataaatgtagtgaatgtggaaagtgcttccgccagaagacaaatcttattgtacatcagagaactcacacaggtgagaaaccctatgtttgtaatgagtgtggtaagtctttcagttataagagaaacctcattgtccatcaaagaactcacaagggagaaaacattgaaatgcaataaatgatgtggtttcttatatgaattctttacaagctgttgtaaacatttagttttaaaaagaaaagcatgctgaaacatgttaatgtaattttaaatcacaagtctaataattattaaagtaccatacggaataactgtctactgtttactagcatataaaataagtatgatcattattattgaactctatcagctatgaagctaaattttaaagtcaactgctcttcctactgactcaaatagtttatttttt

SEQ ID NO: 2045 - DNA, 3230 bp, Homo sapiens
  source 1..3230: mol_type = genomic DNA
acttccggtgcttgccctgcccatccccgtggcgggggcgtggccatggcgggggcgctccggcgggggcgggccctgggctcccgcccttcgggtcccacagtttccagccgccgctctcctcagtgcccggtggcccaggagggcctgggagcccgaagccgtccccgagtcgctcctaggtcactggcgcgatgcgggccgtcctctcggctgatgggttggaagcccagcgaggctagaggccagtcccaaagtttccaggcatcagggctgcagcccaggagcctcaaggcggcccggcgggcgactggacggccggacaggtcccgagcagcccggcccaccatggacccctctgcccacaggtcccgagcagccccgcccaacatggacccagacccccaggcgggcgtgcaggtgggcatgcgggtggtgcgcggcgtggactggaagtggggccagcaggacggcggcgagggcggcgtgggcacggtggtggagcttggccgccacggcagcccctcgacacccgaccgcacagtggtcgtgcagtgggaccagggcacgcgcaccaactaccgcgccggctaccagggcgcgcacgacctgctgctgtacgacaacgcccagatcggcgtccggcaccccaacatcatctgtgactgctgcaagaagcacgggctgcgggggatgcgctggaagtgccgtgtgtgcctggactacgacctctgcacgcagtgctacatgcacaacaagcatgagctcgcccacgccttcgaccgctacgagaccgctcactcgcgccctgtcacactgagtccccgccagggcctcccgaggatcccactaaggggcatcttccagggagcgaaggtggtgcgaggccccgactgggagtggggctcacaggatggaggggaagggaaaccgggccgtgtggtggacatccgtggctgggatgtggagacaggccggagtgtggccagcgtgacgtgggctgatggtaccaccaatgtgtaccgtgtgggccacaagggcaaggtggacctcaagtgtgtgggcgaggcagcgggcggcttctactacaaggaccacctcccaaggctcggcaagccggcggagctgcagcgcagggtgagtgctgacagccagcccttccagcacggggacaaggtcaagtgtctgctggacactgatgtcctgcgggagatgcaggaaggccacggcggctggaaccccaggatggcggagcaccactccttctgggtgggcgacgtggtccgggtcatcggcgaccttgacacagtgaagcggctgcaggctgggcatggcgagtggacggacgacatggcccctgccctgggccgcgtcgggaaggtggtgaaagtgtttggagacgggaacctgcgtgtagcagtcgctggtcagcggtggaccttcagcccctcctgcctggtggcctaccggcccgaggaggatgccaacctggacgtggccgagcgcgcccgggagaacaaaagctcactgagcgtggccctggacaagcttcgggcccagaagagtgacccagagcacccgggaaggctggtggtggaggtggcgctgggtaacgcagcccgggctctggacctgctgcggaggcgcccagagcaggtggacaccaagaaccaaggcaggaccgctctgcaagtggctgcctacctgggccaggtggagttgatacggctgctgctacaagccagggcgggcgtggacctgccggacgacgagggcaacacggcactgcactacgcggccctggggaaccagcccgaggccaccagggtgctcctgagtgctgggtgccgggcggacgccatcaacagcacccagagcacagcactgcacgtggccgtgcagaggggcttcctggaggtggtgcgggccctgtgtgagcgcggctgtgacgtcaacctgcccgacgcccactcggacacgcccctgcactccgccatctcggcgggcactggagccagcggcattgtcgaggtcctcacggaggtgccaaacatcgatgttaccgccaccaacagccagggtttcaccctgctgcaccatgcctccctcaagggtcacgcgctagctgtgagaaagattctggctcgggcgcggcagctggtggacgccaagaaggaggacggcttcacggcgctgcatctggctgccctcaacaaccaccgcgaggtggcccagatcctcatccgggagggccgctgtgacgtgaacgtgcgcaaccggaagctgcagtccccgctgcatctcgccgtgcaacaggcccacgtggggctggtgccgctactggtggacgctgggtgcagtgtcaacgccgaggacgaggagggggacacagccctgcacgtggcgctgcagcgtcatcagctgctgcccctggtggctgatggggccgggggggacccagggcccttgcagctgctgtccaggctacaggcctcgggcctccccggcagcgcggagctgacggtgggcgcggcggtcgcctgcttcctggcgctggagggcgccgacgtgagctacaccaaccaccgcggtcggagcccgctggacctggccgccgagggtcgcgtgctcaaggcccttcagggctgcgcccagcgcttccgggagcggcaggcgggcgggggcgcggccccgggccccaggcaaacgctcgggacccccaacaccgtgacgaacctgcacgtgggcgccgcgccggggcccgaggccgctgagtgcctggtgtgctccgagctggcgctgctggtgctgttctcgccgtgccagcaccgcaccgtgtgtgaggagtgcgcgcgcaggatgaagaagtgcatcaggtgccaggtggtcgtcagcaagaaactgcgcccagacggctctgaggtggcgagcgccgcccccgcccccggcccgccgcgccagctggtggaggagctgcagagccgctaccggcagatggaggaacgcatcacctgccccatctgcatcgacagccacatccgcctcgtgttccagtgcggccacggcgcatgcgccccctgcggctccgcgctcagcgcctgccccatctgccgccagcccatccgcgaccgcatccagatcttcgtgtgagccgcgccgtccgccgcgcccgagctgccttcgcgtgcccccgccctgtgttttataaaaagaaagattctcggacgttg

SEQ ID NO: 2046 - DNA, 2890 bp, Homo sapiens
  source 1..2890: mol_type = genomic DNA
gctggggtcgtcgtccgggccgggtgggctgcggcgcgcggcaggcgctctggcctggcctggccgccgctgagcagtcggggccggtgggtggcctcgaacgccgggacagaccgacagacggactggccggcggtcccgcgcccccgagcggagcgggcgggacggaaacgtccgggcaagttggggtcggcagggttggaagcccagcgaggctagaggccagtcccaaagtttccaggcatcagggctgcagcccaggagcctcaaggcggcccggcgggcgactggacggccggacaggtcccgagcagccccgcccaacatggacccagacccccaggcgggcgtgcaggtgggcatgcgggtggtgcgcggcgtggactggaagtggggccagcaggacggcggcgagggcggcgtgggcacggtggtggagcttggccgccacggcagcccctcgacacccgaccgcacagtggtcgtgcagtgggaccagggcacgcgcaccaactaccgcgccggctaccagggcgcgcacgacctgctgctgtacgacaacgcccagatcggcgtccggcaccccaacatcatctgtgactgctgcaagaagcacgggctgcgggggatgcgctggaagtgccgtgtgtgcctggactacgacctctgcacgcagtgctacatgcacaacaagcatgagctcgcccacgccttcgaccgctacgagaccgctcactcgcgccctgtcacactgagtccccgccagggcctcccgaggatcccactaaggggcatcttccagggagcgaaggtggtgcgaggccccgactgggagtggggctcacaggatggcaagccggcggagctgcagcgcagggtgagtgctgacagccagcccttccagcacggggacaaggtcaagtgtctgctggacactgatgtcctgcgggagatgcaggaaggccacggcggctggaaccccaggatggcggagtttatcggacagacgggcaccgtgcatcgtatcacggaccgcggggacgtgcgcgtgcagttcaaccacgagacgcgctggaccttccaccccggggcgctcaccaagcaccactccttctgggtgggcgacgtggtccgggtcatcggcgaccttgacacagtgaagcggctgcaggctgggcatggcgagtggacggacgacatggcccctgccctgggccgcgtcgggaaggtggtgaaagtgtttggagacgggaacctgcgtgtagcagtcgctggtcagcggtggaccttcagcccctcctgcctggtggcctaccggcccgaggaggatgccaacctggacgtggccgagcgcgcccgggagaacaaaagctcactgagcgtggccctggacaagcttcgggcccagaagagtgacccagagcacccgggaaggctggtggtggaggtggcgctgggtaacgcagcccgggctctggacctgctgcggaggcgcccagagcaggtggacaccaagaaccaaggcaggaccgctctgcaagtggctgcctacctgggccaggtggagttgatacggctgctgctacaagccagggcgggcgtggacctgccggacgacgagggcaacacggcactgcactacgcggccctggggaaccagcccgaggccaccagggtgctcctgagtgctgggtgccgggcggacgccatcaacagcacccagagcacagcactgcacgtggccgtgcagaggggcttcctggaggtggtgcgggccctgtgtgagcgcggctgtgacgtcaacctgcccgacgcccactcggacacgcccctgcactccgccatctcggcgggcactggagccagcggcattgtcgaggtcctcacggaggtgccaaacatcgatgttaccgccaccaacagccagggtttcaccctgctgcaccatgcctccctcaagggtcacgcgctagctgtgagaaagattctggctcgggcgcggcagctggtggacgccaagaaggaggacggcttcacggcgctgcatctggctgccctcaacaaccaccgcgaggtggcccagatcctcatccgggagggccgctgtgacgtgaacgtgcgcaaccggaagctgcagtccccgctgcatctcgccgtgcaacaggcccacgtggggctggtgccgctactggtggacgctgggtgcagtgtcaacgccgaggacgaggagggggacacagccctgcacgtggcgctgcagcgtcatcagctgctgcccctggtggctgatggggccgggggggacccagggcccttgcagctgctgtccaggctacaggcctcgggcctccccggcagcgcggagctgacggtgggcgcggcggtcgcctgcttcctggcgctggagggcgccgacgtgagctacaccaaccaccgcggtcggagcccgctggacctggccgccgagggtcgcgtgctcaaggcccttcagggctgcgcccagcgcttccgagtgcgcgcgcaggatgaagaagtgcatcaggtgccaggtggtcgtcagcaagaaactgcgcccagacggctctgaggtggcgagcgccgcccccgcccccggcccgccgcgccagctggtggaggagctgcagagccgctaccggcagatggaggaacgcatcacctgccccatctgcatcgacagccacatccgcctcgtgttccagtgcggccacggcgcatgcgccccctgcggctccgcgctcagcgcctgccccatctgccgccagcccatccgcgaccgcatccagatcttcgtgtgagccgcgccgtccgccgcgcccgagctgccttcgcgtgcccccgccctgtgttttataaaaagaaagattctcgg

SEQ ID NO: 2047 - DNA, 1444 bp, Homo sapiens
  source 1..1444: mol_type = genomic DNA
gcgggcaggcgactcctgtcccgggtggaggcggcggagccggagccgggggagggggcagcggctgtctcacggaccacggcggcgcccgcagctcctcaccgcagcacccccactgcaggcccgaggagctttccggagcttcccacactcctggggagaagacttcttagccagcttgatgtttaaaattcagctggagcccttaaaacttcgagcgtggacgctgaatgggtttgtaaagtttcgaaacaaggagaccagtgctggtccagtggctgtgatgggaaaagattattacaagattcttgggatcccatcgggggccaacgaggatgagatcaagaaagcctaccggaagatggccttgaagtaccacccagacaagaataaagaacccaacgctgaggagaagtttaaggagattgcagaggcctatgatgtgctaagtgaccccaagaaacggggcctgtatgaccagtatggggaggaaggcctgaagaccggcggtggcacatcaggtggctccagtggctcctttcactacacctttcatggggacccccatgccacctttgcctccttctttggtggctccaaccccttcgatatcttctttgccagcagccgctccactcggcccttcagtggctttgacccagatgacatggatgtggatgaagatgaggacccatttggcgctttcggccgttttggcttcaatgggctgagtaggggtccaaggcgagccccagaaccactgtaccctcggcgcaaggtgcaggaccccccagtggtgcacgagctgcgggtgtccctggaggagatctaccatggctccaccaagcgcatgaagatcacaaggcgtcgcctcaaccctgatgggcgaactgtgcgcaccgaggacaagatcctgcacatagtcatcaagcgtggctggaaggaaggcaccaagatcaccttccccaaagaaggcgacgccacacctgacaacatccctgctgacatcgtctttgtgctcaaagacaagccccatgcacacttccgccgagatggcaccaacgtgctctacagtgccctgatcagcctcaaggaggcgctgtgtggctgcactgtgaacattcccactatcgacggccgagtgatccctttgccctgcaatgatgtcatcaagccaggcaccgtgaagagactccgtggggagggccttcccttccccaaagtgccaactcagcgaggagacctcattgttgagttcaaagttcgcttcccagacagattaacaccacagacaagacagatccttaagcagcaatacccccaacactcactccactcaatgtgcacccagcttgatgtccactggacactggcaactttttctaaaatgcaaaaaaaagccactggttttcaggaaaatgttcctgtccctgaccccttttag

SEQ ID NO: 2048 - DNA, 2255 bp, Homo sapiens
  source 1..2255: mol_type = genomic DNA
gtcggtgtctgctgcgttcacggcaggattcggttaggaggaacagcacagcatgctgggctctggatttaaagctgagcgcttaagagtgaatttgagattagtcataaatcgccttaaactattggagaaaaagaaaacggaactggcccagaaagcaaggaaggagattgctgactatctggctgctgggaaagatgaacgagctcggatccgtgtggagcacattatccgggaagactacctcgtggaggccatggagatcctggagctgtactgtgacctgctgctggctcggtttggccttatccagtctatgaaggaactagattctggtctggctgaatctgtgtctacattgatctgggctgctcctcgactccagtcagaagtggctgagttgaaaatagttgctgatcagctctgtgccaagtatagcaaggaatatggcaagctatgtaggaccaaccagattggaactgtgaatgacaggctaatgcacaagctgagtgtggaagccccacccaaaatcctggtggagagatacctgattgaaattgcaaagaattacaacgtaccctatgaacctgactctgtggtcatggcagaagctcctcctggggtagagacagatcttattgatgttggattcacagatgatgtgaagaaaggaggccctggaagaggagggagtggtggcttcacagcaccagttggtggacctgatggaacggtgccaatgcccatgcccatgcccatgcctatgccatctgcaaatacgcctttctcatatccactgccaaagggaccagtagatgacattaatgctgataagaatatctcttctgcacagattgttggtcctggacccaagccagaagcctctgcaaagcttccttccagacctgcagataactatgacaactttgtcctaccagagttgccatctgtgccagacacactaccaactgcatctgctggtgccagcacctcagcatctgaagacattgactttgatgatctttcccggaggtttgaagagctgaaaaagaaaacataggtctcttaaaccaggcaactttcacgttttgggagttgagactgagcaatttctccttgtaacaaagaatctccatgaaattctgtttcatctgttaaccgtcactcagcacaacactccctctgggctctcttcctgctcctccagattctgctgctttccagttctctgttgatcctgagactaacaattggagactgaggccagagcaactggctcctggcagctgtgcttgtccgtttcctgtcagagtgatcccaggtttcctcctggcccgtcccatggtccctccacaggagtgtgagaggatgggggaagcactgtgggaagaccaccaaagatggctggacagtgggagagagcacgttgtgaagcatcccagcctcgtgttgaggttccagacttagaaacagacccctctgtacagggggattgtggtgagtgagaatcaaggccaccttgtgtgttttctcactctcgaatgcaagtgggagagggaaaatgactcgggacgccattgtaacggttcctggaagctgggccctctcattggcatatacagtactcctcgctgcagggcactgtcccaccgggatccagttgcaaagtttgtcttgacagttgaaggcctcgcttagttgtactggattctcagggagccctctgtggccttttgctttgcgtgctgtttcccttgtaccagagggcggcaccgtggaaattctgttttccctgtagcatattgtgttggattgcattactggcagagaaaggacaaggtgccattcaagtcctagggtgggcttccagctgccttaatagaagtactcaagtcttttgggtagtgagctggaaagcctacaggaaaagaggggtacctgttttcatttgaaaactttgattcatggaacctttaaaactaatctcagaaaaatttttggtgcccatgcagctgtagttgttcactgctttcctggatggatgggactcttatgtcataacttctgttactcctttggcccatagctaaggtcatccttccccacaggggtggctttgggattggatgatacagcttttgcttctgtgtagtatacctgtacatacttgtttcaggcagcctttctttaatgttttcagttggtttgtattctgtagctcagtagctgctaataaagttaaagatcctgtgtcc

SEQ ID NO: 2049 - DNA, 2654 bp, Homo sapiens
  source 1..2654: mol_type = genomic DNA
ctgtggctggcctccccgcgcccagagcgaaattaagggcatgcccccagcagctgactcagtcggcgtggcgcttcccccaacgtctgccgtgcccccgccgcgggaagtagtccccggccgcgccgactccaaaggaaaccgagggagggtgccccgagtcagcgcgtgggtcccggcagcggcgatcgcgcagccaatccctggaaaggagggcgtggctatatcggccccgtggatccctccgcccgcgcttgttgtgctgaggccgagggagtcgccattttggatggtgaaccctgaagtcggtgtctgctgcgttcacggcaggattcggttaggaggaacagcacagcatgctgggctctggatttaaagctgagcgcttaagagtgaatttgagattagtcataaatcgccttaaactattggagaaaaagaaaacggaactggcccagaaagcaaggaaggagattgctgactatctggctgctgggaaagatgaacgagctcggatccgtgtggagcacattatccgggaagactacctcgtggaggccatggagatcctggagctgtactgtgacctgctgctggctcggtttggccttatccagtctatgaaggaactagattctggtctggctgaatctgtgtctacattgatctgggctgctcctcgactccagtcagaagtggctgagttgaaaatagttgctgatcagctctgtgccaagtatagcaaggaatatggcaagctatgtaggaccaaccagattggaactgtgaatgacaggctaatgcacaagctgagtgtggaagccccacccaaaatcctggtggagagatacctgattgaaattgcaaagaattacaacgtaccctatgaacctgactctgtggtcatggcagaagctcctcctggggtagagacagatcttattgatgttggattcacagatgatgtgaagaaaggaggccctggaagaggagggagtggtggcttcacagcaccagttggtggacctgatggaacggtgccaatgcccatgcccatgcccatgcctatgccatctgcaaatacgcctttctcatatccactgccaaagggaccatcagatttcaatggactgccaatggggacttatcaggcctttcccaatattcatccacctcagataccagcaactcccccatcgtatgaatctgtagatgacattaatgctgataagaatatctcttctgcacagattgttggtcctggacccaagccagaagcctctgcaaagcttccttccagacctgcagataactatgacaactttgtcctaccagagttgccatctgtgccagacacactaccaactgcatctgctggtgccagcacctcagcatctgaagacattgactttgatgatctttcccggaggtttgaagagctgaaaaagaaaacataggtctcttaaaccaggcaactttcacgttttgggagttgagactgagcaatttctccttgtaacaaagaatctccatgaaattctgtttcatctgttaaccgtcactcagcacaacactccctctgggctctcttcctgctcctccagattctgctgctttccagttctctgttgatcctgagactaacaattggagactgaggccagagcaactggctcctggcagctgtgcttgtccgtttcctgtcagagtgatcccaggtttcctcctggcccgtcccatggtccctccacaggagtgtgagaggatgggggaagcactgtgggaagaccaccaaagatggctggacagtgggagagagcacgttgtgaagcatcccagcctcgtgttgaggttccagacttagaaacagacccctctgtacagggggattgtggtgagtgagaatcaaggccaccttgtgtgttttctcactctcgaatgcaagtgggagagggaaaatgactcgggacgccattgtaacggttcctggaagctgggccctctcattggcatatacagtactcctcgctgcagggcactgtcccaccgggatccagttgcaaagtttgtcttgacagttgaaggcctcgcttagttgtactggattctcagggagccctctgtggccttttgctttgcgtgctgtttcccttgtaccagagggcggcaccgtggaaattctgttttccctgtagcatattgtgttggattgcattactggcagagaaaggacaaggtgccattcaagtcctagggtgggcttccagctgccttaatagaagtactcaagtcttttgggtagtgagctggaaagcctacaggaaaagaggggtacctgttttcatttgaaaactttgattcatggaacctttaaaactaatctcagaaaaatttttggtgcccatgcagctgtagttgttcactgctttcctggatggatgggactcttatgtcataacttctgttactcctttggcccatagctaaggtcatccttccccacaggggtggctttgggattggatgatacagcttttgcttctgtgtagtatacctgtacatacttgtttcaggcagcctttctttaatgttttcagttggtttgtattctgtagctcagtagctgctaataaagttaaagatcctgtgtcctg

SEQ ID NO: 2050 - DNA, 1567 bp, Homo sapiens
  source 1..1567: mol_type = genomic DNA
atggaaaagtatgaaaaattagctaagactggagaagggtcttatggggttgtattcaaatgcagaaacaaaacctctggacaagtagtagctgttaaaaaatttgtggaatctgaagatgatcctgttgttaagaaaatagcactaagagaaatacgtatgttgaagcaattaaaacatccaaatcttgtgaacctcatcgaggtgttcaggagaaaaaggaaaatgcatttagtttttgaatactgtgatcatacacttttaaatgagctggaaagaaacccaaatggagttgctgatggagtgatcaaaagcgtattatggcaaacacttcaagctcttaatttctgtcatatacataactgtattcacagagatataaaacctgaaaatattctaataactaagcaaggaataatcaagatttgtgacttcgggtttgcacaaattctgattccaggagatgcctacaccgattatgtagctacgagatggtaccgagctcctgaacttcttgtgggagatactcagtatggttcttcagtcgatatatgggctattggttgtgtttttgcagagctcctgacaggccagccactgtggcctggaaaatcagatgtggaccaactttatctgataatcagaacactaggaaaattaatcccaagacatcaatcaatctttaaaagtaacgggtttttccatggcatcagtatacctgagccagaagacatggaaactcttgaggaaaagttctcagatgttcatcctgtggctctgaacttcatgaaggggtgtctgaagatgaatccagatgacagattaacctgttcccaactcctggagagctcctactttgattcttttcaagaggcccaaattaaaagaaaagcacgtaatgaaggaagaaacagaagacgccaacaggtacttccgctcaaaagttaaagtgctataaaaataattccttttttgtttttgtttgtctgcctttcaaagtgagacaaggtggacaccaagacctttcatttgtactggtgtagttgtatttgtctagcttaataaatattggtaattgatgtaataaaaccatagaactatgaaaatatcaagattattgcaaaaatcttattccaaacacacctgaatcaaatcgttacgcaactctttggctgctctgattggatatcccacccacaagatcgtatacccataatataacaacttcatataataaaatgctgattccaacaggactgagttttgccagcattgcaaaggaatccaagtgcctttctgtagcctccagatgtgcaataacggtaacttgactcttccatcttttcacccacagcaggcacctaagtctgcctttcctaggctttttctcaaaaccaagatctgccaggtacaaaggaatgaaacccagacatctgggaaccaaattctacccaatgggccaatattgcagaacagtatggtgactgttatgacaaacattaattctgcagtttatcaggtgactgtccttcacttgctttcagaaaactttgaagttaaatcgtaa

SEQ ID NO: 2051 - DNA, 2386 bp, Homo sapiens
  source 1..2386: mol_type = genomic DNA
aggcgcagtcccgcgttccctcggcggctgccggcgtagtgagcccgccgccgtggagtgtagcggaaagggctcgccgtcctcctccgtttctcgctgcttcgggacgcgctctctgcggctctgtgagcgcccctgagcgccggcagcggccgcggtgggttcttcaggttatcttatgatgaggcttttgctatggctaatgatcccttggaaggcttccatgaagtaaaccttgcttcacctacttctccggaccttcttggtgtgtatgaatcaggaactcaagagcagactacctcaccaagtgtcatctaccggccacacccttcagctttatcctctgtacctatccaggcaaatgcattagatgtttctgaacttcctacacaacccgtgtattcatcccccagacgtttaaattgtgcggaaatatctagtatcagctttcatgttacagacccagccccttgctctacctctggagtcacagctggattaactaaattaactacaagaaaggacaactataatgcagagagagagtttttacagggtgctactataacagaggcttgcgatggcagtgatgatatttttgggttgagtactgatagtctgtctcgtttacgaagcccatctgttttggaagttagagaaaagggctatgaacgattaaaagaagaactcgcaaaagctcagagggaactgaagttaaaagatgaagaatgtgagaggctttcaaaagtgcgagatcaacttggacaggaattggaagaactcacagctagtctatttgaggaagctcataaaatggtgagagaagcaaatatcaagcaggcaacagcagaaaaacagctaaaagaagcacaaggaaaaattgatgtacttcaagctgaagtagctgcattgaagacacttgtattgtccagttctccaacatcacctacgcaggagcctttgccaggtggaaagacaccttttaaaaaggggcatacaagaaataaaagcacaagcagtgctatgagtggcagtcatcaggacctcagtgtgatacagccaattgtaaaagactgcaaagaggtaactcatcaaggactgtcccctctgactctgttgatacttgttagttctcatcactgaggtgtcagttatcatttttgccagcaaaatttttagtacaaaataatgcagtattaagatgggggaggctttatctagagctggctgctttcagggattcttcagttccattttctacctggctgaccttggagtacctgctggaaacttggtaagtttcttaatctcagtatttcattaagggaggaaactgtcatgtgttgtctagaggagagtgggtggctttaatgatctggctagtcaaaatttattgctagagtgcgcttacaaagtatggatataagaaatatgtgaaaataagatgattttcttaaagatcaatacattgcttttatttaaattcagagagaattttatgtcagcaagggagtcctagagttaatttagataattaagcaacaaaaaaatagaaataatggtagccttacaatgacataaggctggaagacattttgctaagtgaaatttcaagttatagtagaacaattagtgtcatttttgatcccaaattaggtttcacagttcagccagtctgttattcagacacttacaactatgtaaggccaccattatcatgtatccataacaattaaaaatttaaaaacgaaataatgggccgggcatggtggctcatgcctgtaatctcagcactttgggaggccaaggccggaggatcacctgaggttgggagttcgagaccagcctgaccaacatggagaaaccctatctgtactaaaaatataaaattagctgggcatggtatctcatgcttataatcccagctactcaggaggctgaggcaggagaatcccttgaacctgggaggcggaggttgcggtcagctgagattgcgccatcacactccagcctgggcaacaagagcgaaactctgtctcaaaatcataataataataatagtcttattttaaaagatatgttacaaagataactgaaataatatataaatattttgagctgtttagagtaaaaatttttaatcattgtatactgtgagaatgcatttctaagaggattgatcaataatttatgaagctttcccatttcttcttagaagccatcttttacattgttaaattcaagtccatcattaatcttgaagaaatgtgtgtgcttgttaaatttttgtatggaagccaggagtttattaaatggaataaccaatgttaacctgttttaattgaattgcattttgacgaattatcaataaaaatgatgctggtaa

SEQ ID NO: 2052 - DNA, 1578 bp, Homo sapiens
  source 1..1578: mol_type = genomic DNA
cccgccgcctctgcgcccgcgccgcgcccccggcgccccctccccagcgcgcccccggccgctcctccgcgccgcgctcgtcggccatggcccgggagaacggcgagagcagctcctcctggaaaaagcaagctgaagacatcaagaagatcttcgagttcaaagagaccctcggaaccggggccttttccgaagtggttttagctgaagagaaggcaactggcaagctctttgctgtgaagtgtatccctaagaaggcgctgaagggcaaggaaagcagcatagagaatgagatagccgtcctgagaaagattaagcatgaaaatattgttgccctggaagacatttatgaaagcccaaatcacctgtacttggtcatgcagctggtgtccggtggagagctgtttgaccggatagtggagaaggggttttatacagagaaggatgccagcactctgatccgccaagtcttggacgccgtgtactatctccacagaatgggcatcgtccacagagacctcaagcccgaaaatctcttgtactacagtcaagatgaggagtccaaaataatgatcagtgactttggattgtcaaaaatggagggcaaaggagatgtgatgtccactgcctgtggaactccaggctatgtcgctcctgaagtcctcgcccagaaaccttacagcaaagccgttgactgctggtccatcggagtgattgcctacatcttgctctgcggctaccctcctttttatgatgaaaatgactccaagctctttgagcagatcctcaaggcggaatatgagtttgactctccctactgggatgacatctccgactctgcaaaagacttcattcggaacctgatggagaaggacccgaataaaagatacacgtgtgagcaggcagctcggcacccatggatcgctggtgacacagccctcaacaaaaacatccacgagtccgtcagcgcccagatccggaaaaactttgccaagagcaaatggagacaagcatttaatgccacggccgtcgtcagacatatgagaaaactacacctcggcagcagcctggacagttcaaatgcaagtgtttcgagcagcctcagtttggccagccaaaaagactgtgcgtatgtagcaaaaccagaatccctcagctgacactgaagacgagcctggggtggagaggagggagccggcatctgccgagcacctcctgtttgccaggcgctttctatacttaatcccatgtcatgcgaccctaggactttttttaacatgtaatcactgggctgggtgcagtggctcacgcctgtaatcccaacactttgggaggctgaggcaggaggactgtttgagttcaggagttttaagaccagcctgaccaacatggtgaaaccccatctctactaaaatataaaaattagccgggtgtggtggcgagcacctgtaatgtcagctacttgggaggctgaggcaggagaatcacttgaacccaggaagcggaggttgcaatgagctgagatcacaccactgcactccagcctgggtgacagattgagactccctctcaaaaaaa

SEQ ID NO: 2053 - DNA, 8154 bp, Homo sapiens
  source 1..8154: mol_type = genomic DNA
ggaggaggcgcgaggtgggggggagcgcggcgggcggcagggagggagcgggagggaggcaagaaagtagcagaaagtgaggctggcaggcggcggcaaaggagccggcgcgcggcggcggcaggaagtctgtgcccgagaacagcagaaataagagccagggagggaccgcggccgcggcggcggcggcgagagcgaaagaggaaactgcagaggaggaagctgcgccgcagcccgagccgcccggcatccccgccgcctctgcgcccgcgccgcgcccccggcgccccctccccagcgcgcccccggccgctcctccgcgccgcgctcgtcggccatggcccgggagaacggcgagagcagctcctcctggaaaaagcaagctgaagacatcaagaagatcttcgagttcaaagagaccctcggaaccggggccttttccgaagtggttttagctgaagagaaggcaactggcaagctctttgctgtgaagtgtatccctaagaaggcgctgaagggcaaggaaagcagcatagagaatgagatagccgtcctgagaaagattaagcatgaaaatattgttgccctggaagacatttatgaaagcccaaatcacctgtacttggtcatgcagctggtgtccggtggagagctgtttgaccggatagtggagaaggggttttatacagagaaggatgccagcactctgatccgccaagtcttggacgccgtgtactatctccacagaatgggcatcgtccacagagacctcaagcccgaaaatctcttgtactacagtcaagatgaggagtccaaaataatgatcagtgactttggattgtcaaaaatggagggcaaaggagatgtgatgtccactgcctgtggaactccaggctatgtcgctcctgaagtcctcgcccagaaaccttacagcaaagccgttgactgctggtccatcggagtgattgcctacatcttgctctgcggctaccctcctttttatgatgaaaatgactccaagctctttgagcagatcctcaaggcggaatatgagtttgactctccctactgggatgacatctccgactctgcaaaagacttcattcggaacctgatggagaaggacccgaataaaagatacacgtgtgagcaggcagctcggcacccatggatcgctggtgacacagccctcaacaaaaacatccacgagtccgtcagcgcccagatccggaaaaactttgccaagagcaaatggagacaagcatttaatgccacggccgtcgtcagacatatgagaaaactacacctcggcagcagcctggacagttcaaatgcaagtgtttcgagcagcctcagtttggccagccaaaaagactgtctggcaccttccacgctctgtagtttcatttcttcttcgtcgggggtctcaggagttggagccgagcggagacccaggcccaccactgtgacggcagtgcactctggaagcaagtgactggccctggaggtggggcccggggtcggggctggggaaggggagccccagggtcgccagagccgcgagccactccagcgagaccccaccttgcatggtgccccttcctgcataggactggaagaccgaagtttttttatggccatattttctactgcaattctgaagtgttcatttctcacaaactgtactgactcgaggggcgctgatttcataggatctggtgctgtatatacgaatcttgcaaagctctaactgaacggaccttcttattcctctcccctaacaccatcgtttccactcttctcagtgtaggtaaccgtctatggtgtgttttttcattaatgacaaaaaaaaaaaggtttcaactggattatttaaatattggtaaatattgtgcattagggtttgtttttccttttaagaagtatgtcctttgtatctctaagttacatgacctatatcttttcctctttaatagtagttttatgttaacctttaagagatttgtttttcctcaaaggagaatttaaaggtattttttaaaattctaataagaggatcagccgggtgcaatgactcatgcctgtaatcccagcacgttgggaggccaagtcgggcggatcacaaggtcaggagatcaaggccatcctggccaacatggtgaaaccccacgtctactaaaaatacaaaaaattagccgggcgtggtggcacacacctgtagtcccggctactcgggaggctgaggcaggagaattgcttgaacccgggagacggaggttgcagtgagctgagatcgtgccactgcactccagcctgggtgacagagcaagactctgtctcaaaaaaaaaaaaaaaaattctaacaagaggatcatgaatctgtctccaaggctaagagtgcccttcacctctactccttctgtttctctccccttccccaggaggaggggcccctcagttctgcgaggctctcttctctgcgggggactttggtagagaatctgcacagagcctttgctggcaacccatccagcagaacccacacccaccagagaccctagaggcctcttgccatcagcaaccagaaataagcctgctcccccgagacgcagggctcagcttcacaggccagacttgctgtgagtgagatgcccacactgcagagatgcaggaccctcccttgcaaaaggaaccagctgccatgttgctgaaagtgggcccacacacaaccctcatttctcacgagagctaacagatgaaagctcagctatgcagtgttaaaattcatctctttctctgtggtttttaaaaaaatgcatttctaatcttacacttcacgtggcctccaacacaaagttctttctccacatttttaccctcttctcacatgaatgttttccaagggaaggaagggagggaagcagccttgggaaaggatccatttctggtggtaaggagagggggccctgccaggctaatgggacttcagccaccacagagatgaccaaagaccacctccgccaggcccagccagtgcttgcagccctcccattggtcaggggagtctaaaatcaaagatacatggtggtagggtcaccaaacgtcccatttgcccgagactgaaggatttctcaggctgtggacatttaatgccaaaaccaggaatatccggggcaaagcaggctgtgttgttcgcctttgtggagccaggcagtgtgtggcccagggaaagctgcgtttcatggaggcttccaggaggctgccctgtaaagccaggcaggtggcttcaagtgccattcctgcaagtgcccctgcttcagctctcaggcccatccaatgcctcgagcccacgggggtgtcccggcaggtctgcgtcatcacgacccagtaacgctgctggctgtgtcctcatgccctcttcctctggctggccagtcatgggaagtcctgttggttgagtcatctttgtcacttctacacctttgagtatgtacaggctgaatgttgagtgatgcccccccaccctctcaataaacacacacacacacacacacacacacacacacacacacaatgttattaggcacagcagctccatcctgctccctgagaatggcagtgcaggcacagagaagagcagttgggaagacaggcagctggtctaccctgtccccgcacacttcacaggcactccactgcttggcaggaattctgcatggcatctgccacgcatgctcacagggtgaaaaatcaagctgtcactctgcaaaatctaaaaaccctggaaaggtctataagatgacattagacccagttaagaagcaagtgtcacctgagttggccatgcaatgaatgaatattataagcagtattggagaactaggcggttgcttactaagaagtgtcttggaaacattcgagttcatacagtgcatgacaaagtaatagaaggctgcaagcgctgaaaatgcacccgaatctggtacctaggatgagtacatgaatagtgatgaatagccctttgtgctgtgtgctatatacaaccatttgcattcagaaagcagcatttgaagctgagttccattactggtgattgaagtattttcaggagcagatacatgtggtgcatgttatatgcacttagtttgaaagtatccctcacccaaaaagtgcagaacctctgaaaggtgagccgtggtgcaggtgcccccctcgctgttcgggtcagttcttggccatgcttggcctgtcacacgccgggtctcaacaacatcgtgcgaggagacagtgactggtttcagcccaagagtcaactgttgagcatgacatcaggaagcctgtactgtcctgatcccaccaggcttgggttaatttcctattgcttcagagaaagagaggcgctcttgtgcttttgagagagctctcatgttaaaaagaggttgtctttgcactgcgcttggtatgatttgttttcttataaaacaggaagagaacctagaatgtgcctttcgtgaaggtctgacaaatggggtctcagagtcctaggacccgcaccaaggtcagagtccacctgtagaggctgagcatttctacatgcacccagggtgctgggctgaggctaagggtggacgcgtagaccccatcacaggcttccttcctgagcccaagtcccccatttggtcactatcccttctcagagcaagtggattctcttttcctcacttggagtattcaatgttgaagtagtggcctggagtggcctttccctcagctgcctgtctgggcctccctggcttcccggatcttcatctcatacgtgaggcaataggaggagtttctattcattgagacaaacagtgagcgggcaccaacaggccagcagcttggcccttttcacagaggtggccttggagtctggagtctgggcagctgtctgcctctctacggctctgcttcccagcgggcacacgggtccggagcctcagaatgaagtggtgcagaggcgcagggcacacctaggagaagctcaatgaccaccaaagcccttgaggagagacggggtttgctgtgttagagaaatggcaacccccaggaccatgcacggctctggcagtgcacagtggctgattttcaccagttcctcctacccctgcctctgtcggagactagaaaacattctaccccttcaggtcttcttttaaaagaaaagagctatggcaaagcgtgccatacaaagttaaaaaaaggaagagtggctttgcgttcttgaccatggccacaattctggtcacttctagcatctgaccttgagaacggtgtagagtctctgagccaccgctggcctttgagagagtctcactctccagctagctctttgtgtagtgtccagggccccggcagtcaggatagagcgagcaaaagaagatggacagtggacagggcgcagtggctcacgcctgtaatcccagcgctttgggagagcgaggcgggcagatcacaaggtcaagagatcaagaccattctggccaacatggtgaaaccctgtttctactaaaaatacaaaaattagctgggcatggtggtgcgtgcctgtaatcccagctactcgggaggctgaggcaggagaatcgcttgaacccgggaggcagaggttgcagtgagccgagatcgtgccactgcactccagcctgggtgacagagcaagactccgtctcaaaaaagatggccatgctggccaaggctgggctcataggaaatatctgtagtaggatgaaaggaatctggcctagggagccccggactcggtttacctaccccgtactcatcccactcatctgtctaccctagtgtccatcatgccctggatgaatcgtaggtgggagggacagaagccgagaacaccaggcacacggggtggggggaatggggggagcccaggtgatcccctttggaaagtggattgatcctctcccctgtggaatgacagcttaacctgattaacccactggggcttgctattttatgagcatttttaaacagaaaggaaagatgatatcccagtgcaggtagactttatttttgaaagcatcgtggcccctcacctctccctctcccccagaaccttggccagaattgagtcttcgcgttggggaggccacgctggaaccattgctctagggctgaaggtggaagtagggccactgccgcagcttcagccagagccctcgctgcttcgcagaatttaacaagcacacgactgggattcctttggatatgagaaaggaaggcaagtgcgggcaaagggaagctcctcccgtttttcataaacagaagtaagatgtcctctttcccaggtttgcacaatcacttctggcaaattaattgaaggtccttgaattcagccagtgcacgaaacctttgcatgttcttctgaaactgtacttcttccctattctgtctacccacactctgcgaactttgccttttccttaaacacattccagaccaaacactgttcagtttgttaaaaaaaaaaaaaaaaaaaaaagatgtatatacctgtatgtgatccaccacccttttgaggggcacctggtcctcggttggggctgcaggtgtgcctgacatttgcaaaagatattccagtctttcgatgttcagaattgaaaatgtggagatagaaaagctcaaacagactcctaaaaggagggtttctttcctgaagactccaagaaaatgagtgtgcagatgagttagcttgacaacctcaactctggggagcaggcaggcggtctgaggaagataagggcccacgccccactcacctggcacctgttcggtggtcccggggcatcatggtctgcagctctgggcccccagccccactgtgaagtcagtcctgcatgctggccgaggcccggccacctcccgatgcctccagagtcagtgggaaggagtcagcccttcccagacttccccgccacctccagcaggagcagctcagtttgtggctctgggagctccgcttttgcaaacccaaaaaggctgtgcatttggaagccaaacgctcagcatgcggctgccgagtctggttttgtggacaaagcaaactgtggaatggcttctcggtgtctgtataaagggacaaacggttgcattcaccctttgtactataacaccgcttctgcattcgccatatccgttttttaacctttttgtctccggggaacttctcattcgattattatgtcttctgatgatttgccatgttattttaaaggtgattttattttcttatggacaggaaaaaagaaaatgaggaggagttggttttactcttagagataagacttcagcaggggctcagaaaccccaaactctagttaaattgcttctcggaggaaaatcttaatctagacagattcagattcccaggctctcctggaagccctgcacttcagggcacaggggccctgggacgtggttggcagccaggctgcgagagagctaaaaaggaacaagaacatcagctcggatgtttgtctctcagccctgacacctgccactctccttcccggggcacttggccctatcagagggacatgaaatgctgtccgaatggtggcagaaatgcagcgacattgcatgcagcagagtctttgcttcgaaagatggggcgccatgtttcagagaacatttatcttagtcccacgttcaggtgagaagacctcaaaggtaccctctgtccagaataaacattggaacaatctctcaattggcttttgtcactacacataatgtaatctcccttctttcagctcccccaacagtgagcatgcttcccaaaaaattacaacatcaaaaccaggaatgtccccgcatctactattaccaggcttgcaattggttcaattttcccataaaaacatgtttgtccaaaagaagggaaactgtgaatttattccatgcatgtaataaactctgcaagaagtttaacccacataggtttgcggcactgcaaaattgttcatgggtctatgtagcaaatgattctctgccttgacaatcatgtatacatatcaagatttctatcataatgataatgagattgatgacttcctgttttcctccaataaagacaattaatcaccttca

SEQ ID NO: 2054 - DNA, 933 bp, Homo sapiens
  source 1..933: mol_type = genomic DNA
gcagcagcggcggcagctggaggatgaagaaggagcatgtgcttcactgccagttctccgcgtggtacccgttcttccgaggcgttaccatcaagagtgtcattcttccacttcctcagaatgtgaaggattatttactcgatgatggaactctggtggtttcaggaagggatgatccaccaacacattctcagccagacagtgatgatgaagcagaagaaatacagtggtctgatgatgagaacacagccacgcttacggcaccagaatttcctgagtttgccactaaagtccaggaagctatcaattccctcgggggcagtgtctttcctaagcttaattggagtgccccaagggatgcgtattggatagcaatgaatagttctctgaaatgtaaaaccctcagcgacatctttctgcttttcaagagttccgatttcatcactcgtgacttcactcagccgtttattcattgtactgatgattctccagatccatgtatagaatatgagctcgttctccgaaaatggtgtgaattgattcctggggctgagtttcgatgttttgtcaaggaaaacaagcttattgttgtgttcgatatatacagagacagtagggggaaggtgtggctcattgactttaatccatttggtgaagtcacagattcactgctgttcacctgggaagaactgatatctgagaacaacttaaacggcgattttagtgaagttgacgctcaagagcaggattccccagctttccgttgcacaaacagtgaagtgacagtccagcccagcccctatttgagttaccggctacccaaggactttgtagacctctctactggggaggacgctcacaagctaatagacttccttaagctgaagagaaatcagcaggaggacgactgatgagcgtactggaactggagaa

SEQ ID NO: 2055 - DNA, 3925 bp, Homo sapiens
  source 1..3925: mol_type = genomic DNA
aaagagcccgctccgccgagcgccgggcgacggcaggaagcccctccgcttggccagaatggagcagccgaagggagttgattggacagtcatcatcctgacctgccagtacaaggacagtgtccaggtctttcagagagaactggaagtgcggcagaagcgggagcagatccctgctgggacgctgttactggccgtggaggacccagagaagcgtgtgggcagcggaggagccaccctcaacgccctgctggtggctgctgaacacctgagtgcccgggcaggcttcacttggatttgtgttggagtctctctctggattcgagggtgccatcctccagggcgtctgcctgaggcctctgttcacagggctttcccactcctgcaggtggtcacatccgatgtcctgcactcggcctggatcctcattctgcacatgggtcgagacttcccctttgatgactgtggcagggctttcacctgcctccccgtggagaaccccgaggcccccgtggaagccttggtctgcaacctggactgcctgctggacatcatgacctatcggctgggcccgggctccccgccaggcgtgtgggtctgcagcaccgacatgctgctgtctgttcctgcaaatcctggtatcagctgggacagcttccggggagccagagtgatcgccctcccagggagcccggcctacgctcagaatcatggcgtctacctaactgacccccagggccttgttttggacatttactaccagggcactgaggcagagattcagcggtgtgtcaggcctgatgggcgggtgccactggtctctggggttgtcttcttctctgtggagactgccgagcgcctcctagccacccacgtgagcccgcccctggatgcctgcacctacctaggcttggactccggagcccggcctgtccagctgtctctgttttttgacattctccactgcatggctgagaacgtgaccagggaggacttcctggtggggaggcccccagagttggggcaaggcgatgcagatgtagcgggttatctgcagagcgcccgggcccagctgtggagggagcttcgcgatcagccccttaccatggcctatgtctccagcggcagctacagctacatgacctcctcagccagtgagttcctgctcagcctcacactccccggggctcctggggcccagattgtgcactcccaggtggaggagcagcagcttctggcggccgggagctctgtggtcagctgcctgctggagggccctgtccagctgggtcctgggagcgtcctgcagcactgccacctgcagggccccattcacataggcgctggctgcttggtgactggcctggatacagcccactccaaggccctgcatggccgggagctgcgtgaccttgtcctgcagggacaccacacgcggctacacggctccccgggccacgccttcaccctcgttggccgtctggacagctgggagagacagggggcaggcacatatctcaacgtgccctggagtgaattcttcaagaggacaggtgttcgagcctgggacctgtgggaccctgagacgctgcccgcagagtactgccttcccagcgcccgcctctttcctgtgctccacccctcgagggagctgggaccccaggacctgctgtggatgctggaccaccaggaggatgggggcgaggccctgcgagcctggcgggcctcctggcgcctgtcctgggagcagctgcagccgtgcctggatcgggctgccacgctggcctctcgccgggacctgttcttccgccaggccctgcataaggcgcggcacgtgctggaggcccggcaggacctcagcctgcgcccgctgatctgggctgctgtccgcgagggctgccccgggcccctgctggccacgctggaccaggttgcagctggggcaggagaccctggtgtggcggcacgggcactggcctgtgtggcggacgtcctgggctgcatggcagagggccgtgggggcttgcggagcgggccagctgccaaccctgagtggatgcggcccttctcatacctggagtgtggagacctggcagcgggcgtggaggcgcttgcccaggagagggacaagtggctaagcaggccagccttgctggtgcgagcggcccgccactatgagggggctggtcagatcctgatccgccaggctgtgatgtcagcccagcactttgtctccacagagcaggtggaactgccgggacctgggcagtgggtggtggctgagtgcccggcccgtgtggatttctctgggggctggagtgacacgccaccccttgcctatgagcttggcggggctgtgctgggcctggctgtgcgagtggacggccgccggcccatcggagccagggcacgccgcatcccggagcctgagctgtggctggcggtggggcctcggcaggatgagatgactgtgaagatagtgtgccggtgcctggctgacctgcgggactactgccagcctcatgccccaggggccctgctgaaggcggccttcatctgtgcagggatcgtgcatgtccactcggaactccagctgagcaccagcagcatcctggcaggcactgccctggctgccttgcagcgagccgcaggccgggtggtgggcacggaagccctgatccacgcagtgctgcacctggagcaggtgctcaccactggaggtggctggcaggaccaagtaggtggcctaatgcctggcatcaaggtggggcgctcccgggctcagctgccactgaaggtggaggtagaagaggtcacggtgcctgagggctttgtccagaagctcaatgaccacctgctcttggtgtacactggcaagacccgcctggctcggaacctgctgcaggatgtgctgaggagctggtatgcccgacttcctgctgtggtgcagaatgcccacagcctggtacggcaaactgaggagtgtgctgaaggcttccgccaaggaagcctgcctctgctgggccagtgcctgacctcgtactgggagcagaagaagctcatggctccaggctgtgagcccctgactgtgcggcgtatgatggatgtcctggccccccacgtgcatggccagagcctggctggggcaggcggtggaggctttctctatctgttgaccaaggagccacagcaaaaggaggccttggaggcggtgctggccaagaccgagggccttgggaattacagcatccacctggttgaagtggacactcagggcctgagcctgaagctgctggggaccgaggcctcaacctgttgccctttcccatgaagctggcttctctctgcaacaggagaaaacctggagctacagtgtcccccaccttccttgccccatgggaacctccacctcctactccccacccacctctgcgaatctgctcccaaaggaagctgaccagagcaagatctgggcaagcagagagtgcctgggacaggactgtgacctggtggacaggggcctagatgtagcctctgttcctcctggacataggaaggtcccaagcttagtatcccacgtggcctttacaaatcctatggctggccttctcattccacaagggccctggaaagggttgacagccagccttggcatatggctgggagtcccttagcaaggccaaccctgaagaggccctttgaggcattccctatggcttagagttgtagacttacactcaaccctcatgtgagcgtgggagtgagggtggcggtcccttgccaagttggtagcagtgacccagtgattcactgccatcccaggccttaactagcaaaactacggagcgtgccaagtgacctggtgcctgtgggaagtgggttctcaggactggcattcttggaataaattcactctgtccttgca

SEQ ID NO: 2056 - DNA, 475 bp, Homo sapiens
  source 1..475: mol_type = genomic DNA
gtccctgctcatgcttgagctggcccaggaccgcttgcagttcgagactgtggaagtctcggagcccagcatgctgcagaagatcctcaccaccaggcggcgggagaccgggggcaacgagccactgcccgtgcccacgctgcagcaccatttggcaccgccggcggaggccaggaaggtgccctccgcctcccaggtccaagccatcaagtgctttctttccaaatgctggagtctgaacatcagtaccaaggagtacgcctacctcaaggggaccgtgctctttaacccgggaaaagggaaggaaaatgattgcaatcatcattaacatcatttaaaccaagtggtcaactgctaattacttgaatacaagttaaagaactttgcaacgatattatcatcatggaagatcaaaggaccttcaaaagcagcctcctcttattactttccttataaaaacttacatccacttaaa

SEQ ID NO: 2057 - DNA, 2021 bp, Homo sapiens
  source 1..2021: mol_type = genomic DNA
gagctcccacgctgctgttcttccatttccagcttttaaagagcacccgccccttcgaaccaccgaggtcatgggcgaacacaccggagcgcagcaccgcgcccccccgcacacaccgcccgcctccgcgcccttgcccagaccgaggcggccgacgcgcctgcgtgcgcgctaggtataaataggtcccaggaggcagccactgggcagaactgggctacgggcgccgcgggccatggcgggcgagaaccaccagtggcagggcagcatcctctacaacatgcttatgagcgcgaagcaaacgcgcgcggctcctgaggctccagagacgcggctggtggatcagtgctggggctgttcgtgcggcgatgagcccggggtgggcagagaggggctgctgggcgggcggaacgtggcgctcctgtaccgctgctgcttttgcggtaaagaccacccacggcagggcagcatcctctacagcatgctgacgagcgcaaagcaaacgtacgcggcaccgaaggcgcccgaggcgacgctgggtccgtgctggggctgttcgtgcggctctgatcccggggtgggcagagcggggcttccgggtgggcggcccgtggcactcctgtaccgctgctgcttttgtggtgaagaccacccgcggcagggcagcatcctctacagcttgctcactagctcaaagcaaacgcacgtggctccggcagcgcccgaggcacggccagggggcgcgtggtgggaccgctcctacttcgcgcagaggccagggggtaaagaggcgctaccaggcgggcgggccacggcgcttctgtaccgctgctgcttttgcggtgaagaccacccgcagcagggcagcaccctctactgcgtgcccacgagcacaaatcaagcgcaggcggctccggaggagcggccgagggccccctggtgggacacctcctctggtgcgctgcggccggtggcgctcaagagtccacaggtggtctgcgaggcagcctcagcgggcctgttgaagacgctgcgcttcgtcaagtacttgccctgcttccaggtgctgcccctggaccagcagctggtgctggtgcgcaactgctgggcgtccctgctcatgcttgagctggcccaggaccgcttgcagttcgagactgtggaagtctcggagcccagcatgctgcagaagatcctcaccaccaggcggcgggagaccgggggcaacgagccactgcccgtgcccacgctgcagcaccatttggcaccgccggcggaggccaggaaggtgccctccgcctcccaggtccaagccatcaagtgctttctttccaaatgctggagtctgaacatcagtaccaaggagtacgcctacctcaaggggaccgtgctctttaacccggacgtgccgggcctgcagtgcgtgaagtacattcagggactccagtggggaactcagcaaatactcagtgaacacaccaggatgacgcaccaagggccccatgacagattcatcgaacttaatagtacccttttcctgctgagattcatcaatgccaatgtcattgctgaactgttcttcaggcccatcatcggcacagtcagcatggatgatatgatgctggaaatgctctgtacaaagatataaagtcatgtgggccacacaagtgcagtagtgcagttcaccatgagggaagaataaagagctgtgggcaaaagagtgtaaaatattttaaaataaactttcttaatatttttacatgcagagtatttttgtattcaattaaagaaataattttattccagacagtcacaaatttctctgttccatagttaaagaagacatttgccaacaggtagcatagctctgtacatcttttaaaaaaaaaatagcagggtactagtataataagctattttcacaagtgtagcaatttcatggaacctgctcaaatcaaatttgtacatattgttataataaattttaaggtcttaactattaacttgattgaaaaaagctt

SEQ ID NO: 2058 - DNA, 7032 bp, Homo sapiens
  source 1..7032: mol_type = genomic DNA
atgttgcgagccacagctccctgctggttcccccctggatacccagaagctaagaaggtggccgaggaggcggccctggaggcaagccgccatttgggaggggagcagagccaggccggtgctcccgaaggcagcaagatgttgcgagccacagctccctgctggttccgccctggatacccagaagctaagaaggtggccaaggaggcggccccggaggcaagccgccatttgggagcggagcagagcccggccggtgctcccgaaggcagcaagatgttgcgagccacagctccctgctggttcccacctggatacccagaagctaagaaggtggccgaggaggcggccctcgaggctccagaattcccactgccctctcatcagcctgcccagagcttcgggctctgggtgccccagatgcacaagcaggcctcagcatttgtggacatccaggcggagccccaaaacaggggtccggcggtgcccccagcgtggcccaagatggtgacggagtcgtgctacttccctgcgcagaggggatcggcctgccgcttgccagccgccccaaggctgacagagaggccctcgggagtccgcatctcagcccccaggaagaggaagacgatcgcccactcttccagcccttgcttggtcacaggttacacagatgccaagagaacccgggtggccagcagcagccaacgctcccgtggctccaaggtcggcagacagccagggaagacgcgcaacaggtcagggatggcatgcaagaccaccgccaccaccagctctaagcgaatcgtccgtcgtgcatccttaccgagtttgagtttgaagaaacccattatcctccgaagctctgggtgccaagtccccaccgtcctccgccgaggctatctccaactgttcaccgaagagtgtctcaagttctgcgcctccaagcaggaggccgaggagaaggcgctgaacgaggagaaggtggcctacgactgcagccccaacaagaacaggtacctgaacgtggtcctgaacaccctcaagagactgaagggcctgacccccagctccatgcccggcctcagcagggccgccctgtacagccgcctccaggagttcctgctcacccaggaccagctcaaggagaacggctaccccttcccgcaccccgagcggcccggaggcgccgtcctcttcactggccaggggaaggggcccggcgactcctcctgtagggtctgctgccgttgtggcaccgagtacctggtgtcctcctcgggccgctgtgtacgcgaccagttgtgttattatcactgggggcgggtccgctcgagccaggtggctggaggccgggttagccagtacacctgctgtgcagctgctcctggctctgtgggctgccaggtggcaaagcagcacgtgcgggacggccgcaaggagagcctcgatggcttcgtggagaccttcaagaaagagttgtccagagacgcttatccaggaatctacgccttggactgtgagatgtgctacaccacgcatggcctagagctgacccgcgtcaccgtggtggacgccgacatgcgagtggtgtacgacaccttcgtcaagcccgacaacgagatcgtggactacaacaccaggttttccggagtcaccgaggccgacgtcgccaagacgagcatcacgttgccccaagtccaagccatcctgctgagctttttcagcgcccaaaccatcctcatcgggcacagcctggagagcgacctgctggccctgaagctcatccacagcaccgtggtggacacggccgtgctcttcccgcactacctgggtttcccctacaagcgctccctcaggaatctcgcggccgactacctggcacagatcatccaggacagccaggacggccacaactccagcgaggacgcaagcgcctgcctgcagctggtgatgtggaaggtccgacagcgcgcccagatccagccacgccaccggtccgcctctcccgccgccctggcctgtccttagccccaggcctcttccaaaaccgccatcagtcccgagagctcaccctgcccacctcgccgcaaagcgaaagaaactggagcagccggcggcaggagagggcaaaaagccaagagtaaccccaaccccccactcccggtcccccggaatccctgccgcggcccctcgggcctgtccacatccctctgcccctcccagacctctgtccttccaccaatcgcctcccgcagccccgagccgccactcccagtcccccgagtccctgccgcgcgccctcgcgcctgttcacatccctctgcccatccgagacctctgtctttacaccactagccaccccacgtgggacttccatggcttctgagtacaaggccagccccccggcccaccagctttcggaatgcctgcttacctctttttctgtagaggcaccacagggaggtgggtgaagcacttcggctctggagttacagatctgggttcaaggccaaattccaccacttactaggtttgtaatattggacagataacgtctttgcgcttctaccttttggtctttaaagtgtgatcaaaagagacttagactcccacatagtaataataataataatggcaaacttaacaccccactgtcaacattagacacaccaacgagacagaaagttaaaaaaggatatccgggaattgaactcagctctgcaccaagcggacctaggagacatgtacagaacgctccaccccaaatcaacagaatatacattcttctcagcaccacatcacacttatttccacattgaccacatagttggaagtaaagcactcctcagtaaaagtaaaataacagaaattattacaaacggtctctcagaccacattgcaatcaaactagacctcaggattgagaaactcactcaaaaccgctcaactgcatggaaaccgtacaagctgctcctgaatgagtacagggtacataacgaaatgaaggcagaaataaagatattctctgaaagcaatgagaacaaagacacaacataccagaatctctgggacacatttaaagcagtgtgtagagggaaatttatagcactaaatgcccacaagggaaagcaggaaagatcaaaaatgcataccctaacatcaccattaaaagaatgagagaagcaagggcaaacacattcaaaagctagcagaaggcaagaaataactaagatctgagcaggactgaaggagatagagacacaaaaaacgtgggatggttttttagtatgtggaaaaattctttgatggtttttccttgaaaaagtgaaacctaaatccactccgtttggatgtgggacgatttgcggttgttgcttcctaaacataaactacgtttaggctgatatttcagacaatgaaacctttgagtgcccgtagcgggaagatctcggttgctgagtgcagggaaggaggatgtaattccatcatatactctctctgtgcctaccgcatttggaaccatgcgagtgatacctatttataaaataaaataaaccaagcacaagtacgaacttagcaacactatattgagttaatagaacggtatcttgtatttcttctgtccaggtatacttataaatgcctgcagggatttcaccacctcagggtggagagactgaatgcttgtgagggaattaggatggtggaatattggtgttaccagggaagggggcgggatgtttgaaaatgctatgtttactcgttcttgggttccaataaaggagaaacagggcacaggagtcggaaggactagtggcaatagtgatgaaaggacctccttatcatgctggcaatgttaattacccaggtgtaggaagccatacactgaggcggaagatcgcaagtcagagtggccggcaggcacaacctcctggcacaccagaggcaggtcttcaatacccactggtttccccaacaggctgcgtaagggaccctgagccacagtgagttggtcaaatgctcctgacagtgtggagaaaccaacagacaaaacgtgggtgcaaaagtgatgagaccccacactttacactcgtggtgacaatgaagctattaagtaacagcttctcaacctatgctgtttcctgttggatgcacataatccatttgcactgcagacaattttaggatgtggtttacagtaaggtggatggtaccttatggcaaaaatctctcagaaatttatgtgtggttttaaagtcattccagtcctagcacgttgtgcttttcagagacgccatagctgtttttccctttgtaatatcaaagcagtaatatgttctctggaggcctgttgggtgaatttaatggaatcaagttaagtaggtgccagaaccattgctgttttccctccatagccctgccacccactgtaaaaaggttgatgagattacttaatgatttccaattaagttgtatttccaaatatcatgatttccattttaatgtagttggtatggagctctgtgagtgtgtgcttcttttattatggatcacgttcagcttctttttatttgcctcctagtcataatagtaaaactctactcctctactccgaggagtccctaccacccatctcatcactttccagcccagcactcttcatgctcattcatttaaagcattcaacattgtgtaaatgaatcttggaaggccaaagctactgaatttagcgaatttgtggaggcattgccacaaatcagccaggtgaagtttcacacaatcgaagactgcacaactcctagaaggcagcactatgctgcaaacccagacggccactcttctcacccctcgtccgtttgctgttctggataatgaggttcaaaagtcacctaggcaactgccaaaatagctgaaatggagaaagggcttcaggctggtgactagcagaggtccacctgacccccgtaagctgctgaacaagtagggctgccagaaatgtcccactagggaatttggtagagacgaagacatgctcaccggacaagggttcctcccaggatacgcccgagcggaagaagcgggctctgagccacgccctttcaccctcctctaccccgccctgggctggtgaaggtgcgcgccaggatgtggactactgagccctgaagaaataagtccttccactttgaccccatggaggattgcctgtgaggaacttaaacgagtctaccagtgtctagacacgggggcaggtctgtccggcacagcagctccctcaaggaggagaagagtgaggagaaaggaaactcaagtctcaccattctgtcctgggagagaagaggaggatctcatctctcatctgtccaaacaaggcaaggagactttctctcatctttccaagcaaggcaaggagactttttatcattaggaaacaaaaagaatttagaaggaatgaaagcagcccgtaaggtgaattcctaaggactgcccattgaaactgacaaaattgcccttgtttgatgagaggaatgagcagagcattgatgtggtgaacaaggatctagtgagactttcccagcatgtttctaccaaagctttatctaagcttctcagaacactctcctaataagcagatgtttggcctttcagaaagtcaacaagcaaaatgccttgagtgtcccaaaacactgatgccatgatgtgggctcctgactggcctccttttcctttgactggaccgctgccacctcttggtagccatcgctttcatgatgctttgccttggagatcatattggtgaagccatgttccaactgccgcttacaatttgtcagagggatgcgtcaggatcgtgatccctcctgtttaaaatttccactgatagctctcgtcgtaaatgcagctgatctgggcacagtggttttcacagccactgcaggattcatcttccacatcttctcacctcttcttgaaacaagctatacattcgtaaagagttcatttctttggggtagtgtccttacaagcttttcttaaaacgtcaatgatgtcttcaatcttccacccaagcttcaccataaatttgatgtttcctcttgctgcaattttcgtggaattcatgttgctctgacgggagtccttttcagtggatgtctcatccttcttagtgcctcaaactagatctagttcagaaaggttatcagaagttaggacaagtttattttagtgcaaaccagtggaaatccatgcatagtttcttcaccatgtgcattttctatgaacctttggaagaccacctgtgttgaacattgcccaagtcctgggagagaagtgggtgcggtccgcttcctgtcctcaatttgcccgcagcggcggagtgcacagagcagggaaaggcagccccagagggatcccgccctccagcatgcagcagactgctggcccagtcctggctccaaggggtgctgtgtgggcccaagcaagttgaccaacctccctgaaccttaatttaatcctaggtagcccaattccagtagccattataggactgccctgccgggacagttacttaactcaggaaaagcaacctagctccaagtttagcaaccgggagttccagttgattccattagcgcaccccctgaggcattcccaagctggagtctggtggaagatgaggctcagtgtgattggactgaagcaccaacctatcaaggagaagtcccacccagtctgccctgtgcctatataaaggcgacaagtggcggccgcagcactcattgaagccgccagttgggagaggagcagagccaggccggtgctcccgaaggcagcaagatgttgcgagccacagctccctgctggttcccccctggatacccagaagctaagaaggtggccgaggaggcggccctggaggcaagccgccatttgggaggggagcagagccaggccggtgctcccgaaggcagcaagatgttgcgagccacagctccctgctggttccgccctggatacccagaagctaagaag

SEQ ID NO: 2059 - DNA, 2703 bp, Homo sapiens
  source 1..2703: mol_type = genomic DNA
ggagagagcgaagtcaagtctccagggccgctggcgacttcggaagccgcgcgcccggcgctctcggccgcccccggccgctcgcccccgccgcgccgccgccctcgcccccgggctcgcccttggcccccggcggccgcgaaagggtgcgggagacgcggagccggaggaggaggcgcagccgctgcccgagccgcagccgcagccggagcccgagccgcggggcgggtgcgaagatgcacacgacccagaaggacacgacgtacaccaagatcttcgtcggggggctgccctaccacaccaccgacgccagcctgcgcaagtacttcgaggtcttcggcgagatcgaggaggcggtggtcatcaccgaccggcagacgggcaagtcccggggctatggatttgtcaccatggctgaccgggctgctgccgaaagggcctgcaaggatcccaatcccatcattgatggcagaaaggccaacgtgaacctggcatacttaggagcaaaaccaaggatcatgcaaccaggttttgcctttggtgttcaacaacttcatccagcccttatacaaagacctttcgggatacctgcccactatgtctatccgcaggcttttgtgcagccgggagtggtcattccacacgtccagccgacagcagctgccgcctccaccaccccttacattgattacactggagctgcatacgcacaatactcagcagctgctgctgctgccgccgccgctgctgcctatgaccagtacccctatgcagcctctccagctgctgcaggatatgttactgctgggggctatggctacgcagtccagcagccaatcaccgcagcggcacctgggacagctgccgccgccgctgcagcagctgctgccgctgcagcatttggccagtaccagcctcagcagctgcagacagaccgaatgcaatagaccagccatctgatcaaagttgaattgttttctctttccctcccaattttccaatttttagtagctaataagagagttaacattgacttaacagctttaaaaaaaaaaacagccatgctattgtgaagcagagttattattttttttatactccaggtagtgttctagatgagaaagaggtaagaatgaggggaatgggcacaattttggaaatcaatcccaaagagcctgagtaaatgaaaggccactacgaaatgacgccaggagtaacaacggaacttcacttttgtaacgggatttttatttttgctctttttatagtatcagggaagcaaactgccttttacaagttagaaaatgctgtttgaatctagttgaaccagggaatacagagcgagcaatatgtagcttgaattacatttaaaagcagattttttacaaacaaaatggcgaaagcactgattgtcatttttagcagtcacttaaggcctatagaacttttttcaagtcggaaggtcctgttcttactatctcaaaaatgggcatcgaacaatcaatctaggagcgtggcagtgggtaaaatggtggacaggcaccaaagctattttctcatctgtcctgtggatgagtggaactgtggaacaagtgatgtggaattaatgggtgcaacagctgtacagacaatcaataacacacacagttctggaaagaacacatcacttgtgcttgtttgatgagcttgtcacattctaatccctctccccatcctgtttcaattttgggaaacttgtatctgctggtgtcagcaattctgattctgaaataggatcaggcttttactacaacagccttctctttctatttattgtgtcgactcgtggcttatgaataaaggcaggcaaagtttgcagaactgtcttaaggacatttattttttttccctttttaagtaattttacactttagtatctatttcagagtcatatttaaaactatttattagtgactacagtacatgagacaacaaggttactgagattacaattcttcaaaggttaatgataatgtggtttatactgtgccttaatagtaatgctatttaagatatttatttttaagttttactatgctgcactctaaagaaaggaactttagatgtgacactgtaaaattatgtattcatctcatggcataaattatttagtaagtctagatgtagcgtattaaatattaacctattcaactaaagatgttgacttggatttatttaaattcatatgtgcactgtataagagagtactcttacattaacacattttagtttagtttttagatttttttttaaacgatatattgctagtttcatgcttcctcctctgattttgcctgtgtagatttcatttattggtaattcattagtttaacactattatgtagtttttaaatgctgctttacatttttcttctgaaactgcaatacttgcaatttttattcttaaactaaattgaatactattttacactgtattggatttttatacttgaacaatttcatacaagggaagacaggttagcatttttatggactttctccattatcactggatttactttaagtattcccatactagacagtgttatgtaatgtagacatgactctcctgtgcaaattatttattcgttgtgtatattgctttataacatttcagatcttctaatctattcacttgtattaaatataatttttaaaaacttc

SEQ ID NO: 2060 - DNA, 5440 bp, Homo sapiens
  source 1..5440: mol_type = genomic DNA
gggagattcgggaccatggcacctgtgcacggcgacgactctctgtcagattcagggagttttgtatcttctcgagcccggcgagaaaaaaaatcaaagaaggggcgccaagaagccctagaaagactgaaaaaggctaaagctggtgagaagtataaatatgaagtcgaggacttcacaggtgtttatgaagaagttgatgaagaacagtattcgaagctggttcaggcacgccaggatgatgactggattgtggatgatgatggtattggctatgtggaagatggccgagagatttttgatgatgaccttgaagatgatgcccttgatgctgatgagaaaggaaaagatggtaaagcacgcaataaagacaagaggaatgtaaagaagctcgcagtgacaaaaccgaacaacattaagtcaatgttcattgcttgtgctggaaagaaaactgcagataaagctgtagacttgtccaaggatggtctgctaggtgacattctacaggatcttaacactgagacacctcaaataactccaccacctgtaatgatactgaagaagaaaagatccattggagcttcaccgaatcctttctctgtgcacaccgccacggcagttccttcaggaaaaattgcttcccctgtctccagaaaggagcctccattaactcctgttcctcttaaacgtgctgaatttgctggcgatgatgtacaggtcgagagtacagaagaagagcaggagtcaggggcaatggagtttgaagatggtgactttgatgagcccatggaagttgaagaggtggacctggagcctatggctgccaaggcttgggacaaagagagtgagccagcagaggaagtgaaacaagaggcggattctgggaaagggaccgtgtcctacttaggaagttttctcccggatgtctcttgttgggacattgatcaagaaggtgatagcagtttctcagtgcaagaagttcaagtggattccagtcacctcccattggtaaaaggggcagatgaggaacaagtattccacttttattggttggatgcttatgaggatcagtacaaccaaccaggtgtggtatttctgtttgggaaagtttggattgaatcagccgagacccatgtgagctgttgtgtcatggtgaaaaatatcgagcgaacgctttacttccttccccgtgaaatgaaaattgatctaaatacggggaaagaaacaggaactccaatttcaatgaaggatgtttatgaggaatttgatgagaaaatagcaacaaaatataaaattatgaagttcaagtctaagccagtggaaaagaactatgcttttgagatacctgatgttccagaaaaatctgagtacttggaagttaaatactcggctgaaatgccacagcttcctcaagatttgaaaggagaaactttttctcatgtatttgggaccaacacatctagcctggaactgttcttgatgaacagaaagatcaaaggaccttgttggcttgaagtaaaaagtccacagctcttgaatcagccagtcagttggtgtaaagttgaggcaatggctttgaaaccagacctggtgaatgtaattaaggatgtcagtccaccaccgcttgtcgtgatggctttcagcatgaagacaatgcagaatgcaaagaaccatcaaaatgagattattgctatggcagctttggtccatcacagttttgcattggataaagcagccccaaagcctccctttcagtcacacttctgtgttgtgtctaaaccaaaggactgtatttttccatatgctttcaaagaagtcattgagaaaaagaatgtgaaggttgaggttgctgcaacagaaagaacactgctaggttttttccttgcaaaagttcacaaaattgatcctgatatcattgtgggtcataatatttatgggtttgaactggaagtactactgcagagaattaatgtgtgcaaagctcctcactggtccaagataggtcgactgaagcgatccaacatgccaaagcttgggggccggagtggatttggtgaaagaaatgctacctgtggtcgaatgatctgtgatgtggaaatttcagcaaaggaattgattcgttgtaaaagctaccatctgtctgaacttgttcagcagattctaaaaactgaaagggttgtaatcccaatggaaaatatacaaaatatgtacagtgaatcttctcaactgttatacctgttggaacacacctggaaagatgccaagttcattttgcagatcatgtgtgagctaaatgttcttccattagcattgcagatcactaacatcgctgggaacattatgtccaggacgctgatgggtggacgatccgagcgtaacgagttcttgttgcttcatgcattttacgaaaacaactatattgtgcctgacaagcagattttcagaaagcctcagcaaaaactgggagatgaagatgaagaaattgatggagataccaataaatacaagaaaggacgtaagaaagcagcttatgctggaggcttggttttggaccccaaagttggtttttatgataagttcattttgcttctggacttcaacagtctatatccttccatcattcaggaatttaacatttgttttacaacagtacaaagagttgcttcagaggcacagaaagttacagaggatggagaacaagaacagatccctgagttgccagatccaagcttagaaatgggcattttgcccagagagatccggaaactggtagaacggagaaaacaagtcaaacagctaatgaaacagcaagacttaaatccagaccttattcttcagtatgacattcgacagaaggctttgaagctcacagcgaacagtatgtatggttgcctgggattttcctatagcagattttacgccaaaccactggctgccttggtgacatacaaaggaagggagattttgatgcatacgaaagagatggtacaaaagatgaatcttgaagttatttatggagatacagattcaattatgataaacaccaatagcaccaatctggaagaagtatttaagttgggaaacaaggtaaaaagtgaagtgaataagttgtacaaactgcttgaaatagacattgatggggttttcaagtctctgctactgctgaaaaaaaagaagtacgctgctctggttgttgagccaacgtcggatgggaattatgtcaccaaacaggagctcaaaggattagatatagttagaagagattggtgtgatcttgctaaagacactggaaactttgtgattggccagattctttctgatcaaagccgggacactatagtggaaaacattcagaagaggctgatagaaattggagaaaatgtgctaaatggcagtgtcccagtgagccagtttgaaattaacaaggcattgacaaaggatccccaggattaccctgataaaaaaagcctacctcatgtacatgttgccctctggataaattctcaaggaggcagaaaggtgaaagctggagatactgtgtcatatgtcatctgtcaggatggatcaaacctcactgcaagtcagagggcctatgcgcctgagcagctgcagaaacaggataatctaaccattgacacccagtactacctggcccagcagatccacccagtcgtggctcggatctgtgaaccaatagacggaattgatgctgtcctcattgcaacgtggttgggacttgaccccacccaatttagagttcatcattatcataaagatgaagagaatgatgctctacttggtggcccagcacagctcactgatgaagagaaatacagggactgtgaaagattcaaatgtccatgccctacatgtggaactgagaatatttatgataatgtctttgatggttcgggaacagatatggagcccagcttgtatcgttgcagtaacatcgattgtaaggcttcacctctgacctttacagtacaactgagcaacaaattgatcatggacattagacgtttcattaaaaagtactatgatggctggttgatatgtgaagagccaacctgtcgcaatcgaactcgtcaccttccccttcaattctcccgaactgggcctctttgcccagcctgcatgaaagctacacttcaaccagagtattctgacaagtccctgtacacccagctgtgcttttaccggtacatttttgatgcggagtgtgcactggagaaacttactaccgatcatgagaaagataaattgaagaagcaattttttacccccaaagttctgcaggactacagaaaactcaagaacacagcagagcaattcttgtcccgaagtggctactccgaagtgaatctgagcaaactcttcgctggttgtgccgtgaaatcctaagggaatcccaggagtaaccaaggagggggtagttgaaaaatcccagcttcctctgtgcctccactctggccctaaatgctcctccagcatctgtttctcccttgggactgtgtctcatgtttgtgtgaatgtagaccaggaaagggggctgcaaaaatgttgagtctaatgttcgtaagcatcatagaaattcctgtcttcatattaagatgtactgctttaaaacacaactccagagcccctccccaagctcccctccccaagctcctgaagacccggtttctgagggagggaaattgctacttggattgagagtagctggaatgtaagtgaccccaggctttgcctcagggcctttagcctatgtcccccccacataaagagagcttctcagagcctgactgaagagctgacgttttgctttttcatatgccaattaaacccggtctaaatccaaatgcttctccagccatccaggagtggctgtccttttcagtcttgtcttttatataggtagctgagggggaagatttagaagccttgcactcactaaatagattaaacagagcaggcttgtttgttgaattgctccaaagtccaacagacacacactgagcaggtgttttacactcacattccctttttgccccttaaatagaaagtgcaggtaaaggtttatacaacaagaaagcacattgaaaataatttgatactctaacaatccattaacatgtgtaggggttacggtgaggatcactgtgttgtattcagaaaaacggggagagggatgcttaattggccctggcgcttgctatttttttctcatttcttcacaataggaccgtctttggcagcagcaaaatgtatttcagtatggcagtctttcctctcttacattattggtaagattatactaacaaaatgtttccccttgtacaattatgctgtgtttttaaaaaacattgacctgtgtgtttttataaaagaaaaagtatgttgtgccttcttcttaagaataaagttttctaaagggaaa

SEQ ID NO: 2061 - DNA, 6111 bp, Homo sapiens
  source 1..6111: mol_type = genomic DNA
ctttgtggtctacagccacaccaccccaaatgtgcctgatcttgtctgatcttggaagctaagcattgttgggcctagttaggacctggataggagaaatcccttatggctaactatatgtcagaaagcatcagcttttctcgatggacccattcatctaatgaaatatgcctgtactattttaaaaagctttgtatttcgtcatagaaaagttcatccccccagaatgaaaatgaggacatttgagaaggtgatttaaggtgtggacatttgagaaggtgtcctatcaaattagtaaaccaaaggaaaagtactgaatagattaatccaaaacacttactgttttttaaacgaagaggatttcaccttgacagaaaaacaacttttattcaatatgtatttcctgaaattaaagagacaagtacagactgaaaggaaaatagattcgtaaataagctacgtcaactctatcctgctgaggatagctcagtgatgttaaatcctttacaaatccctggttgtcttcctacagacaagactgctttttgatgggactgatattaagagaaataggacctttggggcattcaactccttgataaaacttaaaagtatcggcatgagtggcttaacagaggaaataaagaagttttcaactaaatccaaaagtgcggtcattttctttactgctgttattttaaaaacctcttcataaccattgaaaaagaatcgacaactattttaaaagattaaagaaaggcagatgtctgcaaataattcccctccatcagcccagaagtctgtattacccacagctattcctgctgtgcttccagctgcttctccgtgttcaagtcctaagacgggactctctgcccgactctctaatggaagcttcagtgcaccatcactcaccaactccagaggctcagtgcatacagtttcatttctactgcaaattggcctcacacgggagagtgttaccattgaagcccaggaactgtctttatctgctgtcaaggatcttgtgtgctccatagtttatcaaaagtttccagagtgtggattctttggcatgtatgacaaaattcttctctttcgccatgacatgaactcagaaaacattttgcagctgattacctcagcagatgaaatacatgaaggagacctagtggaagtggttctttcagctttagccacagtagaagacttccagattcgtccacatactctctatgtacattcttacaaagctcctactttctgtgattactgtggtgagatgctctggggattggtacgtcaaggactgaaatgtgaaggctgtggattaaattaccataaacgatgtgccttcaagattccaaataactgtagtggagtaagaaagagacgtctgtcaaatgtatctttaccaggacccggcctctcagttccaagacccctacagcctgaatatgtagcccttcccagtgaagagtcacatgtccaccaggaaccaagtaagagaattccttcttggagtggtcgcccaatctggatggaaaagatggtaatgtgcagagtgaaagttccacacacatttgctgttcactcttacacccgtcccacgatatgtcagtactgcaagcggttactgaaaggcctctttcgccaaggaatgcagtgtaaagattgcaaattcaactgccataaacgctgtgcatcaaaagtaccaagagactgccttggagaggttactttcaatggagaaccttccagtctgggaacagatacagatataccaatggatattgacaataatgacataaatagtgatagtagtcggggtttggatgacacagaagagccatcacccccagaagataagatgttcttcttggatccatctgatctcgatgtggaaagagatgaagaagccgttaaaacaatcagtccatcaacaagcaataatattccgctaatgagggttgtacaatccatcaagcacacaaagaggaagagcagcacaatggtgaaggaagggtggatggtccattacaccagcagggataacctgagaaagaggcattattggagacttgacagcaaatgtctaacattatttcagaatgaatctggatcaaagtattataaggaaattccactttcagaaattctccgcatatcttcaccacgagatttcacaaacatttcacaaggcagcaatccacactgttttgaaatcattactgatactatggtatacttcgttggtgagaacaatggggacagctctcataatcctgttcttgctgccactggagttggacttgatgtagcacagagctgggaaaaagcaattcgccaagccctcatgcctgttactcctcaagcaagtgtttgcacttctccagggcaagggaaagatcacaaagatttgtctacaagtatctctgtatctaattgtcagattcaggagaatgtggatatcagtactgtttaccagatctttgcagatgaggtgcttggttcaggccagtttggcatcgtttatggaggaaaacatagaaagactgggagggatgtggctattaaagtaattgataagatgagattccccacaaaacaagaaagtcaactccgtaatgaagtggctattttacagaatttgcaccatcctgggattgtaaacctggaatgtatgtttgaaaccccagaacgagtctttgtagtaatggaaaagctgcatggagatatgttggaaatgattctatccagtgagaaaagtcggcttccagaacgaattactaaattcatggtcacacagatacttgttgctttgaggaatctgcattttaagaatattgtgcactgtgatttaaagccagaaaatgtgctgcttgcatcagcagagccatttcctcaggtgaagctgtgtgactttggatttgcacgcatcattggtgaaaagtcattcaggagatctgtggtaggaactccagcatacttagcccctgaagttctccggagcaaaggttacaaccgttccctagatatgtggtcagtgggagttatcatctatgtgagcctcagtggcacatttccttttaatgaggatgaagatataaatgaccaaatccaaaatgctgcatttatgtacccaccaaatccatggagagaaatttctggtgaagcaattgatctgataaacaatctgcttcaagtgaagatgagaaaacgttacagtgttgacaaatctcttagtcatccctggctacaggactatcagacttggcttgaccttagagaatttgaaactcgcattggagaacgttacattacacatgaaagtgatgatgctcgctgggaaatacatgcatacacacataaccttgtatacccaaagcacttcattatggctcctaatccagatgatatggaagaagatccttaatcactgagctaacctaaataaggaaggatttcattttatggactgatattttgctgtgtaacttgttctttgtagattgtcatctgcagtgctgcaaagatatgaagaaatatgataacgaataagtgacaccagtactgtagttcataatgagtaggtacaggcgggaaactgaataataagaagtcataatggaatcaaggtgaagctttttataaacttttttagcctaagcaataactggttttgtattttttcttaatccttcactttaatacaataggctcacttaatttgtcttcccatttctctttatatatatatatataaatataaatatatgtttgtttgtttttttaatgaaaaacaagtcaagctagcatccagttactatatagcttggctaaattatacaagacttacaagattgattactcgacaggcttgtatttaagaggtaactgtgaggttaccattatgtgatgttactataaggacttttaacattggtttaacaaaccatagaggcattgaagggtttttcttagatgcctagaaaaagcgcactgggctgttttacctttcttttttaggtcaatcaagactccaaaatagtgattcctaacctttttggagttgctctgctactctgaatatgttctatacagcataaggattgtcaccttctgtgtgttgcaacagcttctaagataattagggacaaatgatgttacaaaaggaagagtactgctggtctaagtgctgagttgtatgtctttgcatagctccactctgctgctaaatatgcatgttctgactgacaccatcttgatgccagtactggattccagcattcagcaggtgcagatctcggctttacacaatttatctttacctagggttcagtcagtaatttctgctttttagcagggccagtgcagggtcagttaatgctacagttactgtatagcaaacagtatccttttttctccttcccctagcctattgggctttgcagatatctggagtgttttaaagtcaattattttaagcagtttgaggggatgtgtaggagtggagcatgaaacagtttataaggctggggctgtattatcagcacagcaaattaaagaatgaaagaagtacttctttttacatttcagctccagcagccagctatttaaaaaatatttttaaatatcttccccaaagtttaagatgtgggaccatctacttgtaagaaacagtggcttatttcttcatttctcagtaatcattgtaaacctttttttttttcttctccactctaacaaaagtaaaagaacaaaacttttgctgaggtcttggactccactacttgttagttatgttggcctggacagatggcaggtctgtcggcagttcctcagtctgtaaaatgaagattatcattcttgcctctccctttgtcacagtgttgtcgtgaagatcagatatgtatgaatgcagtcaaataaactaaaaactaggaaagtgttaactatcgttgcccaccgaatttgaggtagcaaaaaaaaaaaagaatgttctggtacatgaacagactgagaaggcctttcgacatccctgaagctagtctcctgtctagactaaaaatatccttgaaagaatagtagcaaacagtatgcagtactcctgtgttctaagttcttttatgttttagtttaccctcacagcagccatagtgttaagtcattatgagcttcatcttaaagataagaaaactgaggcaaggggagattaacttactgccaaatttcaaacagttagtagtatttgagaccagtagtatggctctaatcttacccttagccctcccaaccattatgctgtactatctacccataaatacctccaggaaacattcccctcttggtaatttgtccttctatagaagcttcaaagattaaatcaaattaattttcaaaaaaaatttttttttagaaatgttattttccctgtgatagaggatgacttcccagtttcaccaaagtctgtttatatcaacacacacaaaatggaataattctgagtcactaggcaatcaatctactgtggttttactatgtaaggtgaaaattaactggaacgatgtttgtttgctatacttacatagtcaaactttacaagccatgaaattaattgcactctttgtatttgttgttaaatgcctaagaagttttctaaaaattttgtaaaggcactgtcagagaatctggagttgaatgattattccagatactgtataacctgcataactttttgtctttaagtcgtgtttgtaaaagaagtaattgctagaaacatttgataatgtacaaagtagtctataatgactgttcagtacatttttaatatttttttggttatatccaactttttgtaaatatactggaagcttgataataaaatgtatttcctatcaccatacttttccatgtgaaaacctgagcctatttctagtataagtatccaaagaaaagtttgacctggttgtgttattttaccagaccttggtaaaagaactattttggaaacagtatttgtaaatggaactaatgctatatttaaaaacactgatttttttttaacctgccaaaaataaaaaaaagctcattttataattttctactaaa

SEQ ID NO: 2062 - DNA, 5486 bp, Homo sapiens
  source 1..5486: mol_type = genomic DNA
ccagttttgggctggttggcgcggaatcgggagattcgggaccatggcacctgtgcacggcgacgactgtgagataggggcgagtgctctgtcagattcagggagttttgtatcttctcgagcccggcgagaaaaaaaatcaaagaaggggcgccaagaagccctagaaagactgaaaaaggctaaagctggtgagaagtataaatatgaagtcgaggacttcacaggtgtttatgaagaagttgatgaagaacagtattcgaagctggttcaggcacgccaggatgatgactggattgtggatgatgatggtattggctatgtggaagatggccgagagatttttgatgatgaccttgaagatgatgcccttgatgctgatgagaaaggaaaagatggtaaagcacgcaataaagacaagaggaatgtaaagaagctcgcagtgacaaaaccgaacaacattaagtcaatgttcattgcttgtgctggaaagaaaactgcagataaagctgtagacttgtccaaggatggtctgctaggtgacattctacaggatcttaacactgagacacctcaaataactccaccacctgtaatgatactgaagaagaaaagatccattggagcttcaccgaatcctttctctgtgcacaccgccacggcagttccttcaggaaaaattgcttcccctgtctccagaaaggagcctccattaactcctgttcctcttaaacgtgctgaatttgctggcgatgatgtacaggtcgagagtacagaagaagagcaggagtcaggggcaatggagtttgaagatggtgactttgatgagcccatggaagttgaagaggtggacctggagcctatggctgccaaggcttgggacaaagagagtgagccagcagaggaagtgaaacaagaggcggattctgggaaagggaccgtgtcctacttaggaagttttctcccggatgtctcttgttgggacattgatcaagaaggtgatagcagtttctcagtgcaagaagttcaagtggattccagtcacctcccattggtaaaaggggcagatgaggaacaagtattccacttttattggttggatgcttatgaggatcagtacaaccaaccaggtgtggtatttctgtttgggaaagtttggattgaatcagccgagacccatgtgagctgttgtgtcatggtgaaaaatatcgagcgaacgctttacttccttccccgtgaaatgaaaattgatctaaatacggggaaagaaacaggaactccaatttcaatgaaggatgtttatgaggaatttgatgagaaaatagcaacaaaatataaaattatgaagttcaagtctaagccagtggaaaagaactatgcttttgagatacctgatgttccagaaaaatctgagtacttggaagttaaatactcggctgaaatgccacagcttcctcaagatttgaaaggagaaactttttctcatgtatttgggaccaacacatctagcctggaactgttcttgatgaacagaaagatcaaaggaccttgttggcttgaagtaaaaagtccacagctcttgaatcagccagtcagttggtgtaaagttgaggcaatggctttgaaaccagacctggtgaatgtaattaaggatgtcagtccaccaccgcttgtcgtgatggctttcagcatgaagacaatgcagaatgcaaagaaccatcaaaatgagattattgctatggcagctttggtccatcacagttttgcattggataaagcagccccaaagcctccctttcagtcacacttctgtgttgtgtctaaaccaaaggactgtatttttccatatgctttcaaagaagtcattgagaaaaagaatgtgaaggttgaggttgctgcaacagaaagaacactgctaggttttttccttgcaaaagttcacaaaattgatcctgatatcattgtgggtcataatatttatgggtttgaactggaagtactactgcagagaattaatgtgtgcaaagctcctcactggtccaagataggtcgactgaagcgatccaacatgccaaagcttgggggccggagtggatttggtgaaagaaatgctacctgtggtcgaatgatctgtgatgtggaaatttcagcaaaggaattgattcgttgtaaaagctaccatctgtctgaacttgttcagcagattctaaaaactgaaagggttgtaatcccaatggaaaatatacaaaatatgtacagtgaatcttctcaactgttatacctgttggaacacacctggaaagatgccaagttcattttgcagatcatgtgtgagctaaatgttcttccattagcattgcagatcactaacatcgctgggaacattatgtccaggacgctgatgggtggacgatccgagcgtaacgagttcttgttgcttcatgcattttacgaaaacaactatattgtgcctgacaagcagattttcagaaagcctcagcaaaaactgggagatgaagatgaagaaattgatggagataccaataaatacaagaaaggacgtaagaaagcagcttatgctggaggcttggttttggaccccaaagttggtttttatgataagttcattttgcttctggacttcaacagtctatatccttccatcattcaggaatttaacatttgttttacaacagtacaaagagttgcttcagaggcacagaaagttacagaggatggagaacaagaacagatccctgagttgccagatccaagcttagaaatgggcattttgcccagagagatccggaaactggtagaacggagaaaacaagtcaaacagctaatgaaacagcaagacttaaatccagaccttattcttcagtatgacattcgacagaaggctttgaagctcacagcgaacagtatgtatggttgcctgggattttcctatagcagattttacgccaaaccactggctgccttggtgacatacaaaggaagggagattttgatgcatacgaaagagatggtacaaaagatgaatcttgaagttatttatggagatacagattcaattatgataaacaccaatagcaccaatctggaagaagtatttaagttgggaaacaaggtaaaaagtgaagtgaataagttgtacaaactgcttgaaatagacattgatggggttttcaagtctctgctactgctgaaaaaaaagaagtacgctgctctggttgttgagccaacgtcggatgggaattatgtcaccaaacaggagctcaaaggattagatatagttagaagagattggtgtgatcttgctaaagacactggaaactttgtgattggccagattctttctgatcaaagccgggacactatagtggaaaacattcagaagaggctgatagaaattggagaaaatgtgctaaatggcagtgtcccagtgagccagtttgaaattaacaaggcattgacaaaggatccccaggattaccctgataaaaaaagcctacctcatgtacatgttgccctctggataaattctcaaggaggcagaaaggtgaaagctggagatactgtgtcatatgtcatctgtcaggatggatcaaacctcactgcaagtcagagggcctatgcgcctgagcagctgcagaaacaggataatctaaccattgacacccagtactacctggcccagcagatccacccagtcgtggctcggatctgtgaaccaatagacggaattgatgctgtcctcattgcaacgtggttgggacttgaccccacccaatttagagttcatcattatcataaagatgaagagaatgatgctctacttggtggcccagcacagctcactgatgaagagaaatacagggactgtgaaagattcaaatgtccatgccctacatgtggaactgagaatatttatgataatgtctttgatggttcgggaacagatatggagcccagcttgtatcgttgcagtaacatcgattgtaaggcttcacctctgacctttacagtacaactgagcaacaaattgatcatggacattagacgtttcattaaaaagtactatgatggctggttgatatgtgaagagccaacctgtcgcaatcgaactcgtcaccttccccttcaattctcccgaactgggcctctttgcccagcctgcatgaaagctacacttcaaccagagtattctgacaagtccctgtacacccagctgtgcttttaccggtacatttttgatgcggagtgtgcactggagaaacttactaccgatcatgagaaagataaattgaagaagcaattttttacccccaaagttctgcaggactacagaaaactcaagaacacagcagagcaattcttgtcccgaagtggctactccgaagtgaatctgagcaaactcttcgctggttgtgccgtgaaatcctaagggaatcccaggagtaaccaaggagggggtagttgaaaaatcccagcttcctctgtgcctccactctggccctaaatgctcctccagcatctgtttctcccttgggactgtgtctcatgtttgtgtgaatgtagaccaggaaagggggctgcaaaaatgttgagtctaatgttcgtaagcatcatagaaattcctgtcttcatattaagatgtactgctttaaaacacaactccagagcccctccccaagctcccctccccaagctcctgaagacccggtttctgagggagggaaattgctacttggattgagagtagctggaatgtaagtgaccccaggctttgcctcagggcctttagcctatgtcccccccacataaagagagcttctcagagcctgactgaagagctgacgttttgctttttcatatgccaattaaacccggtctaaatccaaatgcttctccagccatccaggagtggctgtccttttcagtcttgtcttttatataggtagctgagggggaagatttagaagccttgcactcactaaatagattaaacagagcaggcttgtttgttgaattgctccaaagtccaacagacacacactgagcaggtgttttacactcacattccctttttgccccttaaatagaaagtgcaggtaaaggtttatacaacaagaaagcacattgaaaataatttgatactctaacaatccattaacatgtgtaggggttacggtgaggatcactgtgttgtattcagaaaaacggggagagggatgcttaattggccctggcgcttgctatttttttctcatttcttcacaataggaccgtctttggcagcagcaaaatgtatttcagtatggcagtctttcctctcttacattattggtaagattatactaacaaaatgtttccccttgtacaattatgctgtgtttttaaaaaacattgacctgtgtgtttttataaaagaaaaagtatgttgtgccttcttcttaagaataaagttttctaaagggaaa

SEQ ID NO: 2063 - DNA, 497 bp, Homo sapiens
  source 1..497: mol_type = genomic DNA
gcctatatttctttggttttcaattacgagtggctcttctcagcaagtgttccatgatggttgagcccttcttgggaacctggaagctggtctccagtgaaaactttgaggattacatgaaagaactgggagtgaatttcgcagcccggaacatggcagggttagtgaaaccgacagtaactattagtgttgatgggaaaatgatgaccataagaacagaaagttctttccaggacactaagatctccttcaagctgggggaagaatttgatgaaactacagcagacaaccggaaagtaaagagcaccataacattagagaatggctcaatgattcacgtccaaaaatggcttggcaaagagacaacaatcaaaagaaaaattgtggatgaaaaaatggtagtggaatgtaaaatgaataatattgtcagcaccagaatctacgaaaaggtgtgaagaaaggtccacagcaatgaaaacttgttcactgacaaggaa

SEQ ID NO: 2064 - DNA, 3272 bp, Homo sapiens
  source 1..3272: mol_type = genomic DNA
gcgggagtcgccggcggaggcgaggaggagctctgcgcggcgcggcgggcgatccgagccgggacgggctgcaggcgggggtgctgcagaggacacgaggcggcgggctggagacatggaccgcggcgagcaaggtctgctgagaacagacccagtccctgaggaaggagaagatgttgctgccacgatcagtgccacagagaccctctcggaagaggagcaggaagagctaagaagagaacttgcaaaggtagaagaagaaatccagactctgtctcaagtgttagcagcaaaagagaagcatctagcagagatcaagcggaaacttggaatcaattctctacaggaactaaaacagaacattgccaaagggtggcaagacgtgacagcaacatctgcttacaagaagacatctgaaaccttatcccaggctggacagaaggcctcagctgctttttcgtctgttggctcagtcatcaccaaaaagctggaagatgtaaaaaactccccaacttttaaatcatttgaagaaaaggtcgaaaacttaaagtctaaagtagggggaaccaagcctgctggtggtgattttggagaagtcttgaattcggctgcaaatgctagtgccaccaccacggagcctcttccagaaaagacacaggagagcctgtgagattcctacctttgttctgctacccactgccagatgctgcaagcgaggtccaagcacatcttgtcaacatgcattgccatgaatttctaccagatgtgcttttatttagctttacatattcctttgaccaaatagtttgtgggttaaacaaaatgaaaatatcttcacctctattcttgggaaacaccctttagtgtacatttatgttcctttatttaggaaacaccattataaaaacacttatagtaaatggggacattcactataatgatctaagaagctacagattgtcatagttgttttcctgctttacaaaattgctccagatctggaatgccagtttgacctttgtcttctataatatttcctttttttcccctctttgaatctctgtatatttgattcttaactaaaattgttctcttaaatattctgaatcctggtaattaaaagtttgggtgtattttctttacctccaaggaaagaactactagctacaaaaaatattttggaataagcattgttttggtataaggtacatattttggttgaagacaccagactgaagtaaacagctgtgcatccaatttattatagttttgtaagtaacaatatgtaatcaaacttctaggtgacttgagagtggaacctcctatatcattatttagcaccgtttgtgacagtaaccatttcagtgtattgtttattataccacttatatcaacttatttttcaccaggttaaaattttaatttctacaaaataacattctgaatcaagcacactgtatgttcagtaggttgaactatgaacactgtcatcaatgttcagttcaaaagcctgaaagtttagatctagaagctggtaaaaatgacaatatcaatcacattaggggaaccattgttgtcttcacttaatccatttagcactatttaaaataagcacaccaagttatatgactaatataacttgaaaattttttatactgaggggttggtgataactcttgaggatgtaatgcattaataaaaatcaactcatcattttctacttgttttcaatgtgttggaaactgtaaaatgatactgtagaacctgtctcctactttgaaaactgaatgtcagggctgagtgaatcaaagtgtctagacatatttgcatagaggccaaggtattctattctaataactgcttactcaacactaccaccttttccttatactgtatatgattatggcctacaatgttgtatttgttatttattaaattgtgattgttttattattgtttatgccaaatgttaactgccaagcttggagtgacctaaagcattttttaaaagcatggctagatttacttcagtataaattatcttatgaaaaccaaattttaaaagccacaggtgttgattgttataaaataacatgctgccattcttgattgctagagtttttgttagtactttggatgcaattaaaactatgtgctatcacatgtgaaaagcttaataaattccatctatcagtagtataggtctcaatatttattatgagaccagtggtctggaaacagcttgttgtaccgaatcaactggagtctatgcttaaaaaaaaaaaatttttttttaaccatccttaaattattgcttaatggtatcatattaacatattctaaataagggctttaaggcacaggctgttgaagcattttctcagaggagtggatctgtagaagtctgtctttctatagaaatattgtgcttactcaagtgttaaattattttttctatgaactagtctacttcttaaaattcaaacatattcttttgatcacattgtttcttgagcatcctgccctgctactaacttttcaacaaggcaaaatggagtaaagtggcaatttctttagatgagtgaaataccctcaagtctcttttctgcccaaaaagggaaaagtgatagaaatgggggtggcaagtggggtgagtggatgaaggtgggtattgggggtggctgtgaaagaaaataatggagaatcacttttctagacatctacctatacttaatctaagaaacaaagtaatctactgtaaagtactctgccccttgaaagaagtattaaaaagagtgaggatggatttagaaaaaaacatgaatttagaaatattcaaaatggtttttgtggcagattcaatattatgaattcacagatatttaaagaatgagaaacatagtaattagtagaaatgccagaaacagttcctggttcctcttgtgtttgacactaagaaaatagcaagagtgtgaaatctcagatacttatgaaatctcacagatgtaaggactcaagtgtagaagaaaatatccccttcttacaaaaagaaatgtcaatttatggagtttgtgggaaatagggcaagaattcttatgcttatgagagccaagtagtcagtggaagagagtagagctcaaaactggattatcaccttagcaacttagaatagtttgaaatagaaaaaaagtatttaatttggatctggatctgttaagatatgcacagtctattttttgtatagtattggaaaataaaaatgctataatttg

SEQ ID NO: 2065 - DNA, 2563 bp, Homo sapiens
  source 1..2563: mol_type = genomic DNA
gcctgaactgtttgtacctctgggccatattgcagaaccctgcccttctttgttgactgaggaaagctcgctccctgcccaggtttttcattgttgatcgaaattaacaccaggtggtgaatagagcccctcctaaggttgctcaggataaatcatttattaaataggtctgcttatcaggaggggcgtgaaggctcccaaaaggaaatgctggcacctgggcccagaagccagggcctctaactcctggggttgatttcttcagtgaagttgcaccctacaaagggaatatggccaaagcggcactcaactgaaggctgatatcaggcgattagacagccatgcattctgcgtttgtctggaatggattgtagagagatggacttatatgaggactaccagtccccgtttgattttgatgcaggagtgaacaaaagctatctctacttgtctcctagtggaaattcatctccacccggatcacctactcttcagaaatttggtctgctgagaacagacccagtccctgaggaaggagaagatgttgctgccacgatcagtgccacagagaccctctcggaagaggagcaggaagagctaagaagagaacttgcaaaggtagaagaagaaatccagactctgtctcaagtgttagcagcaaaagagaagcatctagcagagatcaagcggaaacttggaatcaattctctacaggaactaaaacagaacattgccaaagggtggcaagacgtgacagcaacatctgcttacaagaagacatctgaaaccttatcccaggctggacagaaggcctcagctgctttttcgtctgttggctcagtcatcaccaaaaagctggaagatgtaaaaaactccccaacttttaaatcatttgaagaaaaggtcgaaaacttaaagtctaaagtagggggaaccaagcctgctggtggtgattttggagaagtcttgaattcggctgcaaatgctagtgccaccaccacggagcctcttccagaaaagacacaggagagcctgtgagattcctacctttgttctgctacccactgccagatgctgcaagcgaggtccaagcacatcttgtcaacatgcattgccatgaatttctaccagatgtgcttttatttagctttacatattcctttgaccaaatagtttgtgggttaaacaaaatgaaaatatcttcacctctattcttgggaaacaccctttagtgtacatttatgttcctttatttaggaaacaccattataaaaacacttatagtaaatggggacattcactataatgatctaagaagctacagattgtcatagttgttttcctgctttacaaaattgctccagatctggaatgccagtttgacctttgtcttctataatatttcctttttttcccctctttgaatctctgtatatttgattcttaactaaaattgttctcttaaatattctgaatcctggtaattaaaagtttgggtgtattttctttacctccaaggaaagaactactagctacaaaaaatattttggaataagcattgttttggtataaggtacatattttggttgaagacaccagactgaagtaaacagctgtgcatccaatttattatagttttgtaagtaacaatatgtaatcaaacttctaggtgacttgagagtggaacctcctatatcattatttagcaccgtttgtgacagtaaccatttcagtgtattgtttattataccacttatatcaacttatttttcaccaggttaaaattttaatttctacaaaataacattctgaatcaagcacactgtatgttcagtaggttgaactatgaacactgtcatcaatgttcagttcaaaagcctgaaagtttagatctagaagctggtaaaaatgacaatatcaatcacattaggggaaccattgttgtcttcacttaatccatttagcactatttaaaataagcacaccaagttatatgactaatataacttgaaaattttttatactgaggggttggtgataactcttgaggatgtaatgcattaataaaaatcaactcatcattttctacttgttttcaatgtgttggaaactgtaaaatgatactgtagaacctgtctcctactttgaaaactgaatgtcagggctgagtgaatcaaagtgtctagacatatttgcatagaggccaaggtattctattctaataactgcttactcaacactaccaccttttccttatactgtatatgattatggcctacaatgttgtatttgttatttattaaattgtgattgttttattattgtttatgccaaatgttaactgccaagcttggagtgacctaaagcattttttaaaagcatggctagatttacttcagtataaattatcttatgaaaaccaaattttaaaagccacaggtgttgattgttataaaataacatgctgccattcttgattgctagagtttttgttagtactttggatgcaattaaaactatgtgctatcacatgtgaaaagcttaataaattccatctatcagt

SEQ ID NO: 2066 - DNA, 342 bp, Homo sapiens
  source 1..342: mol_type = genomic DNA
ccccgcgctgcacgctctcgaggccctgccgtgtcccgccctcgggctccaaggcctgaactaacaactgaggcgggagaaccagcacgaagatgtgtacctccctacgagcaccggcccggaatgcagtgtgctgttacaactcccccgccgtcatactacccatatccgaaccttagatgggacacaagtcacttcaagaagtctggtggtccccagagaaacaactatgttatccatcctgagtttgtgtctgagacctatcccgactatcgttgctggtagagcctgggcttgctgtgccaagggggcagagcaataaataaactcttcaaccccaaa

SEQ ID NO: 2067 - DNA, 1692 bp, Homo sapiens
  source 1..1692: mol_type = genomic DNA
agaaagaaggggagaagaagcggggggatgggtggagggtagaggggagaaaaatacgtgacaaagaaaacattctctgcctgggaggagactctctgagggtgtagagctagagggagcattcactggccatgccagtagttaccactgatgctgagtcagaaacaggtatcccaaaatccctttccaatgagcctccctcagaaaccatggaggaaatagagcacacatgcccacagcctcgactgaccctgactgcacctgccccatttgctgatgaaaccaactgccagtgtcaagcaccccatgaaaaactgaccattgctcaggcccgcttaggaacaccagctgacaggcctgtcagagtatacgccgatggaatatttgacctcttccactcaggtcatgcaagagcccttatgcaagcaaaaacactgtttcccaacagctacttgttggtaggagtttgcagtgatgatctcacccacaaattcaaaggtttcaccgtgatgaatgaagccgagagatacgaagctctcagacactgtcgctacgtagacgaagttatcagagatgctccctggacactcacgccagagtttctggaaaaacacaagattgactttgtggctcatgatgacattccgtattcctctgctggctctgatgatgtttacaagcacataaaggaagcagggatgttcgttccaacgcagagaacagaaggcatctcaacatcggacatcattaccagaattgttcgtgactatgatgtttatgcccgacgtaacctccagagagggtatacagccaaggaactgaatgtcagctttataaatgagaagaggtaccgtttccagaaccaagtggacaaaatgaaggaaaaagtcaagaatgtggaggaaagatcaaaggaatttgtgaacagagtggaagaaaagagccatgatctaattcaaaagtgggaagagaagtcaagggaattcattggcaacttcctagaactgtttggacctgatggagcatggaagcagatgttccaggagaggagcagccggatgctgcaggccttatccccgaagcagagccctgtgagcagcccaacccggagccggtccccttcccgctccccatcgcccaccttctcatggcttccactcaaaacctcacccccttcctcacccaaagcagcctcagcctctatcagcagcatgagcgagggggatgaggatgaaaagtagaggctgctgggaggcaagagccgcaccatgcaggatggggaggagggcgagagtcacagggttgcctgggtggtgtttgaagggtaatagtcacaggagctgcagctcagcagagagaccctgaactctgctaagggaaggtcttgggaccagttctctctcactctccgtacagctgaagagttgggcgaggtgcagagacttctagctggacaacctacacaaaccttagcgtctagagtcactctaaccttgctaaggaaggatgcagagttccctagagagacttgcactgatggggtgacttctgctttggtccttccaccacccccaccaagtaaaccacctgtggcagcggctgttccctcaacctgctacttctgcgtccataagggtcctgcacgttgcctcccaccaccccagctctgccagaataaaattgtttccaata

SEQ ID NO: 2068 - DNA, 5307 bp, Homo sapiens
  source 1..5307: mol_type = genomic DNA
aaagggtagaggcctctagagaagataaaaagatcaggagcaggcatggtaggccatcaggagtgcatcatggaagaggacaatcgcgctccccaattgtggcgcaagaccctgactgcacctgccccatttgctgatgaaaccaactgccagtgtcaagcaccccatgaaaaactgaccattgctcaggcccgcttaggaacaccagctgacaggcctgtcagagtatacgccgatggaatatttgacctcttccactcaggtcatgcaagagcccttatgcaagcaaaaacactgtttcccaacagctacttgttggtaggagtttgcagtgatgatctcacccacaaattcaaaggtttcaccgtgatgaatgaagccgagagatacgaagctctcagacactgtcgctacgtagacgaagttatcagagatgctccctggacactcacgccagagtttctggaaaaacacaagattgactttgtggctcatgatgacattccgtattcctctgctggctctgatgatgtttacaagcacataaaggaagcagggatgttcgttccaacgcagagaacagaaggcatctcaacatcggacatcattaccagaattgttcgtgactatgatgtttatgcccgacgtaacctccagagagggtatacagccaaggaactgaatgtcagctttataaatgagaagaggtaccgtttccagaaccaagtggacaaaatgaaggaaaaagtcaagaatgtggaggaaagatcaaaggaatttgtgaacagagtggaagaaaagagccatgatctaattcaaaagtgggaagagaagtcaagggaattcattggcaacttcctagaactgtttggacctgatggagcatggaagcagatgttccaggagaggagcagccggatgctgcaggccttatccccgaagcagagccctgtgagcagcccaacccggagccggtccccttcccgctccccatcgcccaccttctcatggcttccactcaaaacctcacccccttcctcacccaaagcagcctcagcctctatcagcagcatgagcgagggggatgaggatgaaaagtagaggctgctgggaggcaagagccgcaccatgcaggatggggaggagggcgagagtcacagggttgcctgggtggtgtttgaagggtaatagtcacaggagctgcagctcagcagagagaccctgaactctgctaagggaaggtcttgggaccagttctctctcactctccgtacagctgaagagttgggcgaggtgcagagacttctagctggacaacctacacaaaccttagcgtctagagtcactctaaccttgctaaggaaggatgcagagttccctagagagacttgcactgatggggtgacttctgctttggtccttccaccacccccaccaagtaaaccacctgtggcagcggctgttccctcaacctgctacttctgcgtccataagggtcctgcacgttgcctcccaccaccccagctctgccagaataaaattgtttccaatagaggtggcaaagtgcttctgaaatagtcgagaaaaagacagattccaacctcctcagtccagccactgagacctgatgttggaacgcatcagctccttccagttccatgaatgtggctcatagacaaagccttgctttaggctggttataaaaggtcatctagtgtgaaccttaactttttattcaaaggacagttttgtcaagaactccacgtaaggcctgatgtgctcctggttgtactttctcatcactggtttgacttcattgttttgcagaaattaccttaatccgtgggaactgcaacaaagaaaaacttcctaatatataaaaaagaggagctgctttgctttgcctccaggtttagcggacaagaaatgtctcctgaagcttctccttaaaggatgctattatggaatggcttttcccatttctgaccagttaacagtttcatagacctcaagtaacagtttgaggtatcaaacatagtataccaatagggggtgctacctgcacgtatctgttctatatatgctccaatatgtcatccccgggtgtatcccatgtgcaatatgagtatatagtggtggcattttataatagaccccactcctgcgctccaccataatactcctctgaaatccttggtctcaagaaacatctgttctcttgtgacttgggcactttgtcaagcttattccagattcctgtggaaacgttttatcccaaccaggaaattagtattttgttctcgtggcctcctataacatttttgggtgaaggagaactcaagactttttacagagaactgtgggctcagttatgatctcagcatctgaatggtctaggtagtatcaccattatctctggccctaggtttgccaagtaggatgaagactctaagtgttcctgctgagttgtccaaaggtcctgctccttagtcacctgtgcgaaatgagcagggagagttaaggcatagaaccaaactctttgggttattgtatgggtatgccagtaaattcagacacagagctggggtctgactgaatagaggcccaaaccagcaacttgtaggcagagcccagaatctcttgtgatagaaataccccttttcagaggccttgggaaccagccttctaggtgacaaggggacaaccagtgaaggaaggcggcatgtctttccccttcttgttggggttgaactacctccctatccacttggagatgagtgctgtctgctgtgaagcaaaactatgaggctgagctggcttggaacctctttgttcttggcactttccttctccaggactctgggaagcactcatatgggacagagggctggcaggaacatggcatgtgaagaagaaaacttctttttgcagtcaagggccacccagaatattgctcttcagagagggacaagggcctcattcttccatttggtctctgtcttccatcatgcactcaggtcaagccatgcaagtctgcctaccatttgagttagttggcacttgtagcagtgaaggatgaggccagccaggcaagggaaggtggcgggaacaagggaagagaaaaggaggaaagaagttcctggagggaggaaaggaggataaagaaaatctgctctcataaaaccatttcaggacctcactttacaggtgagactctcttgggaaggcctttgtgcccctgctccatggcccagggcagatagattcacttttacctgaatcttatactctggagcaaatagtgtatcaggctgactatacatttgcaggccttacacgccatactgacaggtgccacttacgtgactcatcagataatgtcaccattgctgccaattatgggaaataactaatgcctattccagggatgagcccaaaccacacataaatgggttctaaatctcaccctcctaacctgcagtgagtccccccgttccaccctcttgaggctgcaaatctactgagaaggaatgggaaggattctacaacccaacttttgatactttttggccatctctcagtctctcccagcccctacccccacaccacctccctgctcccaggcagagaccgggttgcactttgttagggccagcaggtcaactgtaatggccaagagtgagttaaggctggaatgagaaatatgccccaagcttggaggggtaagcaggaataacacaaagcaaggaaagagattctttttgccctagtgaggaaaggaagcttcagaatgagggctggaggatagcaacttaggactgcagaagggggcagcttatgaagatgggagaaagtgggactgaagttgtaggggagcaggagggtagtgattttccgcttttctttctttctttcttttactttctttctctttctttctctctctctctctttctttttctttcttctttctctttttctttcctctttttctttctttctttttctttctctttcttccttctttctttcattcttctttgttctttcttctttctttctttttttttttttttgagatggagttttgctcttgttgctcaggctggagtgcaatggcacaatctcggctcactgcagcctccacctcccaggttcaaggggttcttctgcctcagcctcccaagtagctgggattacaggtgcctgccacgacacccagctaatttttgtatgtttagtagagacggggtttcaccatgttggccaggctggtctcaaattcctgacctcaggtgattctcccgcctcggcctcccaaagtgctgggattatgagcacgagccacggcgtccagccgattttccgctccctttcaagtgttaactcaccccctgacaggtgaagagggaagggttccttttacgcacaaccaaggttagcaaatgcccatgcaggatatggggtccctgcctctctggttgcttcatttcagcacttctatattagctgcttatggggaccctaaaatgaactggtcacccctccaccagctaagaaacaagggtgggattgctgtgccataagtcacactgaacgacttgcttctggcaagcatgctcctgtgtgtcaggaccttaccaaggcaaagaaatgccaggctcaagaggagcaggacgtgagacattggcctggcttctaacctggtctgagtggaagagacacagcttagggatttcagttttgctcttaggctactagatactgttatttcaccccctgagggagggacaggaagagcacggatttattttctctccgtcttcagtacttattttagcatctagtcataccccagggagagatgcgagacggtgtcactggctcagctgaagcagatgagcccgtctctagcagagatgtgcctgtttcttaggcatccgttcagcactagtcttggccatcagatttttaaaaaagaaatagctcatgaggcatttgcaacttctcctctctagacttctttctagttttcctctgttgtgtcactgcgatgtgtccagggacaaagccataagtagagcatacatacttaagactatgctgtacatataagacaagacctgtctgggttaaagcacgaccttatgcccaagcatttactctggtgctgaataacgcgaactactggaatcagcctcccccaactctgcgcgccccctgcccccctgctcctatcccattcttgctctcaaatggaccacaccattctcaactcgtttataaataaagggatgcagaattgca

SEQ ID NO: 2069 - DNA, 715 bp, Homo sapiens
  source 1..715: mol_type = genomic DNA
atggctgataaatccaaatttattgaatacattgacgaagctttagaaaaatcaaaagaaactgcactctctcatttatttttcacctatcaggggattccttaccccatcaccatgtgcacctcagaaactttccaagcgctggacaccttcgaagccagacatgatgacatcgtgctagcatcttatccaaagtgcggttcaaactggattctccacattgtcagtgaattaatatatgctgtttctaaaaaaaagtataaatatccagaattcccagttcttgaatgtggggattcagaaaaatatcagaatctggctgctggaataaaacagattgctgagttcttgggattctttctaactggggagcaaattcaaactatctcagtccagagcaccttccaagccatgcgtgcgaagtctcaggacacacacggtgctgtcggcccattccttttccgcaaaggtgaagttggtgattggaaaaatttgttcagtgaaattcagaaccaggaaatggatgaaaaattcaaagagtgcttagcaggcacctccctcggagcaaagttgaagtatgaatcatattgccagggttgattccagtcaattcagcaggcctagatttattttccttaataataattaagtgtaaataattaaatgataattcaatcaaataatcaaataataattaaacaatattgaaatctaa

SEQ ID NO: 2070 - DNA, 9233 bp, Homo sapiens
  source 1..9233: mol_type = genomic DNA
gaggagagggcgcgttagtgagcagcgactgtggcattgatgtttgagcatacttctgaactggcttttgttgagactatcagtatagaagcatgcgctgtcccaaatccgctgttactatgagaaatgaagagctgcttttaagtaacggcacagccaacaagatgaacggagctttggatcactcagaccaaccagacccagatgccattaagatgtttgtcggacagatcccccggtcatggtcggaaaaggagctgaaagaactttttgagccttacggagccgtctaccagatcaacgtcctccgggaccggagtcagaaccctccgcagagtaaaggttgttgtttcgtaacattttatacaagaaaagctgcacttgaggcccagaatgcactgcacaatattaaaactttacctgggatgcatcatcccattcagatgaaacctgcagatagtgaaaagtccaacgctgtggaagacagaaaattgttcataggaatggtatcgaagaaatgtaatgagaacgacatcagggtgatgttctctccatttggccagatagaagaatgccggatcctccggggacctgatgggctgagtcgaggctgtgcgtttgtcacattttctacaagggcaatggcacagaatgcaatcaaagccatgcatcagtctcagaccatggagggctgctcttcacctatcgtggtgaagtttgctgacactcagaaggacaaagagcaaaggcgcctccagcagcagctcgctcagcagatgcagcagctcaacactgccacctgggggaacctgacagggctgggcggactgaccccacagtatctggcgctcctgcagcaggccacctcctccagcaacctgggtgcgttcagcggcattcaacaaatggcaggcatgaatgctttacagttgcagaacctggcgacgctggctgctgctgcagctgcggcccagacctcagccaccagcaccaatgcaaaccctctctctaccacgagcagcgccctgggagccctcacgagtcccgtggctgcttcaacccccaactccactgctggtgcagccatgaactccttgacctctctcgggactctgcaaggactggctggagccactgttggactgaataatattaatgcactagcaggtatggcggctctgaatggaggacttggcgccacaggcttgacgaatggcacggctggcaccatggacgccctcacccaggcctactcaggaattcaacagtacgcagccgccgcgctgcccactctgtacagccagagcctgctgcagcagcagagcgctgcaggcagccagaaggaaggtccagagggggcaaacctctttatttaccaccttccacaggaatttggagaccaggacattctgcagatgttcatgccttttggaaatgttatctctgctaaagtcttcattgacaaacagaccaatctgagcaagtgctttggttttgttagctacgacaatccagtctctgcacaagctgctatccaagctatgaatggctttcagatcggcatgaaacgcttgaaggtgcagctgaagcgttccaaaaacgacagcaaaccttactgatcctaaccccagaggctccctgctctcattttagctttcttagggtaagtcccacgagccagcctgtctcaacagggaaggcagaggaggaccacattgccaacttttaccaagagagacggttatttttacaataaggcctccatgtccccacccacttcccctacccagtttgccataattaaaacttgggctactttgtttctattgagtaattcctcctccagttgtgccactgtattctcctttgttttgcgatttgaatctccttttacctttttttttaatttttttcatttttgcttttttttaaagagaagcatatacacaaataaatggcatcttgagaatttaaaaggcaaacaaacaaacgctaatgtgcaattctaactctgaaaccactggtgccccgagagcactgcctggagaattcacccctccttgcccggcgcccgcccccggagggagggcccggtgcttagaggttaacttggtggcctaggagagggagaagccaggagaagcacttactccaaccacacgtctttccactacatcggcttgttttactaagtaggattttattttagggttcaaagaaacatgacatttattggtcaaaatattacactggttgtctattttgttattgttttattttagtttttagaaaggattaatgtacaaaaagatttagagatctgtttcttaaagctacagggtttaaaaaataaaaatgagtgaaaatacttgatgtttcttgaaagataaatttaataataataaataaatacataaatacataaataaaaaagaaagccacaggcctgtaaattttatttgtaaaaaagcatttctatttttatacaaaatttttactgcctcagaaataatggaagttatttattgcctattgttaacttattgggtacctaaagagcagttctctgtctagctagaaccttctgaagtagtctctagaggaattgttctaggaatgggctttttttcaccgttgaaccctagacctgaagttcatgctttatcctctcgttgtttgtatctgtctgattattttgtttgtaacttccattatctagtttacagttcagtcgtctgactttccccgtatgtcacatttgttgaaactggaccttctccccctgtccctcaccccaaaacacccggaatccatcccgtttcgctctctccagatggattctcttggggtttcattgtgctgtggataaggagtgtaagaaatgcaaattatgtgaatggctcggagactccctaatgacctaagatttgcattagtttttctcctgcacccttaaaagtgattttgttgccgctgcatagattctgtgtaactttttactcttccttgttttttccctagacatcttcatgcccgttagttcatcgtttgcctagcatgtccctgtggcgtctcaaaaaaaagtttcatcgtcccgtcattgtttctgatgtctttctgacctcacatcatatttggttctcctactgacctttgatctagtttgacctttgaaatttgcatgtgacctcatctagctatgaattctgggaagtcaatgtgaaaaacattgctgcattcatgcaagactgaaatttattattagacaaattcattatagaaaaaacctgtggcaaaaacgtttctttcttattttttttcttttcctaaaacagacttgaaagtattatacagggattggcattcttcccggtcactggtaacaatagcaatatgtgtccagggacacagaatgttggtttctaacagactacttccaaaaacagtttgagaaaaaaactgtctgattttaagtctctagaggtctgtaatagtttttacatttttcaggcagtgtaaagttttttgataaggccattttaggtggctcactttctcattaagatatatatatagaaccactttttgtagattagtataagaaaaatatttaccctgttttggggcaaatgctacctatttgtgtcaccttttgctgaactcacagttagacaatccatggtttaatgcacatgaaattacctatattttatactgtttcaatgtacaggagaaaggttactgtaaactgtgttatgttggtgcttctgtgaattaagttgtggtttcatcatgagtcttaatgttctttgttgataagacaagtttagaattggtttacttaatacaaaaaaaaaaaaaagaatttcaaaaaaaaaagttgtttgcttaaaaaaaatttcatgtgagggaaaaaaaaaaaacctattccagaataagttttgtgttggcttgtgaagcattgatgtcattttttttaattgtggactatttagatgtgtttgtgttcagcaaaatgtgatgtttttttcttttaaagaaaaaaagtgaaaatatatagtgccaaattccaaaggtacttccttcctagagcttcagtgtgtttcttgtgagaagtaatttgataacatgggtattttattatgtgttttgtataaatccctaatatttaaaaaaaaaaacaaaacaaaaaaaggttacaaagtttgttaacttgctatcctgtggtcttgttgcctgaaattgttattgtttgttatttctctctgatgttttttgtaagacattgtataagtgcccatgtcccacttttttaaccactccgcacatcagtgctgtgaaggcaacctcaccatgtattttcttcataatctatggaaacctctaaggtgagaaagttttgaacttttaaccctttctacccagagctatctggaatgttgatgactttttatactgtcatgatttgagtttgttttggggtgtttccaatttggatttttttccctgcatctatcctctaagttgtttcggtttgactactttgttctttggttaagatccaaaagaaaacagaaaacaattccacgaggccaatctaaagggaaaaaatcctacactacttttactacttttgattatttctcatttttgggaaaagaattcctaatgtgctactagaattccttcttcagttttaacgagtaattggataaaccctgagggaaaacggaggtagattcagcacctaacaatcctgtatgcttttgagatcacgtttagtgctatgtcctagtctagaatattttcatataccttgcagtaaaacgactttgtggcaggacagtctcttgaggggttttgtttctgtttcctaaatactcctaaataatatttctaatcagccattatgctggggcatctctgatcccagtaggtacctctgaatataccaggtgtctggagttagaagcccatagccctttcccagcctttttggtttttttaattgaacacatttcatctaagtaaagctcagttctttatcacaatttactgaccaaatacctagcaccagttcctgctgccactttttaaagtgccatatgactttctacgaacaggtaccttgctgtcttgacaaatcctaatgtcacgcctacagccccaacacaagctccagtcttcctcttcggcatgccctggaagcttcttggcctcagctccccttccccgctcagcaccctgttaggatcagtgtgtgtggatgggatagccctgggatggaaaggactagcctctactgatgcaaaaaaacaaaaagcaacacaaacgtttccttcttatagcacatgcacttccttacaatgacatgatttgtattatcctcacatgtgtttactactgctggggccttccttcatcctctgagggctattttgtactttctgcagcaatcagcttaataacaacacttattgcacctgtctctctctgagaacacggtgtgtctcgacacgtaccacgtacgtggaaacacaagagcccaccacttgaatttctaagaccatttcattctgaaacttcttatcaattacctaaatctcaacgaaaaacaatttactgaagccgactcccctccccatctccctctcaacctcaacccacctgcatgcatctcccccagaggaaacactgagggtaggggacaggaggctcaggacgcgccctctgaatcgagtgtttcttcttcacaagtcaccaagagaggacatgagggggaaagtcctttttgcccttctccaaaaaataaccttccacagagacaaactgtccttctatccacttttatcttttaataaatatcaaaaggaaaaagctgcaagggtgcaaagggcctgtgccagaagaaaacacacacagggaaaccgctttttttaatcaattgtagagaatagtcatttttaatctaaattagagaattgtgatacaatggcagtcctcaaaggcgtaacgagttcatctttctttcaccataggggttatagttggcttgtgctactctggaatcattttactgtttgtttttattatcttaagtgctaattaaaaaaaaaataaaattttaaaaaaacctgtagtttcattacctttttgaataatgtcatacaaaaaatgtatttgtttttttgtgctgtgagaattgatgtttgtagattaataatcattttgtttagaattacaaaatagtttttaaatattgtctgagaaaagccaaagttaatgcaacctagtggaaactgtaagaccatttgagtattgtttgttttattgatgcatttggattttgttgtttgatggaatttgagccaaaaaaaaaatacgcaggctttcctatttctacaactgattgtacttatgcattttgtaccagtggaactttttatactggagattaaaaaaaaaatggaaatttttgtggcttgctctggtgggcccctgacaatgactgatttcaagtttgatttcgggttgattgattgattgattgatagaaagaaagttgcttttcttttgagaattaaaaactttggcttgatttcttttttccctttgcttatatctagcattagaattttgtcttaaaataacagcggtaagtttcactttttattctgtattgtgcagttacacaataaggtaattagatttagaagtactcagtcactttaagtggataaatgtattagttaaaactttagggtttgcttttttgctgtttagatcaaagttttttctgattcttctgtcctcattgtgaacataaccgtgtagttgaaacagtcaaacttatttttgtaatgtatgttattgtgtgatgcagttttttgcttctgtctccaatattaaaccattttcctaatacttgtttctctctctgcgtgttgtattgttggtagtcattatatgttggtgatacatctgcacacctcactgtttcacgtatctgtttttttctctatgttgtgtaaaaagatacagtcgattccacttaagtgaatatctgatttggggaagaggaaactgcacagcagccacctttgatttatgtacaaccgcccacttgaactcctgcttccaagatttatacacttttttcctacagttcacctcagtaactgcctttggggttggatttgccaaggtgttttacggtcttttgaccacacaggttaatttccccttctctcccctccctcatgagtctatccacgcagttcttaacatacattccaaactgctgcggggtttcctctccacacccacgaggccaaacccgcatcattacagtccaactcttcttagacactaatcactttctaaaagaagtgagttctccagggaagaaaaatcaacttagccagtgaaaagggttaaacttaagtctattatttgttgccctcaatcaaaagatatgtatagaaaagtcatttaaattatttatttctacaagctaattgaatccaggagcagctttaattattaacactaacggaagagaaaagaagtatttccaagggctcaaatggaagctgtactcagtccggtggaggcagggggaggtaaagtttctcacactcaagtcgtcttcatagtttactgtccttttccaaacaaaagctaataacgccatacgcatccacacactccctcctggatgaacctaagtctcgtccccactgtcaccccaaggccagttatcaaaaactgttccttctctgccctcaaagactgaagccgcaggccctgttctgcctctgctcaggaatctgattgctcttaaagtgctcttacaagattccgtcgatgtttgctccctctgtcttatctctccttccagtattttcagacgcacaagctctgactcaggccacccagcacctggcagccttcctctgcgtgccagtgaaatctctcccagtaggtgctcaggctcttcaccctctcgttgcagcagcccctctggcccgagattgtattttctagtctgctcaagaacagaggggcctggcgaggtggaggaagggaggctccctccccggggctggccgcctcagtgatggtgatgccaccagctccagcctgcacggatggagctcacttcctaccatcacttctgctttcagtctcctcatagccttcggcagtctcctctgaaaacacactgcctacgttagtgggaaaggatggctaagggtgtgatttctttttattagggaggtgggagggggatgttgggaggcatggggggtgattaaattatcatttccaaggtgcaagtgtttatttttcaaatctataagtacatagttccaccattttggcacaagacaaaatactcatgctaagcaaaggaagagaaagacaaagccagtttttgttgcttttctaaagcaacaaataattctccaaagaaggggatgaaaatgctagttcctttaagcacttactgactgtaaagttggtccctgcttaaattcatacccatagttttgagtcggtatgacaccactgcagtgtgagcaaggtgaatccgtgtgccatgcatggaccaccttgggataccgcagcaccatcaacatccgccttgctgatggaagccacacacgctgcccagcccacagcagtcgcacgcagccgatgggctcggactcttagctggcaggctaggacacacagtgaacattaatgtactgtgaatcgttcctgataagtgaataaaacattgtgaccaaacaatcagcttattcacttatcaggaatcgactgttctgctaatttgctgttgttgtttttcatctctgttgtagttcactatttttgctgtgttctgttttctcctctcatgcttgggcaaatcactgggaatattatcttcatgtgaccatgaaacgtttctattgagtgaaaatgatatcttaacaaaatctatgcacttgctatcaggaacacaatactggatgtgtcttatatatattgaactatatagtactcgatttcttaaataaagcttaagaaaggactctgttgtgtgtaaagttaatgtgattatttttcaaagcagtgtttctaaggggtatttttgttcttttaagtcttgagtgatacaggatatttttcattaaaattatatcactggctttatgacttaatattcaataaattgactttgg

SEQ ID NO: 2071 - DNA, 2114 bp, Homo sapiens
  source 1..2114: mol_type = genomic DNA
acagcccggcccctgccctgcaccaggccactgccctgttggtgaggagggtcggaggggcgacctccctgccccctgctccaagctccccacccccacctggaacctgccggcaggaagcctggccctggagggtggtcacggcccctccccagatgcccggcccacgagaggccaatggggagcagccaggaggagggactccggtgtcagccaagccagccagaccacgacgcagatggacactgtgggccggacctggagggggcagaaagagcctctgccacacccggaccccctgggctcctgaacagccaccggcctgcagactcggatgacactaacgccgccgggccctcagctgccctcctggaggggctcctgctggggggtgggaagccatcgccccacagcacccggccggggcccttcttctacattggaggcagcaacggggccacaatcatcagctcctactgcaaaagcaagggctggcagcgcatccatgacagccgccgggacgactacacgctgaagtggtgtgaggtcaagagccgagacagctacggcagcttccgggaaggagagcagctgctgtaccagcttcccaacaacaagctcctcaccaccaagatcgggctgctcagcacccttcggggacgggcacgggccatgagcaaggccagcaaggtgccggggggggtccaggccaggctggaaaaggacgcagcagcgcccgccctggaggacctcccgtggacaagcccaggatacctcaggccacagagggtcctgagaatggaagagtttttcccagagacctaccgcctggacctcaaacacgagagagaggcctttttcaccttgtttgatgaaacccagatatggatctgcaagcccacagcctccaaccagggcaaaggcatcttcctgctccggaaccaggaggaagttgccgccctgcaggccaagacccggagcatggaggacgaccccatccaccacaagacgccgttccgggggcctcaggcgcgggtggtgcagaggtacatccagaacccgctgctggtggacgggagaaagtttgacgtgcgctcctacctgctcattgcctgcaccacaccctacatgatcttctttggccacggctatgctcgcctcacccttagcctttacgacccccattccagcgacctcggcggccacttgaccaaccagttcatgcagaagaagagccctctgtacatgctgctgaaggagcacacggtgtggagcatggaacacctcaaccgctacatcagtgacacgttctggaaggcccggggcctcgccaaggactgggtcttcaccaccctcaaggtgcgtccactgtgccctccagtctgggagtgagatccctcggggcgggggtgtgtggtcaggctgggcaccaggcacacagatgtccgtggcgtgcgtgggcggctgcgctgaagtgtgacctgaccgtgtggaaccaaacccttccagcgtctctgctcacttagctggcagtgcctgtccccagcagccagcaaaggcccggacggaaagcccagtcgggggtctgtcggcacgagtcccgcgggcagcctcgccgtagggtcaggggacagctcggcttcagtgacagccaccatgtgaagagtctttgttcctttcagatcctccacttggcaggcagggccaacagcagcccccgggccaggtgtcctggagcagcagcagctgcccgtgcaggcccggactctccctagctaagggccatgtgcggtggagtgtcctaattttgcagggttcctttctgtgggggtacctgtggggtacttcaaacagccctagcagcaaaggcccttgagcagcgcggtgtgaaactgggataaaaacggggcttggccgaaggacttttatctgtcttggtcaccccggccaggccccggaagcagcagccagggatggtccttcctcacccacaggcgtgtgtcactgtggctgggacggcagcgctcagaggagcctccagttactttcctcacatctcccaaactctctcttaattgcgataattcacagaacataaaattcacgatcttaaa

SEQ ID NO: 2072 - DNA, 2259 bp, Homo sapiens
  source 1..2259: mol_type = genomic DNA
aggaccttgtgggctgggcagcggcctccggccgggaggcaccagctcttcgaacaatgtttaaaagtctcttctgttcatcctaccggggtgccgtctcctgccggtcttttcatctcaccagggccctcgcccgggcaccccccggccaatggaccacagctgcacccggttcatccaccgccggggaccacccactcggacccgagccggcttcaagaggggcaagaggccaaggatccagcagaggcctcgggctcgagtctcagggaccatccctgcgtcacgtctgcacccagcaccggcctcacagcccggcccctgccctgcaccaggccactgccctgttggcccggcccacgagaggccaatggggagcagccaggaggagggactccggtgtcagccaagccagccagaccacgacgcagatggacactgtgggccggacctggagggggcagaaagagcctctgccacacccggaccccctgggctcctgaacagccaccggcctgcagactcggatgacactaacgccgccgggccctcagctgccctcctggaggggctcctgctggggggtgggaagccatcgccccacagcacccggccggggcccttcttctacattggaggcagcaacggggccacaatcatcagctcctactgcaaaagcaagggctggcagcgcatccatgacagccgccgggacgactacacgctgaagtggtgtgaggtcaagagccgagacagctacggcagcttccgggaaggagagcagctgctgtaccagcttcccaacaacaagctcctcaccaccaagatcgggctgctcagcacccttcggggacgggcacgggccatgagcaaggccagcaaggtgccggggggggtccaggccaggctggaaaaggacgcagcagcgcccgccctggaggacctcccgtggacaagcccaggatacctcaggccacagagggtcctgagaatggaagagtttttcccagagacctaccgcctggacctcaaacacgagagagaggcctttttcaccttgtttgatgaaacccagatatggatctgcaagcccacagcctccaaccagggcaaaggcatcttcctgctccggaaccaggaggaagttgccgccctgcaggccaagacccggagcatggaggacgaccccatccaccacaagacgccgttccgggggcctcaggcgcgggtggtgcagaggtacatccagaacccgctgctggtggacgggagaaagtttgacgtgcgctcctacctgctcattgcctgcaccacaccctacatgatcttctttggccacggctatgctcgcctcacccttagcctttacgacccccattccagcgacctcggcggccacttgaccaaccagttcatgcagaagaagagccctctgtacatgctgctgaaggagcacacggtgtggagcatggaacacctcaaccgctacatcagtgacacgttctggaaggcccggggcctcgccaaggactgggtcttcaccaccctcaagaagcggatgcagcagatcatggcccactgctttctggccgccaagcccaagctggactgcaagctgggttactttgacctcattggctgtgacttcctgattgatgacaacttcaaggtatggctgctggagatgaattctaacccagccctgcacaccaactgcgaggtcctgaaggaggtcatcccaggtgtggtcatcgagaccctggacctggtgctcgagaccttccggaagagcctgcgcggccagaagatgttgcctctgctgtcccagcgccgcttcgtgctcctgcacaacggtgaggccgacccgcggccgcacctggggggctcgtgcagcctccgccgctggccgcccctgcccacccgccaggccaagtcctccgggccacccatgccgcatgccccagaccagccgggcgcccgcaggcctgcgccacctcccttggtgccgcagcgtccccggccacccggccccgacctggacagcgcccacgatggggagccccaggccccgggcacggagcagtcgggcacaggcaacaggcacccggcgcaagagccttccccggggacagccaaggaggaacgcgaggagcctgagaacgcgaggccctaggggcagccacccgcgcccagcgccccgcgccccgcgccccagccgtgctgcctgccctcagggacctataaagcccactttgctac

SEQ ID NO: 2073 - DNA, 2283 bp, Homo sapiens
  source 1..2283: mol_type = genomic DNA
cccaggaccttgtgggctgggcaggtcgtgcgtcctttgacagcggcctccggccgggaggcaccagctcttcgaacaatgtttaaaagtctcttctgttcatcctaccggggtgccgtctcctgccggtcttttcatctcaccagggccctcgcccgggcaccccccggccaatggaccacagctgcacccggttcatccaccgccggggaccacccactcggacccgagccggcttcaagaggggcaagaggccaaggatccagcagaggcctcgggctcgagtctcagggaccatccctgcgtcacgtctgcacccagcaccggcctcacagcccggcccctgccctgcaccaggccactgccctgttggcccggcccacgagaggccaatggggagcagccaggaggagggactccggtgtcagccaagccagccagaccacgacgcagatggacactgtgggccggacctggagggggcagaaagagcctctgccacacccggaccccctgggctcctgaacagccaccggcctgcagactcggatgacactaacgccgccgggccctcagctgccctcctggaggggctcctgctggggggtgggaagccatcgccccacagcacccggccggggcccttcttctacattggaggcagcaacggggccacaatcatcagctcctactgcaaaagcaagggctggcagcgcatccatgacagccgccgggacgactacacgctgaagtggtgtgaggtcaagagccgagacagctacggcagcttccgggaaggagagcagctgctgtaccagcttcccaacaacaagctcctcaccaccaagatcgggctgctcagcacccttcggggacgggcacgggccatgagcaaggccagcaaggtgccggggggggtccaggccaggctggaaaaggacgcagcagcgcccgccctggaggacctcccgtggacaagcccaggatacctcaggccacagagggtcctgagaatggaagagtttttcccagagacctaccgcctggacctcaaacacgagagagaggcctttttcaccttgtttgatgaaacccagatatggatctgcaagcccacagcctccaaccagggcaaaggcatcttcctgctccggaaccaggaggaagttgccgccctgcaggccaagacccggagcatggaggacgaccccatccaccacaagacgccgttccgggggcctcaggcgcgggtggtgcagaggtacatccagaacccgctgctggtggacgggagaaagtttgacgtgcgctcctacctgctcattgcctgcaccacaccctacatgatcttctttggccacggctatgctcgcctcacccttagcctttacgacccccattccagcgacctcggcggccacttgaccaaccagttcatgcagaagaagagccctctgtacatgctgctgaaggagcacacggtgtggagcatggaacacctcaaccgctacatcagtgacacgttctggaaggcccggggcctcgccaaggactgggtcttcaccaccctcaagaagcggatgcagcagatcatggcccactgctttctggccgccaagcccaagctggactgcaagctgggttactttgacctcattggctgtgacttcctgattgatgacaacttcaaggtatggctgctggagatgaattctaacccagccctgcacaccaactgcgaggtcctgaaggaggtcatcccaggtgtggtcatcgagaccctggacctggtgctcgagaccttccggaagagcctgcgcggccagaagatgttgcctctgctgtcccagcgccgcttcgtgctcctgcacaacggtgaggccgacccgcggccgcacctggggggctcgtgcagcctccgccgctggccgcccctgcccacccgccaggccaagtcctccgggccacccatgccgcatgccccagaccagccgggcgcccgcaggcctgcgccacctcccttggtgccgcagcgtccccggccacccggccccgacctggacagcgcccacgatggggagccccaggccccgggcacggagcagtcgggcacaggcaacaggcacccggcgcaagagccttccccggggacagccaaggaggaacgcgaggagcctgagaacgcgaggccctaggggcagccacccgcgcccagcgccccgcgccccgcgccccagccgtgctgcctgccctcagggacctataaagcccactttgctacaa

SEQ ID NO: 2074 - DNA, 693 bp, Homo sapiens
  source 1..693: mol_type = genomic DNA
gcggcggcggcagcggcagcggcagcggcgctgagttttgtctcccgggccgtctgggcgcgcgcgggtgtcccaggtaccccgccgcctccctccttcccgcaggactcgtccctcctggccctgggccccaacggtgcccgcctgcccggcggtcggtcagcgcacagggcacggcttcctctgcttctcccggaccacttagtctcaacccgggtgtgtttgcactactagagactcacttttccccttcgtctttctctccctttctgtctttctgtgtctcctccaagaatgaaatatgactgaggactctcagagaaactttcgttcagtatattatgagaaagtggggtttcgtggagttgaagaaaagaaatcattagaaattctcctaaaagatgaccgtctggatactgagaaactttgtacttttagtcagaggttccctctcccgtccatgtaccgtgcattggtatggaaggtgcttctaggaatcttgcctccacaccacgagtcccatgccaaggtgatgatgtatcgtaaggagcagtacttggatgtccttcatgccctgaaagtcgttcgctttgttagtgatgccacacctcaggctgaagtctatctccgcatgtatcagctggagtctgggaagttacctcgaagtccctcttttccactggagccagatga

SEQ ID NO: 2075 - DNA, 1276 bp, Homo sapiens
  source 1..1276: mol_type = genomic DNA
gcggcggcggcagcggcagcggcagcggcgctgagttttgtctcccgggccgtctgggcgcgcgcgggtgtcccaggtaccccgccgcctccctccttcccgcaggactcgtccctcctggccctgggccccaacggtgcccgcctgcccggcggtcggtcagcgcacagggcacggcttcctctgcttctcccggaccacttagtctcaacccgggtgtgtttgcactactagagaatgaaatatgactgaggactctcagagaaactttcgttcagtatattatgagaaagtggggtttcgtggagttgaagaaaagaaatcattagaaattctcctaaaagatgaccgtctggatactgagaaactttgtacttttagtcagaggttccctctcccgtccatgtaccgtgcattggtatggaaggtgcttctaggaatcttgcctccacaccacgagtcccatgccaaggtgatgatgtatcgtaaggagcagtacttggatgtccttcatgccctgaaagtcgttcgctttgttagtgatgccacacctcaggctgaagtctatctccgcatgtatcagctggagtctgggaagttacctcgaagtccctcttttccactggagccagatgatgaagtgtttcttgccatagctaaagccatggaggaaatggtggaagatagtgtcgactgttactggatcacccgacgctttgtgaaccaattaaataccaagtaccgggattccttgccccagttgccaaaagcgtttgaacaatacttgaatctggaagatggcagactgctgactcatctgaggatgtgttccgcggcgcccaaacttccttatgatctctggttcaagaggtgctttgcgggatgtttgcctgaatccagtttacagagggtttgggataaagttgtgagtggatcctgtaagatcctagtttttgtagctgtcgaaattttattaacctttaaaataaaagttatggcactgaacagtgcagagaagataacaaagtttctggaaaatattccccaggacagctcagacgcgatcgtgagcaaggccattgacttgtggcacaaacactgtgggaccccggtccattcaagctgaacgcacccgctggttgtggaccgtctgccaggcaccacagtgagcattgtgttcttggcatgtgatctgggaaactgattgaataatacacttttcttgctttggtgctcaaagtggtttttttcccccaataaaattatttaattgaaa

SEQ ID NO: 2076 - DNA, 1045 bp, Homo sapiens
  source 1..1045: mol_type = genomic DNA
gatgtcacgtccggcggcggcggcagcggcagcggcagcggcgctgagttttgtctcccgggccgtctgggcgcgcgcgggtgtcccagaatgaaatatgactgaggactctcagagaaactttcgttcagtatattatgagaaagtggggtttcgtggagttgaagaaaagaaatcattagaaattctcctaaaagatgaccgtctgggaatcttgcctccacaccacgagtcccatgccaaggtgatgatgtatcgtaaggagcagtacttggatgtccttcatgccctgaaagtcgttcgctttgttagtgatgccacacctcaggctgaagtctatctccgcatgtatcagctggagtctgggaagttacctcgaagtccctcttttccactggagccagatgatgaagtgtttcttgccatagctaaagccatggaggaaatggtggaagatagtgtcgactgttactggatcacccgacgctttgtgaaccaattaaataccaagtaccgggattccttgccccagttgccaaaagcgtttgaacaatacttgaatctggaagatggcagactgctgactcatctgaggatgtgttccgcggcgcccaaacttccttatgatctctggttcaagaggtgctttgcgggatgtttgcctgaatccagtttacagagggtttgggataaagttgtgagtggatcctgtaagatcctagtttttgtagctgtcgaaattttattaacctttaaaataaaagttatggcactgaacagtgcagagaagataacaaagtttctggaaaatattccccaggacagctcagacgcgatcgtgagcaaggccattgacttgtggcacaaacactgtgggaccccggtccattcaagctgaacgcacccgctggttgtggaccgtctgccaggcaccacagtgagcattgtgttcttggcatgtgatctgggaaactgattgaataatacacttttcttgctttggtgctcaaagtggtttttttcccccaataaaattatttaattg

SEQ ID NO: 2077 - DNA, 4116 bp, Homo sapiens
  source 1..4116: mol_type = genomic DNA
ggcgcctgcggcggcgacagcggcagctgcggcgcgaccaggccgggcacctccgagcgcaaggacagcgcgaggtccgcgcagcccagcgcagccatggagccccgcgcggactcactctatgatgtccctgtcggtgcggccgcagcgccgtctgctcagcgcccgggtcaataggagccagtccttcgcaggcgtcctcggcagccacgagcgggggcccagcctctccttcaggagtttcccggtcttcagcccgccggggcccccacggaagccccccgcgctctcccgagtgtccaggatgttttccgtggctcacccagccgccaaggtgccgcagcccgagcggctggacctggtgtacacggcgctgaagcggggcctgacggcctacttggaagtgcaccagcaggagcaagagaaactccaggggcagataagggagtccaagaggaattcccgcttgggcttcctgtatgatctggacaagcaagtcaagtccattgaacgcttcctgcgacgactggagttccatgccagcaagatcgatgagctgtatgaggcatactgtgtccagcggcgtctccgggatggtgcctacaacatggtccgtgcctacaccactgggtccccgggaagccgagaggcccgggacagcctggcagaggccactcgggggcatcgcgagtacacggagagcatgtgtctgctggagagcgagctggaggcacagctgggcgagtttcatctccgaatgaaagggctggctggcttcgccaggctgtgtgtaggcgatcagtatgagatctgcatgaaatatgggcgtcagcgctggaaactacggggccgaattgagggtagtggaaagcaggtgtgggacagtgaagaaaccatctttctccctctactcacggaatttctgtctattaaggtgacagaactgaagggcctggccaaccatgtggttgtgggcagtgtctcctgtgagaccaaggacctgtttgccgccctgccccaggttgtggctgtggatatcaatgaccttggtaccatcaagctcagcctggaagtcacatggagccccttcgacaaggatgaccagccctcagctgcttcttctgtcaacaaggcctccacagtcaccaagcgcttctccacctatagccagagcccaccggacacaccctcacttcgggaacaggctttctataacatgctgcgacggcaggaggagctggagaatgggacagcatggtccctgtcatctgaatcttcagacgactcatccagcccacagctctcaggcactgcccgccactcaccagcccctaggcccctggtgcagcagcccgagccccttcccatccaagttgccttccgcaggcctgagacccccagctctgggcccttggatgaggagggggccgtggccccagtcctggcaaatgggcatgcaccctacagtcggactctgagccacatcagtgaggctagtgtagatgctgccttggctgaggcttcagtggaggccgttggcccagaaagcctagcctggggacctagcccacctacacacccagctcccacccatggagagcaccccagtcctgttcctcctgccctggaccctggccactctgccacaagctctaccctcggtacaacaggctctgtccccacatctacagaccctgccccatctgcacacctagactcagttcataagtccacagactctggcccttcagaactgccaggccccactcacaccactacaggctctacctatagtgccattaccactacccacagtgctccaagccccctcactcacactactacaggctccacccacaagcccataatctctacccttactactacaggccctaccctcaatatcataggcccagtccagactaccacaagccccacccacactatgccaagccctacccataccacagcaagccccactcatacttccacaagccccacccatacccccacaagtcccacccacaaaaccagtatgtcacctcccaccactacaagtcctacccccagtggtatgggcctagtccagactgccacaagtcccacccatcctaccacaagccccacccatcccaccacaagccccatccttataaatgtaagcccttccacttctctagaacttgctaccctctccagcccctccaaacactcagaccccaccctcccaggcactgactcccttccctgtagtcccccagtctccaattcctacactcaggcagaccctatggcccccagaactccccacccaagtcctgcccattccagtaggaaacccctcacaagccctgccccagatccctcagagtctacggttcagagtctaagccccactccctcacccccaacccctgcaccccagcattcagacctttgcctggccatggctgtccagaccccagtcccaacggcagccggagggtctggggacaggagcctggaggaggcactgggggccctaatggctgccctggatgactaccgtggccagtttcctgagctgcagggcctggagcaggaggtgacccgcctagaaagtctgctcatgcagagacaaggtctgactcgcagccgggcctccagtctcagcatcactgtggagcatgccttggagagcttcagcttcctcaatgaagacgaagatgaagacaatgatgttcctggggacaggcctccaagcagcccggaggctggggctgaggacagcatagactcacccagtgcccgccccctcagcacggggtgtccagctctggatgctgccttggtccggcacctgtaccactgcagtcgcctcctgctgaaactgggcacatttgggcccctgcgctgccaggaggcatgggccctggagcggctgctgcgggaagcccgagtactggaggcagtatgcgagttcagcaggcggtgggagatcccggccagctctgcccaggaagtggtgcagttctcggcctctcggcctggcttcctgaccttctgggaccagtgcacagagagactcagctgcttcctctgcccggtggagcgggtgcttctcaccttctgcaaccagtatggtgcccgcctctccctgcgccagccaggcttggctgaggctgtgtgtgtgaagttcctggaggatgccctggggcagaagctgcccagaaggccccagccagggcctggagagcagctcacagtcttccagttctggagttttgtggaaaccttggacagccccaccatggaggcctacgtgactgagaccgctgaggaggtgctactggtgcggaatctgaactcggatgatcaggctgttgtgctgaaggccctgagattggcgcccgaggggcgtctgcgaagggacgggctgcgggccctcagctccctgctcgtccatggcaacaacaaggtcatggctgctgtcagcacccagctccggagcctgtcactgggccctaccttccgggagagggccctcctgtgcttcctggaccagctggaggatgaggacgtgcagactcgagtggctggctgcctggccctaggctgcatcaaggctcccgagggcattgagcccctggtgtacctctgccaaactgacacagaagctgtgagggaagctgcccggcaaagcctacagcagtgtggagaagagggacagtctgcccatcgacggctggaggagtccctggacgccctgccccgcatctttgggcctggcagcatggccagcacagcattctaaactattcacccatgggttcctggtgcccctttccccccactttcagggctcaccaggcactggcagggagggtaagggctggctccagatacccctcccccacagattcctagcaatgaaaatctaatatattcttctgttgcccctggggttggagagtcagtgcctgcagtcaagtgcctcccagcctcggctcagcacatcccttgccacaaatcagtgtctggggcttggccaccctgccgctgcccagccacatcccttggttttgtattttatttacagagttttacagaaaataaaaaagcaaaatgtctttccta

SEQ ID NO: 2078 - DNA, 154 bp, Homo sapiens
  source 1..154: mol_type = genomic DNA
gagccatggcggacgaggagcttgaggcgctgaggagacagaggctggccgagctgcaggccaaacacggggatcctggtgatgcggcccaacaggaagcaaagcacagttcaacagaagaaaagtaatggactctgatgaagatgacgattat

SEQ ID NO: 2079 - DNA, 960 bp, Homo sapiens
  source 1..960: mol_type = genomic DNA
gcggaccgtgctgggagcggcgcggctggagcgcagcgccgaagggactggcagggctgaagtgtgcgggacagcaagcccccgaatagccccggctgccacctcgcaggacccaaggccacgcgcgccgggcccagctgagccgcctcatgaagccgcccgcggcgcagggcagccccgcggccgccgcggccgcagccccggccctggactcggcggccgcggaggacctgtcggacgcgctgtgcgagtttgacgcggtgctggccgacttcgcgtcgcccttccacgagcgccacttccactacgaggagcacctggagcgcatgaagcggcgcagcagcgccagtgtcagcgacagcagcggcttcagcgactcggagagtgcagattcactttataggaacagcttcagcttcagtgatgaaaaactgaattctccaacagactctaccccagctcttctctctgccactgtcactcctcagaaagctaaattaggagacacaaaagagctagaagccttcattgctgatcttgacaaaactttagcaagtatgtgaaacaagaagttctgggtcctttcatcataagggagaagcttcagaaagttccgaggacctgctaaaatcagctactagaatctgctgccagaggggacaaagacgtgcactcaaccttctaccaggccactctcaggctcaccttaaaatcagcccttgatcccatttctgggcaatttagacagtgaaactgactttgtttacctgcttgcagcatattagaacagacgatccatgctaatattgtattttctcttaaaacatagctttcctgtaatttaaagtgcttttatgaaaatatttgtaattaattatatatagttggaaatagcagtaagctttcccattataatatatttttgtatacaaataaaatttgaactgaagtctgcttcct

SEQ ID NO: 2080 - DNA, 1917 bp, Homo sapiens
  source 1..1917: mol_type = genomic DNA
aaagggcgctccgcgcatgcgcacaggatccggctcgggaggcggaccctggctgccatcttgcagtgcgcgggaaccgccgccgccgccgctggccaaaaagcggagcccaggggaagcgtgtcctgctcagaccgccttccttctccattgccacccgtgccgaacagccaggctgcccaattgcaactgtagaccaatgaactaatccatcgcccgcagcccgactctcagcagcggttcgtcccggtgcccacccccgcgaagcggagcgcccgggcacctagcctccctgccggccacctagcctccctgccggccacgatgccgaacgtgctgctgccgcccaaggagagcaacctcttcaaacgcatcttgaaatgttatgaacagaagcagtacaaaaatggcctcaagttttgcaagatgattctgtcgaacccaaaatttgctgaacatggagagactttggctatgaaaggattaacactgaactgtttaggaaaaaaagaagaagcttatgagtttgttcgtaaaggacttcgtaatgatgtcaagagtcatgtctgttggcatgtatatggactcttgcagcgttctgataaaaaatatgatgaagctataaaatgttaccgaaatgccctcaaattagataaagataacctgcaaattttgagggatctctcactgttgcagatccaaatgagagaccttgaaggttaccgagagacaagataccagcttcttcagttgcgccccacacagcgtgcctcctggattggatatgctattgcataccatttgctgaaagattatgatatggccctaaaactgttggaagaatttagacaaactcagcaagttcctccaaacaaaatagattatgaatatagtgaattgatattataccagaatcaagtgatgagagaggcagatctgttgcaggaatctttggaacatatagaaatgtatgagaaacaaatatgtgataaacttttggtggaagaaattaaaggggaaatactgttgaaattgggaagattaaaagaagccagtgaagtgttcaaaaacttgattgatcgaaatgcagaaaattggtgttattatgaaggcttggaaaaagctctacaaattagcactttagaagagaggcttcaaatttatgaagaaattagtaagcagcaccccaaagcaattacacccagaagattacctttgactcttgtcccaggtgaaagatttagagaactaatggataagttcctgagggttaacttcagtaaaggctgcccacccttgtttactactttgaaatctttatattacaatacagaaaaggtttctataatccaggaacttgttactaattatgaagcctctcttaaaacgtgtgacttttttagcccatatgagaatggggagaaggaacccccgacaacactactctgggttcagtatttcctggcacagcactttgataaacttggacagtattctttggctttggattatattaatgctgcaattgctagtactccaactctaatagaattattctatatgaaagcaaaaatttacaagcatataggtaatctcaaagaagctgcaaagtggatggatgaagcacagtctttggacacagctgatagattcatcaattccaaatgtgcaaaatacatgcttcgagcaaatatgataaaagaagcagaggaaatgtgctccaagttcacaagggaaggaacatctgccatggaaaatctaaatgaaatgcagtgtatgtggtttcagacagaatgcatttcagcttatcagcgtctggggagatacggggatgccttgaaaaaatgtcatgaagtagaaaggcactctccttccacatggaccacaggaggaaaagagccgcaaatgcacccctga

SEQ ID NO: 2081 - DNA, 4347 bp, Homo sapiens
  source 1..4347: mol_type = genomic DNA
aaagggcgctccgcgcatgcgcacaggatccggctcgggaggcggaccctggctgccatcttgcagtgcgcgggaaccgccgccgccgccgctggccaaaaagcggagcccaggggaagcgtgtcctgctcagaccgccttccttctccattgccacccgtgccgaacagccaggctgcccaattgcaactgtagaccaatgaactaatccatcgcccgcagcccgactctcagcagcggttcgtcccggtgcccacccccgcgaagcggagcgcccgggcacctagcctccctgccggccacctagcctccctgccggccacgatgccgaacgtgctgctgccgcccaaggagagcaacctcttcaaacgcatcttgaaatgttatgaacagaagcagtacaaaaatggcctcaagttttgcaagatgattctgtcgaacccaaaatttgctgaacatggagagactttggctatgaaaggattaacactgaactgtttaggaaaaaaagaagaagcttatgagtttgttcgtaaaggacttcgtaatgatgtcaagagtcatgtctgttggcatgtatatggactcttgcagcgttctgataaaaaatatgatgaagctataaaatgttaccgaaatgccctcaaattagataaagataacctgcaaattttgagggatctctcactgttgcagatccaaatgagagaccttgaaggttaccgagagacaagataccagcttcttcagttgcgccccacacagcgtgcctcctggattggatatgctattgcataccatttgctgaaagattatgatatggccctaaaactgttggaagaatttagacaaactcagcaagttcctccaaacaaaatagattatgaatatagtgaattgatattataccagaatcaagtgatgagagaggcagatctgttgcaggaatctttggaacatatagaaatgtatgagaaacaaatatgtgataaacttttggtggaagaaattaaaggggaaatactgttgaaattgggaagattaaaagaagccagtgaagtgttcaaaaacttgattgatcgaaatgcagaaaattggtgttattatgaaggcttggaaaaagctctacaaattagcactttagaagagaggcttcaaatttatgaagaaattagtaagcagcaccccaaagcaattacacccagaagattacctttgactcttgtcccaggtgaaagatttagagaactaatggataagttcctgagggttaacttcagtaaaggctgcccacccttgtttactactttgaaatctttatattacaatacagaaaaggtttctataatccaggaacttgttactaattatgaagcctctcttaaaacgtgtgacttttttagcccatatgagaatggggagaaggaacccccgacaacactactctgggttcagtatttcctggcacagcactttgataaacttggacagtattctttggctttggattatattaatgctgcaattgctagtactccaactctaatagaattattctatatgaaagcaaaaatttacaagcatataggtaatctcaaagaagctgcaaagtggatggatgaagcacagtctttggacacagctgatagattcatcaattccaaatgtgcaaaatacatgcttcgagcaaatatgataaaagaagcagaggaaatgtgctccaagttcacaagggaaggaacatctgccatggaaaatctaaatgaaatgcagtgtatgtggtttcagacagaatgcatttcagcttatcagcgtctggggagatacggggatgccttgaaaaaatgtcatgaagtagaaaggcatttttttgagataactgatgaccaattcgacttccatacatactgcatgagaaagatgacccttcgtgcctatgttgaccttttgagattagaagatatactcagaagacatgccttttatttcaaggctgctagatcagcgattgaaatatacttgaaattgtatgataatcccttaaccaatgaaagcaaacaacaagaaataaactcagaaaacttgtcagccaaagaattgaagaaaatgcttagcaagcagagaagagctcagaaaaaggctaaactagaagaagaaagaaagcatgcagaaagagaacgtcaacagaaaaatcaaaagaaaaaaagagatgaagaagaagaagaagccagtggccttaaggaagaacttatacctgaaaaattagaaagggtagaaaatccattagaggaagccgttaagttccttatacctcttaagaaccttgttgctgataacattgacactcatctgttagcatttgaaatatattttagaaaaggaaagtttctgttaatgctgcagtctgtcaaacgagcttttgccattaacagtaataacccatggttacatgaatgtttaattagattttctaaatctgtgtctaatcatagtaatcttccagacattgtgagcaaagttctatctcaagaaatgcagaaaatatttgtcaaaaaggatttggaaagttttaatgaggattttctgaaacgtaacgctacctctcttcagcatctactttcaggtgctaaaatgatgtattttctggacaagtcaaggcaggagaaagcaattgctatagccactagactagatgaaactataaaagataaagatgtaaagacattaataaaggtttctgaagcactgcttgatggcagctttgggaactgtagttcccaatatgaagaatataggatggcctgtcataacctgcttccttttacatctgccttcttgcctgctgtgaatgaagtcgacaatcctaatgtggcactgaaccatacagctaattatgatgtcttggcaaatgaaatttgaaatcttctagaaagtagactcctatagactcaaagctgaattgagatcagggtttcttttccagggtgcattttaatatacgtatgaaatgaaatatttggttaggatttttaaatggcatattctgtaagcttattttgttctttacccgacctgccaatttacataaccatctgttaaaattacctgtttattcttacacagttttgtggtagctccgatcgcttctgtataattataatttcttactaagctaagttgtatacaaccccactgtattattttctttagattctgatttcaggatctgtgctttgattccttgtctgttttatcgtatatttgcttgctttttaattaaagcacatcagttttaaagtgttaactatatgttaacaatatggaggctgggcgtggtggctcacacctgtaatcccagcactttgggaggcccagactggcggatcacctgaggtcaggagatcgagatcagcctggccaacatggtgaaaccccttctctactgaaaatacaaaaattagccagacgtgatggcacatacctgtaatccaagctgcccaggagctgaggccggagaatcgcttgaacctgggaggtggaggttgcagtgagccgagatcatgccactgcactccagcctgggcaacagagcaagactccatctcgaaaaaaaggaattcctcttggcagatattgaagtttatttgaaaatttaattcgtccttttttcattgtaatatttcatggtttactatttccttttagtattcatgaaaatggtattttctggttgaataagggtactctagttttatgtagatgatttcagaatgtgaaggctggtttgcctgtcagtcatggaaattcactggtaaaattgttgaatatttctctctcccagtcttaaaagcccacaggcaagaattaatgctttcttaactaagttactttgagtattaacaagtagcttatactgaggtgtgcttcaagggagcattatagggcagaaaacaaattaaaatgaaatgttgttgttatagccatgcattgaccattaaatgcattttaatatctcggcaaaatgagatttgaaactcattagtttaactcttaaaacatagtgttgttaaacagtattttttgggggcgggtggatagctttttgttctatcttgtacagaaaacagtaatggaatcactcatgttcagaaccttgtaaatatgtctgtaatattaatgcttccctttattaagacaaatatacattcaaaaagggagattttatttagacacacattttcttttcaccctaatctatttagattcatacttattgagacgggaaaaactcgctgtaaaataatgccaacctagataatgctataataaattattttgtacacagtt

SEQ ID NO: 2082 - DNA, 2230 bp, Homo sapiens
  source 1..2230: mol_type = genomic DNA
ctttctgtgctgatcttggaggcagagtggctgcctgcattcattccacggtccattccacagcttgttccaaagacagtctgctcatgatgtagcttctgcacttgacaaattattttcatgcacgaggcccttgaaaatgttgacagtcttgtgacatccatggagggccttatttgacggtcacaaaggagcggttcctagaaggtgagcgcggacggtatgcaaagttgtgaatccagtggtgacagtgcggatgaccctctcagtcgcggcctacggagaaggggacagcctcgtgtggtggtgatcggcgccggcttggctggcctggctgcagccaaagcacttcttgagcagggtttcacggatgtcactgtgcttgaggcttccagccacatcggaggccgtgtgcagagtgtgaaacttggacacgccacctttgagctgggagccacctggatccatggctcccatgggaaccctatctatcatctagcagaagccaacggcctcctggaagagacaaccgatggggaacgcagcgtgggccgcatcagcctctattccaagaatggcgtggcctgctaccttaccaaccacggccgcaggatccccaaggacgtggttgaggaattcagcgatttatacaacgaggtctataacttgacccaggagttcttccggcacgataaaccagtcaatgctgaaagtcaaaatagcgtgggggtgttcacccgagaggaggtgcgtaaccgcatcaggaatgaccctgacgacccagaggctaccaagcgcctgaagctcgccatgatccagcagtacctgaaggtggagagctgtgagagcagctcacacagcatggacgaggtgtccctgagcgccttcggggagtggaccgagatccccggcgctcaccacatcatcccctcgggcttcatgcgggttgtggagctgctggcggagggcatccctgcccacgtcatccagctagggaaacctgtccgctgcattcactgggaccaggcctcagcccgccccagaggccctgagattgagccccggggtgagggcgaccacaatcacgacactggggagggtggccagggtggagaggagccccgggggggcaggtgggatgaggatgagcagtggtcggtggtggtggagtgcgaggactgtgagctgatcccggcggaccatgtgattgtgaccgtgtcgctaggtgtgctaaagaggcagtacaccagtttcttccggccaggcctgcccacagagaaggtggctgccatccaccgcctgggcattggcaccaccgacaagatctttctggaattcgaggagcccttctggggccctgagtgcaacagcctacagtttgtgtgggaggacgaagcagagagccacaccctcacctacccacctgagctctggtaccgcaagatctgcggctttgatgtcctctacccgcctgagcgctacggccatgtgctgagcggctggatctgcggggaggaggccctcgtcatggagaagtgtgatgacgaggcagtggccgagatctgcacggagatgctgcgtcagttcacagggaaccccaacattccaaaacctcggcgaatcttgcgctcggcctggggcagcaacccttacttccgcggctcctattcatacacgcaggtgggctccagcggggcggatgtggagaagctggccaagcccctgccgtacacagagagctcaaagacagcgcccatgcaggtgctgttttccggtgaggccacccaccgcaagtactattccaccacccacggtgctctgctgtccggccagcgtgaggctgcccgcctcattgagatgtaccgagacctcttccagcaggggacctgagggctgtcctcgctgctgagaagagccactaactcgtgacctccagcctgccccttgctgccgtgtgctcctgccttcctgatcctctgtagaaaggatttttatcttctgtagagctagccgccctgactgccttcagacctggccctgtagcttttctttttctccaggctgggccgtgagcaggtgggccgttgagttacctctgtgctggatcccgtgcccccacttgcctaccctctgtcctgccttgttattgtaagtgccttcaatactttgcattttgggataataaaaaaggctccctcccctgcccctcagcttctctctggttttctca

SEQ ID NO: 2083 - DNA, 636 bp, Homo sapiens
  source 1..636: mol_type = genomic DNA
ggcaagatggcgccggtgggggtggagaagaagctgctgctaggtcccaacgggcccgcggtggcggccgccggcgacctgaccagtgaggaggaggaaggccagagcctatggtcctccattctgagcgaagtgtccacccgcgccaggtccaagctgccgtccggcaagaacatcctggtcttcggtgaagatggttctggtaaaacaaccctcatgactaaactacaaggagctgagcatggcaaaaaaggaagaggcctagaatatctctacctcagtgtccatgatgaggaccgagatgatcacacgcgctgcaacgtgtggattctggatggagacttgtaccacaaaggcctgctgaaatttgcagtttctgctgaatccttgccagagaccctcgtcatttttgttgcagacatgtctagaccttggactgtgatggaatctctgcagaaatgggctagtgttttacgtgagcacattgataaaatgaaaattccaccagaaaaaatgagggagctggaacggaagtttgtgaaagattttcaagactatatggaacctgaagaaggttgtcaagagggcccactttctaacagggtggagcaaatgagaccaagaaatcattggtaa

SEQ ID NO: 2084 - DNA, 1243 bp, Homo sapiens
  source 1..1243: mol_type = genomic DNA
aactggaatcttgcctcctggaatccttcaaatcctgaatgtctcttacttgtggtgaaggaacttgtgcaacaatatcaccaattccaatgtagccgcctccgggagagctcccgcctcatgtttgaataccagacattactggaggagccacagtatggagagaacatggaaatttatgctgggaaaaaaaacaactggactggtgaattttcagctcgtttccttttgaagctgcccgtagatttcagcaatatccccacataccttctcaaggatgtaaatgaagaccctggagaagatgtggccctcctctctgttagttttgaggacactgaagccacccaggtgtaccccaagctgtacttgtcacctcgaattgagcatgcacttggaggctcctcagctcttcatatcccagcttttccaggaggaggatgtctcattgattacgttcctcaagtatgccacctgctcaccaacaaggtgcagtacgtgattcaagggtatcacaaaagaagagagtatattgctgcttttctcagtcactttggcacaggtgtcgtggaatatgatgcagaaggctttacaaaactcactctgctgctgatgtggaaagatttttgttttcttgtacacattgacctgcctctgtttttccctcgagaccagccaactctcacatttcagtccgtttatcactttaccaacagtggacagctttactcccaggcccaaaaaaattatccgtacagccccagatgggatggaaatgaaatggccaaaagagcaaaggcttatttcaaaacctttgtccctcagttccaggaggcagcatttgccaatggaaagctctaggaaacaccagtcttgagaggtggccagccagactgcctgtccacatgcgtgtcagcacatacagccgcttcctggaagccgcctggaatgtcttcacggcagcgttttgctcacacagcagcttttgcacgccccaggcagccccgactgctgaaatccaacttgagctggctggtggtccctggatcctagagcccttcacttcgggttactccctctttcttgcctctatttcttagttggaagaaataaactcacaaattatggtgcagtaattttccggggaaagtaaagcctcaggaatgcccacgcctttcttccaaagcctttgtctctgagacctcttaagttctaagattaaatgcccctcgctgttcttcctctg

SEQ ID NO: 2085 - DNA, 1657 bp, Homo sapiens
  source 1..1657: mol_type = genomic DNA
gcggcgcgcgcgcaggtcggtgcgtctgtcgggggcgcgctcgggtacctgtaccccacgtagtcgccggttaccgatcggactaagttccagtggtgatttacaagtcaagttaaaatgtccccagaagtggccttgaaccgaatatctccaatgctctcccctttcatatctagcgtggtccggaatggaaaagtgggactggatgctacaaactgtttgaggataactgacttaaaatctggctgcacatcattgactcctgggcccaactgtgaccgatttaaactgcacataccatatgctggagagacattaaagtgggatatcattttcaatgcccaatacccagaactgcctcccgattttatctttggagaagatgctgaattcctgccagacccctcagctttgcagaatcttgcctcctggaatccttcaaatcctgaatgtctcttacttgtggtgaaggaacttgtgcaacaatatcaccaattccaatgtagccgcctccgggagagctcccgcctcatgtttgaataccagacattactggaggagccacagtatggagagaacatggaaatttatgctgggaaaaaaaacaactggactggtgaattttcagctcgtttccttttgaagctgcccgtagatttcagcaatatccccacataccttctcaaggatgtaaatgaagaccctggagaagatgtggccctcctctctgttagttttgaggacactgaagccacccaggtgtaccccaagctgtacttgtcacctcgaattgagcatgcacttggaggctcctcagctcttcatatcccagcttttccaggaggaggatgtctcattgattacgttcctcaagtatgccacctgctcaccaacaaggtgcagtacgtgattcaagggtatcacaaaagaagagagtatattgctgcttttctcagtcactttggcacaggtgtcgtggaatatgatgcagaaggctttacaaaactcactctgctgctgatgtggaaagatttttgttttcttgtacacattgacctgcctctgtttttccctcgagaccagccaactctcacatttcagtccgtttatcactttaccaacagtggacagctttactcccaggcccaaaaaaattatccgtacagccccagatgggatggaaatgaaatggccaaaagagcaaaggcttatttcaaaacctttgtccctcagttccaggaggcagcatttgccaatggaaagctctaggaaacaccagtcttgagaggtggccagccagactgcctgtccacatgcgtgtcagcacatacagccgcttcctggaagccgcctggaatgtcttcacggcagcgttttgctcacacagcagcttttgcacgccccaggcagccccgactgctgaaatccaacttgagctggctggtggtccctggatcctagagcccttcacttcgggttactccctctttcttgcctctatttcttagttggaagaaataaactcacaaattatggtgcagtaattttccggggaaagtaaagcctcaggaatgcccacgcctttcttccaaagcctttgtctctgagacctcttaagttctaagattaaatgcccctcgctgttcttcctctgaaa

SEQ ID NO: 2086 - DNA, 1752 bp, Homo sapiens
  source 1..1752: mol_type = genomic DNA
ggtacctgtaccccacgtagtcgccggttaccgatcggactaagttccagaagcaagagataaagtaataatgggtactgtggggaaaaacacagaagaacaattcggtaatatagtggtgatttacaagtcaagttaaaatgtccccagaagtggccttgaaccgaatatctccaatgctctcccctttcatatctagcgtggtccggaatggaaaagtgggactggatgctacaaactgtttgaggataactgacttaaaatctggctgcacatcattgactcctgggcccaactgtgaccgatttaaactgcacataccatatgctggagagacattaaagtgggatatcattttcaatgcccaatacccagaactgcctcccgattttatctttggagaagatgctgaattcctgccagacccctcagctttgcagaatcttgcctcctggaatccttcaaatcctgaatgtctcttacttgtggtgaaggaacttgtgcaacaatatcaccaattccaatgtagccgcctccgggagagctcccgcctcatgtttgaataccagacattactggaggagccacagtatggagagaacatggaaatttatgctgggaaaaaaaacaactggactggtgaattttcagctcgtttccttttgaagctgcccgtagatttcagcaatatccccacataccttctcaaggatgtaaatgaagaccctggagaagatgtggccctcctctctgttagttttgaggacactgaagccacccaggtgtaccccaagctgtacttgtcacctcgaattgagcatgcacttggaggctcctcagctcttcatatcccagcttttccaggaggaggatgtctcattgattacgttcctcaagtatgccacctgctcaccaacaaggtgcagtacgtgattcaagggtatcacaaaagaagagagtatattgctgcttttctcagtcactttggcacaggtgtcgtggaatatgatgcagaaggctttacaaaactcactctgctgctgatgtggaaagatttttgttttcttgtacacattgacctgcctctgtttttccctcgagaccagccaactctcacatttcagtccgtttatcactttaccaacagtggacagctttactcccaggcccaaaaaaattatccgtacagccccagatgggatggaaatgaaatggccaaaagagcaaaaagagagagcaacagagatggggaggaatccagctctgcctgacatccaggcatcctctccaaattgcatagggcttatttcaaaacctttgtccctcagttccaggaggcagcatttgccaatggaaagctctaggaaacaccagtcttgagaggtggccagccagactgcctgtccacatgcgtgtcagcacatacagccgcttcctggaagccgcctggaatgtcttcacggcagcgttttgctcacacagcagcttttgcacgccccaggcagccccgactgctgaaatccaacttgagctggctggtggtccctggatcctagagcccttcacttcgggttactccctctttcttgcctctatttcttagttggaagaaataaactcacaaattatggtgcagtaattttccggggaaagtaaagcctcaggaatgcccacgcctttcttccaaagcctttgtctctgagacctcttaagttctaagattaaatgcccctcgctgttcttcctctgaaa

SEQ ID NO: 2087 - DNA, 2534 bp, Homo sapiens
  source 1..2534: mol_type = genomic DNA
atgatccgagcttttccaacaactaccccacgcagtcttcatctcttcacttcatctactttcctggctcgcgcccttccaggagcctttcccaccggagcctgcgaggagagactcagtgttcctgaaagtacacctttcacagcagtcttaaagtttgcagcagaagaatttaaagttcctgctgcaacaagtgcaattattaccaatgatggaataggaataaatcctgcacagactgctggaaatgtttttctaaaacatggttcagaactgcggattattcctagagatcgtgttggaagttgttaatatctgctacttggaacatacgattgcctttcagaataaatattggtattttttgttgttgtaaaattgaaatcaggcatttaacatactatgaaaacaccaggagtcaatgattaatgaaaggtgactcatctgtccctttttgttgtccatactcttcctatgaagagggaatgcgtatgaattaaggctactactgtcacagaagatcatagtctttgatgctacctcacaacacaaacaggtagttcgttgggggcaaatgaattagccaactgttaactggaagcttttgataatttttttttttagaacaatttggaacattaaaatttactgaatcgtatatattcatctgagataaaaatataaaaagaattatggaccctggatggcaatttgcttgatagcatctgatttgcagactcataatttgatttttaattaaatatataggttgtgatgaagtgaatagacatatcagtgaacagttaactatattaaatttttatcatttactttttttaagattcagacctcagttatataaatttcagtttaatatcaaccaaaaaattaaaattttaatctaacccttatgtgtataaattggtgtcccataccagcttttaatggtggacctatagaatccagtacttttaatggtgggaatttacagtagaagcatcctttgctgagttatacattcctttatcaatctcttttgatacaacatttaaaacaagtagcttcaagaaaccactggtgttttgaggatagtatttctaaatagcattcaggaacagagtattattgcacagatctgaagatcaaaaaaaagctcaaggaaatacagatcggaagtgctgatgagttatatttattgaaaacccaacttttaaggaagtgctaagatcagtcacccatgtgaataagaagccaggaaaggaaagatggggaagcccagatcaccaggcttctattaaggaggaaagcaacagaggaaacagtgaaggggaacagaagggggtagcaaagtgttacagaaaagcggactggatagacaaaactgcagaaggtgtatgttggggagaactgaaagggaaaacaaaatacttgacatagtcttaagtagaagaaggcagttagagaaaacaaagtatctactggccttgtcaacatacagacttcaaaataccccttatgagaatccaaagaatgatgtgtgtaagggaagattttatttgcccttccggaagaaatcagtatctatgcaaatcttgaaagacgaaatcaaagcccattaatgattcagaatcagtgcttgacctcctgtattctgaatggtgaactctggaagcagggattgtgtctggctctttttagagctggaaatgtagtggctttcattaaatacttgctgtaaagtctttctaagaccaattattatcttagcatgtttcagtatcttctctatcataggccctaagttcattgggggaaaaaaaataagaagattcaacagaatcagcatttgaagtgtaccattggtagttgtttatgaaattaccagatattcataaatgtgacaaatgaacagcaggattatgaattatcaaaggaaaaagtatttgctgaggtgaaaaaatctgatgtttgaggaagtttttatttttatttatttgttttgtttttttttttttgaggcagactctctgtcgccaggcttctcctgcctcagcctcacgagtagctgggactacaggcatgcaccaccacgcccagctaatttttgtatttttagcagagacagggaggaagtttttatttttataaacaaaatctgatgttcagaggccccgtttcttacaataaatgttgagtcttagttaagcaggaatttatgaacacccatttcctgactttttgctttaatttagatttttctccatcctgtttctagcacaaaaatttgcctgctgtgttacaaaaataaatttatgttgtcctgtgccataaagtgatatatttaatatttttattctttggttttgaacattgtaagttcctaaaaacattttattaaacaagtagacattttgttattaaaaaaatgtgatctgtaatttctttgtgcagaatgatttgaagtattgtattcagtttacatgcgttattggtttataattaatatctaatgaaaatacatgttgttatattgt

SEQ ID NO: 2088 - DNA, 2664 bp, Homo sapiens
  source 1..2664: mol_type = genomic DNA
gggctctgagccggaggttttgttgtgagggtcggttgtcaagcagcggccaatcaaggcaggggatggaggcaagtgggggtcgcgcctggagcggagcctcggcctccggagccgcagctgcagccctgtattgagctgagatggctcgagcctaacattccatgatccaggatcgtgacagatgtgcacaggctgctgctgttgctgctgtgggtaatttggaaccacgaggcaccccagggccagaagacgaggcattctgtctgcctggatgtgtgggaactctctgccaacttgattggtggatctggggggggatccacccccaccccacgaggaaagcacagtttattttgtgggtggggcttcaggtgccagccagctgaaggatggccacccctgtggtcaccaagacagcctggaagttgcaagagatcgtcgcgcatgccagcaacgtgtcctcactggtgctgggcaaagcctccgggcggctgctggctacaggcggggatgactgccgcgtcaacctgtggtccatcaacaagcccaactgcatcatgagcctgacgggccacacatccccagtggagagcgtccgcctcaacacccccgaggagctcatcgtggccggctctcagtcgggctccatccgtgtctgggacctggaagctgccaaaattcttcgcacactcatgggacacaaagccaacatctgcagcctggatttccacccgtacggcgagtttgtagcctctggttcccaggacacaaacatcaagctctgggacatcaggaggaaaggctgtgtcttccgatacagggggcacagccaggccgtgcggtgtctccggttcagccccgatgggaagtggttggcgtcggccgcagatgaccacaccgtgaagctctgggatctcactgccggcaagatgatgtctgagttccctggtcacacggggcctgtcaacgtggtcgagtttcaccccaacgagtacctcctggcctccggcagctctgacaggacaatccgcttctgggacctggagaagttccaggtggtgagctgcatcgaaggggagcctgggcccgtcaggagcgtcctcttcaacccagacggctgctgcctgtacagcggctgccaggactcactgcgtgtctacggctgggaacctgagcggtgctttgatgtggtcctcgtcaactggggcaaggtggccgacctggccatctgcaatgaccagttgataggtgtggccttctcccagagcaacgtctcctcctacgtggtggatctgacgcgtgtcaccaggactggcacggtggcccgggaccctgtgcaggaccaccggcccctggcacagccactgcccaaccccagcgcccccctccggcgcatctatgagcggcccagcacaacctgcagcaagcctcagagggtgaagcagaactcagagagcgagcgccgcagccccagcagcgaggatgaccgggacgagcgcgagtcccgcgcggagatccagaacgccgaggactacaacgagatcttccagcccaagaacagcatcagtcggacgccaccccggagaagtgagcccttccctgcacccccagaggacgacgcagccacagcaaaggaggcagcaaagcccagccctgccatggatgtgcagttcccggtgccaaatctggaggtcctgccccggcccccagtggttgcttccacacctgcacccaaggctgagcctgccatcatccctgccacccggaacgagcccatcgggctgaaggcctccgacttcctgcccgccgtgaagatcccccagcaggccgagctggtggacgaggatgccatgtcacagatccgcaaaggccacgacaccatgtgtgtggtgctcaccagccgccacaagaacctggacactgtgcgggctgtgtggaccatgggcgacatcaagacgtcggtggactccgctgtggccatcaacgacctgtcggtggtggtggacctcctgaacatcgtcaaccagaaagcctccctgtggaagctggacctgtgcaccaccgtcctgccacagattgagaagcttctgcagagcaagtatgagagctacgtccagacgggctgcacctccctgaagctgatcctgcagcggtttctgcccctcatcacagacatgctggcggccccaccctctgtgggtgtggatatcagcagggaggagaggctgcataagtgccggctctgctacaagcagcttaagagcatcagcggcctggtcaagagcaagtcaggcctgagcggccgccatggcagtaccttccgcgagctgcacctgctcatggccagtctggactgaggaaagcagtgggcaggggcgctcggcagcccacagggcctggcctcagcccccactcctgttccttgtgcacccactggcccatgagcctctgcctggcccctgctgctgtcctgtggccgtcctggaggaggtgatgctggtccctggccacctctacagccctgaactcttgagacaactctctccagcaatagctgcccagctttgcccaactgttgcttcttggggcagcgaactgagccctggggctgctgctgtaatttataaggcaaattttattaaatttgtaactattcccagg

SEQ ID NO: 2089 - DNA, 404 bp, Homo sapiens
  source 1..404: mol_type = genomic DNA
gcagttgttgttggttgggggccttttggccggtgacggagactgcccaggtgtggtcaccatgttcctctccgcggtcttctttgccaagagcaagtcaaatgaaacaaagagtcctcttcgtggaaaagaaaaaaatacgctccctttaaacggtggattgaaaatgactttgatttataaagagaagactgagggcggggatactgattcagaaatcctgtagcgtgtaataaaagaagaggaaatggcatggaatcactgcctcctgtgatttgaaggccattgtgaaggaaaacaatgcagtgaaagaaagttcttcatattaggacagatatcattgcatcacatttatttatctttctgggtatttttatagcccttaataaaaaatattaaaatag

SEQ ID NO: 2090 - DNA, 4255 bp, Homo sapiens
  source 1..4255: mol_type = genomic DNA
gactcccgggtccccgcgccggactgggactgggagcaggcagcccgggcggagcgggccggtgccgaggacggccccaggcattgctctgccccgggcattgcgcggcgcgcgtgagggggatgcggcaggaggcggcgcggcgggaggagtaggcggcggcgccctcgggagggagctgcgcgcgggccagacggcgcccggaggctccgcagtgccgccgccgtcgcccgggaggctccgcgcgggagccatgtaaccctgcggcgggctccgggctgctccgtccttccccagctcccgggctagcgcggcagcggggccacgatgaagaagcagttcaatcgcatgcgccagctggccaaccagacggtgggcagggctgaaaagacagaagttttgagtgaagaccttcttcaggtggagaagcgtctggagctggtgaaacaggtgtcccacagcacgcacaagaagctcaccgcatgtctgcagggccagcaaggggcagaggctgacaagcgctccaaaaagttgcctttgacaacactggctcagtgtctgatggaggggtcagctatcctgggagatgacacacttcttgggaagatgctgaaactctgtggagagacggaggacaagctggctcaggagctgatacattttgagttgcaagtagagagagacgtgattgagcccctgtttttgctggcggaggtggaaatcccaaatattcaaaagcagaggaaacacttagccaagttggtgctggacatggattcctcacgaaccaggtggcagcagacttccaagtcttcaggtttgtccagcagcttacagcctgcgggtgccaaggctgatgccctcagggaagaaatggaagaggctgccaacagagtggagatttgcagggaccagctctcagctgatatgtacagttttgtggccaaagaaattgactatgcaaactactttcaaacgctaatagaagtgcaagctgaataccacaggaagtccctgacactattgcaggctgtattgcctcagatcaaagcacaacaggaggcctgggtagagaagccttccttcgggaagccgctggaggagcacctcaccatcagcggccgggagatcgccttccccatcgaggcgtgtgtgaccatgctgcttgagtgtgggatgcaggaggagggactcttccgagtagccccctctgcctccaaactgaagaagctgaaagcggccctggactgctgcgtggtggatgtgcaggagtactcggcagacccccacgcaattgcaggagctttgaaatcttacctccgagagttgccagaacctcttatgacctttgaactctatgatgagtggatccaggcttccaatgtccaggagcaagacaagaagcttcaggctctatggaatgcttgtgaaaagttgcccaaggccaatcacaacaacatccgatacttgataaaatttttatccaagctgtcagaatatcaagatgtaaacaagatgactcccagtaatatggcaattgttttaggacccaacctcctatggccacaagcagaagggaacattacagagatgatgaccacagtgtcgctgcaaattgttgggatcattgaacctatcatccagcatgcagactggttcttccctggggagatagagttcaacattactggcaattatgggagtccagtacacgtgaaccataatgccaactacagctcaatgccctccccagacatggaccctgctgaccggcgccagcccgagcaggcccgccggcccctcagcgtcgccacggataatatgatgctggagttttacaaaaaggatggccttaggaaaatccaaagcatgggtgtgagggtcatggacacaaactgggtggctcgaagaggctcctcggccggtcggaaagtgtcctgcgccccgccctccatgcagcctcccgccccgcccgccgagctggctgcgcccctgccttcgccgctgccggagcagcccctggacagccccgcggcccccgcgctctctccatccggcctgggcctccagcctgggcccgagcgcaccagcacaacaaaaagcaaggaactttctccaggctctgcacagaaaggaagtccaggctccagccagggcacagcctgtgcagggactcaaccaggggctcaacctggagctcagccgggcgccagccccagccccagccagccgcctgcagaccagagtcctcacaccctccggaaagtttcaaagaagctggcaccgattccacccaaggtcccctttggccagccgggggctatggcagaccagtccgctggccagccgtccccagtcagcctgtcccccaccccgcccagcaccccgtcaccctatggactgagctaccctcaggggtactccttggcctcgggccagctctccccagctgcagctcctcccctggcctctccttctgtctttacaagcactttgagcaaatcgcggcccactcctaagccgcgacagagacctactctgccgcctcctcagcctcccacagtaaacctctcggcctctagtccacagtccacggaggcccccatgctagatggcatgtcccctggggaaagcatgtctacagatcttgtccactttgatattccctcgatccacatagagctcgggtcgacgctccgcctgagtcccctggagcacatgcggcgacactcagtaactgacaagagggactcggaggaggagtctgagagcaccgccctctgacatgacaccgcccatcctgcctcgcgtgtacatacatcacgggccctaggaacgccgccaggagcagcgtccatgagcttgccaagtgttctctgctggctctttcctgccactgccaacacgaggttggaatttggcagaaaattgtgatctccagtccgtgtggtgatgctggtggtgcaggttttgtttgttcctttcgggtggtgacttcggccttttgtttgacctttgccttttgactttgtgcctcttttgatccactttcagcctccatgccagaaaacacccacctctccatccaaggctggtcaggaacgtcctttgcagggtcggggtggtgcgggagaggctcactttgcctggttagacccaagggctgctaccttttccttggacggctcatgtcaggtcttgcaggatcagtttaatggccacagaaaggaagcaggacagcagggcccctctcacccacaactggaccaggtccaggattctagcagtcctggggcactgacctttgccagctacctgggggagggcttgccactggaaaacctttcaggccgcccccatcagtgggctccaaagtaaatggctgaaaacaaaaatgtttcacttcctaacagttttcctttttccactgtgtgactgaaagctcctatatcattttatatttctgaatctataaaacaaaacaaacaagcctgacagtgtctggaggagccaaaggtggcctccctgtccccaaatatattggctatatgagagtaattttacccctctacgtacctaaaggcacccagttcactagtctgtggggtcctggagcctgtctcttctttctggaggttcaaactgaatagcaataattacgttacccaaagcatgtggaggaaaagtgaaaccagccacggagacgctggcccacgggctcggcctgcggtgtggcctgctttgctcaccagcgtcagccgctcatttccttctcatgaagtcccatctggtcatggggacgagggccgggagggcaccgggtagccttttcacacttggggattaggggagtgagaaaagatttgggccatgcatgcaaagtcaaagtttaaaattttatccttttcaaatagatgatataatatacctatacatgatataatatttgtatatatgaaatctctctatatttgtttaatttgagccattcaatctaaaccaatgtacaggtgtacaatgaaaaatttaaatgcttagttatttttcccaacacagtgtaaagtcaccctcctctgagagtgggatgtgcagagttttgatgttgcagctttgctcacttcctggcaagggcaggtcatgcctcaatttgtaatgggagtctggggtaagggtgggggttgaaagttgttatctttaaatacatgtacaaatcgttgtcaaaagtaacgttattaaaatagatttattatccctg

SEQ ID NO: 2091 - DNA, 2406 bp, Homo sapiens
  source 1..2406: mol_type = genomic DNA
gatttgtggttggctgaggtggaggaacaaaatggcggcgccggcggcgtgaccgggccctctggcccacagccgttggtagcggtggcagcagtactgctgccccaactcgctgtgccccctttctcagcccacgacatcgccacgacagcgaggcagcgaccgccaccgagaaagaggtggtggcccagcctggaaccttgagaaaccctcgcaaactgtggcctggcggaaatcctggtgtgctgcagggatcaggctgactccacgccctgtaacaccgggaaacgcctcggtggccatttccagcagccctcatcctcagccttgcgggccggtgggccccggaggcctccatcctcccctagaggggtcagggctgagcccagcctccatctttgcctctcaggatgacaaacaacagcggctccaaagccgaactcgttgtgggagggaaatacaaactggtgcggaagatcgggtctggctcctttggagacgtttatctgggcatcaccaccaccaacggcgaggacgtagcagtgaagctggaatctcagaaggtcaagcacccccagttgctgtatgagagcaaactctacacgattcttcaaggtggggttggcatcccccacatgcactggtatggtcaggaaaaagacaacaatgtgctagtcatggaccttctgggacccagcctcgaagacctctttaatttctgttcaagaaggttcaccatgaaaactgtacttatgttagccgaccagatgatcagcagaattgaatacgtgcatacaaagaattttctacaccgagacattaaaccagataacttcctgatgggtactgggcgtcactgtaataagttgttccttattgattttggtttggccaaaaagtacagagacaacaggaccaggcaacacataccgtacagagaagataaacacctcattggcactgtccgatatgccagcatcaatgcacatcttggtattgagcagagccgccgagatgacatggaatccttaggctacgttttcatgtattttaatagaaccagcctgccgtggcaaggactaagggctatgacaaaaaaacaaaaatatgaaaagattagtgagaagaagatgtccacccctgttgaagttttatgtaaggggtttcctgcagaattcgccatgtacttgaactactgtcgtgggctgcgctttgaggaagtcccagattacatgtatctgaggcagctattccgcattcttttcaggaccctgaaccaccaatatgactacacatttgattggacgatgttaaagcagaaagcagcacagcaggcagcctcttccagtgggcagggtcagcaggcccaaacccagacaggcaagcaaactgaaaaaaacaagaataatgtgaaagataactaagcgtgaatgaggaacagaagaagcagagcagatgattcgagcagcatttgtttctccccacatctagaaattgtagttcatatgtacaccagctagtggctgtgaacaaccatttagttggtgtaaaaaactttatttcaatataaactgactctggggagcgttggtgatgctgtatcccaaagtgtagcctctgtaattgtgaatattaactgaggtagtgaaacgtggtgtctggttttctattgcatttattcaagtagaaaagttaactaaatggttgacacacacgaattggtggagacattgtccatatgccaattttttgttaaaaccttttattttgaactagactgctttgagatatcatttcagaaggacagtattcagccacagctgcaaaggttgtaaatgcttatgattgagcatttttagggtttctccatccctggggtttgcaaattgttcacataaagagcattcttaaaatggttggcttcttgtctgtaagccagctgatctagtagtaaccaaaaattccagttttgagaataggaaagattccgcctgcttacctgtgaagacataagaaaatcttagtaactaccagattatctttagaattccacattaactatatcatgttctcggtattttaaaaacaacaacaaccatatttgtcacagaaatttagttaacatcttacaactgaacatgtatgtacatggcttagataaatgtaatcaccgtaaacacccatatgatctgggattttgttcatattttgaaatgggagcttttatgttttacaagttcactaaaatctgaaaactgtttctataaggaaataatacttttttaaacaacaaccaaaaaatgccttgctgattcactaggaaataaaaatctccccaattttttgatagtcaacttcgagccatttgttacatgatattcccttgcaagtaaattttatttcatt

SEQ ID NO: 2092 - DNA, 2163 bp, Homo sapiens
  source 1..2163: mol_type = genomic DNA
gcggagcgcagctgtgagggagtcgctgtgatccggggccccggaacccgagctggagctgaagcgcaggctgcggggcgcggagtcgggaggcctgagtgttccttccagcatgtcggagggggagtcccagacagtacttagcagtggctcagacccaaaggtagaatcctcatcttcagctcctggcctgacatcagtgtcacctcctgtgacctccacaacctcagctgcttccccagaggaagaagaagaaagtgaagatgagtctgagattttggaagagtcgccctgtgggcgctggcagaagaggcgagaagaggtgaatcaacggaatgtaccaggtattgacagtgcatacctggccatggatacagaggaaggtgtagaggttgtgtggaatgaggtacagttctctgaacgcaagaactacaagctgcaggaggaaaaggttcgtgctgtgtttgataatctgattcaattggagcatcttaacattgttaagtttcacaaatattgggctgacattaaagagaacaaggccagggtcatttttatcacagaatacatgtcatctgggagtctgaagcaatttctgaagaagaccaaaaagaaccacaagacgatgaatgaaaaggcatggaagcgttggtgcacacaaatcctctctgccctaagctacctgcactcctgtgacccccccatcatccatgggaacctgacctgtgacaccatcttcatccagcacaacggactcatcaagattggctctgtggctcctgacactatcaacaatcatgtgaagacttgtcgagaagagcagaagaatctacacttctttgcaccagagtatggagaagtcactaatgtgacaacagcagtggacatctactcctttggcatgtgtgcactggagatggcagtgctggagattcagggcaatggagagtcctcatatgtgccacaggaagccatcagcagtgccatccagcttctagaagacccattacagagggagttcattcaaaagtgcctgcagtctgagcctgctcgcagaccaacagccagagaacttctgttccacccagcattgtttgaagtgccctcgctcaaactccttgcggcccactgcattgtgggacaccaacacatgatcccagagaacgctctagaggagatcaccaaaaacatggatactagtgccgtactggctgaaatccctgcaggaccaggaagagaaccagttcagactttgtactctcagtcaccagctctggaattagataaattccttgaagatgtcaggaatgggatctatcctctgacagcctttgggctgcctcggccccagcagccacagcaggaggaggtgacatcacctgtcgtgcccccctctgtcaagactccgacacctgaaccagctgaggtggagactcgcaaggtggtgctgatgcagtgcaacattgagtcggtggaggagggagtcaaacaccacctgacacttctgctgaagttggaggacaaactgaaccggcacctgagctgtgacctgatgccaaatgagaatatccccgagttggcggctgagctggtgcagctgggcttcattagtgaggctgaccagagccggttgacttctctgctagaagagaccttgaacaagttcaattttgccaggaacagtaccctcaactcagccgctgtcaccgtctcctcttagagctcactcgggccaggccctgatctgcgctgtggctgtccctggacgtgctgcagccctcctgtcccttccccccagtcagtattaccctgtgaagccccttccctcctttattattcaggagggctgggggggctccctggttctgagcatcatcctttcccctcccctctcttcctcccctctgcactttgtttacttgttttgcacagacgtgggcctgggccttctcagcagccgccttctagttgggggctagtcgctgatctgccggctcccgcccagcctgtgtggaaaggaggcccacgggcactaggggagccgaattctacaatcccgctggggcggccggggcgggagagaaaggtggtgctgcagtggtggccctggggggccattcgattcgcctcagttgctgctgtaataaaagtctactttttgct

SEQ ID NO: 2093 - DNA, 4089 bp, Homo sapiens
  source 1..4089: mol_type = genomic DNA
acagcctgcggggaacgtagctagctgcaagcagaggccggcatgaccaccgagcagcgacgcagcctgcaagccttccaggattatatccggaagaccctggaccctacctacatcctgagctacatggccccctggtttagggaggaagaggtgcagtatattcaggctgagaaaaacaacaagggcccaatggaggctgccacactttttctcaagttcctgttggagctccaggaggaaggctggttccgtggctttttggatgccctagaccatgcaggttattctggactttatgaagccattgaaagttgggatttcaaaaaaattgaaaagttggaggagtatagattacttttaaaacgtttacaaccagaatttaaaaccagaattatcccaaccgatatcatttctgatctgtctgaatgtttaattaatcaggaatgtgaagaaattctacaggtataaaagatgttgaaacagaagatcttgaggataagatggaaacttctgacatacagattttctaccaagaagatccagaatgccagaatcttagtgagaattcatgtccaccttcagaagtgtctgatacaaacttgtacagcccatttaaaccaagaaattaccaattagagcttgctttgcctgctatgaaaggaaaaaacacaataatatgtgctcctacaggttgtggaaaaacctttgtttcactgcttatatgtgaacatcatcttaaaaaattcccacaaggacaaaaggggaaagttgtcttttttgcgaatcagatcccagtgtatgaacagcagaaatctgtattctcaaaatactttgaaagacatgggtatagagttacaggcatttctggagcaacagctgagaatgtcccagtggaacagattgttgagaacaatgacatcatcattttaactccacagattcttgtgaacaaccttaaaaagggaacgattccatcactatccatctttactttgatgatatttgatgaatgccacaacactagtaaacaacacccgtacaatatgatcatgtttaattatctagatcagaaacttggaggatcttcaggcccactgccccaggtcattgggctgactgcctcggttggtgttggggatgccaaaaacacagatgaagccttggattatatctgcaagctgtgtgcttctcttgatgcgtcagtgatagcaacagtcaaacacaatctggaggaactggagcaagttgtttataagccccagaagtttttcaggaaagtggaatcacggattagcgacaaatttaaatacatcatagctcagctgatgagggacacagagagtctggcaaagagaatctgcaaagacctcgaaaacttatctcaaattcaaaatagggaatttggaacacagaaatatgaacaatggattgttacagttcagaaagcatgcatggtgttccagatgccagacaaagatgaagagagcaggatttgtaaagccctgtttttatacacttcacatttgcggaaatataatgatgccctcattatcagtgagcatgcacgaatgaaagatgctctggattacttgaaagacttcttcagcaatgtccgagcagcaggattcgatgagattgagcaagatcttactcagagatttgaagaaaagctgcaggaactagaaagtgtttccagggatcccagcaatgagaatcctaaacttgaagacctctgcttcatcttacaagaagagtaccacttaaacccagagacaataacaattctctttgtgaaaaccagagcacttgtggacgctttaaaaaattggattgaaggaaatcctaaactcagttttctaaaacctggcatattgactggacgtggcaaaacaaatcagaacacaggaatgaccctcccggcacagaagtgtatattggatgcattcaaagccagtggagatcacaatattctgattgccacctcagttgctgatgaaggcattgacattgcacagtgcaatcttgtcatcctttatgagtatgtgggcaatgtcatcaaaatgatccaaaccagaggcagaggaagagcaagaggtagcaagtgcttccttctgactagtaatgctggtgtaattgaaaaagaacaaataaacatgtacaaagaaaaaatgatgaatgactctattttacgccttcagacatgggacgaagcagtatttagggaaaagattctgcatatacagactcatgaaaaattcatcagagatagtcaagaaaaaccaaaacctgtacctgataaggaaaataaaaaactgctctgcagaaagtgcaaagccttggcatgttacacagctgacgtaagagtgatagaggaatgccattacactgtgcttggagatgcttttaaggaatgctttgtgagtagaccacatcccaagccaaagcagttttcaagttttgaaaaaagagcaaagatattctgtgcccgacagaactgcagccatgactggggaatccatgtgaagtacaagacatttgagattccagttataaaaattgaaagttttgtggtggaggatattgcaactggagttcagacactgtactcgaagtggaaggactttcattttgagaagataccatttgatccagcagaaatgtccaaatgatatcaggtcctcaatcttcagctacagggaatgagtaactttgagtggagaagaaacaaacatagtgggtataatcatggatcgcttgtacccctgtgaaaatatattttttaaaaatatctttagcagtttgtactatattatatatgcaaagcacaaatgagtgaatcacagcactgagtattttgtaggccaacagagctcatagtacttgggaaaaattaaaaagcctcatttctagccttctttttagagtcaactgccaacaaacacacagtaatcactctgtacacactgggatagatgaatgaatggaatgttgggaatttttatctccctttgtctccttaacctactgtaaactggcttttgcccttaacaatctactgaaattgttcttttgaaggttaccagtgactctggttgccaaatccactgggcacttcttaaccttctatttgacctctgcgcatttggccctgttgagcactcttcttgaagctctccctgggcttctctctcttctagttctattctagtctttttttattgagtcctcctctttgctgatcccttccaagggttcaatatatatacatgtatatactgtacatatgtatatgtaactaatatacatacatacaggtatgtatatgtaatggttatatgtactcatgttcctggtgtagcaacgtgtggtatggctacacagagaacatgagaacataaagccatttttatgcttactactaaaagctgtccactgtagagttgctgtatgtagcaatgtgtatccactctacagtggtcagcttttagtagagagcataaaaatgataaaatacttcttgaaaacttagtttactatacatcttgccctattaatatgttctcttaacgtgtgccattgttctctttgaccattttcctataatgatgttgatgttcaacacctggactgaatgtctgttctcagatcccttggatgttacagatgaggcagtctgactgtcctttctacttgaaagattagaatatgtatccaaatggcattcacgtgtcacttagcaaggtttgctgatgcttcaaagagcttagtttgcggtttcctggacgtggaaacaagtatctgagttccctggagatcaacgggatgaggtgttacagctgcctccctcttcatgcaatctggtgagcagtggtgcaggcggggagccagagaaacttgccagttatataacttctctttggcttttcttcatctgtaaaacaaggataatactgaactgtaagggttagtggagagtttttaattaaaagaatgtgtgaaaagtacatgacacagtagttgcttgataatagttactagtagtagtattcttactaagacccaatacaaatggattatttaaaccaa

SEQ ID NO: 2094 - DNA, 4621 bp, Homo sapiens
  source 1..4621: mol_type = genomic DNA
tagttattaaagttcctatgcagctccgcctcgcgtccggcctcatttcctcggaaaatccctgctttccccgctcgccacgccctcctcctacccggctttaaagctagtgaggcacagcctgcggggaacgtagctagctgcaagcagaggccggcatgaccaccgagcagcgacgcagcctgcaagccttccaggattatatccggaagaccctggaccctacctacatcctgagctacatggccccctggtttagggagggttattctggactttatgaagccattgaaagttgggatttcaaaaaaattgaaaagttggaggagtatagattacttttaaaacgtttacaaccagaatttaaaaccagaattatcccaaccgatatcatttctgatctgtctgaatgtttaattaatcaggaatgtgaagaaattctacagatttgctctactaaggggatgatggcaggtgcagagaaattggtggaatgccttctcagatcagacaaggaaaactggcccaaaactttgaaacttgctttggagaaagaaaggaacaagttcagtgaactgtggattgtagagaaaggtataaaagatgttgaaacagaagatcttgaggataagatggaaacttctgacatacagattttctaccaagaagatccagaatgccagaatcttagtgagaattcatgtccaccttcagaagtgtctgatacaaacttgtacagcccatttaaaccaagaaattaccaattagagcttgctttgcctgctatgaaaggaaaaaacacaataatatgtgctcctacaggttgtggaaaaacctttgtttcactgcttatatgtgaacatcatcttaaaaaattcccacaaggacaaaaggggaaagttgtcttttttgcgaatcagatcccagtgtatgaacagcagaaatctgtattctcaaaatactttgaaagacatgggtatagagttacaggcatttctggagcaacagctgagaatgtcccagtggaacagattgttgagaacaatgacatcatcattttaactccacagattcttgtgaacaaccttaaaaagggaacgattccatcactatccatctttactttgatgatatttgatgaatgccacaacactagtaaacaacacccgtacaatatgatcatgtttaattatctagatcagaaacttggaggatcttcaggcccactgccccaggtcattgggctgactgcctcggttggtgttggggatgccaaaaacacagatgaagccttggattatatctgcaagctgtgtgcttctcttgatgcgtcagtgatagcaacagtcaaacacaatctggaggaactggagcaagttgtttataagccccagaagtttttcaggaaagtggaatcacggattagcgacaaatttaaatacatcatagctcagctgatgagggacacagagagtctggcaaagagaatctgcaaagacctcgaaaacttatctcaaattcaaaatagggaatttggaacacagaaatatgaacaatggattgttacagttcagaaagcatgcatggtgttccagatgccagacaaagatgaagagagcaggatttgtaaagccctgtttttatacacttcacatttgcggaaatataatgatgccctcattatcagtgagcatgcacgaatgaaagatgctctggattacttgaaagacttcttcagcaatgtccgagcagcaggattcgatgagattgagcaagatcttactcagagatttgaagaaaagctgcaggaactagaaagtgtttccagggatcccagcaatgagaatcctaaacttgaagacctctgcttcatcttacaagaagagtaccacttaaacccagagacaataacaattctctttgtgaaaaccagagcacttgtggacgctttaaaaaattggattgaaggaaatcctaaactcagttttctaaaacctggcatattgactggacgtggcaaaacaaatcagaacacaggaatgaccctcccggcacagaagtgtatattggatgcattcaaagccagtggagatcacaatattctgattgccacctcagttgctgatgaaggcattgacattgcacagtgcaatcttgtcatcctttatgagtatgtgggcaatgtcatcaaaatgatccaaaccagaggcagaggaagagcaagaggtagcaagtgcttccttctgactagtaatgctggtgtaattgaaaaagaacaaataaacatgtacaaagaaaaaatgatgaatgactctattttacgccttcagacatgggacgaagcagtatttagggaaaagattctgcatatacagactcatgaaaaattcatcagagatagtcaagaaaaaccaaaacctgtacctgataaggaaaataaaaaactgctctgcagaaagtgcaaagccttggcatgttacacagctgacgtaagagtgatagaggaatgccattacactgtgcttggagatgcttttaaggaatgctttgtgagtagaccacatcccaagccaaagcagttttcaagttttgaaaaaagagcaaagatattctgtgcccgacagaactgcagccatgactggggaatccatgtgaagtacaagacatttgagattccagttataaaaattgaaagttttgtggtggaggatattgcaactggagttcagacactgtactcgaagtggaaggactttcattttgagaagataccatttgatccagcagaaatgtccaaatgatatcaggtcctcaatcttcagctacagggaatgagtaactttgagtggagaagaaacaaacatagtgggtataatcatggatcgcttgtacccctgtgaaaatatattttttaaaaatatctttagcagtttgtactatattatatatgcaaagcacaaatgagtgaatcacagcactgagtattttgtaggccaacagagctcatagtacttgggaaaaattaaaaagcctcatttctagccttctttttagagtcaactgccaacaaacacacagtaatcactctgtacacactgggatagatgaatgaatggaatgttgggaatttttatctccctttgtctccttaacctactgtaaactggcttttgcccttaacaatctactgaaattgttcttttgaaggttaccagtgactctggttgccaaatccactgggcacttcttaaccttctatttgacctctgcgcatttggccctgttgagcactcttcttgaagctctccctgggcttctctctcttctagttctattctagtctttttttattgagtcctcctctttgctgatcccttccaagggttcaatatatatacatgtatatactgtacatatgtatatgtaactaatatacatacatacaggtatgtatatgtaatggttatatgtactcatgttcctggtgtagcaacgtgtggtatggctacacagagaacatgagaacataaagccatttttatgcttactactaaaagctgtccactgtagagttgctgtatgtagcaatgtgtatccactctacagtggtcagcttttagtagagagcataaaaatgataaaatacttcttgaaaacttagtttactatacatcttgccctattaatatgttctcttaacgtgtgccattgttctctttgaccattttcctataatgatgttgatgttcaacacctggactgaatgtctgttctcagatcccttggatgttacagatgaggcagtctgactgtcctttctacttgaaagattagaatatgtatccaaatggcattcacgtgtcacttagcaaggtttgctgatgcttcaaagagcttagtttgcggtttcctggacgtggaaacaagtatctgagttccctggagatcaacgggatgaggtgttacagctgcctccctcttcatgcaatctggtgagcagtggtgcaggcggggagccagagaaacttgccagttatataacttctctttggcttttcttcatctgtaaaacaaggataatactgaactgtaagggttagtggagagtttttaattaaaagaatgtgtgaaaagtacatgacacagtagttgcttgataatagttactagtagtagtattcttactaagacccaatacaaatggattatttaaaccaagtttatgagttggttttttttcattttctatttgtattttattaagagtgtcttttcttatgtgattttttttaattgctatttgatatggtttggctatatgtccccacccaaatctcatcttgaattataatccccatgtgtcaagggagggacctgacgggaggtgattggatcacgggggcagttgtccccatgctgttcttgggatagtgagttagttctcatgagatctgatggttttataagtgtttgacaattcctcctttacacacactctctctctcatctgctgccatgtaagacttgcctgcttccccttctgccatgattgtaagtttcctgaggcctcctcagccatgtggaactgtgaatctattaagcctcttttctttataaatga

SEQ ID NO: 2095 - DNA, 4353 bp, Homo sapiens
  source 1..4353: mol_type = genomic DNA
tagttattaaagttcctatgcagctccgcctcgcgtccggcctcatttcctcggaaaatccctgctttccccgctcgccacgccctcctcctacccggctttaaagctagtgaggcacagcctgcggggaacgtagctagctgcaagcagaggccggcatgaccaccgagcagcgacgcagcctgcaagccttccaggattatatccggaagaccctggaccctacctacatcctgagctacatggccccctggtttagggaggaagaggtgcagtatattcaggctgagaaaaacaacaagggcccaatggaggctgccacactttttctcaagttcctgttggagctccaggaggaaggctggttccgtggctttttggatgccctagaccatgcaggttattctggactttatgaagccattgaaagttgggatttcaaaaaaattgaaaagttggaggagtatagattacttttaaaacgtttacaaccagaatttaaaaccagaattatcccaaccgatatcatttctgatctgtctgaatgtttaattaatcaggaatgtgaagaaattctacagatttgctctactaaggggatgatggcaggtgcagagaaattggtggaatgccttctcagatcagacaaggaaaactggcccaaaactttgaaacttgctttggagaaagaaaggaacaagttcagtgaactgtggattgtagagaaaggtataaaagatgttgaaacagaagatcttgaggataagatggaaacttctgacatacagattttctaccaagaagatccagaatgccagaatcttagtgagaattcatgtccaccttcagaagtgtctgatacaaacttgtacagcccatttaaaccaagaaattaccaattagagcttgctttgcctgctatgaaaggaaaaaacacaataatatgtgctcctacaggttgtggaaaaacctttgtttcactgcttatatgtgaacatcatcttaaaaaattcccacaaggacaaaaggggaaagttgtcttttttgcgaatcagatcccagtgtatgaacagcagaaatctgtattctcaaaatactttgaaagacatgggtatagagttacaggcatttctggagcaacagctgagaatgtcccagtggaacagattgttgagaacaatgacatcatcattttaactccacagattcttgtgaacaaccttaaaaagggaacgattccatcactatccatctttactttgatgatatttgatgaatgccacaacactagtaaacaacacccgtacaatatgatcatgtttaattatctagatcagaaacttggaggatcttcaggcccactgccccaggtcattgggctgactgcctcggttggtgttggggatgccaaaaacacagatgaagccttggattatatctgcaagctgtgtgcttctcttgatgcgtcagtgatagcaacagtcaaacacaatctggaggaactggagcaagttgtttataagccccagaagtttttcaggaaagtggaatcacggattagcgacaaatttaaatacatcatagctcagctgatgagggacacagagagtctggcaaagagaatctgcaaagacctcgaaaacttatctcaaattcaaaatagggaatttggaacacagaaatatgaacaatggattgttacagttcagaaagcatgcatggtgttccagatgccagacaaagatgaagagagcaggatttgtaaagccctgtttttatacacttcacatttgcggaaatataatgatgccctcattatcagtgagcatgcacgaatgaaagatgctctggattacttgaaagacttcttcagcaatgtccgagcagcaggattcgatgagattgagcaagatcttactcagagatttgaagaaaagctgcaggaactagaaagtgtttccagggatcccagcaatgagaatcctaaacttgaagacctctgcttcatcttacaagaagagtaccacttaaacccagagacaataacaattctctttgtgaaaaccagagcacttgtggacgctttaaaaaattggattgaaggaaatcctaaactcagttttctaaaacctggcatattgactggacgtggcaaaacaaatcagaacacaggaatgaccctcccggcacagaagtgtatattggatgcattcaaagccagtggagatcacaatattctgattgccacctcagttgctgatgaaggcattgacattgcacagtgcaatcttgtcatcctttatgagtatgtgggcaatgtcatcaaaatgatccaaaccagaggcagaggaagagcaagaggtagcaagtgcttccttctgactagtaatgctggtgtaattgaaaaagaacaaataaacatgtacaaagaaaaaatgatgaatgactctattttacgccttcagacatgggacgaagcagtatttagggaaaagattctgcatatacagactcatgaaaaattcatcagagatagtcaagaaaaaccaaaacctgtacctgataaggaaaataaaaaactgctctgcagaaagtgcaaagccttggcatgttacacagctgacgtaagagtgatagaggaatgccattacactgtgcttggagatgcttttaaggaatgctttgtgagtagaccacatcccaagccaaagcagttttcaagttttgaaaaaagagcaaagatattctgtgcccgacagaactgcagccatgactggggaatccatgtgaagtacaagacatttgagattccagttataaaaattgaaagttttgtggtggaggatattgcaactggagttcagacactgtactcgaagtggaaggactttcattttgagaagataccatttgatccagcagaaatgtccaaatgatatcaggtcctcaatcttcagctacagggaatgagtaactttgagtggagaagaaacaaacatagtgggtataatcatggatcgcttgtacccctgtgaaaatatattttttaaaaatatctttagcagtttgtactatattatatatgcaaagcacaaatgagtgaatcacagcactgagtattttgtaggccaacagagctcatagtacttgggaaaaattaaaaagcctcatttctagccttctttttagagtcaactgccaacaaacacacagtaatcactctgtacacactgggatagatgaatgaatggaatgttgggaatttttatctccctttgtctccttaacctactgtaaactggcttttgcccttaacaatctactgaaattgttcttttgaaggttaccagtgactctggttgccaaatccactgggcacttcttaaccttctatttgacctctgcgcatttggccctgttgagcactcttcttgaagctctccctgggcttctctctcttctagttctattctagtctttttttattgagtcctcctctttgctgatcccttccaagggttcaatatatatacatgtatatactgtacatatgtatatgtaactaatatacatacatacaggtatgtatatgtaatggttatatgtactcatgttcctggtgtagcaacgtgtggtatggctacacagagaacatgagaacataaagccatttttatgcttactactaaaagctgtccactgtagagttgctgtatgtagcaatgtgtatccactctacagtggtcagcttttagtagagagcataaaaatgataaaatacttcttgaaaacttagtttactatacatcttgccctattaatatgttctcttaacgtgtgccattgttctctttgaccattttcctataatgatgttgatgttcaacacctggactgaatgtctgttctcagatcccttggatgttacagatgaggcagtctgactgtcctttctacttgaaagattagaatatgtatccaaatggcattcacgtgtcacttagcaaggtttgctgatgcttcaaagagcttagtttgcggtttcctggacgtggaaacaagtatctgagttccctggagatcaacgggatgaggtgttacagctgcctccctcttcatgcaatctggtgagcagtggtgcaggcggggagccagagaaacttgccagttatataacttctctttggcttttcttcatctgtaaaacaaggataatactgaactgtaagggttagtggagagtttttaattaaaagaatgtgtgaaaagtacatgacacagtagttgcttgataatagttactagtagtagtattcttactaagacccaatacaaatggattatttaaaccaa

SEQ ID NO: 2096 - DNA, 2398 bp, Homo sapiens
  source 1..2398: mol_type = genomic DNA
agaatggcctcggacacccaggcagtccctgacgtgtcggggaggagccgggcgcggaggtacgctgagtggagctcggggctgcgtaggggagctgagccgagcggctgggcgggcctggccgggccggcggaggggagacgtcggttgagcggcggcgaacatgcgcttttgacacattggaggctttcttgatcatggatggtgaagatataccagatttttcaagtttaaaggaggaaactgcttattggaaggaactttccttgaagtataagcaaagcttccaggaagctcgggatgagctagttgaattccaggaaggaagcagagaattagaagcagagttggaggcacaattagtacaggctgaacaaagaaatagagacttgcaggctgataaccaaagactgaaatatgaagtggaggcattaaaggagaagctagagcatcaatatgcacagagctataagcaggtctcagtgttagaagatgatttaagtcagactcgggccattaaggagcagttgcataagtatgtgagagagctggagcaggccaacgacgacctggagcgagccaaaagggcaacaatagtttcactggaagactttgaacaaaggctaaaccaggccattgaacgaaatgcatttttagaaagtgaacttgatgaaaaggaatctttgttggtctctgtacagaggttaaaggatgaagcaagagatttaaggcaagaactagcagttcgggaaagacaacaggaagtaactagaaagtcggctcctagctctccaactctagactgtgaaaagatggactccgccgtccaagcatcactttctttgccagctacccctgttggcaaaggaacggagaacacttttccttcaccgaaagctataccaaatggttttggtaccagtccactaactccctctgctaggatatcagcactaaacatcgtgggggatctcttacggaaagtaggggctttagaatccaaattagcagcttgcaggaattttgcaaaggaccaagcatcacgaaaatcctatatttcagggaatgttaactgtggggtgctgaatggcaatggcacaaagttctctcgatcagggcatacatctttcttcgacaaagggcaagaaaaagtcatatttcccacgttgttcatggggcagtaaacggctttgaccccgctcctcctcctcctggtctgggctcctcgcgtccatcgtcagcgccgggtatgctgcctctcagtgtgtgagtgcctagcctccaggtgggggctcctgccctcctccaacaacccaggacacccacgcctcacccctcggtgcctgggcccagccccgtgcccctccgtctgcctccgcacggctggcagagggcaggctgcatgcagtggcggctactgggccctgcccagccccggaactctgcgcgatatcaatactggctattttctcttctcgccgtagtgccgttggtttcacatgattgcacttttgtgggtcgcaaggtgatacatacgtgtattacttggtcactggatgcagaagtacccattcatcacacctgccccatagcccccactctgctgtactgataggatttagttgtgttttaggacattgcaaatcttctagaagttctcccccaaatcaggtcaatgtgtgccctcctgagctcccacccaggcatctccagtgctcatgatcatgtgtcccccaactccacccctcacagtttgggcctgtttctggcaaagagtcaggaaggttactgaattagggaacattttctgcaccttctgattttacttaagcagctaccattccatggacttgcctcccagagcagcacaatgcccgtctgagccccacgtggcaggagcctctgggacggggcacacacaggcccagcctctgtgctgtctcctcctccgtgcgcctcagactcggggtgagggaggcgggcagcctctcgccagccttcccgtccttcagttcaacgacatctttggagtgtttttgttttctcttccaagggccgtcccgttgtgttaggaagggtgagtggctggttccagggtgggccggtgccagctccggggtggactgaacagcggcggctgtccctgtgcatcctttgattactctcatgctgcatttactgtttacatttgttttattgtacataggtttgtaaacattattgcctgagatatttgtatataacttgggctttgtagcttttatttattcagaacgcatacggcatgttaatgactctgatggtgtcctcctctgggcagctgtataggatcatcatgtggttacaaaaaatacttccctcaaaaaaattcttttaatgtggaaacaataaatttcac

SEQ ID NO: 2097 - DNA, 3675 bp, Homo sapiens
  source 1..3675: mol_type = genomic DNA
gctgcgagggttgccgaaggcgcacggatctgggcgctgaaaaagccaggatttggcaatggctttgctgtgtggccttgggcaagtcactctgcgtatctgggtttcacttccttcccaatccgaaaacgggattgggttccttgcagcccgggcattcctgaggagcggcggcatggaggctctcaccactcagctggggccggggcgcgagggcagttcctcgcccaactccaagcaggagctgcagccgtactcgggctccagcgctctcaaacccaaccaggtgggcgagacgtcgctgtacggggtgcccattgtgtcgctggtcatcgacggccaggagcgcctatgcctggcgcagatctccaacaccctcctcaagaactacagctataatgagatccacaaccgccgcgtggccctgggcatcacgtgcgtgcagtgcacgccggtacagctggagattctgcgtcgggccggggccatgcccatctcgtcgcgccgctgcggcatgatcactaagcgagaggccgaacgcctgtgcaagtcgttcctgggcgagcacaaaccacccaagctgcccgagaacttcgccttcgatgtggtgcacgagtgcgcgtggggctcgcgtggtagcttcatccctgcgcgttacaacagctctcgtgccaagtgcatcaagtgcggctactgcagcatgtacttctcgcccaacaagttcatcttccactcgcaccgaacacccgacgccaagtacacgcagcccgatgccgccaacttcaactcctggcgtcgtcacctcaaactcagtgacaagtcggccacagacgaactgagccatgcttgggaggacgtcaaggccatgtttaatggcggcacgcgcaagcggaccttctccctacaaggaggcggcggaggcggtgccaatggcgggtcgggtgggcaggggaagggtggtgctggcggcggtggcggcggtggcccagggtgcggtgcagagatggccccaggcccgccgccccacaaaagcctgcgctgtggcgaagatgaggctgccgggcctccggggccacctccaccccacccgcagcgcggacttggcctggcgactggagctagtggcccggcgggcccaggagggcccggtggcggcgccggcgtacgaagctacccggtgatcccggtgcccagcaaaggctttgggctcctgcaaaagctgcccccaccacttttcccccatccttacggcttccctacggccttcggcctatgccccaaaaaggacgacccggttttaggcgcgggcgagccaaagggcggtcctggcactgggagcggcggcggcggcgcggggacaggcgggggtgcggggggcccgggagccagccacttgcccccgggggcaggggcgggcccgggcggcggcgccatgttctgggggcatcaaccctccggggcagccaaggacgcagcggcagtggctgcagcggccgccgccgccactgtgtacccgacgtttcccatgttctggccagcagcaggcagcctcccggtaccgtcctaccccgctgctcagagccaagccaaggccgtggcggcagccgtggcggcggcagcggcggcggcagcggcagctgctggcagcggtgccccagagcccctggacggtgccgagccagccaaagagagtggcctcggcgcggaggagcgctgcccgagcgctctgtcccgcgggcccctggacgaagacggcacggacgaggcgctgccaccgcccctggccccgttgcccccgccgcccccgccgcccgcacgcaaaggctcctacgtgtcggccttccggccggtggtcaaggacaccgagagcatcgctaagctctacgggagcgcccgggaggcgtacggcgcggggcctgctcgggggccgggacccggcgctgggagcggcggctacgtgagcccggactttctgagcgagggcagctccagctacaattccgcctcgcccgacgtggacaccgcggacgagcccgaggtggacgtggaatccaaccgcttccccgacgacgaggacgcccaagaggagaccgagcccagcgcacccagcgcagggggcggcccagacggtgaacagcccactggacccccttccgccacctcctctggcgcggacggtcccgcaaactctcccgacggcggcagcccccgcccccggcgccgcctcgggccacccccagctggccggcccgcatttggggacttggcagccgaagacttggtgcggagacctgagaggagcccgccaagcggcggcggcggctacgagctgcgagagccttgcgggcccctaggaggccccgcgccggccaaggtgttcgcgcccgagagggatgagcacgtgaagagcgcggcggtggcgctggggcccgcggcctcctacgtctgcacccccgaggcccacgagccagataaggaagacaatcactcgcccgccgatgatttggaaacgaggaaatcctatccagaccaaaggagtatctcccagccaagtcctgcaaatacagacagaggcgaagatgggcttaccttggatgtcacaggaactcatttggtggagaaagatatcgagaacctggccagagaggaattgcaaaaactgctcctggaacaaatggagctccgcaagaagctggaacgggaatttcagagtctcaaagataattttcaggatcaaatgaagagggaattggcttatcgagaagaaatggtgcaacagctgcaaattgtcagagataccctgtgtaacgaactcgaccaggagcggaaggcgcgctatgccatccagcagaaattgaaagaagcccacgacgccctgcaccatttctcctgcaagatgctgacgccccgccactgcactggcaactgctccttcaagccaccgctgttgccctagggccggcctggccgcacccctgcgccctcaagccatgctgctccttgtaaatacccgctgctgcggtggccctgagcgaggaacaagccattcggacccgaccgatgtaaatacagccgcccgtccgcccgccttcctcccgggctccccggccttgcccgccccctcccgggcgtccctgtccagggccccggcttggtttccaagtgtaaataccgcctcgcgcctcaaatccccctaccccgtgtgaactctagggcatcggacctcaaggggttaactggacagacggggggcgggaggggagagcgccccctcccattgtatagccttgaacccgattgtgaatacaatgtagcaacttcgctggcgcctgccccgcactccccgtcccgtccacttctgaaactcctgttcctaatgacaaagtggctatgtgcaatggatataaatgtactgtgagtctctcggttcagtattaggttcactttaatttatttatgctgtaagttatttttgcttccttctcctggacccacttccagtcccgttttgcattcccctttggattttgctttggctattttttgttgtaacctcttgatgtaacagcactttaaaagggcgacaactgactcacgagatggcaaccacctggagcctgtttggggagaccaccctgtacccgtgactttcgtttttaataataataataataa

SEQ ID NO: 2098 - DNA, 2160 bp, Homo sapiens
  source 1..2160: mol_type = genomic DNA
atcccgcccccgttgccgggatacgccgcggcgcacggcagttagtgggtaggcctgagagccgaggaaaactgagcgtgggcctcagaaagaagttaaggcacccgcgagccgggcaactgccctccttccgcgccggcggagcgattaaagtgaagaaacaatggccagcaatcacaaatcttcagcagctcgccctgtttcaagaggtggagttgggttaacaggaaggcctccttctgggatacgacccctatcaggaaatattcgagtggcaactgcaatgccacctgggacagcaagaccaggttctcgtggttgtcccatagggactggtggagttctgtcttctcaaatcaaagttgcccatcgccctgtaacacaacaaggtttgactggaatgaaaactgggacgaaaggtccccagaggcaaattttagacaaatcttactatcttgggcttcttagaagtaaaataagtgaacttacaactgaagttaataaacttcagaagggaatagaaatgtacaatcaagagaattcagtatatttgtcatatgaaaagagggctgagactttagctgttgagataaaagagcttcaaggacaactagcagactacaacatgttggtagataaacttaataccaacactgaaatggaagaagtaatgaatgattacaatatgcttaaagctcaaaatgatcgagaaacacaaagtttggatgtcatatttactgaaagacaagcgaaagaaaaacaaatcagaagtgtcgaagaagaaattgaacaggaaaaacaagcaacagatgacattatcaaaaatatgtcttttgaaaaccaagtcaagtacctagagatgaaaaccacaaatgagaaactgttacaggaattagatacacttcaacaacaattggattcacagaacatgaaaaaagagagcctggaagcagaaatagctcactcccaggtgaaacaggaggcggtattgctgcatgaaaaactttatgagttggagtcccatcgagatcaaatgattgcagaagacaaaagcataggatctccaatggaagagagagagaaattacttaagcagattaaagatgataatcaggaaatagccagcatggaaagacagttaacagatacaaaagaaaagataaatcagtttattgaagaaattagacaacttgacatggatttagaggaacaccaaggtgaaatgaaccagaaatacaaggagctaaagaaaagggaggaacatatggacacttttattgagacttttgaggaaacaaagaatcaggaactgaaacgaaaggcacagatagaagccaacattgttgcactcttggagcactgcagtcgaaatataaatcgtatagaacagatatcctctatcaccaatcaagagctaaagatgatgcaggatgacctcaattttaaatctactgaagtgcagaaatcacaaagtacagctcagaatttgacttcagacattcaacgtctgcagttggatctgcagaaaatggagcttctagaaagtaagatgactgaagaacagcattctctaaaaagcaaaattaagcaaatgacaactgatctggagatatataatgatttgccagctttaaaatcatcaggtgaagaaaagataaagaaattacatcaggagagaatgatattatcaacccacagaaatgcctttaagaaaataatggagaagcaaaacatagagtatgaggcactaaaaacacaattgcaagaaaatgagacacattctcagcttacaaatttggagagaaagtggcaacaccttgagcaaaataattttgcgatgaaagaattcatagcaaccaagagtcaagagagtgattaccagccaattaagaaaaatgtgaccaagcagattgcagagtacaataaaaccatcgtggatgctttacatagcaccagcggaaactgagtttaagtccactgaaagtctctaaggaagtatcctcttgctgctaaacttggtacaagttgactaccaaaaaaaaaaaaagcttacttttggagtttacctaaaatttctgaatgttataatttttgtggcctcttttaagaatgatattttaaaatagtaaatagttcaataaatggtttgcatattaaaaa

SEQ ID NO: 2099 - DNA, 1389 bp, Homo sapiens
  source 1..1389: mol_type = genomic DNA
aaacagtgctacccacagagtgaacaagagagagtcatttgggaaacaaaaggagaattttacagagagagagggatagctaaaactacgtgagcctggcgagggtgcagagcagaaagtagagactgtccgaagactgctatctgggacgagacaagttgttaaagggacaggagagaaagcagagctatttcaagagtgagccacagaagggaatccagaggccatctaagcgaggaagggtctacaggcagtgagtgaaggccaggagcagggcccaggccaggcacgaccaccgaggggatgaacttcacagtgggtttcaagccgctgctaggggatgcacacagcatggacaacctggagaagcagctcatctgccccatctgcctggagatgttctccaaaccagtggtgatcctgccctgccaacacaacctgtgccgcaaatgtgccaacgacgtcttccaggcctcgaatcctctatggcagtcccggggctccaccactgtgtcttcaggaggccgtttccgctgcccatcgtgcaggcatgaggttgtcctggacagacacggtgtctacggcctgcagcgaaacctgctagtggagaacattatcgacatttacaagcaggagtcatccaggccgctgcactccaaggctgagcagcacctcatgtgcgaggagcatgaagaagagaagatcaatatttactgcctgagctgtgaggtgcccacctgctctctctgcaaggtcttcggtgcccacaattacaaacgccagaagagtgagctcagcgatggcatcgcgatgctggtggcaggcaatgaccgcgtgcaagcagtgatcacacagatggaggaggtgtgccagactatcgaggacaatagccggaggcagaagcagttgttaaaccagaggtttgagagcctgtgcgcagtgctggaggagcgcaagggtgagctgctgcaggcgctggcccgggagcaagaggagaagctgcagcgcgtccgcggcctcatccgtcagtatggcgaccacctggaggcctcctctaagctggtggagtctgccatccagtccatggaagagccacaaatggcgctgtatctccagcaggccaaggagctgatcaataaggtcggggccatgtcgaaggtggagctggcagggcggccggagccaggctatgagagcatggagcaattcaccgtaagggtggagcacgtggccgaaatgctgcggaccatcgacttccagccaggcgcttccggggaggaagaggaggtggccccagacggagaggagggcagcgcggggccggaggaagagcggccggatgggccgttgggcccttatagtgcctacgttagtctgtgtggagcccct

SEQ ID NO: 2100 - DNA, 1967 bp, Homo sapiens
  source 1..1967: mol_type = genomic DNA
acagtaaaattaatctgctctctggggagtaagggacaaacagtgctacccacagagtgaacaagagagagtcatttgggaaacaaaaggagaattttacagagagagagggatagctaaaactacgtgagcctggcgagggtgcagagcagaaagtagagactgtccgaagactgctatctgggacgagacaagttgttaaagggacaggagagaaagcagagctatttcaagagtgagccacagaagggaatccagaggccatctaagcgaggaagggtctacaggcagtgagtgaaggccaggagcagggcccaggccaggcacgaccaccgaggggatgaacttcacagtgggtttcaagccgctgctaggggatgcacacagcatggacaacctggagaagcagctcatctgccccatctgcctggagatgttctccaaaccagtggtgatcctgccctgccaacacaacctgtgccgcaaatgtgccaacgacgtcttccaggcctcgaatcctctatggcagtcccggggctccaccactgtgtcttcaggaggccgtttccgctgcccatcgtgcaggcatgaggttgtcctggacagacacggtgtctacggcctgcagcgaaacctgctagtggagaacattatcgacatttacaagcaggagtcatccaggccgctgcactccaaggctgagcagcacctcatgtgcgaggagcatgaagaagagaagatcaatatttactgcctgagctgtgaggtgcccacctgctctctctgcaaggtcttcggtgcccacaaggactgtgaggtggccccactgcccaccatttacaaacgccagaagagtgagctcagcgatggcatcgcgatgctggtggcaggcaatgaccgcgtgcaagcagtgatcacacagatggaggaggtgtgccagactatcgaggacaatagccggaggcagaagcagttgttaaaccagaggtttgagagcctgtgcgcagtgctggaggagcgcaagggtgagctgctgcaggcgctggcccgggagcaagaggagaagctgcagcgcgtccgcggcctcatccgtcagtatggcgaccacctggaggcctcctctaagctggtggagtctgccatccagtccatggaagagccacaaatggcgctgtatctccagcaggccaaggagctgatcaataaggtcggggccatgtcgaaggtggagctggcagggcggccggagccaggctatgagagcatggagcaattcaccgtaagggtggagcacgtggccgaaatgctgcggaccatcgacttccagccaggcgcttccggggaggaagaggaggtggccccagacggagaggagggcagcgcggggccggaggaagagcggccggatgggccttaaggcctgcgccgacccgaccctgctcgagagcccgcgctagagtcggggaggatctgcgcagagaccgcagcatcacccaaatcggcgccggccccgggaggatctcaataaagaactcgagcgtcccagacccgtatctcctttcgctgcccaaccccgcagcctgggcttcgaaggcgacccgcccaccatcctgcccttcccagaacctgagaccgtctggggggcggaagccaaatgaacccctattgggcacctctgtgatgccaggagcgaactggtgagcccagcgccctgggaagagggccgagggcggggcggtggtgccgggacctctgaggtcctggggatttggggacccttggggtccacatgcacctggctgacctggctgaaagccgctgtctcggagccccccacagcattttgttcccctcccgctggcccgggggccccaccttcccacgggttcccacgctgctgtgactgccctgcctctacgacaaaagccaacgggtcttcagtacttttattaaaaaatagtcacgca

SEQ ID NO: 2101 - DNA, 1098 bp, Homo sapiens
  source 1..1098: mol_type = genomic DNA
cactcactcacacactcactcactcacacacctcccccagctcaccgcctccccactccagcatggccgcctccaccatgtccatctgctccagcgcctgcactgactcttggcgggtagtcgactgcccagagagctgctgcgagccctgctgctgtgccccagcccccagcttgaccctggtctgcaccccagtgagctgtgtgtccagcccctgctgccagacggcctgtgagcccagcgcctgccaatcaggctacaccagctcctgcacaaccccatgctaccagcagtctagctgccagccggattgctgcacctcctccccctgccagcaggcctgctgtgtgcctgtctgctgtgtgcccgtctgctgcgtgcccgtctgtaacaagcctgtgtgcttcgtgcctacctgctccgagtcttccccttcatgctgccagcagtctagctgccagccaacttgctgcacctcctccccatgccagcaggcctgctgtgtgcctgtctgctctaagtccgtctgctatgtgcctgtgtgctctggggcttccacttcatgctgccagcagtctagctgccagcctgcttgctgcaccgcctcctgctgcagaccctcctcctccgtgtccctcctctgccaccctgtgtgcaagtccacctgctgcgtgcccgtcccctcctgcggtgcctctgcctcctcctgccagcccagctgctgccgcacggcctcctgtgtttccctcctctgccgccccgtgtgctcccgccctgcctgctacagcctctgctctggccagaagtccagctgctgacagccctggatgtgatccggagtcccttcccaccaggggctgacctcccagctgccccagcaagctctgccctctctggctttgacaccctcagaaggtggggcaggctctttgtcttggggaccaggatgctcccccagtccttcccagatgatggctgcctgtgggaccccagctactcccccagacccaagttctgcagaactaacccccagcaggcctggttccaccctgggcagcaccccctctagttctaataaagccgcctctgtctcacacc

SEQ ID NO: 2102 - DNA, 1595 bp, Homo sapiens
  source 1..1595: mol_type = genomic DNA
catctcctccagttcaatccccagcatggccgcgtccactatgtctgtctgctccagcgacctgagctacggcagccgcgtctgccttcctggttcctgtgactcttgctccgactcctggcaggtggacgactgcccagagagctgctgcgagcccccctgctgcgcccccagctgctgcgccccggccccctgcctgagcctggtctgcaccccagtgagccgtgtgtccagcccctgctgcccagtgacctgtgagcccagcccctgccaatcaggctgcaccagctcctgcacgccctcgtgctgccagcagtctagctgccagctggcttgctgtgcctcctccccctgccagcaggcctgctgcatgcccgtctgctgcaagactgtctgctgcaagcctgtgtactgtgtgcctgtctgcagtggggattcttcatgctgccagcagtctagctgccagtcagcttgctgcacctcctccccctgccagcaggcctgctgtgtgcccatctgctgcaagcctgtctgctctgggatttcctcttcgtgctgccagcagtctagctgtgtgagctgtgtgtccagcccctgctgccaggcggtctgtgagcccagcccctgccaatcaggctgcatcagctcctgcacgccctcgtgctgccagcagtctagctgccagccggcttgctgcacctcctccccctgccagcaggcctgctgtgtgcctgtctgctgcaagcccgtctgctgtgtgcccacctgctctgatgattccggttcatgctgccagccagcttgctgcacctcctcccaaagccagcagggctgctgcgtgcccgtctgctgtaagcctgtgtgctgtgtgcctgtctgctctggggcttccagttcatgctgccagcagtctagctgccagccggcttgctgcaccacctcctgctgcagaccctcctcctccgtgtccctcctctgccgccctgtgtgcaggcccacctgctgcgtgcccgtcccctcctgctgcgcccccacctcctcctgccaggccagctgctgccgcccagcctcctgtgtgtctctcctttgccgccccgcatgctcccgcccagcctgctgtggccccacctcaacccagaagtccagctgctgagtgatctccttaagatcatccaaagcctgagtgctcactgccacctgcacccctggattctttacccttgacggctctccacatcccgctcctaagccctgcagtggacatcagtggtcagctggccatccagtgtgcgcttctcctcctagaagcagctcagctgtttctccaagtcttgactttcccccaattacccagccctgcttccccagcaacaggtgggcagtgaccccagcaaggccagcgggtgctcccaggccatagcccggtgtggggagaaacgagggtagacacgtaccaactgtgggtttctcgtcactgtcccagctcagtggcgagccctgctcctcccctgctgtgggcctgggcctctttctctgtcttccctgaccacgggagcaggtcagacccttctaataaactcctttcctaaaaagta

SEQ ID NO: 2103 - DNA, 4401 bp, Homo sapiens
  source 1..4401: mol_type = genomic DNA
aaggccctgcgagattctgtgccccttgtcgggccgcttgtttggctgctgccgtcacctcatggcgacgcgggtagaggaggcagcgcggggaagaggcggcggcgccgaagaggcgactgaggccggacggggcggacggcgacgcagcccgcggcagaagtttgaaattggcacaatggaagaagctggaatttgtgggctaggggtgaaagcagatatgttgtgtaactctcaatcaaatgatattcttcaacatcaaggctcaaattgtggtggcacaagtaacaagcattcattggaagaggatgaaggcagtgactttataacagagaacaggaatttggtgagcccagcatactgcacgcaagaatcaagagaggaaatccctgggggagaagctcgaacagatccccctgatggtcagcaagattcagagtgcaacaggaacaaagaaaaaactttaggaaaagaagttttattactgatgcaagccctaaacaccctttcaaccccagaggagaagctggcagctctctgtaagaaatatgctgatcttctggaggagagcaggagtgttcagaagcaaatgaagatcctgcagaagaagcaagcccagattgtgaaagagaaagttcacttgcagagtgaacatagcaaggctatcttggcaagaagcaagctagaatctctttgcagagaacttcagcgtcacaataagacgttaaaggaggaaaatatgcagcaggcacgagaggaagaagaacgacgtaaagaagcaactgcacatttccagattaccttaaatgaaattcaagcccagctggagcagcatgacatccacaacgccaaactccgacaggaaaacattgagctgggggagaagctaaagaagctcatcgaacagtacgcactgagggaagagcacattgataaggtgttcaaacataaggaactgcaacagcagctcgtggatgccaaactgcagcaaacgacacaactgataaaagaagctgatgaaaaacatcagagagagagagagtttttattaaaagaagcgacagaatcgaggcacaaatacgaacaaatgaaacagcaagaagtacaactaaaacagcagctttctctttatatggataagtttgaagaattccagactaccatggcaaaaagcaatgaactgtttacaaccttcagacaggaaatggaaaagatgacaaagaaaattaaaaaactggaaaaagaaacaataatttggcgtaccaaatgggaaaacaataataaagcacttctgcaaatggctgaagagaaaacagtccgtgataaagagtacaaggcccttcaaataaaactggaacggttagagaagctgtgcagggctcttcagacagaaaggaatgagctcaatgagaaggtggaagtcctgaaagagcaggtatccatcaaagcggccatcaaagcggcgaacagggatttagcaacacctgtgatgcagccctgtactgccctggattctcacaaggagctgaacacttcctcgaaaagagccctgggagcgcacctggaggctgagcccaagagtcagagaagcgctgtgcaaaagcccccgtccacaggctctgctccggccatcgagtcggttgactaagatgaggtgtgatcactgtattgagagatatattttgtgtataactttctctgttagtagttaactattggttttgtggtgaaaattttcttactttttctaccatatctgtattttcttagaactactggacttatgtggtacaggaggctgcttagcagttttgaatagtttaatctataaattttcctcagctgtgttgcacatcagcctcgttctccctccactggaatgcatgtgttcattgccttgtcctttctctccctgctccttgcacattatcatcctaatgaaaatttcactgacagggccgaccattacaagggaactttgttctgacgatggttccttgatgtgaaaacaatattaatttaaacgtcttagcccccccccccataatattattcagaaaaacaaaataccaaggcgattagttttgtctaataacccatttaaatgccaagtaaaaataaaactcctagtgttgggtcagaagcatatttgattgaaattagctttttgaaaacatttatatctcgggacaaattgagatggccacatgcctagaatcctaagtttcggcagaatatgtatataaagatgtcacttgtggacaaaatagtacatagaggcaaatcactagacaaataagcttagtgtttacgtgactgaacagtcatcctgctttggtttcaggtgtgggatttggaccatgaggggctcccgtagaggatggcggtttgtgtttgattctgatttgggatttcagtacatattctccacttcccatagaaggccacttattctttgaaaactggtgttcatgtttgccgttcaatgaagtcccttgtcaaagacaaggacggtcaattcacgtgtcactttcactaggcagaagtttctccaataccttctggctacttgaaagttactacaaaaattccaccagcaaagtactccaggtttttcaaaagggaattttcattatggatcagtaccaaccgaaattgattttcatttccaaaacaaacactggcaccaacatttttactttgggaagacttggcagagtgttagtcatgatctgttacttacgtgttcagtctgttttctcacccccttcttagttaccatctcttttttaagaagaaaaaagaaaagccacagtattatcaaggtctctacacttggactgggggaaaatttgaaattaagcacataacttttgaattagttctttgtttcaatgttgaatgtggcgcagttatgcagatgattaatcaggctgcactgatggaagttttgactttgtccctggtataatttgcattgaaatgctttatgaaataaaaggttctactagaactgatgttagcacattccactgagcaaaactatcagactgacacttgttaaattgcttactggactgaataaactctgttttgtccagttaaaagggttttctctttgttacaagtgttatttgtaaagtcctgtcacattcatggtcgaaactgggttgaaagaattgaaaattgtccaacagatagatagataggaaaccgcctggagtggaggagggttgtatctaagcctccactatcagtcatgttaattcaaggggccacagtggaggaaaataaatccacaaagtagattatctaattaccatcaaaatgagtcagaagcaaaaaacaccaccctccaacagcctcttaggagtacaccctgttctgctactaaaatactagactcatttccctggtggtgggggggaatgcaggtatagatcagaaatataatccaccttaaaattagtactaatgatcacattatttcacaagaactctgctggatgtacagctcttaacattttattaagccatttgtgtagcccaccacgtttctttgtggtgcttgtcctgtgtggaagattgtaaatcttgggcctgttgcatacttccaagggctttaaagcaatgtgattaacagtacttggcctgctgcttttggcttactttgtatttttagctagatgctattatagtgttgaaaggatatggattctgtctgggatgcatttgttgtcctttcagaacccttcctcccattaccctgtgaataaaaacaaatgggaccccctgagaaggacatcttcctacagtgatcacctcaccagcccagtgttgtggctttgtagcgcaccccgtatctaccatattctagaacactgtaatgctactaggctggcccagaaaaggtttaaatgttgaattcacttaaattgcaattgttgcaccatcatggaatcgtgatgtgtattatttatattggcggtggactccaaggtgtagagaaaacttgggtcttgggtaatatggaccatttcatcctcagacttgttaggagtacatttcttggtcttgagaccagtatttttcagttatgtatgcaactgcctttattacacctggttatcacaattcaattctcaggtgttgcagaaaaatctacctctttcagactgtagatggaaataactgtgaaaaaaatgatgcagatatcttctagtttgtgctaaacacactgctttatttttacagcccacgtctttcatgaggatacgaattgttaagaggcagtctcgttttgcttttcaaagacattttgtagagatttttcactaatgtgaatctgattttatctacttgattctgtatagattaagtaaatatgtatgataaacttaa

SEQ ID NO: 2104 - DNA, 412 bp, Homo sapiens
  source 1..412: mol_type = genomic DNA
agtatgcaccgcgatgcgcgcctcaccctgcatctcccagcccgcagccagctggcatcctagaccctctgccctgcgaccaacagccgggagcggaccagacaccagaactcccggaacggttgaagacggttccgctccctgtcccgcctttcgcagcccagcagtttcgccctgcggagaggagccttgctgtttccaaatctctcctgctgaagagacattggagctagggcggctagtttcacctggtaattgtgacaccctgtctcctcgagctgcaggcttttatgcttgtcatgttcgaagtttgataccttgcagatcaacaaagggccggtggcctctcactgcctccgcggcagggttgtcaagacatgcgcagtgcggcccgtccctagggctgggttaa

SEQ ID NO: 2105 - DNA, 2605 bp, Homo sapiens
  source 1..2605: mol_type = genomic DNA
gtccactgggcttggagtcagtggcaataaccaggggcaataaccaggcgtgtcccaggggggagccccgctctgcagccctgtgcgccgtagagagctggacttaggctggcagcatggccgagttcagggtcagggtgtccaccggagaagccttcggggctggcacatgggacaaagtgtctgtcagcatcgtggggacccggggagagagccccccactgcccctggacaatctcggcaaggagttcactgcgggcgctgaggaggacttccaggtgacgctcccggaggacgtaggccgagtgctgctgctgcgcgtgcacaaggcgcccccagtgctgcccctgctggggcccctggccccggatgcctggttctgccgctggttccagctgacaccgccgcggggcggccacctcctcttcccctgctaccagtggctggagggggcggggaccctggtgctgcaggagggtacagccaaggtgtcctgggcagaccaccaccctgtgctccagcaacagcgccaggaggagcttcaggcccggcaggagatgtaccagtggaaggcttacaacccaggttggcctcactgcctggatgaaaagacagtggaagacttggagctcaatatcaaatactccacagccaagaatgccaacttttatctacaggctggctctgcttttgcagagatgaaaatcaaggggttgctggaccgcaaggggctctggaggagtctgaatgagatgaaaaggatcttcaacttccggaggaccccagcagctgagcacgcatttgagcactggcaggaggacgccttcttcgcctcccagttcctgaatggtctcaaccctgtcctgatccgccgctgtcactacctcccaaagaacttccccgtcactgatgccatggtggcctcagtgttgggtcctgggaccagcttgcaggctgagctagagaagggctccctgttcttggtggatcacggcatcctctctggcatccagaccaatgtcattaatgggaagcctcagttctctgcggccccaatgaccctgctataccagagcccaggctgcgggccgctgctgcctctcgccatccagctcagccagacccccggcccaaacagccccatcttcctgcccactgatgacaagtgggactggttgctggccaagacctgggtgcgcaatgccgagttctccttccatgaggccctcacgcacctgctgcactcacatctgctgcctgaggtcttcaccctggctaccctgcgtcagctgccccactgccaccctctcttcaagtccacaggcatcggcattgaaggcttctctgagttgatacagaggaacatgaagcagctgaactattctctcctgtgtctgcctgaggatatccggacccgaggagttgaagacatcccaggctactactaccgtgatgatgggatgcagatctggggtgcagtggaacgctttgtctctgaaatcatcggtatctactacccaagtgatgagtctgtccaagatgacagagagctccaggcctgggtcagagagatcttctccaagggcttcctaaaccaggagagctcaggtataccctcctcactggagacccgggaagccctggtgcagtatgtcaccatggtgatattcacctgctccgccaagcatgcggctgtcagtgcagggcagtttgactcctgtgcttggatgcccaacctgccacccagcatgcagctgccaccacccacctccaaaggcctggcaacatgcgagggcttcatagccaccctcccacctgtcaatgccacatgtgatgtcatccttgctctctggttgctgagcaaggagcctggagaccaaaggcccctgggcacctatccggatgagcacttcacagaggaggcccctcggcggagcatcgccaccttccagagccgcctggcccagatctcgaggggcatccaggagcggaaccagggcctggtgctgccctacacctacctagaccctcccctcatcgagaacagcgtctccatctaaatcccaggggaacacaggcccagatgacatccctttgaccacatcgctctaggataactggcacccagagaaaaggactcctcagaaaaaacaggcccccatgtgcctctcctgggacaaccagactctgtaactcacccccaccaccatacacacacacaaaaacagaaacaaaatcaaaacagagaaagcagaaaatctaccaagaacagagtctcaggacagaaccactgagtcttttggaggctccaagcctcaaagtgcccgcagagcccaccttgagggttttgctagttggttttgttttgcgttttacagccgtggggggaagcacataatcccgccccagggcccactagcatccactgattggaccttatggtcacccaactcaaggacagccaccaagaagtggctgccaaagagactgggcgcagtggctcatgcccataatcccagcactttgggagatggaggcgggaaaatcatttgaggtcagaagttcaaggccagcctggacgacatagcgagactccacctctacc

SEQ ID NO: 2106 - DNA, 2713 bp, Homo sapiens
  source 1..2713: mol_type = genomic DNA
cactgggcttggagtcagtggcaataaccaggggcaataaccaggcgtgtcccaggggggagccccgctctgcagccctgtgcgccgtagagagctggacttaggctggcagcatggccgagttcagggtcagggtgtccaccggagaagccttcggggctggcacatgggacaaagtgtctgtcagcatcgtggggacccggggagagagccccccactgcccctggacaatctcggcaaggagttcactgcgggcgctgaggaggacttccaggtgacgctcccggaggacgtaggccgagtgctgctgctgcgcgtgcacaaggcgcccccagtgctgcccctgctggggcccctggccccggatgcctggttctgccgctggttccagctgacaccgccgcggggcggccacctcctcttcccctgctaccagtggctggagggggcggggaccctggtgctgcaggagggtacagccaaggtgtcctgggcagaccaccaccctgtgctccagcaacagcgccaggaggagcttcaggcccggcaggagatgtaccagtggaaggcttacaacccaggttggcctcactgcctggatgaaaagacagtggaagacttggagctcaatatcaaatactccacagccaagaatgccaacttttatctacaggctggctctgcttttgcagagatgaaaatcaaggggttgctggaccgcaaggggctctggaggagtctgaatgagatgaaaaggatcttcaacttccggaggaccccagcagctgagcacgcatttgagcactggcaggaggacgccttcttcgcctcccagttcctgaatggtctcaaccctgtcctgatccgccgctgtcactacctcccaaagaacttccccgtcactgatgccatggtggcctcagtgttgggtcctgggaccagcttgcaggctgagctagagaagggctccctgttcttggtggatcacggcatcctctctggcatccagaccaatgtcattaatgggaagcctcagttctctgcggccccaatgaccctgctataccagagcccaggctgcgggccgctgctgcctctcgccatccagctcagccagacccccggcccaaacagccccatcttcctgcccactgatgacaagtgggactggttgctggccaagacctgggtgcgcaatgccgagttctccttccatgaggccctcacgcacctgctgcactcacatctgctgcctgaggtcttcaccctggctaccctgcgtcagctgccccactgccaccctctcttcaagctgctgatcccgcacacccgatacaccctgcacatcaacacactcgcccgggagctgcttatcgtgccagggcaggtggtggacaggtccacaggcatcggcattgaaggcttctctgagttgatacagaggaacatgaagcagctgaactattctctcctgtgtctgcctgaggatatccggacccgaggagttgaagacatcccaggctactactaccgtgatgatgggatgcagatctggggtgcagtggaacgctttgtctctgaaatcatcggtatctactacccaagtgatgagtctgtccaagatgacagagagctccaggcctgggtcagagagatcttctccaagggcttcctaaaccaggagagctcaggtataccctcctcactggagacccgggaagccctggtgcagtatgtcaccatggtgatattcacctgctccgccaagcatgcggctgtcagtgcagggcagtttgactcctgtgcttggatgcccaacctgccacccagcatgcagctgccaccacccacctccaaaggcctggcaacatgcgagggcttcatagccaccctcccacctgtcaatgccacatgtgatgtcatccttgctctctggttgctgagcaaggagcctggagaccaaaggcccctgggcacctatccggatgagcacttcacagaggaggcccctcggcggagcatcgccaccttccagagccgcctggcccagatctcgaggggcatccaggagcggaaccagggcctggtgctgccctacacctacctagaccctcccctcatcgagaacagcgtctccatctaaatcccaggggaacacaggcccagatgacatccctttgaccacatcgctctaggataactggcacccagagaaaaggactcctcagaaaaaacaggcccccatgtgcctctcctgggacaaccagactctgtaactcacccccaccaccatacacacacacaaaaacagaaacaaaatcaaaacagagaaagcagaaaatctaccaagaacagagtctcaggacagaaccactgagtcttttggaggctccaagcctcaaagtgcccgcagagcccaccttgagggttttgctagttggttttgttttgcgttttacagccgtggggggaagcacataatcccgccccagggcccactagcatccactgattggaccttatggtcacccaactcaaggacagccaccaagaagtggctgccaaagagactgggcgcagtggctcatgcccataatcccagcactttgggagatggaggcgggaaaatcatttgaggtcagaagttcaaggccagcctggacgacatagcgagactccacctctaccaaaaaataaaaattaaaaaacaaa

SEQ ID NO: 2107 - DNA, 3477 bp, Homo sapiens
  source 1..3477: mol_type = genomic DNA
ggctgccaacggttttgagcgtagggggaggcgtgagagggggatctcaggggaggaggtcaatcgcttgccccccactttggcaaattggggactgaggactggaagggtggagagtaggcggaaccaggtggtcgtcggggcagaggatctcgggctaggcttgagggcggcgtgcttcttagggacgacttagggcgtgactgagggttcacaaggtttcttttggggtggtcgggagggagagattctagggaacaaggaagctcgctatggctttcttgccaggaggggtcgaagggaaagtacaagggagctggagctgaccctgggtagaacgggtgaagggatgggggagcgtgaggttccgccctctcttgagactggaaccaattgagggactagtagggcagggggacagaaattgggctcctagtggatttgggtccgtttccgttgggacgttttgggtgtgagaacttaagagctcagttgaccggggatagcctgtgccggagttgatctgcagcttccagcactcgtagtcgggaagaggagcttcagcagcgctgttgtcccacagtaggtcttctgtccgcacccgctctgcgctgcaccctcttaacgctgttcccaggagctggggaaagggatgcttttgcccactcccatggcccctggaactggtggaaacctttcctctaaccagaaagcctcgatatccttaattcaccaaggatccttggcgtggagtcttcctcccttctcccaagtctttctccgtgaacttttcctcctggactttgctaaagcagaacctcccagctctttgctgtctccggttgtctcttccctgtattcatggcaacatcagctgacagccccagttcacccctcggggcggaggatctcctgagtgattcatcagaaccccctgggctcaaccaagtgtcgtctgaagtgacctcccagctctatgcttctttgcgcctcagccggcaggcggaggccacggcccgagcccagctgtatttaccctccacctccccgcctcatgaagggttagacggcttcgcccaagaattgagtcgaagcttgtcagtcggattggaaaagaacttgaagaaaaaggatggttctaagcatatctttgagatggaaagtgttcggggtcagctccagaccatgctccaaacctcacgtgatacagcctatcgggatcctctcattcctggcgctggctcagagagacgggaagaggactcctttgacagtgatagcacagccaccttgctcaacacccggcccctgcaagacttgtctccatctagctcagcccaagccctggaggagctgtttccccgctacaccagccttcggccagggcctccactcaatcccccagattttcaggggctgagagatgcattggattcagagcatacccgccgcaagcattgtgagcgccatattcagagcctgcagacccgagtgttagagctacagcaacaattagccgtggctgtggctgccgaccgcaagaaagataccatgattgaacaactggacaagaccctggcccgtgtggtggagggctggaaccggcatgaggctgagcggacagaggttctcaggggacttcaagaggaacaccaggcagcagagctcaccagaagcaagcagcaggagacagtaacccgcctggaacaaagcctttctgaggccatggaggccctgaatcgtgagcaggaaagtgccagactgcagcaacgggaaagagagacactggaggaggaaaggcaagctctgactctgaggttggaggcagaacagcagcggtgctgtgtcctgcaggaagagcgggatgcagctcgggctgggcaactgagtgagcatcgagagttggagactcttcgggctgccctagaagaagaacggcagacctgggcccagcaagagcaccagcttaaggaacactaccaggcgctgcaggaggagagccaggctcagctggaaagggagaaggagaagagccagagggaagcccaggccgcctgggagacccagcaccagttggcattggtgcagtctgaggtgcggcggctggaaggagagctggatacagctcggagagagagagatgccctgcagctggaaatgagcttggtgcaggcccggtatgaaagccagcggatccagctggagtcggagctggctgtgcagctggagcagcgggtgacagagcggctggcgcaggctcaggagagcagcctacggcaagcagcctccctcagggaacatcacaggaagcagctgcaggacctgagtggacagcaccagcaggagctggccagtcagctagctcagttcaaggtggaaatggcagaacgagaggaacggcaacagcaggtggctgaggactacgagctcaggctcctcctgctggaccctccagccccgggcctcaggagcccgagaaggaggagaggagggtctggactatgcctcccatggccgtggccctgaagcctgtattgcagcagagccgggaagcaagggacgagctacctggagcgcctcctgttctttgcagttcctcctcagatcttagcctcctgttgggcccctcttttcagagccagcattctttccagcccctggagcccaaaccagacctcacttcatccacagctggggccttctctgcacttggggccttccatcccgatcatagggcagaaaggccattccctgaggaagatcctggacctgacggggagggcctcctaaagcaagggctgccgcctgctcagctggagggcctcaagaattttttgcaccagttgctggagacagtgccccagaacaatgagaacccttctgtcgacctgttgccccctaagtctggtcctctgactgtcccatcttgggaggaagcccctcaagtgccacgtattccaccgcctgtccacaaaaccaaagttcccttagccatggcatccagtcttttccgggtccctgagcctccctcctcccattcacaaggcagtggtcccagcagtggttccccagagagaggtggagatgggcttacattcccaaggcagctgatggaggtgtctcaactgttgcgactctaccaggctcggggctggggggctctgcctgctgaggatctcctgctctacctgaagaggctggaacacagcgggactgatggccgaggggataatgtccccagaaggaacacagactcccgcttgggtgagatcccccggaaagagattccctcccaggctgtccctcgccgccttgctacagcccccaagactgaaaaacctcccgcacggaagaaaagtgggcaccctgccccgagtagcatgaggagccgggggggagtctggagatgagcccccctaccctctctcctctttgttctctcattgttgttattttaataaatgctcattagtctgt

SEQ ID NO: 2108 - DNA, 3770 bp, Homo sapiens
  source 1..3770: mol_type = genomic DNA
gtggtctcgcgggcgggtgacgtcatcgaggcgagagaggcggagccgtggacagtgggcgggaggctgccaacggttttgagcgtagggggaggcgtgagagggggatctcaggggaggaggtcaatcgcttgccccccactttggcaaattggggactgaggactggaagggtggagagtaggcggaaccaggtggtcgtcggggcagaggatctcgggctaggcttgagggcggcgtgcttcttagggacgacttagggcgtgactgagggttcacaaggtttcttttggggtggtcgggagggagagattctagggaacaaggaagctcgctatggctttcttgccaggaggggtcgaagggaaagtacaagggagctggagctgaccctgggtagaacgggtgaagggatgggggagcgtgaggttccgccctctcttgagactggaaccaattgagggactagtagggcagggggacagaaattgggctcctagtggatttgggtccgtttccgttgggacgttttgggtgtgagaacttaagagctcagttgaccggggatagcctgtgccggagttgatctgcagcttccagcactcgtagtcgggaagaggagcttcagcagcgctgttgtcccacagtaggtcttctgtccgcacccgctctgcgctgcaccctcttaacgctgttcccaggagctggggaaagggatgcttttgcccactcccatggcccctggaactggtggaaacctttcctctaaccagaaagcctcgatatccttaattcaccaaggatccttggcgtggagtcttcctcccttctcccaagtctttctccgtgaacttttcctcctggactttgctaaagcagaacctcccagctctttgctgtctccggttgtctcttccctgtattcatggcaacatcagctgacagccccagttcacccctcggggcggaggatctcctgagtgattcatcagaaccccctgggctcaaccaagtgtcgtctgaagtgacctcccagctctatgcttctttgcgcctcagccggcaggcggaggccacggcccgagcccagctgtatttaccctccacctccccgcctcatgaagggttagacggcttcgcccaagaattgagtcgaagcttgtcagtcggattggaaaagaacttgaagaaaaaggatggttctaagcatatctttgagatggaaagtgttcggggtcagctccagaccatgctccaaacctcacgtgatacagcctatcgggatcctctcattcctggcgctggctcagagagacgggaagaggactcctttgacagtgatagcacagccaccttgctcaacacccggcccctgcaagacttgtctccatctagctcagcccaagccctggaggagctgtttccccgctacaccagccttcggccagggcctccactcaatcccccagattttcaggggctgagagatgcattggattcagagcatacccgccgcaagcattgtgagcgccatattcagagcctgcagacccgagtgttagagctacagcaacaattagccgtggctgtggctgccgaccgcaagaaagataccatgattgaacaactggacaagaccctggcccgtgtggtggagggctggaaccggcatgaggctgagcggacagaggttctcaggggacttcaagaggaacaccaggcagcagagctcaccagaagcaagcagcaggagacagtaacccgcctggaacaaagcctttctgaggccatggaggccctgaatcgtgagcaggaaagtgccagactgcagcaacgggaaagagagacactggaggaggaaaggcaagctctgactctgaggttggaggcagaacagcagcggtgctgtgtcctgcaggaagagcgggatgcagctcgggctgggcaactgagtgagcatcgagagttggagactcttcgggctgccctagaagaagaacggcagacctgggcccagcaagagcaccagcttaaggaacactaccaggcgctgcaggaggagagccaggctcagctggaaagggagaaggagaagagccagagggaagcccaggccgcctgggagacccagcaccagttggcattggtgcagtctgaggtgcggcggctggaaggagagctggatacagctcggagagagagagatgccctgcagctggaaatgagcttggtgcaggcccggtatgaaagccagcggatccagctggagtcggagctggctgtgcagctggagcagcgggtgacagagcggctggcgcaggctcaggagagcagcctacggcaagcagcctccctcagggaacatcacaggaagcagctgcaggacctgagtggacagcaccagcaggagctggccagtcagctagctcagttcaaggtggaaatggcagaacgagaggaacggcaacagcaggtggctgaggactacgagctcagactggcccgggagcaagcgcgagtgtgcgaactgcagagtgggaaccagcagctggaggagcagcgggtggagctggtggaaagactgcaggccatgctgcaggcccactgggatgaggccaaccagctgctcagcaccactctcccgccgcccaaccctccagctcctcctgctggaccctccagccccgggcctcaggagcccgagaaggaggagaggagggtctggactatgcctcccatggccgtggccctgaagcctgtattgcagcagagccgggaagcaagggacgagctacctggagcgcctcctgttctttgcagttcctcctcagatcttagcctcctgttgggcccctcttttcagagccagcattctttccagcccctggagcccaaaccagacctcacttcatccacagctggggccttctctgcacttggggccttccatcccgatcatagggcagaaaggccattccctgaggaagatcctggacctgacggggagggcctcctaaagcaagggctgccgcctgctcagctggagggcctcaagaattttttgcaccagttgctggagacagtgccccagaacaatgagaacccttctgtcgacctgttgccccctaagtctggtcctctgactgtcccatcttgggaggaagcccctcaagtgccacgtattccaccgcctgtccacaaaaccaaagttcccttagccatggcatccagtcttttccgggtccctgagcctccctcctcccattcacaaggcagtggtcccagcagtggttccccagagagaggtggagatgggcttacattcccaaggcagctgatggaggtgtctcaactgttgcgactctaccaggctcggggctggggggctctgcctgctgaggatctcctgctctacctgaagaggctggaacacagcgggtacaagcctgggaggaaggaggaaggattctccgggtggaagctggattatggggagtggagtgggactgatggccgaggggataatgtccccagaaggaacacagactcccgcttgggtgagatcccccggaaagagattccctcccaggctgtccctcgccgccttgctacagcccccaagactgaaaaacctcccgcacggaagaaaagtgggcaccctgccccgagtagcatgaggagccgggggggagtctggagatgagcccccctaccctctctcctctttgttctctcattgttgttattttaataaatgctcattagtctgt

SEQ ID NO: 2109 - DNA, 3781 bp, Homo sapiens
  source 1..3781: mol_type = genomic DNA
agcacttgaagttcaggcagcgagagttgacatggggccagggctgcgcccctggggcgggttgaagacagggtgagtctcttgatattcaggaaatcatcgcgcacccagtcaccagcgttcgggagcctgtcgcagcgggaccgacggaatccggagcaggcgacagggcgcagaagcgggatgtacttctgttggggcgccgactccagggagctgcagcgccggaggacggcgggcagccccggggctgagctactgcaggcggccagcggggagcgccactctctgctgctgctgaccaaccacagggtcctctcgtgcggagacaacagcaggggtcagctgggccgcaggggcgcgcagcgcggggagctgccagaaccaattcaggcattggaaaccctaattgttgatctcgtgagctgcgggaaggagcactccctggctgtgtgccacaaaggaagggtcttcgcatggggagctggttctgaagggcagctggggattggagaattcaaggaaataagtttcacacctaagaaaataatgactctgaatgatataaaaataatacaagtttcctgtggacactaccactccctggcattatcaaaagatagccaagtgttttcgtggggaaagaacagccatgggcagctgggcttggggaaggagttcccctcccaagccagcccgcagagggtgaggtccctggaggggatcccactggctcaggtggctgccggaggggctcacagctttgccctgtctctctgtgggacttcgtttggctggggaagtaacagtgccgggcagctggccctcagtgggcgtaatgtcccagtgcaaagcaacaagcctctctcagtcggtgcactgaagaatctaggtgtggtttatatcagctgtggtgatgcacacactgcggtgcttacccaggacgggaaagtgttcacatttggagacaatcgctctggacagctgggatacagccccactcctgagaagagaggtccacaacttgtggaaagaattgatggcctagtttcgcagatagattgtggaagttatcacaccctggcatatgtgcacaccactggtcaggtggtatcttttggtcatggaccaagtgacacaagcaagccaactcatccggaggccctgacagagaactttgacattagctgcctgatttctgctgaagacttcgtggatgttcaagtcaaacacatttttgctggaacatatgccaactttgtgacaactcatcaggatactagttccacacgtgctcccgggaaaaccctgccagaaataagccgaattagccagtccatggcagaaaaatggatagcagtgaaaagaagaagtactgaacatgaaatggctaaaagtgaaattagaatgatattttcatctcctgcttgtctgactgcaagttttttaaagaaaagaggaactggagaaacgacttccattgatgtggacttagaaatggcaagagataccttcaagaagttaacaaaaaaggaatggatttcttccatgataactacgtgtctcgaggatgatctgctcagagctcttccatgccattctccacaccaagaagctttatcagttttcctcctgctcccagaatgtcctgtgatgcatgattctaagaactggaagaacctggtggttccatttgcaaaggctgtgtgtgaaatgagtaaacaatctttgcaagtcctaaagaagtgttgggcatttttgcaagaatcttctctgaatccgctgatccagatgcttaaagcagccatcatctctcagctgcttcatcagactaaaaccgaacaggatcactgtaatgttaaagctcttttaggaatgatgaaagaactgcataaggtaaacaaagctaactgtcgactaccagaaaatactttcaacataaatgaactctccaacttattaaacttttatatagatagaggaagacagctctttcgggataaccacctgatgtcagaaaagaaagcatacatgcttatgcatgaaacaattctgcaaaaaaaggatgaatttcctccatcacccagatttatacttagagtcagacgaagtcgcctggttaaagatgctctgcgtcaattaagtcaagctgaagctactgacttctgcaaagtattagtggttgaatttattaatgaaatttgtcctgagtctggaggggttagttcagagttcttccactgtatgtttgaagagatgaccaagccagaatatggaatgttcatgtatcctgaaatgggttcctgcatgtggtttcctgccaagcctaaacctgagaagaaaagatatttcctctttggaatgctgtgtggactctccttattcaatttaaatgttgctaaccttcctttcccactggctctgtataaaaaacttctggaccaaaagccatcattggaagatttaaaagaactcagtcctcggttggggaagagtttgcaagaagttctagatgatgctgctgatgacattggagatgcgctctgcatacgcttttctatacactgggaccaaaatgatgttgacttaattccaaatgggatctccatacctgtggaccaaaccaacaagagagactatgtttctaagtatattgattacattttcaacgtctctgtaaaagcagtttatgaggaatttcagagaggattttatagagtctgtgagaaggagatacttagacatttctaccctgaagaactaatgacagcaatcattggaaatactgattatgactggaaacagtttgaacagaattcaaagtatgagcaaggataccaaaaatcacatcctactatacagttgttttggaaggctttccacaaactaaccttggatgaaaagaaaaaattcctctttttccttacaggacgtgataggctgcatgcaagaggcatacagaaaatggaaatagtatttcgctgtcctgaaactttcagtgaaagagatcacccaacatcaataacttgtcataatattctctccctccctaagtattctacaatggaaagaatggaggaagcacttcaagtagccatcaacaacaacagaggatttgtctcacccatgctcacacagtcataatcacctctgagagactcagggtgggctttctcacacttggatccttctgttcttccttacacctaaataatacaagagattaatgaatagtggttagaagtagttgagggagagattgggggaatggggagatgatgatgatggtcaaagggtgcaaaatctcacacaagactgaggcaggagaatagggtacagagatagggatctaaggatgacttggacacactccctggcactgaagagtctgaacactggcctgtgattggtccattccaggaccttcatttgcataaggtatcaaaccacatcagcctctgattggccatgggccagacctgcactctggccaatgattggttcattccaggacattcatttgcataaggagtcaaaccacaccagtcttggattggctgtgagccaattcacctcagtctctaattggctgtgagtcagtctttcatttacatagggtgtaaccatcaagaaacctctacagggtacttaagccccagaagattttgctaccagggctcttgagccacttgctctagcccactcccaccctgtggaatgtactttcacttttgctgcttcactgccttgtgctccaataaatccactccttcaccaccca

SEQ ID NO: 2110 - DNA, 675 bp, Homo sapiens
  source 1..675: mol_type = genomic DNA
gtattttacaaactgagaaagtagctccagcagcacccgagagggtcaggagaaaagcggaggaagctgggtaggccctgaggggcctcggtaagccatcatgaccacccggcaagccacgaaggatcccctcctccggggtgtatctcctacccctagcaagattccggtacgctctcagaaacgcacgcctttccccactgttacatcgtgcgccgtggaccaggagaaccaagatccaaggagatgggtgcagaaaccaccgctcaatattcaacgccccctcgttgattcagcaggccccaggccgaaagccaggcaccaggcagagacatcacaaagattggtggggatcagtcagcctcggaaccccttggaagagctcaggcctagccctaggggtcaaaatgtggggcctgggccccctgcccagacagtcctggtcccagctcctggaaagctctttgctcttagaagatctccctttcctccagcaaaatgtcatctcgccaggtgccatggcttgtacctgtaatcacagctactcaggaggctgaagcaggaggatcactggaggccaggagttggagaccagcctggatgacagagggagatcccatctctttaaaaaataaataaataaataaataataaatatcacttcttctgaagcct

SEQ ID NO: 2111 - DNA, 683 bp, Homo sapiens
  source 1..683: mol_type = genomic DNA
gcatgcgcgccggcgaccacgcctaaatagccgcagcctctgcgcgtcgccctccacggttaccccggctctccgcccctccttctcgcggcgctcgagggaccatggccgatcctcgcgtgagacagatcaagatcaagaccggcgtggtgaagcggttggtcaaagaaaaagtgatgtatgaaaaagaggcaaaacaacaagaagaaaagattgaaaaaatgagagctgaagacggtgaaaattatgacattaaaaagcaggcagagatcctacaagaatccaggatgatgatcccagattgccagcgcaggttggaagccgcatatttggatcttcaacggatactagaaaatgaaaaagacttggaagaagctgaggaatataaagaagcacgtttagtactggattcagtgaagttagaagcctgaaacttttctcgtatggggtggtttttgcattaaatcctggggtccattttacaatccattatttttgaccactgctatgtgttcaagtagtatgagaatgtgattgtttttatctggttacatatatatttctttgtctaatttaatatgtcaaataaatgagttcatctaataaaattgtttattttatactttacaaaatttttaaattaaccttttatcattaaaccacatagactttatgacagagaa

SEQ ID NO: 2112 - DNA, 1798 bp, Homo sapiens
  source 1..1798: mol_type = genomic DNA
tcattactacagggcaggaagggcacgttctcatcagcatgagggagtgcctttccatccacatcggtcaagctggcatccagattggggacgcctgctgggaactctattgcctggaacatggaatccagccaaatggcgttgttcttgacactcaacaggatcagctggaaaatgcaaaaatggagcacacaaatgcatctttcgataccttcttctgtgagacaagagctgggaagcatgtgcctagagcactcttcgtggacttggagccaactgttatagatgggatccggacgggccagcaccgttcactcttccaccccgagcagctccttagcggaaaggaggatgctgctaacaattacgcgcgaggccgttactctgtggggtcggaggtcatcgaccttgtgctggagaggacccggaagctggcagaacagtgtggtggacttcagggatttttgattttccgaagctttggaggaggcactggttcagggtttacgtctctcttaatggagaggctcacaggagaatatagcagaaagactaagctggagttctcggtctacccagcccccaggatctccactgctgtggtagagccttataactctgtcctcaccacccactccaccacagagcacacggactgtaccttcatggtggacaacgaggccgtctatgatatatgccatcgtaaactcggtgttgaatgcccctctcatgccagcatcaatagattggtggttcaggtggtatcttccatcactgcctccctccggtttgaagggcccttgaatgtagacctaattgaattccagaccaacctggtaccttatccgagaatacatttccccatgacagccttcgcccccatcgtctctgctgacaaagcctaccatgagcagttctctgtgtcagacatcaccactgcctgctttgagtcctccaaccagctggtcaagtgtgatcctcggcttgggaagtacatggcctgctgcctactctatagaggggatgtggtccccaaggaagtgaatgcagcaatcgcagccacgaagtcgaggcactctgttcagtttgtagattggtgtccaactggtttcaaggtgggcatcaacaatcggccgcccacggtgatgccgggtggggacctggccaaagtccaccggtccatctgcatgctgagcaacaccacggcgattgtggaggcctgggcccgcctggaccacaagtttgacctcatgtacgccaagagagcatttctgcactggtacctcagagaaggcatggaagaagcagagttcttggaggccagggaagatctggcagccctggagagggactatgaggaagtggcgcaaagtttctgaggcatgtatgatgggtgcaaatgaatgtcaagttaaaatggcatgttttcttttcaagccgttatatgcctagtgggtagttcccctgatgagcagaaaaatgaactcaaatcaggcaagactctaggttccacactaaattaagtgggtcagtaccaacaatgaacacattatttcctggtctactggtacaagtcagctctgctacctgggagcctttggaagcttagagtcctttgaactgctgagtcacttctaggtgggatttttttgttttaccaagagacaatgaaatcctgaagtttatgcttttcctttctggtaccggaagtagaaaacagcacatgttgattacgaatgttttttcccccatgtctacattttttacactgattaaatcataaatattttcagtatga

SEQ ID NO: 2113 - DNA, 1282 bp, Homo sapiens
  source 1..1282: mol_type = genomic DNA
cctcccgcctcctctaggccgccggccgcgaagcgctgagtcacggtgaggctactggacccacactctcttaacctgccctccctgcactcgctcccggcggctcttcgcgtcacccccgccgctaaggctccaggtgccgctaccgcagcccctccatcctctacagctcagcatcagaacactctctttttagactccgatatggggtcctccaagaaagttactctctcagtgctcagccgggagcagtcggaaggggttggagcgagggtccggagaagcattggcagacccgagttaaaaaatctggatccgtttttactgtttgatgaatttaaaggaggtagaccaggaggatttcctgatcatccacatcgaggttttgaaacagtatcctacctcctggaagggggcagcatggcccatgaagacttctgtggacacactggtaaaatgaacccaggagatttgcagtggatgactgcgggccggggcattctgcacgctgagatgccttgctcagaggagccagcccatggcctacaactgtgggttaatttgaggagctcagagaagatggtggagcctcagtaccaggaactgaaaagtgaagaaatccctaaacccagtaaggatggtgtgacagttgctgtcatttctggagaagccctgggaataaagtccaaggtttacactcgcacaccaaccttatatttggacttcaaattggacccaggagccaaacattcccaacctatccctaaagggtggacaagcttcatttacacgatatctggagatgtgtatattgggcccgatgatgcacaacaaaaaatagaacctcatcacacagcagtgcttggagaaggtgacagtgtccaggtggagaacaaggatcccaagagaagccactttgtcttaattgctggggagccattaagagaaccagttatccaacatggtccatttgtgatgaacaccaatgaagagatttctcaagctattcttgatttcagaaacgcaaaaaatgggtttgaaagggccaaaacctggaaatcaaagattgggaactagtggaaagcggaagagcaggtcttgatgtgtcctagaattttgccatttctgagattgagccattgaaggcattccatttctaaagcttatttagccggtgcttctaaagaattccacactaacgtgataacatggtttttgtaacaataaatgtaggatatttcctggcacatgcaaataaacctaatcattgtttctttaaaaa

SEQ ID NO: 2114 - DNA, 1539 bp, Homo sapiens
  source 1..1539: mol_type = genomic DNA
accgaccggagcgccgatcagagcacctgcccgggccacacatttcctcctggagcacagcaagtgccgcctaaattacccgagtgagcatctcttcccggcacgagaggcagggaggccaaagggccgccaagctggcctgggagaggcgtagggcggagcgagagtggagtgacattcccgagggcggagccccagggcctccgagacccgtagactcccgcctcccgcctcctctaggccgccggccgcgaagcgctgagtcacggtgaggctactggacccacactctcttaacctgccctccctgcactcgctcccggcggctcttcgcgtcacccccgccgctaaggctccaggtgccgctaccgcagcgtgagtacctggggctcctgcaggggtccactagccctccatcctctacagctcagcatcagaacactctctttttagactccgatatggggtcctccaagaaagttactctctcagtgctcagccgggagcagtcggaaggggttggagcgagggtccggagaagcattggcagacccgagttaaaaaatctggatccgtttttactgtttgatgaatttaaaggaggtagaccaggaggatttcctgatcatccacatcgaggttttgaaacagtatcctacctcctggaagggggcagcatggcccatgaagacttctgtggacacactggtaaaatgaacccaggagatttgcagtggatgactgcgggccggggcattctgcacgctgagatgccttgctcagaggagccagcccatggcctacaactgtgggttaatttgaggagctcagagaagatggtggagcctcagtaccaggaactgaaaagtgaagaaatccctaaacccagtaaggatggtgtgacagttgctgtcatttctggagaagccctgggaataaagtccaaggtttacactcgcacaccaaccttatatttggacttcaaattggacccaggagccaaacattcccaacctatccctaaagggtggacaagcttcatttacacgatatctggagatgtgtatattgggcccgatgatgcacaacaaaaaatagaacctcatcacacagcagtgcttggagaaggtgacagtgtccaggtggagaacaaggatcccaagagaagccactttgtcttaattgctggggagccattaagagaaccagttatccaacatggtccatttgtgatgaacaccaatgaagagatttctcaagctattcttgatttcagaaacgcaaaaaatgggtttgaaagggccaaaacctggaaatcaaagattgggaactagtggaaagcggaagagcaggtcttgatgtgtcctagaattttgccatttctgagattgagccattgaaggcattccatttctaaagcttatttagccggtgcttctaaagaattccacactaacgtgataacatggtttttgtaacaataaatgtaggatatttcctggcacatgcaaataaacctaatcattgtttctttaaaaa

SEQ ID NO: 2115 - DNA, 1975 bp, Homo sapiens
  source 1..1975: mol_type = genomic DNA
agattgctgaaacaaaggaccaatgcccagggcggtccttaattcctccctgcagtttgaaactgtcaggttgccgtctaggtagcggttgtgcttgctgaggctgcacttgctgacactgcagctgcgacgcggctaagaggcgcagagcgaggagtcgggatttggtcgcgagcggcgacgagcatttgtgcagaatgtcatcagatgaggagaaatactcacttccagttgtgcaaaatgactccagtcgaggcagttctgtctcttcgaatcttcaggaagaatatgaagaactgcttcattatgctatagtgactccaaatattgaaccctgtgcttcacagtcatctcatcctaagggagaattggtgccagatgtcagaatttctacaattcatgatattcttcatagtcaaggaaataactctgaagtaagagaaactgcaatagaagttggaaaaggatgtgatttccatatttcaagtcattcaaagacagatgagtcatcaccagtgttatcgccaaggaagccttctcacccagtcatggattttttcagttcacatcttttagctgactcttcctcaccagcaacaaattctagtcatacagatgcccatgaaatacttgtgagcgattttcttgtttctgatgaaaaccttcagaagatggaaaatgtgcttgatctttggagttcaggtcttaagacaaacatcatatctgaactaagtaaatggagacttaattttattgactggcaccgaatggaaatgagaaaagagaaagaaaaacatgcagcacatttaaaacaactgtgtaatcagatcaatgaattgaaggagctgcaaaaaacctttgaaatctccattgggagaaaagatgaggtgatttctagcttgtctcatgccataggcaagcaaaaggaaaagatagagttgatgagaacattcttccactggcgaatcggccatgtcagagccagacaggatgtttatgaaggtaaactagctgaccagtactaccagagaactttactgaagaaagtctggaaagtctggcgttccgtagtgcaaaagcagtggaaagatgtggtagaaagagcttgtcaagcaagagctgaagaagtttgtatccagatttccaatgattatgaagccaaagttgctatgttatctggagctttggaaaatgcaaaagctgagattcaaagaatgcaacatgaaaaagagcactttgaagattccatgaaaaaagctttcatgaggggtgtatgtgcattaaatcttgaagccatgactatatttcaaaacagaaatgatgcagggatagactccacaaataataaaaaggaagagtatggtcctggtgttcaaggaaaagaacattctgctcatttggatccttcagctcctccgatgcccttaccagttacatcaccactgctgccatccccaccagccgccgtcggaggagccagcgcgactgccgttccctcagctgcttcgatgacttctaccagggctgcttccgcatcttctgttcacgttcctgtttctgctcttggtgcaggatctgcagctactgctgcatcagaagaaatgcaaaccattcctcaagcaactgcagcaaaatatccccggaccattcatcctgaaagtagtacctcagcttccagatcacttggaaccagatcagctcacacccagtctctcacaagtgttcattccataaaagtggttgactaaagtgaatatgtccatagtggggtcttttaatccctctggtcttaccaagggttagaagtcttttggttttaacttttccatattgttagaacatcatggagacatcatgttcatctgttcaaaattacaagaggctttttcaagctctaccatgctttgtaactatatgtagaaattattttaatgttattttttatttaagcaattaagtaaaacttttttaaatt

SEQ ID NO: 2116 - DNA, 1682 bp, Homo sapiens
  source 1..1682: mol_type = genomic DNA
agtcgccccggcaacagccgcctccctcgcgtcccccactccccctctgtctctccaaggaaaactaggcccctgcgcggccaacgcccaggatccgcaagctgcgcgcccacgagctccaccagcccattggagaaaagttactgttcagtccctgaaggcttgtgccataaaagagtgggagacattcccagggaggtgaggaatgaaagatcgaattaaagaccattaaagaccaaagggcatctaaatctgcagcaaccatcagctctcttttctttgagagtttcagcacccatttggactttcacaatcagagatggcagcggtaaaggcatcaacatcgaaagctaccaggccttggtattctcatccggtatatgcaagatactggcaacattatcatcaagcaatggcttggatgcaaagccatcacaatgcctacaggaaggccgtggaatcctgtttcaatcttccatggtacttaccttctgcgcttcttccccaaagctcttacgataatgaggctgcgtatcctcagtccttctatgaccatcatgtggcctggcaggactacccctgcagttcttcacatttcagaagatctgggcagcatccacgttacagcagtaggatccaggcatccacaaaagaagaccaagctttgtccaaagaggaagagatggagactgagtcagatgcagaggtagaatgtgacctgagcaatatggaaatcactgaagagctccgccagtactttgcagagaccgagaggcatagagaagaacgacggcggcagcagcagctggatgcagagcgcctggacagctatgtgaacgctgaccacgacctgtactgcaacacccgccggtcggtagaagccccaactgagaggcctggtgagcggcgccaggccgagatgaagcgtttgtacggggacagtgctgccaagatccaagccatggaggccgcggtgcagctgagctttgacaagcactgtgaccgaaagcagcccaagtactggccggtcatccccctgaagttctgagctcagggcacagggtacccagcctctccttcttccttttgggtacacgctctttatctctccttctgtacatttcttagggaaaggggactttgtactggggtacaggcatgttcaccacagtcccagtgggcctgtcacggggtggatgtactatgccagccacttggaggtctgcaggacatgttctgttgccaacatgataaattttctcctgacataaaataattttgcatatactatactggttttttatgttgttggtaacagttcaattcattaacgttcttgcctagagatactgcctggtgttttgcttttttatcttttcttgtctttaacctgtctgaactacacaaatgcctttaaaaaaccagatatcctctctgactctagctccattagcccccactaaaaatgagccaagtgtgtagtgagacaaataccactacctgtagtggagagggatgcatgttctataaagggccagagagtgaatatctttggcactgcaagccacacggtcagtgttgtgactactcaaccctccctttgtagtgtgaaagcagctgtagacagtaagtaaacaaatgggtgtggctgtgttctaataaaactttatttataaaaacag

SEQ ID NO: 2117 - DNA, 3306 bp, Homo sapiens
  source 1..3306: mol_type = genomic DNA
gggcgcccgagccggctgctcgtgccatggagcggagtcccgacgtgtcccccgggccttcccgctccttcaaggaggagttgctctgcgccgtctgctacgaccccttccgcgacgcagtcactctgcgctgcggccacaacttctgccgcgggtgcgtgagccgctgctgggaggtgcaggtgtcgcccacctgcccagtgtgcaaagaccgcgcgtcacccgccgacctgcgcaccaaccacaccctcaacaacctggtggagaagctgctgcgcgaggaggccgagggcgcgcgctggaccagctaccgcttctcgcgtgtctgccgcctgcaccgcggacagctcagcctcttctgcctcgaggacaaggagctgctgtgctgctcctgccaggccgacccccgacaccaggggcaccgcgtgcagccggtgaaggacactgcccacgactttcgggtgaggagcctgatagccgaagagagaaggaactttttaccaactcaccagtggatagtgacaaagacaaggctccaaaccagctctcctaaccttcagtccaggaggcaaggccaagtgcaggaacatggagcatgcactgcgggagaaggccaaggccttctgggccatgcggcgctcctagatgccatggccgaggagacaaggcagaagcaacttctggccgacgagaagatgaagcagctcacagaggagacggaggtgctggcacatgagatcgagcggctgcagatggagatgaaggaggacgacgtttcttttctcatgaaacacaagagccgaaaacgccgactcttctgcaccatggagccagagccagtccagcccggcatgcttatcgatgtctgcaagtacctgggctccctgcagtaccgcgtctggaagaagatgcttgcatctgtggaatctgtacccttcagctttgaccccaacaccgcagctggctggctctccgtgtctgacgacctcaccagcgtcaccaaccatggctaccgcgtgcaggtggagaacccggaacgcttctcctcggcgccctgcctgctgggctcccgtgtcttctcacagggctcgcacgcctgggaggtggcccttggggggctgcagagctggagggtgggcgtggtacgtgtgcgccaggactcgggcgctgagggccactcacacagctgctaccacgacacacgctcgggcttctggtatgtctgccgcacgcagggcgtggagggggaccactgcgtgacctcggacccagccacgtcgcccctggtcctggccatcccacgccgcctgcgtgtggagctggagtgtgaggagggcgagctgtctttctatgacgcggagcgccactgccacctgtacaccttccacgcccgctttggggaggttcgcccctacttctacctggggggtgcacggggcgccgggcctccagagcctttgcgcatctgccccttgcacatcagtgtcaaggaagaactggatggctgagctggcccggggctgccccggtcttgtgccacagcactgttttctttctgccctcttcctaatgcccacactgcttgggcactattgcgcccctgcctccttgccaggctcttcctcctgtcctgcctggtccttttccatgactccaggctgtgcctctctccatgtttggtcccttctgtgcccatggtcaggagctattcgggtggcacctcgctggccaggctctcccgagtcgtggcacctccacaatgtgaattttctgaatccctattccaggatttctgggaataatgtttacttctagaatgggcctgttgtaaaccatctcatcgaggtgtggtaaagccattggatgaggaggggactgccatggaaaggagagtttgttacttacggttctgagaggaggggccacataggaaagccccacggtgggtcagaaggcggaaggagggaggggaacgtgtgggcaagagacttcctctggtttcctcaggaggaaatgggcaaggcagagtaagcaggggagacaggtttaagggtagctggcttgagtaatttcagtggctctcaggataggggctgccctttttgtctgatacctggccccgggatagtcaggacaggtgaatgttggcctggggtgtgacagccctgggagagccatgtgaaggaggcagctggcgccatcgctccggattagttggtttccataggaaaggcatgctttcagccagatgcttgccatctctagggattgggggattggctagcctgggaggatcagtctgtccaggtcagcgaggccccagataccagagcatcaagagtacaggaaatacagttaatgcagggcctctgtgtggctggatcctccgtctccatcagatcagctctgattgatctattcttgcacgatttcctctgaacacagggttccagagtacttaaacacaacattttttaaatcgtgatttcggcctatttccttgccaggcctgtttccccaccaggaaatgagataggaggactggatgaggatgtcctgttatagttgctgtggaggaagttcctctggttaattctcatcagcgtctgcagaaaagaaggaaagagggcacccttttcagttgggaagaaaggagaggggtggcgccatggacgtggccctaaacgctgtgggagagggaagaggaggctgggcctcgctgccctcttgtctctgctgacttcagcctggtcatgcttgctctgccacttgcgatttcatccctaatttcttcctccaccatgcctgcagacttttccctgggcttgttttttctcgcacatctctgaagagtttttaatcttcagctcatcatgtcccaggaagtggcatcataaaaggaaatatttttttttcctaggagcagtgttaaaatctgggtcacattcctgaccaaggacagcatcctgccttctgcccatccccttcagttcacaaaagctgacattttaaacaaatcatgactcacacgtattaattggttataaatatgttgtgtacactggttagataaaacttaaggccacaaggagggcccaggtaggcgatgtcagtgtgtgaaggggctggattgggcgtggtgaggatgttggcaaaccagtgcatgcacctggttggaagatgctcagcctcacaaaagctccaagccctttgggagccaaagtgtctgagagtgtgaccctctcctgtaaagtatttatcccacccattaatataatttctgtataataaacttgacctgaaatt

SEQ ID NO: 2118 - DNA, 7551 bp, Homo sapiens
  source 1..7551: mol_type = genomic DNA
cggccgcggctgccatggcaacactacgccgccgccgccttttcacgcacgtcgcgagctaacggactcggcggcggcggcggcggcggcctgcgccccacccgcaccccatctggaccgcatcgctgaatgtgcccggacctgcgccttctgggtctctgaaagaagatgaatttggctgagatttgtgataatgcaaagaaaggaagagaatatgcccttcttggaaattacgactcatcaatggtatattaccagggggtgatgcagcagattcagagacattgccagtcagtcagagatccagctatcaaaggcaaatggcaacaggttcggcaggaattattggaggaatatgaacaagttaaaagtattgtcagcactttagaaagttttaaaattgacaagcctccagatttccctgtgtcctgtcaagatgaaccatttagagatcctgctgtttggccaccccctgttcctgcagaacacagagctccacctcagatcaggcgtcccaatcgagaagtaagacctctgaggaaagaaatggcaggagtaggagcccggggacctgtaggccgagcacatcctatatcaaagagtgaaaagccttctacaagtagggacaaggactatagagcaagagggagagatgacaagggaaggaagaatatgcaagatggtgcaagtgatggtgaaatgccaaaatttgatggtgctggttatgataaggatctggtggaagcccttgaaagagacattgtatccaggaatcctagcattcattgggatgacatagcagatctggaagaagctaagaagttgctaagggaagctgttgttcttccaatgtggatgcctgactttttcaaagggattagaaggccatggaagggtgtactgatggttggacccccaggcactggtaaaactatgctagctaaagctgttgccactgaatgtggtacaacattcttcaacgtttcgtcttctacactgacatctaaatacagaggtgaatctgagaagttagttcgtctgttgtttgagatggctagattttatgcccctaccacgatcttcattgatgagatagattctatctgcagtcgaagaggaacctctgatgaacatgaggcaagtcgcagggtcaagtctgaactgctcattcagatggatggagttggaggagctttagaaaatgatgatccttccaaaatggttatggtattggctgctactaatttcccgtgggacattgatgaagctttgcgaagaaggttagaaaaaaggatatatatacctctcccaacagcaaaaggaagagctgagcttctgaagatcaaccttcgtgaggtcgaattagatcctgatattcaactggaagatatagccgagaagattgagggctattctggtgctgacatcactaatgtttgcagggatgcctctttaatggcaatgagacggcgtatcaatggcttaagtccagaagaaatccgtgcactttctaaagaggaacttcagatgcctgttaccaaaggagactttgaattggccctaaagaaaattgctaagtctgtctctgctgcagacttggagaagtatgaaaaatggatggttgaatttggatctgcttgaatttctgtcagctctttaatttctggtatttttgttgataaaatacgaagaaattcctgcaatttttaaaaaacaagtttggaatttttttcagtggagtggttttcgcttaaaggaaaaaaaaatctaaaactgcgaagaatactaaatgtagttgagaaataattgatggcgagagtttgctagtctccctccccggctttgtgctggtattccacgtattcctgcattaatattgcacacccaaaccagtctatcagggaggctgaagcaagggcgcagtgtgatattttaggaatacagaagatttagaaatacccctatttctcatttgcagtttttttttccaattctgtgctctgtcaacatgagggacctatctatgtatgttgacttttaacatcaaaattggatttgtgtcaaacattcattgttaagagaagaatgacagtatattttggaggaaataatgaatttactaattaaacctttagaatttatgacttactgttagagtctgtcatatggttagaatttttacttccgctacccctgccatttcttctgctagctacttcataatatcttgagctttactgaggaatattctcacgctctgtggtatttgaatcattttgccaggtcatttctctgtctttagtattttttgctggtgcttcttacatttaatatggaaaggtgggaagaatattactgcattagatgtaattcttcattctagacttccaagtttgttttcacttttttgtgtgtgcgtgaaggagtctgtgtcacccaggctgtgtagtgcagtggttgatcttggctcactgcaacctctgcctcctagattcaagcaattctcctgtctcagcctcccaagtagctgggattacaggtgcgcaccaccatgcctggctgtgttttcacttttctttcaacatgttcaaccagatatatagccattatttttctcagctccagcattgtttgatttttcttgagtttgattttagtatttgagataaatacttttacattctaaacaagtccactctctgtggctaacgcaaaacaaatgaaatctttattgttttccaaacagctagtttaacaaaacagcatcatacatagtgaatgatgttcattggaaaattctaaaatttgtccttgtctaggttgagaacttttacacacactaagataaagatagaaatctgacatgctcactcaattcagcaggaattacacattagaaagaagccagaaaaataaatggcatatatccaatcacaagtaaatgatcctggcgttagtttttatgattacatgtgtctcattaggcaatttatgctttaatggtcaagcttttaaaaatttgtatttgataacatcctgaattctcagtttcgaatagtgcctactggtttaaaactaaaaataatacagctttttggacatttaaccaagatactaagaaggttttttttaaaaaaagagatttgattatttttccctgctaaaaactgtaaatgccttatgttcttttcagataacttaagtctgacctaaactccagtattcatctgatgctgtaaattgcccttctttctgagacacagattataagatgccagatcataagacatcatgattttattgtaattgaattcttcctaaaaattgagaggtttccttttattaacttttaaaataaagaaataagtagtttcattacgattattttgcaaactattgccagtcagaaatgcactttttttttccctgaagttttaggagccgtcactaaaacattagtcttgtgattgttaaaacttgtttgtaatgggttggtgcaaaagtaattgtggtttttccattactttcaatggcaaaaaccgcaattacttttgcaccagcctaacaatagttgattagttagaccttttctgggttttgtattgattatcttggtgtgcatttaattatttttctgaattcttcatggataatgacatagtaattgtgattcttttaataccagttaagcagtatttggcaacttaaacttcctgggagcctaactttactatgttaagtgagtcaggtgtgctttttatttcccttgtttctcattttgccctgtcagtggatggtagatgctttgtatatcttaaatcccttaaaggatcttaaagacatccctcaggtgttctatttaacttttattttattttattttatttatttatttattttgagactgagtcttgctctgtcgcccaggctggagtgcagtggcatgatctcggctcactgcaacttctgcctcccaggttcaagccattctcctgcctcggcctcctgagtagctgggattacagttgccgccacacccggcttatttttttgtatttttagtagaggcagagtttcaccatgttggccaggctagtctcgaactcctgacctcagatgatccgcccacattggcctcccaaagtgctgggattacaggtgtgatccaccgcacctggccctaacttttaatatacaacacacacacacacacacacacacacacacacacacacacacacacacacacacacactatttcagaagacagtgtgttgccttacccagaatgagtgctaggattacaggcgtgagacagacacacatacacacacatacacacacacagagtctttattgcagaagacagtgtgttgccttataggcgtgagacacacacacacacacacacacacacacacacacacacagtctttattgcagaagacagtgtgttgccttaccagaatgagtgcttggattacaggcgtgagccactgtgcccagccctaacttttaatgtacatcacacacacactcacactcacatacacacacacacacacactctgactgtctttattgcagaagacagtgtgttgccttacccagaatgagattgaattgttttgcttcgttttgttttgttattcagtgttgcggtagcagatgcattatcaaaggaaaaatatttggctcctttaattcctctgaaaacatgagtattttgagttctgcagcacaatgactgtaggactaagctaagtctgctttgcagatatctgatcagatagtcccttcattctgtagacgtgtattggttggtccaagacacagtgagtaggagctctgtggaccaagacaaagctggactagagagtacagttcaaacttggcagtttctctaacgactctgtatagcttctggcttctactactgaaacaagagtttagatcactgatggagaggcatagtaatctgtttgtgctttggaaaaatatataaaagtttttttcccctattttttgcactttaaatctgttttgaaattagaactgatatacatttatttgaataatgtgtaactattatggatctattttaatgaacaatttttaccatttcccaagctgcctgtttattataagcatgacatgtttactataaaccttttgcccccataatttctttttttaaaggaaattaatattagtaaaataaacacctctttaatggaagctgcaaccttctagtgatccaagtagacaatagatggtggcatcacagactttatctacacactttcgggtctgaccactacctcccacaatacctagccattttggaaggggaaaacatgcggtggtctagctgtatagctcagggcttaatttcagcttctgagattgtgatgtcatatttcactctcaaaacataggctgaaagcacgaattactcaaaaagtaagcaaaccaatacctggtgaatctatggacagtcatacacatacatcaggggaaaatgtgtgtgtacaacccaaatttacagtatgattgtcattctttgactttgttttgtatagcctgactctgttgaacatgaaattattagtactctaggttttggacagcttgagttcatttgaattccttccttaggaataagtttttatatacactgctaaatgtgtgatgagaatcataaaacactaaccagctgaggtagctgtgattcactttccccccaccctaacttgagataaaatgaaggactaggcaagtatttcatgttgtgtgagtggacttcggttccttcagtattgtctaggttattgagtctttctttgcctaatagtggattcccactcttaagataacttttattagtgataaatcagtttagggtatattctgtatgacaggcataaaatgttaagggtgaatgctggccttttccaagaaaaggccaccttaacttgtatgaggaaaaaatcctaactattctcttttttgtatctttttttccgtaactgttttgattgtatattttaaagaaaccacttaatttgtgatgcacgtaatatttgtgtgaacctgagaatatgtcacaataggaaaaagcagaaattatacttaggggacatgttaggggggtaaaaatatttaagcctcgaatgttttactgtcatctccactaactatttttacagaaaaagctaaaaactctgttgtaattattgtaagtttacttatttatacttttaaattaggcttttcatacttaaatttttttgacatttgcttttaatatttgtttcttaatgtggaaattgtgtattttaataatcaaattattaggataatagatatatttttaaacattcacctcattaacaaatagatctttgaatttttattaggttttttggctccagacaactgtttagctttaatgatatttctaaattcccagtgacttattaataaaaacaggaaaaatatttaggtaatgtcataaaatttattttacctttctcattttctgagaaaataaatgaaaaaaaccctagatattgctttattaccaacagtgtgtaggtttttgtacatatggaaatttgacacaaaaaaatagggaatttgtatagagaagtttccctcttataaaaggactcccatttgattgttcgaaactataaaatgcacttttactttaccatatctgaaatgacaaaatatcgccctttggaaaacctgactctttgcacgtgtaattcccagagtctacctcagttaaccaggcttagttttaggcaggaatgaattgaattaaattcagttcatcatctatgcagatttgtttcttttaagcacatccttccctcctgctgttgccctcctcccattaacttttctttttaatcttgaaattgtttaaaatattccatctttctttctctagcaaagtgtttgtattccaaataaggcctctgtgaaatgtctgaattacttttcccgtctttgttatggtcagcttcattatttggatgtattgcattcaaagcagcagttccaaacataacacacatctattttcttagagttttgtaaatacaaactaacctgatgacattaaaaattgtggatcctacatgttcctatgttcattctctaaaaacctgagtaactttatgaaaacacacaaacctggaaaaacatcacatttttgtcacatttttactgacaaatgtatattcatatgatggtacggcagcagggagtggcccccagttaacatggctgtgagtggacacagtgtctcgcaggatcactgcatgttatgatggcttgtaagtgcgttgttaagacttttgtttcagtgtttgtctcccagtatttgaacctaatttaaagaaaaagacgtttccaagttgtatttattaaatgtgtttttccttaccttttgtgctgctactttgctaatctcattagcttagctgtgtttgtgcataggttatatttggtaataaatttatagagtgttggttgtca

SEQ ID NO: 2119 - DNA, 1634 bp, Homo sapiens
  source 1..1634: mol_type = genomic DNA
gacagaaaaaaaaatctctctttgtcttgagggggctgttgagtggtcgcggacctgggctctgtgcgttgggaaagggaagtggaggtctctgaaagaagatgaatttggctgagatttgtgataatgcaaagaaaggaagagaatatgcccttcttggaaattacgactcatcaatggtatattaccagggggtgatgcagcagattcagagacattgccagtcagtcagagatccagctatcaaaggcaaatggcaacaggttcggcaggaattattggaggaatatgaacaagttaaaagtattgtcagcactttagaaagttttaaaattgacaagcctccagatttccctgtgtcctgtcaagatgaaccatttagagatcctgctgtttggccaccccctgttcctgcagaacacagagctccacctcagatcaggcgtcccaatcgagaagtaagacctctgaggaaagaaatggcaggagtaggagcccggggacctgtaggccgagcacatcctatatcaaagagtgaaaagccttctacaagtagggacaaggactatagagcaagagggagagatgacaagggaaggaagaatatgcaagatggtgcaagtgatggtgaaatgccaaaatttgatggtgctggttatgataaggatctggtggaagcccttgaaagagacattgtatccaggaatcctagcattcattgggatgacatagcagatctggaagaagctaagaagttgctaagggaagctgttgttcttccaatgtggatgcctgactttttcaaagggattagaaggccatggaagggtgtactgatggttggacccccaggcactggtaaaactatgctagctaaagctgttgccactgaatgtggtacaacattcttcaacgtttcgtcttctacactgacatctaaatacagaggtgaatctgagaagttagttcgtctgttgtttgagatggctagattttatgcccctaccacgatcttcattgatgagatagattctatctgcagtcgaagaggaacctctgatgaacatgaggcaagtcgcagggtcaagtctgaactgctcattcagatggatggagttggaggagctttagaaaatgatgatccttccaaaatggttatggtattggctgctactaatttcccgtgggacattgatgaagctttgcgaagaaggttagaaaaaaggatatatatacctctcccaacagcaaaaggaagagctgagcttctgaagatcaaccttcgtgaggtcgaattagatcctgatattcaactggaagatatagccgagaagattgagggctattctggtgctgacatcactaatgtttgcagggatgcctctttaatggcaatgagacggcgtatcaatggcttaagtccagaagaaatccgtgcactttctaaagaggaacttcagatgcctgttaccaaaggagactttgaattggccctaaagaaaattgctaagtctgtctctgctgcagacttggagaagtatgaaaaatggatggttgaatttggatctgcttgaatttctgtcagctctttaatttctggtatttttgttgataaaatacgaagaaattcctgc

SEQ ID NO: 2120 - DNA, 1749 bp, Homo sapiens
  source 1..1749: mol_type = genomic DNA
aaaatcccatggtgtccattcggttaaagcccatgttatttctctcccagttacctgccaaatcttctgtttagtgctgtggtaaatttcacctttatttacttactaaaaccatgctgacaagcataattagagagacattatttttataggacatctgaaattccaacgggcactactatggtgcaagtcaccattatcatctatgggataactccaaaatcccatattcactttaggtttaccatcagcttttgactggatactggcaaaaccaccttggtcacaatagtgctttgtgacataccatctcttacctgaatacctgcaaaaacccatggtcttcataaggtttgaaaacctaacatctgttacatggctatccacaaactgcccaggtaactgccatagctgggcatacaacatcttccggcatacctacagaaactcacggatacaattaacatggatttcatctttcatgagaaacaggaaggtttcctgtgtgctcagcactgtctgaacaatctattgcaaggagaatattttagccctgtggaattagcctcaattgcacatcagctagatgaagaagagaggatgagaatggcagaaggaggagtcaccagtgaagagtatcttgcatttttacagcagccttcagaaaacatggatgataccggtttcttctccattcaggtaataagcaatgccttgaagttctggggtttagagatcatccatttcaataatcctgaatatcagaagctcggcattgatcctataaatgaaagatcttttatatgtaattataaacaacactggtttactattagaaaatttggaaaacactggtttaacttgaattctctcttggcgggtccagaattaatatcagatacatgccttgcaaatttcttggctcgattacaacaacaagcatattctgtatttgttgtcaagggtgatctgccagactgtgaagctgaccaactcctgcagatcatcagtgtcgaagagatggatacaccaaaacttaatggaaaaaaattagtaaaacaaaaagagcatagagtctataaaacagtccttgaaaaagtatcagaagaaagtgatgagtctggaacatcagaccaagatgaggaggattttcagagggcccttgaactaagccgccaagaaaccaatagagaagatgaacatctccgcagtactattgagttaagcatgcaaggtagttccggaaacacatcgcaagatcttccaaagacatcatgtgtaactcctgcttcagaacagccgaagaaaataaaagaagactattttgaaaagcatcagcaggaacagaagcagcagcaacaacagtcagatctgccgggccacagttcatacctacacgaaaggccaacaacaagttcgagagcaattgagagtgatctcagtgatgacatcagtgaaggcacagtacaggccgctgtcgacaccattttagaaattatgagaaagaatttgaaaatcaaaggggaaaaataatgcctttaaaaataatttagatagtcatactttccaacattatcctgtgtgattatactgtaggatccattttggtcatctgtcaaagagatgaggaaataaggcttttagacagtttgcaaacaaaatgacgagagagatgtgggactaaataatgatcgttcaactactagccaaggagacattcagcaattaattaaatttaaattagctttc

SEQ ID NO: 2121 - DNA, 5910 bp, Homo sapiens
  source 1..5910: mol_type = genomic DNA
atggcggcccggagcgccccgagctgccacctgcggctcgagtgggtgtacggctaccggggccaccagtgccgcaacaacctctactacactgcggccaaggagatcgtatacttcgtggcgggggtcggcgtggtgtacagcccgcgggagcacaggcagaagttctaccggggccacagcgacgacatcatcagccttgcattgcatcctgaacgagtgttggtagcaacaggacaagttgggaaagagccttatatttgtatttgggattcatacactgtgcagaccatatcagttttaaaggatgttcatacacatggtatagcttgcttggcgtttgacttagatggacagcgcttggtttcagttggacttgattcaaagaatgcagtttgtgtttgggactggaaaaggggaaaaatgttgtctatggctcctggtcatacagatagaatatttgatatttcttgggatttgtaccagccaaataaacttgtcagctgtggtgtaaaacatatcaagttctggagtttatgtggaaatgctctgaccccaaaacgaggtgtctttggtaagacgggtgaccttcagacaatactgtgcctagcctgtgcaagggatgaattaacatattctggtgcactcaatggggatatatatgtttggaaaggaatcaatcttatacgaacaatacaaggagcccatgctgcaggaatttttagcatgaatgcttgtgaagaaggctttgctactggtggcagagatggttgtattcgtctttgggatttaacttttaaaccaattactgtgattgatctcagggaaacagaccagggatacaaaggtttgtctgtaaggagtgtgtgttggcgaggtgaccacattctagttggaacacaggacagtgaaatttttgaaattgtggtgcaagaaagaaataaaccttttctaattatgcaagggcattgtgaaggtgaactttgggcacttgctgtccatcctactaaacctttggctgtgactggaagtgatgatcgttcggtcaggatatggagcctagtagatcatgcattaatagcaaggtgtaatatggaagaaccaattcgttgtgcagctgtcaatgcagatggaatccatcttgcccttggaatgaaggatggctcattcactgtacttagagtaagagatatgacggaagttgtacatattaaagataggaaggaggcaattcatgagttaaaatattcaccagatggaacttaccttgctgttggatgcaatgacagctcggttgatatttatggagttgctcagcgttataaaaaagttggcgagtgtttgggatcccttagtttcatcactcatctggactggtcttcagacagtagatatttgcagacaaatgatggaaatgggaaaagacttttttatagaatgccaggaggaaaggaagtgacaagtacagaagaaataaaaggtgttcattgggcttcatggacatgtgtttcaggccttgaagtaaatggaatttggcccaagtattcagatatcaacgatataaattcagtagatggaaattatattggccaagttttagttacagctgatgactatggaattataaaattattccgatatccatgtttaagaaaaggggccaagtttagaaaatatattggccattcagctcacgtaactaatgtcagatggtcacatgattatcagtgggttatttctattggtggagcagatcactctgtctttcagtggaaatttattcctgaaagaaaactgaaagatgctgttcacatagcaccccaagaaagtctggctgactctcatagtgatgaatcagattcagatctgtctgatgttccagaactggattctgaaattgaacaagagacacagctcacctaccgtcgacaggtttacaaagaagatctacctcagcttaaagaacagtgcaaagagaaacaaaaaagtgctacttctaaaagaagagagcgggctccaggaaatagtattcgattacactttgttcacggttacagaggttatgactgtcgaagtaatctgttttatactcaaattggtgaaattgtgtaccatgtggcagcagtgggtgtcatttataatcgacagcaaaacacacagcgtttttatctgggtcatgatgatgatattctctgcctaactattcatcctttgaaagactacgtggcaacaggccaggttggtagagatccctcaattcatatatgggatacagagaccattaaaccattgtccatattaaagggccaccaccagtatggtgttagtgccgttgatttctcagcggatgggaaacgtttggcatcagttggcatagatgatagccatactgttgtgctctgggactggaagaaaggagagaaactttcaatagcaagaggaagtaaagataagatttttgttgtaaagatgaacccctatgtgcctgataaactaattacagctggaattaaacacatgaaattttggcgtaaagcagggggaggattgattggaagaaaaggctacataggcacactggggaaaaatgacacaatgatgtgtgcagtgtatggatggactgaagagatggctttttctggaacatccacaggagatgtgtgtatctggagagacatctttcttgtaaaaacagtgaaagcgcatgatgggccagtgttcagtatgcatgcattggaaaaagggtttgtaactggaggaaaagatggtatagtagctctttgggatgactcttttgaaagatgtctcaagacctatgctataaaaagagctgcattggccccaggatctaaaggtcttctcttggaagataatccatctatacgtgccatatcattaggacatggtcatattttagttggcacaaagaatggtgaaatactagaagtggataaaagtggcccaataacacttctggttcagggacacatggaaggagaggtgtggggtttagctacacacccttatctgcccatctgtgctactgtaagcgatgataaaaccttaagaatatgggatctctcacctagtcattgtatgttggctgtccggaagctgaaaaagggtgggaggtgttgctgtttttctcctgatggtaaagctttagccgtaggtctcaacgatggaagcttcttaatggcaaatgcggatactctagaggatcttgtgtcttttcatcacagaaaagatatgatttcagatattcgattttcacctggttctgggaaatatcttgctgtagcatcccatgacagctttatagatatatacaatgtaatgagtagtaaacgagtaggaatatgcaaaggagctaccagttacataacccatattgattgggatattagaggaaagcttttacaggtcaacactggtgctaaggaacaattattctttgaagctcccagagggaaaaaacaaaccatccccagcgtggaggtagaaaaaattgcttgggcatcatggacaagtgtacttggtttatgctgtgaaggaatttggccagtaattggagaagttacagatgtaactgcttcttgcctcaccagtgacaaaatggttctagctaccggggacgatttgggatttgtgaagttatttagatatcctactaaagggaaatttggaaagtttaagaggtatgtggcccatagtacacatgtcacaaatgttcgctggacttatgatgacagcatgttggttaccctaggcggtacagatatgtctttaatggtgtggacaaatgagatggaaggctatcgagaaaaaaggccttgtgatagtgaagaatccgacattgattctgaagaagatgggggctatgacagtgatgttacaagggagaatgaaatcagttacaccatcagagccttatcaacaaatattcgcccaatgttaggaatcaagcctcatttacaacaaaaagaaccctcaattgatgaaaggcctccagtgagcagggccccaccacagccagagaaactccagacaaacaatgtaggcaagaaaaagagacctatagaggaccttgtgttggagctcatttttggttatcgaggcagagactgtaggaataatgttcactatttaaatgatggtgatgatataatttatcacactgcatctgttggaattctgcacaatgttgctacaggttctcagagtttttatcaggaacataatgatgatattctgtgcctcacagtaaaccagcaccccaaatttatcaacatagtggcaactggccaagtaggtgattcagcagacatgtcagctacagctccttctattcacatctgggatgcaatgaacaagcagactttatctatcctaagatgctaccattcaaagggagtatgttcagtcagcttcagtgctactggcaaactattgctgtctgtgggactagacccagaacatactattaccatttggagatggcaggaaggtgccaaaattgccagcagagctggtcacaatcaacgtatttttgtggcagaattccgaccagattcagatacccagtttgtctcagtgggagtaaaacatgtgaagttctggaccctggcaggaagagctcttcttagcaaaaaagggctactgagcacactggaagatgcccggatgcagaccatgctcgctattgcatttggtgcaaataacttgacgtttacaggtaccatcagtggtgatgtctgtgtgtggaaagatcacatattgtgtagaatcgtggcgagagctcacaacgggcctgtgtttgccatgtacaccaccctgcgagatggacttatcgtgactgggggaaaggaaaggccgtcaaaagaaggaggagcggttaaactgtgggatcaggaactgaggcggtgccgtgccttcaggcttgagacaggacaagccacagattgtgttcgttctgtgtgcagaggcaaaggcaagatccttgttgggacaaggaatgctgaaataatcgaagttggagagaaaaatgcagcttgtaatattttagttaacggtcatgtggatgggccaatctggggactagcaacacatccttccagggattttttcctttctgctgcagaagatgggacagtgagactttgggatattgctgataaaaagatgttaaacaaagtgaatttgggacatgctgctcgtactgtgtgttacagccctgaaggggacatggtggctattggaatgaaaaatggagaatttatcattttactagtgagttctctaaaaatatggggaaagaagagagacaggagatgtgcaatccatgatatcagatttagtccggattcccggtatctggcagtaggttctagtgagaactcagtggatttttatgacctaacgctgggccccactcttaacagaatcagctactgcaaagacattccaagctttgtcattcaaatggacttctctgcagatagcagttatctccaggtctctagtggctgctataaacggcatgtctatgaagtgccttcaggaaaacatcttatggatcatgccgctattgacagaattacttgggctacatggactagtattctaggagatgaggttttgggaatctggtccagacatgctgagaaagctgatgtcaactgtgcctgtgtatctcattcaggaatcagtcttgttacaggagatgactttggcatggttaagttatttgacttcccatgtccagaaaaatttgcaaaacacaaaaggttcttgggtcattcgccccatgtgacaaatattcgatttaccagtggtgatcgacatgttgttagtgctggaggtgatgactgcagcttatttgtctggaaatgtgtacatacacctcactga

SEQ ID NO: 2122 - DNA, 1789 bp, Homo sapiens
  source 1..1789: mol_type = genomic DNA
tcctctcctattatgcaaacccacaccatggatccagcagactactctggccccagcatgctgctccttgggatgatgggagaagggggaaacctgtgttttctcttggttttagggtatgggtctacttctttgaacattcgctcagatcgtaaggtaaccccaagaatcggcatcactctctggtctgggcgcctggatagtcacgcatggagtccgcgaggtgctggcgccggagcacgctgggaacgccgggctcccggccggcctgacccggaagggctggcgcatggtaaccccagcttccctagcaaccaagcaggcgcaagaagcaaccagccgcgctatccgctcccgttgctaccggaatgcctcttcaggttagcgattacagctggcagcagacgaagactgcggtctttctgtctctgcccctcaaaggcgtgtgcgtcagagacacggacgtgttctgcacggaaaactatctgaaggtcaactttcctccatttttatttgaggcatttctttatgctcccatagacgatgagagcagcaaagcaaagattgggaatgacaccattgtcttcaccttgtataaaaaagaagcggccatgtgggagaccctttctgtgacgggtgttgacaaagagatgatgcaaagaattagagaaaaatctattttacaagcacaagagagagcaaaagaagctacagaagcaaaagctgcagcaaagcgggaagatcaaaaatacgcactaagtgtcatgatgaagattgaagaagaagagaggaaaaaaatagaagatatgaaagaaaatgaacggataaaagccactaaagcattggaagcctggaaagaatatcaaagaaaagctgaggagcaaaaaaaaattcagagagaagagaaattatgtcaaaaagaaaagcaaattaaagaagaaagaaaaaaaataaaatataagagtcttactagaaatttggcatctagaaatcttgctccaaaagggagaaattcagaaaatatatttactgagaagttaaaggaagacagtattcctgctcctcgctctgttggcagtattaaaatcaactttacccctcgagtattcccaacagctcttcgtgaatcacaagtagcagaagaggaggagtggctacacaaacaagctgaggcacgaagagcaatgaatactgacatagctgaactttgcgatttaaaagaagaagaaaagaacccagaatggttgaaggataaaggaaacaaattgtttgcaacggaaaactatttggcagctatcaatgcatataatttagccataagactaaataataagatgccactattgtatttgaaccgggctgcttgccacctaaaactaaaaaacttacacaaggctattgaagattcttctaaggaattctgttctcttgagggcattgaatgtcaggcctctgagcccaagctaagccatcatatccctagtgacctgcacgtatacatccagatggcctgaagcaagtgaagaatcacaaaagaagtgaaaatggccggttcctgccttaactgatgacattaccttgtgaaattccttctcctggctcagaacctcccccactgagcaccttgtgacccctgcccctgcccgccacagaataaccccctttgactgtaattttccattacctacccaaatcctataaaacggccccacccctatctcccttcgctgactgtcttttcggactcagcccgcctccacccaggtgattaaaaagctttattgctcac

SEQ ID NO: 2123 - DNA, 3940 bp, Homo sapiens
  source 1..3940: mol_type = genomic DNA
aggtgacgtcactggccaggccagccggcgccattttgaaagtggagtcgcctgcccctgccgctgccgccgccgccgtcgctgtcgtagtcgccgccgccgctgccggagaaagagcacgagcggggaagccccagagtgaaatctagcatcctgccggctggtctgcccgcccctccttccttttccccccggcccccgtcccctccccccgcaggtgccatccgccgccatccgccctctctacccccccatccccaggtgaggggggtgagttcaggaagcggagaccccgaggaacccagcagggtcaccatttgcagcgcaacatggcaggagctggaggagggaatgatattcagtggtgtttttctcaggtgaaaggagcagtagatgatgatgtagcagaagcagatataatttctacagtagaatttaatcattctggagaattactagcaacaggagataaaggtggtagagttgtcatctttcaacaggagcaggagaacaaaatccagtctcatagcagaggagaatataatgtttacagcaccttccagagccatgaaccagagtttgactacttgaaaagtttagaaatagaagaaaagatcaacaaaattaggtggttaccccagaaaaatgctgctcagtttttattgtctaccaatgataaaacaataaaattatggaaaatcagtgaaagggacaaaagaccagaagggtataacttgaaagaggaggatggaaggtatagagatcctactacagttactacactacgagtgccagtctttaggcctatggatctaatggttgaggccagtccacgaagaatatttgccaatgctcatacatatcacatcaactcaatttctattaatagtgattatgaaacatatttatctgcagatgatttgcggattaatctttggcatctggaaattacagacaggagttttaacattgtggatatcaagcctgccaatatggaagagctaacagaggtgattacagcagcagaatttcatccaaacagctgtaacacatttgtatacagcagcagtaaaggaactattcggctatgtgacatgagggcatctgccctctgtgatagacattctaaattgtttgaagaacctgaagatcccagtaacaggtcatttttttccgaaatcatctcctctatttcggatgtaaaattcagccatagtggtcgatatatgatgactagagactatttgtcagtcaaaatttgggacttaaatatggaaaacaggcctgtggaaacataccaggtgcatgaatacctcagaagtaaactctgttcactgtatgaaaatgactgcatatttgacaaatttgaatgttgttggaatggatctgacagtgttgtcatgactggatcttacaataatttcttcagaatgtttgacagaaacacaaagcgagacataaccctagaagcatcgcgggaaaacaataagcctcgcacagttctgaagcctcgcaaagtctgtgcaagtggcaagcgaaagaaagatgaaataagtgttgacagcctagacttcaataagaaaatccttcacacagcctggcaccccaaggaaaatatcattgccgtagctactacaaacaatctgtatatatttcaagacaaagtgaattagggttggcattcctagcagaagaacccacttcctgcttagttgagatagttgaatctagcattcgttcctataaaagagagaggtccattgtggcgcccctttccagtgtttgacagtgtgccattcgacaacacattgttatagctacatggagaaagctctgtggattcatcactgtggtgttctccatgtctgctagccatttaggtaagggtagggcacttttaatttaaatgacttcttgcaccatcttgcctaatggactagattggactgtatcaacattgatttactccactttttatgccttccattgtgatgacgtcaaacacagtgaaagccttcagtcatgctatgggatttaattgtgtatcctcattactgtatcatttgtggggtacaccccttccccctttttttaaattaaatacagctcattcttactgtggcttgtagcattcctcctcttctggcctcctggactgctccccttcatctcttacccttgccccctccacccggtcttggtggtggtatattaaaaaaagaaagaatgaaagcacacaaaatgagtcagtttggggtcagtggtataaagggggtatatgttgcaaacaaatgttttagtaacagttggctgtaatcactcctcgccgtgtctggcactgaaaataaggaaaaaaaacctactactgaataaaagtgacaaagaatggagaatctggttttctttttctttttaacctacctcttgtagccaatattttgtgtcatacctttgggcacagtgaaacaaaatgggttttcattgtttattggtatttttgttaattatttttaacaagtgttcttttacatgcaggaggagaggtattggttctctatgaacatattttgaatataggttttattaaggatttcacaatctataaatgctactagtttttttttttttttttaccatcatgagggtattggatacattgtgtctctatttaactcattatgtgttaatgaaattgttgtaaatgggaaccaaatttgtagaacttaatttctactttttagagtgcttaatttcatttttgccttactaaatagtcaaagacttataaaacatttttaacaagttagaacttttttgttattcagtcatataaaatagcagaaaactaacatcaagtgacactgcactaaatactttttttgtattttactgctatcaaatcagaatgaaatatactttaccatagatatttttcttctatttttggttttccaaagctatatgaaagacaaatttttaaaggtacagcgttcaaaaagtgcttaatgaactccaacagctgcctcaaataaaaatctgtatatgaatacattttccctaagcggtgatacattatccaaagatgaagagtgctcctatttttaataggtagaatgtacctttgtcagtcttgcagaaactttaatggagaagaaatggactttatttttgaaaggtgaaatgaacaggcatttatattattagagaatggtagtcttattttggtggaacataatgtaacaaccttgaatttcagaggactctgagtgcttctatgtccactacctattgttctattcttcaataatgaaaaagaattcaacgagccgaccgtgattccctctactacaaatattatgtcttgtaagttagcatttttagcacacaggagaaattttatgtaataaaattactgtatcttttggatttaacaaatttgtatttgaaacacattctatgtctgataattcttaatggcacttttactaatttatttggggatcttgggtacattcttaatttgtgtttattcttcacgcttgacttgcaagtgggatattcccctgccacaagtgtcaaacagtgatattcttcctgtgttgtgactggacagttttccagatcttttttgggagattttcctacagcttggttgtatgtcttgagataacaccaccaaacagctctcagaaattcttttttgattgatcagtagctatgatgattctcctccatgacactaaggattagtttatatatttaagagaaataattgctaaaattaaaatgcctctatcaaggaatgctattataaattattgttaacattctcaagtattaattttttaatttcattggtgtagcaaactctaagcccagccactcattttacatggccatggttaatctttttattaataaaaattatacttagaataaa

SEQ ID NO: 2124 - DNA, 4537 bp, Homo sapiens
  source 1..4537: mol_type = genomic DNA
gcggcgcgcacggtatggcggcggcggcggcggcggcggcgcgcgcctgagaagaggggacgccagcccggtcaggcctcggcgcggcctacacgctccgctcgctcgctcgctcccgcctcccgccccgcgcccggccatggcggagccgtcgtccgcccgacgcccggtgcctctcatcgagtcggagctgtacttccttatcgcccggtacctatcggcgggcccgtgtcggagagcggcccaggtgctggtgcaggagctggagcagtaccagttgttgccgaagagattggactgggagggcaacgagcacaacaggagctacgaggagttggtcttgtccaataagcatgtggctcctgatcatcttttgcaaatctgccagcgcatcggtcctatgttggataaagaaattccacccagtatttcaagagtcacttctttacttggtgcaggaaggcagtctttgctacgtacagcaaaagactgcaggcacacagtttggaagggctctgcctttgctgctcttcatagaggaagacctcctgaaatgccagtgaattatggttccccaccaaatcttgtggagatacatcgaggaaaacaactcacagggtgttccacttttagtacagcatttccaggaactatgtatcagcatataaaaatgcacagaaggattctcggacatctatctgctgtttactgtgtagcatttgataggacaggacatagaatctttacaggttcagatgactgtttggtaaagatttggtcaacacataatggccgcttgttatctacattaagaggtcattctgcagaaatttcagatatggcagtaaactatgagaatacaatgattgctgcggggagctgtgataaaattattagagtgtggtgcttgagaacttgtgccccagttgctgtgctccaaggacacacaggatcaattacatctttacagtttagcccgatggccaaaggctctcaaagatacatggtttccactggtgctgatgggacagtttgcttttggcaatgggatttagaatccttaaaatttagcccacgtcccctgaagttcactgaaaagcctaggccaggcgttcaaatgctttgttcttcttttagtgttggtggtatgtttttagccacaggtagtactgatcatgtaatcagaatgtattttttgggttttgaagcacccgaaaaaatcgcagaacttgaaagccacactgataaagtagatagtatccaattttgtaacaatggtgatcggttcctaagtggtagcagagatggaacagcacggatttggagatttgagcagttagaatggaggagcattttattggatatggctaccagaatctcaggggacttatcttccgaagaggaaaggtttatgaaacctaaagtaacaatgatagcttggaatcaaaatgatagcattgttgtcacagctgtgaatgatcatgtcctcaaagtgtggaattcttacactggacaactgcttcataacttaatgggacatgctgatgaagtatttgttctggagacacatccctttgattccagaattatgttatctgcaggacatgatggcagcatatttatatgggatattacaaaaggtaccaagatgaaacattattttaatatgattgaaggacaaggacatggagctgtgtttgactgtaagttttcacaggatggacagcattttgcctgtacagattctcatgggcaccttctgatatttggttttggatgcagcaaaccatatgaaaagattcctgatcagatgttcttccatactgactatcgaccacttattagagattctaataattatgtcttagatgagcaaactcagcaggctcctcatcttatgcctccaccattcttggtagatgtagatggaaatcctcatccaaccaagtatcagagattagtaccaggccgagaaaattctgcagatgaacatttgattccacagctgggctatgtggcaacaagtgatggagaggtgattgaacaaattataagcctgcaaaccaatgataatgatgaacgcagcccagaatcgagtattcttgatggaatgataagacagttgcagcagcagcaagatcagagaatgggagcagatcaggatactattccaagaggactttcaaatggtgaagaaacaccccggagaggttttagaaggctgagcttagacattcagtcccctccaaatattggtctgcgtcgtagtggacaagttgaaggtgttcgtcagatgcatcaaaacgctccacgcagtcagattgctacagaacgtgacctgcaggcttggaaacgaagagtggttgtaccagaggtaccactaggcatatttaggaagctggaagacttccgattagagaaaggtgaagaggaaagaaatctttatataataggaagaaaaagaaagactcttcagctctcacataagtcggattcagtggttttggtatcacagtctagacaaaggacatgtaggcgtaaatatccaaattatggtagaagaaatcgtagctggcgtgagttatcttctggaaatgagtcttcaagctctgtaagacatgagacttcctgtgatcagagtgaaggttctggttcttcagaagaggatgaatggagaagtgacagaaaaagtgagagttacagcgaaagttcaagtgactcttcatctagatattccgattggacagctgatgcgggcatcaatttgcagcctcctttaagaacatcatgtcgtcgacgaattactcgattttgtagtagttcagaagatgaaatatctactgagaatttatctcctccaaaaagaagacgaaagagaaagaaagaaaataagcctaagaaggagaatttgcggaggatgactccagcagagcttgcaaatatggagcatttatatgaatttcaccctccagtttggattactgacaccacacttagaaaatctccttttgttcctcaaatgggtgatgaggtaatatattttcgacagggtcatgaagcttatattgaggctgtaagaagaaataatatttatgaactgaaccctaataaggagccatggagaaaaatggatcttagggatcaagaattggttaaaatagttggaatacgatatgaagttgggccccctacactctgttgcctaaaactagcatttatagatccagcaactggaaaacttatggacaaatctttctctattagatatcatgatatgccagatgttattgactttcttgtattgcgtcaattttatgatgaagcaagacagaggaattggcagtcttgtgacagattccgctctattattgatgatgcttggtggtttggaacagtgttaagtcaagagccatatcaaccacagtatcctgatagtcatttccagtgttatattgttaggtgggataatactgaaattgaaaaacttagcccatgggacatggaaccaattcctgataatgttgatccacctgaagaattaggagctagtatttctgtcacaacagatgagctagagaaattgctctataaaccacaagctggtgaatggggtcagaaatcaagagatgaagaatgtgatagaattatcagtggtatagatcaacttttgaatcttgatatagcagcagcttttgcaggccctgttgatttgtgtacatacccgaagtactgtactgtagtagcttatccaaccgatctttacacaattcgaatgagacttgttaatcgattttacaggaggctgtctgcgttagtttgggaagtcagatatatagaacataatgccagaacatttaacgaacctgagagtgtaattgcaagatcagctaaaaagataactgaccaacttttaaaatttatcaagaatcaacactgtacaaatatctcagaactttctaacacatctgaaaatgatgagcaaaatgctgaggatttggatgatagtgatcttcctaaaacatcttctggaaggaggagagactacagagatattatagataccccaatggattttggaacagtaagggaaactctagatgcgggaaattatgacagccctttggagttttgcaaagacatccggctgatatttagcaatgcaaaagcgtatacaccaaacaaaagatcaaagatttatagtatgaccttgagattatctgccttatttgaagaaaaaatgaagaaaatctcttctgattttaaaattggtcaaaaattcaatgaaaaacttcgaagaagccagaggttcaagcaacggcaaaattgtaaaggtgacagtcagcctaacaaaagtatcagaaacctcaagccgaagaggttaaaatctcagacaaaaataattcctgagttggtaggttctcctacccagtctacctcaagtaggacagcttatcttggaacccacaagacaagtgctggtatctcttcaggtgttacttctggtctcttcagattcagcagaatcatcagaaaggag

SEQ ID NO: 2125 - DNA, 1034 bp, Homo sapiens
  source 1..1034: mol_type = genomic DNA
attatcctccttattgacaaacagagcggtcgcggcggcgactctcggcgtgcggtgatagccaagccatgggagacaagaagagccccaccaggccgaagcggcagccgaagccgtcctcggatgagggttactgggactgtagcgtctgcaccttccggaacagcgccgaggccttcaagtgcatgatgtgcgatgtgcggaagggcacctccacccgagataacaggaagagagcctggttaccatttggtggaacaatcctgctggctcaagcctctgcctagaaatttgggtcattctcttttttggacagtctggaaacctcgacctgtctcccagttggttgcacagcaggttactcagcagtttgtgcctcctacacagtcaaagaaagagaaaaaagataaagtagaaaaagaaaaaagtgaaaaggaaacaactagcaaaaagaatagccataagaaaaccaggccaagattgaaaaatgtggatcggagtagtgctcagcatttggaagttactgttggagatctgacagtcattattacagactttaaggagaaaacaaagtcaccgcctgcatctagtgctgcttctgcagatcaacacagtcaaagcggctctagctctgataacacagagagaggaatgtccaggtcatcttcacccagaggagaagcctcatcattgaatggagaatctcattaaagtttattttctccaatttcttagtcacttctgtcctaccatgcaaatacacagattatgccaagaggtaccacattttcatgacagatacattcatgcacaatccataatttgagttttacataaaatagaaatttgttagaatttgttagattttattgcaatgatgcctaccaaacatttccagacttaacattttggtctctgcagttaagtgccatgaaaatgtggttgaattattcattatgcagtgttattggtaagtgtattttcacttttagtttagtgaattctaacacataattcttgaattctctactatt

SEQ ID NO: 2126 - DNA, 1211 bp, Homo sapiens
  source 1..1211: mol_type = genomic DNA
ccctccctccctcctcccccgcccgcttccgcccggcttattatcctccttattgacaaacagagcggtcgcggcggcgactctcggcgtgcggtgatagccaagccatgggagacaagaagagccccaccaggaaacctcgacctgtctcccagttggttgcacagcaggttactcagcagtttgtgcctcctacacagtcaaagaaagagaaaaaagataaagtagaaaaagaaaaaagtgaaaaggaaacaactagcaaaaagaatagccataagaaaaccaggccaagattgaaaaatgtggatcggagtagtgctcagcatttggaagttactgttggagatctgacagtcattattacagactttaaggagaaaacaaagtcaccgcctgcatctagtgctgcttctgcagatcaacacagtcaaagcggctctagctctgataacacagagagaggaatgtccaggtcatcttcacccagaggagaagcctcatcattgaatggagaatctcattaaagtttattttctccaatttcttagtcacttctgtcctaccatgcaaatacacagattatgccaagaggtaccacattttcatgacagatacattcatgcacaatccataatttgagttttacataaaatagaaatttgttagaatttgttagattttattgcaatgatgcctaccaaacatttccagacttaacattttggtctctgcagttaagtgccatgaaaatgtggttgaattattcattatgcagtgttattggtaagtgtattttcacttttagtttagtgaattctaacacataattcttgaattctctactattggcatgtaacgaatttaaattttttataacatagtgcaagctgcctaaatatgtattatttgagaattgtgaaacagatagttatatgtatacaagtcaaagaacaacttaactattgctgcaacaggtttttcttaatggttatcctcttaaatacacctgctggtacttggtgtggttaaataggaaaattgttattaaataaagaatttgtatgaacctttgccaatgtttttgacacgttttactaattattgttcctgaattatgtttctggttttatctattttttgaggtttttttgtttgcttatttttcaaaacattcatttattgtaatgtttactagcggactagtaaacaat

SEQ ID NO: 2127 - DNA, 1793 bp, Homo sapiens
  source 1..1793: mol_type = genomic DNA
agatctgatcgctgctgccctgctctcctcctcctctcattcctctgcctcctggattcctgaagtttaggagaaataaggtagccaagggaaccacatggaagttgtgacagctcccagcggcgcgcccctttcgtgtgtgccggtacctcggcttaggagttgcccgctgacaccttgaatgaaggaggtccccttgccagccagcctgccgggatgggccattgctgctgcaagccttataactgccttcagtgcctggacaagacgaatgaaagtgcccttgtgaaagaaaaagagctgtcaatcgaacttgcaaacatcagggatgaagttgccttccatacagcaaagtgcgagaaactacaaaaggagaaggaggagctggagaggcggttcgaggacgaggtgaagaggctgggctggcagcagcaggccgagctccaggagctggaggagcggctgcagctgcaattcgaggcggaaatggcgcgcctgcaggaggagcacggtgaccagctgctgagcatccggtgtcaacaccaggagcaggtggaagatctcaccgccagccatgatgctgctctcctagagatggaaaataaccacacagttgccatcacaatcctgcaggatgaccacgaccacaaagtccaagaattgatgtccactcatgagcttgaaaagaaagaattggaagaaaattttgaaaaactgcggctgtcattgcaggaccaggtggacacgctgaccttccagagccagtctctgcgggacagagcccgccgcttcgaagaggccttgaggaagaacacagaggagcagctggagattgcattggctccttatcagcacttggaagaagacatgaagagtctgaagcaggtattagaaatgaagaatcagcaaatacacgagcaagaaaagaagattcttgagctggaaaagctggcagaaaagaacattatcctagaagaaaagatccaggttctccaacagcagaacgaagacctcaaagcaaggattgaccaaaacacagttgtcaccagacagctgtcggaggaaaatgctaacctccaggaatatgttgagaaggaaacccaggagaagaagagattgagccgaaccaatgaagagctgctttggaagctccaaactggggacccgaccagtccgattaaactctcgcccacatctcccgtttaccgcggctcctcctcggggccctcctctccggccagagtcagcacaacacccagatgacgccactacacggcctgcgggagctccggcttctcgtcctccggtctccaccctgagggagcaccgacccggtgccgccggagctggccctgtgcgcatgctcagtagctgcgaatgcatcctaggcgcgtcctcctctgatccccgtgtaagactgccctggtgtcggcacttaggaatgtgtaaatggtaaagtctgatgtgcaaacgttttaccatagttagagccaaaagaaagacacttgcaattgttcttgagcaatgaactttcactgcagaatttcaggttagttacaaaaagctcagttttcaatatacattgaataatcattgtgtactgcaccgatatgtgtgtatatttagatatacgtatatacacatgctgcggttctgaatttcattttttataacatgaagtgctgacatattttagtgaaggtcagcagttttctaacttgtgcctaagaattattgggaaatgaaaatgcatttctatctagcttcccaggaatatttctacccaaaataga

SEQ ID NO: 2128 - DNA, 2833 bp, Homo sapiens
  source 1..2833: mol_type = genomic DNA
ctccccgggcggctccggctcccgcagcgggacagacccacccgcccaggcttttatccggcaccggcagcgtcttcctttcctcccccgtctatggtggtggcggcggcggctcctcgggcggcggcggaagacgaggctgcggcgttgccatgaacagtggcggcggcctcccgcccccctcggccgccgcctccccttcctcctcctcgctggcggcggcggtggcggtggtggccccgccgggggtcgggggtgtccccggcggggcggcggtaggagtgaagctgaagtactgccgctactacgctaaggataagacttgcttctacggggaggagtgtcagttcctgcatgaggaccctgccgccggggctgccccgggcctcggcctccatagcaacagcgtccccctggctctggctggtgcacccgtggccggctttccgccgggagccgtcgcgggcgggggagctgggccgccccccgggcccaagaagccggacctgggggacccggggaccggagccgcagccggcggaggaggcagtagcgggggactcgatggaccgcggctggcaattccaggaatggatggaggtgctttaactgatacaagtctcacagattcctattttagcaccagctttattggagtcaatggatttggaagccctgtagaaacaaaatatcccctgatgcagagaatgactaatagtagcagctccccaagccttctaaatgacagtgccaagccatattcagcccatgatcctctaacatcacctgcttcatccttgtttaatgactttggtgccctcaacatctctcagagacgaaagccaaggaagtatcgcctggggatgctggaggagaggctagttccgatgggatcaaaggcacgaaaagcaaagaaccctattggctgccttgctgacaggtgtaaatcaggagtacccatcaatatggtttggtggaacagagtcacagaaaacaatttacagacaccaaatcctactgcaagcgagtttattcctaaaggaggatcaacctccaggctgagtaacgtgtcccagtcaaatatgtctgccttctctcaagttttctctcacccatccatgggaagccctgctactgctggattagcgccaggaatgtcgttgtctgctgggtcttcccctcttcattcccccaagattactccacatacttctcctgctcccagaagaagaagtcacactccaaatccagcaagttacatggtgccttctagtgcctctacatctgttaataatcctgtttctcagactccgtcttctggtcaggtgatccaaaaggaaactgttggtgggacgacttacttctatacagacacaactccagcacctttgactggaatggtgtttccaaactatcatatttatcctccaactgcacctcacgttgcttatatgcaaccgaaagcaaacgcaccttccttcttcatggctgatgaactccgacaggagctgatcaacagacatttaataacaatggctcaaattgatcaagcagatatgccagcagttcctacagaggttgacagctaccatagcctattccctctagaaccactgccacctcccaaccggatacagaaatcaagtaattttggatatattacatcttgctacaaagctgtaaacagcaaagatgatctgccatattgccttcggaggatacatggttttcgtcttgttaacacaaagtgcatggtgttggtcgacatgtggaagaaaattcaacactcaaatatcgtaactttgcgtgaagtatttaccactaaagcatttgctgagccctctcttgtgtttgcatatgatttccatgctggaggagaaactatgatgagcagacactttaatgaccctaatgctgatgcctacttcaccaagagaaagtggggtcagcacgagggaccattgcccaggcagcatgctggattattgccagaatctcttatttgggcatatattgtccaactaagttctgcattgcgtaccattcatacagcaggtttggcatgtcgagttatggatccaacaaagattctgataactggcaaaacaaggttgcgagtaaattgtgttggagtttttgatgttttaacatttgataacagtcaaaataataatccattggcattaatggcccagtaccagcaagcagatctgatatcattaggaaaagttgtgttggctttggcttgcaactctttggcaggaattcagcgagagaatttacagaaagccatggaactggtgacaatcaactattcctctgacctgaagaatctgattttgtatttgttgactgaccaaaacaggatgcgaagtgtaaatgacatcatgcccatgattggtgctcgattttatactcaattggatgctgctcaaatgagaaatgatgtcatagaggaagaccttgcaaaggaggttcaaaatggaagactgtttaggctcctagcaaaattgggaacaatcaatgagaggccggagtttcagaaggatcccacttggtcagagactggagaccgttatctgttgaaactctttagggatcatctttttcatcaggtgacagaagcaggtgctccctggattgacctcagtcatataatttcttgtcttaacaagctagatgctggtgtgccagaaaaaataagcctgatttccagagatgagaagagtgtacttgtggtgacctacagtgacttaaagcgctgctttgaaaatacttttcaagaactgattgcagctgcaaatggtcagttgtagtatttgctaaaaaagca

SEQ ID NO: 2129 - DNA, 1855 bp, Homo sapiens
  source 1..1855: mol_type = genomic DNA
ctgtggcgcttcccctgcgaggatggctaccctggttgtaaacaagctcggagcgggagtagacagtggccggcagggcagccgggggacagctgtagtgaaggtgctagagtgtggagtttgtgaagatgtcttttctttgcaaggagacaaagttccccgtcttttgctttgtggccataccgtctgtcatgactgtctcactcgcctacctcttcatggaagagcaatccgttgcccatttgatcgacaagtaacagacctaggtgattcaggtgtctggggattgaaaaaaaattttgctttattggagcttttggaacgactgcagaatgggcctattggtcagtatggagctgcagaagaatccattgggatatctggagagagcatcattcgttgtgatgaagatgaagctcaccttgcctctgtatattgcactgtgtgtgcaactcatttgtgctctgagtgttctcaagttactcattctacaaagacattagcaaagcacaggcgagttcctctagctgataaacctcatgagaaaactatgtgctctcagcaccaggtgcatgccattgagtttgtttgcttggaagaaggttgtcaaactagcccactcatgtgctgtgtctgcaaagaatatggaaaacaccagggtcacaagcattcagtattggaaccagaagctaatcagatccgagcatcaattttagatatggctcactgcatacggaccttcacagaggaaatctcagattattccagaaaattagttggaattgtgcagcacattgaaggaggagaacaaatcgtggaagatggaattggaatggctcacacagaacatgtaccagggactgcagagaatgcccggtcatgtattcgagcttatttttatgatctacatgaaactctgtgtcgtcaagaagaaatggctctaagtgttgttgatgctcatgttcgtgaaaaattgatttggctcaggcagcaacaagaagatatgactattttgttgtcagaggtttctgcagcctgcctccactgtgaaaagactttgcagcaggatgattgtagagttgtcttggcaaaacaggaaattacaaggttactggaaacattgcagaaacagcagcagcagtttacagaagttgcagatcacattcagttggatgccagcatccctgtcacttttacaaaggataatcgagttcacattggaccaaaaatggaaattcgggtcgttacgttaggattggatggtgctggaaaaactactatcttgtttaagttaaaacaggatgaattcatgcagcccattccaacaattggttttaacgtggaaactgtagaatataaaaatctaaaattcactatttgggatgtaggtggaaaacacaaattaagaccattgtggaaacattattacctcaatactcaagctgttgtgtttgttgtagatagcagtcatagagacagaattagtgaagcacacagcgaacttgcaaagttgttaacggaaaaagaactccgagatgctctgctcctgatttttgctaacaaacaggatgttgctggagcactgtcagtagaagaaatcactgaactactcagtctccataaattatgctgtggccgtagctggtatattcagggctgtgatgctcgaagtgtttttcagataatatgtgaccaatatactgggaaagaggtagtcacagagaaagggtaaaaggtcatgctgttacaggtgtagtttgtgtgcataaataatacttccgaattaaattatttaatatttgactgatttcaataactgtgaaaaataaaaaaggtgttgtattgcttgtgagaa

SEQ ID NO: 2130 - DNA, 3360 bp, Homo sapiens
  source 1..3360: mol_type = genomic DNA
gactacccggcgtgcgcgtcctcctgccggcctgcaggcccggggcctccgcctgcttccccacagctgctccttgcggccccgcttgcgttcacgctgtcgcccgggccggcgcggccgcgggcaaccgctccccctcccacacctaccccgccccctccccgccttttccgccctccggtccccctccctcggcccgctgctgctgctccagatgaggtgatggcaacggccaacttcggcaagatccagatcgggatttacgtggagatcaagcgcagcgatggtaaatacgagttcacagtataccagcaaaagtaggatttacatattattttgaagattctgggtgcacagcaacacctgtccctggtatacacccaagggagaggaaatcaccaccttgtgaagatatctgcactctcgcgttcattgcagcattattcacagtagccaagatagggaagcaacctaaatgtccatcgatgggccgaatacatcaagcaatggtaacatctttaaatgaagataatgaaagtgtaactgttgaatggatagaaaatggagatacaaaaggcaaagagattgacctggagagcatcttttcacttaaccctgaccttgttcctgatgaagaaattgaacccagtccagaaacacctccacctccagcatcctcagccaaagtaaacaaaattgtaaagaatcgacggactgtagcttctattaagaatgaccctccttcaagagataatagagtggttggttcagcacgtgcacggcccagtcaatttcctgaacagtcttcctctgcacaacagaatggtagtgtttcagatatatctccagttcaagctgcaaaaaaggaatttggacccccttcacgtagaaaatctaattgtgtgaaagaagtagaaaaactgcaagaaaaacgagagaaaaggagattgcaacagcaagaacttagagaaaaaagagcccaggacgttgatgctacaaacccaaattatgaaattatgtgtatgatcagagactttagaggaagtttggattatagaccattaacaacagcagatcctattgatgaacataggatatgtgtgtgtgtaagaaaacgaccactcaataaaaaagaaactcaaatgaaagatcttgatgtaatcacaattcctagtaaagatgttgtgatggtacatgaaccaaaacaaaaagtagatttaacaaggtacctagaaaaccaaacatttcgttttgattatgcctttgatgactcagctcctaatgaaatggtttacaggtttactgctagaccactagtggaaactatatttgaaaggggaatggctacatgctttgcttatgggcagactggaagtggaaaaactcatactatgggtggtgacttttcaggaaagaaccaagattgttctaaaggaatttatgcattagcagctcgagatgtctttttaatgctaaagaagccaaactataagaagctagaacttcaagtatatgcaaccttctttgaaatttatagtggaaaggtgtttgacttgctaaacaggaaaacaaaattaagagttctagaagatggaaaacagcaggttcaagtggtgggattacaggaacgggaggtcaaatgtgttgaagatgtactgaaactcattgacataggcaacagttgcagaacatccggtcaaacatctgcaaatgcacattcatctcggagccatgcagtgtttcagattattcttagaaggaaaggaaaactacatggcaaattttctctcattgatttggctggaaatgaaagaggagctgatacttccagtgcggacaggcaaactaggcttgaaggtgctgaaattaataaaagccttttagcactcaaggagtgcatcagagccttaggtagaaataaacctcatactcctttccgtgcaagtaaactcactcaggtgttaagagattctttcataggtgaaaactctcgtacctgcatgattgccacaatctctccaggaatggcatcctgtgaaaatactcttaatacattaagatatgcaaatagggtcaaagaattgactgtagatccaactgctgctggtgatgttcgtccaataatgcaccatccaccaaaccagattgatgacttagagacacagtggggtgtggggagttcccctcagagagatgatctaaaacttctttgtgaacaaaatgaagaagaagtctctccacagttgtttactttccacgaagctgtttcacaaatggtagaaatggaagaacaagttgtagaagatcacagggcagtgttccaggaatctattcggtggttagaagatgaaaaggccctcttagagatgactgaagaagtagattatgatgtcgattcatatgctacacaacttgaagctattcttgagcaaaaaatagacattttaactgaactgcgggataaagtgaaatctttccgtgcagctctacaagaggaggaacaagccagcaagcaaatcaacccgaagagaccccgtgccctttaaaccggcatttgctgctaaaggatacccagaaccctcactactgtaacatacaacggttcagctgtaagggccatttgaaagtttggaattttaagtgtctgtggaaaatgttttgtccttcacctgaattacatttcaattttgtgaaacactcttttgtctacaaaatgcttctagtccaggaggcacaaccaagaactgggattaatgaagcattttgtttcatttacacaaatagtgatttacttttggagatccttgtcagttttattttctatttgatgaagtaagactgtggactcaatccagagccagatagtagggggaagccacagcatttccttttaactcagttcaatttttgtagtgagactgagcagttttaaatcctttgcgtgcatgcatacctcatcagtgattgtacataccttgcccactcctagagacagctgtgctcaccttttcctgctttgtgccttgattaaggctactgaccctaaatttctgaagcacagccaagaaaaattacattccttgtcattgtaaattacctttgtgtgtacatttttactgtatttgagacattttttgtgtgtgactagttaattttgcaggatgtgccatatcattgaacggaactaaagtctgtgacagtggatatagctgctggaccattccatcttatatgtaaagaaatctggaattattattttaaaaccatataacatgtgattataatttttcttagcattttctttgtaaagaactacaatataaactagttggtgtataataaaaagtaatgaaattctga

SEQ ID NO: 2131 - DNA, 2505 bp, Homo sapiens
  source 1..2505: mol_type = genomic DNA
ctcgccgagatgacctgggcacctctgcgttgaatcggcaaatactgatcaagccgcatttattctgctctcaggaactctaagtctagcagagaagatgaggcggtagaagttcatcaatggcttggctggaggacaagcaaattgaggacattggcaacggagtgatcaaaatgatagatcatgaggcctaaaatgaataaggaaagaagagaagtggcagaggctgagaacagaaagagagggtggaggggctgtaaatcttgaagattagggtataatatgagtatatgggtaagaattggaagaattgtgtaggaggcagtagtcaaaaagtagaagcagtttggaagagtagttacaaatatcaagagccaggtggctaaaaggtggagctataggtcattgaagctcaagaaactgagtctctagggcattggttaagtcatctgtctagacttcaaagttgtctaggatgataattcagaagactgatctgtgccaaagtcacaggtttttcacgactgaaaacaacatagcaaaataagccaagatgtctgtggatccaatgacctacgaggcccagttctttggcttcacgccacaaacgtgcatgcttcggatctacattgcatttcaagactacctatttgaagtgatgcaggccgttgaacaggttattctgaagaagctggatggcatcccagactgtgacattagcccagtgcagattcgcaaatgcacagagaagtttctttgcttcatgaaaggacattttgataacctttttagcaaaatggagcaactgtttttgcagctgattttacgtattccctcaaacatcttgcttcctgaagataaatgtaaggagacaccttatagtgaggaagattttcagcatctccagaaagaaattgaacagttacaggagaagtacaagactgaattatgtactaagcaggcccttcttgcagaattagaagagcaaaaaattgttcaggccaaactcaaacagacgttgactttctttgatgagcttcataatgttggcagagatcatgggactagtgattttagggagagtttagtatccctggttcagaactccagaaaactacagaacattagagacaatgtggaaaaggaatcgaaacgactgaaaatatcttaattgctcagtagtcaaaaggaggagcctgtcaaaaagtagaatcataaggactgttcaaaccataaggactgttcaaatcataccagtgactgttcaaaccaaccatactttttattagatttgctttgtcaactctttcttgtattctgtgttttcctcttttttggtccactttgctgaggtatgaagtgtactactttgaactaggctgaagcatctgagtcttctaataagtgggaagggatccaacaaagaagccatgaccagttaaagatatttgcagagttacaccttggtcataagtcctttgtgaccttgattattttggcttactctttggatgagaccagacaagaaaaggattaaacgggtggctcctttaatattattattattgtttttgagacaaggtccctttctgtcacccaggttagagtagatttcagtggcacaatcttggctcactgcaacctctgtgtcctgggctcaagtgatcctcctgcctcagcctcccaagtagctaggaccacaggtgcgtgtcaccatgcttggctaatttttttgcagaaacgaggcctcactatattgtccaggctgagtggctcttttattaaccagtcattacactgcggaacagccaacatagagtacttgctctcgtcctgtgaattttctttcatgagggagtcaatatgtagtggaaagaagcatgtagcaaaaaagacaaccttgatctttaataaaaaagaagttggtttatttccaaaataaatcccctgacaaaaaacctggtgatgttaagcaattgactgtcttagagtccagcagaagaccttagacaaaaaaagcagaacccactggagtagaaaaggaagcatgtagcatatactcagtagtgaaatttaattttactgactgttaggtatctatgccaatttgttttcatacttcagttggttttggaatctgccttatacctaatatttatttattcacactcataagcatcaaatatttaatgccctcagtgggaaatttgtgtttaaactcaatggaatctaatatttctttatgtcgttagtccctgtaaaatgttaggtcacccaaggaaaggggagaaatagcaatggttgttcctaaggtattgcttgccctccatgtcttcctaaagagcagaacttggagtttctcctttatgtagagaagaagtaacttagggtgtatttgcaatgaaatattcatagatattgaaagcttgtgtttacatgaaatatgtttattatcaagaagtcctttttccaattctgtacattaaatatatgtgttttaaaggg

SEQ ID NO: 2132 - DNA, 2027 bp, Homo sapiens
  source 1..2027: mol_type = genomic DNA
aagtgcggacgcccggctcccggcgtggacgccatggtgctgtgcccggtgattgggaagctgctgcacaagcgcgtggtgctggccagcgcctccccacgccgtcaggagatcctcagcaacgcgggtctcaggtttgaggtggtcccctccaagtttaaagagaagctggacaaagcctccttcgctactccgtatgggtacgccatggagaccgccaagcagaaggccctggaggtggccaaccggctgtaccagaaagacctgcgggcccccgacgtggtcattggagcggacacgatcgtgacagtcggggggctgattctggagaagccggtggacaagcaggacgcctacaggatgctgtcccggttgagtgggagagaacacagcgtgttcacaggtgtcgcgatcgtccactgctccagcaaagaccatcagctggacaccagggtctcggaattctacgaggaaacgaaggtgaagttctcggagctgtccgaggagctgctctgggaatacgtccacagcggggagcccatggacaaagctggcggctacgggatccaggccctgggcggcatgctggtggagtccgtacacggggactttctgaacgtggtgggattcccgctgaaccacttctgcaagcagctggtgaagctctactacccgccccgtccggaggacctgcggcggagtgtcaagcacgactccatcccggccgcggacaccttcgaagacctcagtgacgtggaggggggcggctcggagcccactcagagggacgcgggcagccgcgatgagaaggccgaggcgggagaggcgggacaggccacggcagaggctgagtgtcacaggactcgggagaccctgcctccgttcccgacacgcctcctggagctgattgagggctttatgctatccaagggcctgctcaccgcttgcaaactgaaggtgttcgatttgttaaaagatgaagcaccccagaaggctgcggatattgccagcaaagtggacgcctctgcgtgtggaatggagaggcttctggacatctgtgctgccatggggctcctggagaagacagagcaaggttacagtaacacagagacagcgaacgtctacctggcatcggatggcgaatactctctgcacggcttcatcatgcacaataatgacctcacatggaacctctttacatacctggagtttgccatccgagagggaacaaaccagcaccacagggcgttggggaagaaggcggaagatctgttccaggatgcgtactaccagagcccggagacgcggctgaggttcatgcgggccatgcacggcatgacgaagctgactgcgtgccaggtggccacggccttcaatctgtcccgcttctcctccgcctgcgacgtgggaggctgcacgggtgcactggcccgagagctggcccgtgagtaccctcgtatgcaggtgactgtgtttgacctcccagacattatcgagctggccgcccacttccaaccccccggaccgcaggcagtgcagatccacttcgcagcaggtgactttttcagggaccccctccccagcgctgagctgtacgtcctgtgccggatcctgcatgactggccagacgacaaagtccacaagttactcagcagggtcgccgagagctgcaagccaggggccggcctgctgctggtggagacgctcctggatgaggagaagagggtggcgcagcgcgccctgatgcagtcactgaacatgctggtgcagactgaaggcaaggagcggagcctgggcgagtatcagtgcttgctggagctgcacggcttccaccaggtgcaggtggtgcacttggggggtgtcctggatgccatcttggccaccaaagtggccccctgaagcccaggcagcatgttcattatagggatgtcctcccccaggctgcaggtggaccgcccggtccccaagtaccataggacagtcacataggagcgtgtagtcgtgactgaataaagaaagcaaaagcc

SEQ ID NO: 2133 - DNA, 4059 bp, Homo sapiens
  source 1..4059: mol_type = genomic DNA
gtctgactccagcgaccgcgcgcgggttcgagggttggcggcgaggcgctcggtttctcttcttccgtccacccgcgcttcccgttccccgtcaccgccgctggcgtttgtagatttctttccgccagtgaagctgggttttctggagttggctctggcgctctggcccctggagtgtaatttcctacacgcagcgccgcagagtttatattctttgaaagtgtttgtagctttgtagaggtcctcttgttgatggtaggtgagcctaattctgcaagataaaagcctagtctctgacctggcagatgaaagatcaaatcagattgtggtttcctgctattagaatgccgtgctattagactttaaggctttttagccttctttaaaaaataaaaaaatttttacagtggaagaaaagcacaagaagtaaacttttacagtcgttgatttgactataacgctgatccccccaaatcaaagaatttttacttgttcctgcaaagctgctggagctcagaagctgattctatcacattgtaagatgcctttggataattctacagtcctcttaaatgaatctttagaacttggcaagtctcactagataccttcaatcatcattttgagctcaaagaattctgagacttatggttggtcatatagaagagtaccttgaacctatagtttcctgaagaatcagtttaaaagatccaaggagtacaaaaggcagttattggaggaattactcaacaaaaataaagaagtaaactaaaaaagatgaaggcataggatacaagtaacagggaatatgacctaactagagacccagggaatcaccaggatgatgatgaataatgatcacaagaagacagcttgtcctcaggagaagtacaaatgtctactacaagacgaaaacgtagtatgttatgttgtttaccgtaagctgtagtaaaatgagctcgattgttgacagagatgacagtagtatttttgatgggttggtggaagaagatgacaaggacaaagcgaaaagagtatctagaaacaaatctgaaaagaaacgtagagatcaatttaatgttctcattaaagaactgggatccatgcttcctggtaatgctagaaagatggacaaatctactgttctgcagaaaagcattgattttttacgaaaacataaagaaatcactgcacagtcagatgctagtgaaattcgacaggactggaaacctacattccttagtaatgaagagtttacacaattaatgttagaggctcttgatggtttttttttagcaatcatgacagatggaagcataatatatgtgtctgagagtgtaacttcattacttgaacatttaccatctgatcttgtggatcaaagtatatttaattttatcccagaaggggaacattcagaggtttataaaatactctctactcatctgctggaaagtgattcattaaccccagaatatttaaaatcaaaaaatcagttagaattctgttgtcacatgctgcgaggaacaatagacccaaaggagccatctacctatgaatatgtaaaatttataggaaatttcaaatctttaaacagtgtatcctcttcagcacacaatggttttgaaggaactatacaacgcacacataggccatcttatgaagatagagtttgttttgtagctactgtcaggttagctacacctcagttcatcaaggaaatgtgcactgttgaagaacccaatgaagagtttacatctagacatagtttagaatggaagtttctgtttctagatcacagggcaccacccataatagggtatttgccatttgaagttctgggaacatcaggctatgattactatcatgtggatgacctagaaaatttggcaaaatgtcatgagcacttaatgcaatatgggaaaggcaaatcatgttattataggttcctgactaaggggcaacagtggatttggcttcagactcattattatatcacttaccatcagtggaattcaaggccagagtttattgtttgtactcacactgtagtaagttatgcagaagttagggctgaaagacgacgagaacttggcattgaagagtctcttcctgagacagctgctgacaaaagccaagattctgggtcagataatcgtataaacacagtcagtctcaaggaagcattggaaaggtttgatcacagcccaaccccttctgcctcttctcggagttcaagaaaatcatctcacacggccgtctcagacccttcctcaacaccaaccaagatcccgacggatacgagcactccacccaggcagcatttaccagctcatgagaagatggtgcaaagaaggtcatcatttagtagtcagtccataaattcccagtctgttggttcatcattaacacagccagtgatgtctcaagctacaaatttaccaattccacaaggcatgtcccagtttcagttttcagctcaattaggagccatgcaacatctgaaagaccaattggaacaacggacacgcatgatagaagcaaatattcatcggcaacaagaagaactaagaaaaattcaagaacaacttcagatggtccatggtcaggggctgcagatgtttttgcaacaatcaaatcctgggttgaattttggttccgttcaactttcttctggaaattcatctaatatccagcaacttgcacctataaatatgcaaggccaagttgttcctactaaccagattcaaagtggaatgaatactggacacattggcacaactcagcacatgatacaacaacagactttacagagtacatcaactcagagtcaacaaaatgtactgagtgggcacagtcagcaaacatctctacccagtcagacacagagcactcttacagccccactgtataacactatggtgatttctcagcctgcagccggaagcatggtccagattccatctagtatgccacaaaacagcacccagagtgctgcagtaactacattcactcaggacaggcagataagattttctcaaggtcaacaacttgtgaccaaattagtgactgctcctgtagcttgtggggcagtcatggtacctagtactatgcttatgggccaggtggtgactgcatatcctacttttgctacacaacagcaacagtcacagacattgtcagtaacgcagcagcagcagcagcagagctcccaggagcagcagctcacttcagttcagcaaccatctcaggctcagctgacccagccaccgcaacaatttttacagacttctaggttgctccatgggaatccctcaactcaactcattctctctgctgcatttcctctacaacagagcaccttccctcagtcacatcaccagcaacatcagtctcagcaacagcagcaactcagccggcacaggactgacagcttgcccgacccttccaaggttcaaccacagtagcacacgtgcttcctctcttgacatcaagggaggaaggggatggcccattaagagttactcagatgacctgaggaaaggagggaaagttccagcagtttcatgagatgcagtattgagtgttctagttcctggaattagttggcagagaaaatgctgcctagtgctacagatgtacattaaataccagccagcaggaggtgatcataggggcatagccagttctgacagtgttttaggtgcctggatattttttgatggaaaaagaatatattgccaaatattaagaagctcagctatgaaatgacctccagggaatcagaaaggcactaatgatgttagtaacttttagtggttctgtgcctcttatcaagtgttacagaggacataccactgccatgtcaggggtttgcttacagtgatgccatgaagacagtccagtagacttggtagcgaccccctcccccaacccctctcccttttcagataatgatggaacagtaattactttcagaatgttgtgtgggttcaaattctctatgtacagatgatgtaaaaatatgtatatgtctagataaaaggagagaaagcaaaa

SEQ ID NO: 2134 - DNA, 2035 bp, Homo sapiens
  source 1..2035: mol_type = genomic DNA
ctggccgcctgttttttttgcagccgcgctgcgcgcaccgcgggctccgggctcagaagtgcggacgcccggctcccggcgtggacgccatggtgctgtgcccggtgattgggaagctgctgcacaagcgcgtggtgctggccagcgcctccccacgccgtcaggagatcctcagcaacgcgggtctcaggtttgaggtggtcccctccaagtttaaagagaagctggacaaagcctccttcgctactccgtatgggtacgccatggagaccgccaagcagaaggccctggaggtggccaaccggctgtaccagacagtcggggggctgattctggagaagccggtggacaagcaggacgcctacaggatgctgtcccggttgagtgggagagaacacagcgtgttcacaggtgtcgcgatcgtccactgctccagcaaagaccatcagctggacaccagggtctcggaattctacgaggaaacgaaggtgaagttctcggagctgtccgaggagctgctctgggaatacgtccacagcggggagcccatggacaaagctggcggctacgggatccaggccctgggcggcatgctggtggagtccgtacacggggactttctgaacgtggtgggattcccgctgaaccacttctgcaagcagctggtgaagctctactacccgccccgtccggaggacctgcggcggagtgtcaagcacgactccatcccggccgcggacaccttcgaagacctcagtgacgtggaggggggcggctcggagcccactcagagggacgcgggcagccgcgatgagaaggccgaggcgggagaggcgggacaggccacggcagaggctgagtgtcacaggactcgggagaccctgcctccgttcccgacacgcctcctggagctgattgagggctttatgctatccaagggcctgctcaccgcttgcaaactgaaggtgttcgatttgttaaaagatgaagcaccccagaaggctgcggatattgccagcaaagtggacgcctctgcgtgtggaatggagaggcttctggacatctgtgctgccatggggctcctggagaagacagagcaaggttacagtaacacagagacagcgaacgtctacctggcatcggatggcgaatactctctgcacggcttcatcatgcacaataatgacctcacatggaacctctttacatacctggagtttgccatccgagagggaacaaaccagcaccacagggcgttggggaagaaggcggaagatctgttccaggatgcgtactaccagagcccggagacgcggctgaggttcatgcgggccatgcacggcatgacgaagctgactgcgtgccaggtggccacggccttcaatctgtcccgcttctcctccgcctgcgacgtgggaggctgcacgggtgcactggcccgagagctggcccgtgagtaccctcgtatgcaggtgactgtgtttgacctcccagacattatcgagctggccgcccacttccaaccccccggaccgcaggcagtgcagatccacttcgcagcaggtgactttttcagggaccccctccccagcgctgagctgtacgtcctgtgccggatcctgcatgactggccagacgacaaagtccacaagttactcagcagggtcgccgagagctgcaagccaggggccggcctgctgctggtggagacgctcctggatgaggagaagagggtggcgcagcgcgccctgatgcagtcactgaacatgctggtgcagactgaaggcaaggagcggagcctgggcgagtatcagtgcttgctggagctgcacggcttccaccaggtgcaggtggtgcacttggggggtgtcctggatgccatcttggccaccaaagtggccccctgaagcccaggcagcatgttcattatagggatgtcctcccccaggctgcaggtggaccgcccggtccccaagtaccataggacagtcacataggagcgtgtagtcgtgactgaataaagaaagcaaaagcc

SEQ ID NO: 2135 - DNA, 1154 bp, Homo sapiens
  source 1..1154: mol_type = genomic DNA
aactccagggctagtgagctggaccggaagtaggtttctacccgaccgcattttacgtggtgctgcatttccggtagcggcggcgggaaatcggctgtgggagagaggctaggcctctgaggaggcgaatccggcgggtatcagagccatcagaaccgccaccatgacggtgggcaagagcagcaagatgctgcagcatattgattacaggatgaggtgcatcctgcaggacggccggatcttcattggcaccttcaaggcttttgacaagcacatgaatttgatcctctgtgactgtgatgagttcagaaagatcaagccaaagaactccaaacaagcagaaagggaagagaagcgagtcctcggtctggtgctgctgcgaggggagaatctggtctcaatgacagtagagggacctcctcccaaagatactggtattgctcgagttccacttgctggagctgccgggggcccagggatcggcagggctgctggcagaggaatcccagctggggttcccatgccccaggctcctgcaggacttgctgggccagtccgtggggttggcgggccatcccaacaggtgatgaccccacaaggaagaggtactgttgcagccgctgcagctgctgccacagccagtattgccggggctccaacccagtacccacctggccgtgggggtcctcccccacctatgggccgaggagcaccccctccaggcatgatgggcccacctcctggtatgagacctcctatgggtcccccaatggggatcccccctggaagagggactccaatgggcatgccccctccgggaatgcggcctcctccccctgggatgcgaggccttctttgacccttggccacagagtatggaagtagctccgcagaggcgtgggctcgattcctcagggccacgttaccacagacctgtttgtttcttatgctgttgttcgtggagtctcatgggattgtctggtttcccttacagggccccctcccccgggaatgcgcccaccaaggccctagactcatcttggccctcctcagctccctgcctgtttcccgtaaggctgtacatagtccttttatctccttgtggcctatgaaactggtttataataaactcttaagagaacattataattgca

SEQ ID NO: 2136 - DNA, 2301 bp, Homo sapiens
  source 1..2301: mol_type = genomic DNA
gggtggggcgtgttgacccccttaaaggcgccagagcccgcggtcacggctcaggttcccggtgcttcgcgcgtctgccgttgtcacaggccagggaggtggcaccaccaggcgaagcttggcgagattgtgtcgtcaagcgcgtacgggcgccaattggccgggcgatgtggcgtggactggcgctggcgcgagcgattggctgcgcggcccgggggcggggccagtgggcggtgcgcgccgcagactgtgctcaaagcgggcgccatccgggaccggcggttgtctgtggccggaggctgatcagtgttctagaacagatcagacattttgtaatgatgcctgaaataaacactaaccacctcgacaagcaacaggttcaactcctggcagagatgtgtatccttattgatgaaaatgacaataaaattggagctgagaccaagaagaattgtcacctgaacgagaacattgagaaaggattattgcatcgagcttttagtgtcttcttattcaacaccgaaaataagcttctgctacagcaaagatcagatgctaagattacctttccaggttgttttacgaatacgtgttgtagtcatccattaagcaatccagccgagcttgaggaaagtgacgcccttggagtgaggcgagcagcacagagacggctgaaagctgagctaggaattcccttggaagaggttcctccagaagaaattaattatttaacacgaattcactacaaagctcagtctgatggtatctggggtgaacatgaaattgattacattttgttggtgaggaagaatgtaactttgaatccagatcccaatgagattaaaagctattgttatgtgtcaaaggaagaactaaaagaacttctgaaaaaagcagccagtggtgaaattaagataacgccatggtttaaaattattgcagcgacttttctctttaaatggtgggataacttaaatcatttgaatcagtttgttgaccatgagaaaatatacagaatgtgaatatgtaggtaaatgattacagaaaaatttatctgcttaacaaacttagaatgactttttccttttaaatttagttctatcattaatttatcattaaatttagttctatcatttggtactatcattaatgtattatatacactgatactttaaaacttgtgtggaaaaaactaacttataattttgtatcacacaccctggatatgtgttctgtttctaagcgacatttgtgagagattattgtaaaatgagagcgagcaaataaaacttaatttaatctttgcagatacatacttatgggaaatttgaacaaatgagtgaaactctgtttttagtaggctgtgataaacatttccggagcacttgcagaggacttgctatttgccaggtgctttatgtatcattaaatttttctcatagttcagaaaaatgtgcaaaggaaactattgtctcgctccttcaaaacagtcttaattaactttcatattagcagattaaactagcagagcaggttcaagggaaattaaatgatatggaccctaatttgtatcattctgagttgattgtgtggtttattcattctggaaacatgttgatacttacagtcagccactgcttttgataagtgatattgattaggttgaatcttcttgtaaatagtatttaccagttagcaaagtctgtgttttcagaattacagtgagcacagaggtgttcataaaatgggaattgagtcccactcggtaagagttgcttaaacttgacactgttgacatttgggctggataaaacccctgtggtggggtctgtgctgtgcattgcaggatggtgagcagcgtccctctcatgtgacacccacagttatgccggatgttgccagatgcccctaggggacagagtcaacccccaactgaggaccactgtcctacagagtcaggaaatattgtagggagaaaaaaataacaacaacaaaggcctgtgttaatgttaaatagatgagattatggaatgtgtatattaatgttaaaaattgtaccttgatcaatgtactttttataaacttgccatagatatctcagatttgaaacctcaagacagatttattattcttaaatgctgtatgataatgaagaaaaataaaaatttatttcttgcaaagttaaatgtttgttaaattcaatagaatgactcatttatggttaactttgggcaatttataatttcagacaagactgtttagcaagtattttattgaaaagtaaaaaaaattgcaatttaa

SEQ ID NO: 2137 - DNA, 1931 bp, Homo sapiens
  source 1..1931: mol_type = genomic DNA
ggccaaccgcccggacctcggcgctttcttctaggatccgcatgaatcgctttgggctatcggaagagctatccccagttctcgggagaaagagtccgcgaccagcgtctgacctctcactcagagtccccagtcctgccttagtttccccagcgaccctgaatttggagttgctgtctctaagtgaaagctgaacctgcaaccccttgagggtttcagccgcagaggggcgggagaaagggcctggttggtaggcgggctcagcggttcgcgcccagttagccccgagcttcggagacccgagagaccagaggatggctgacacgaaggggcacccgagacagcgcctgggctttttcccgcccgcggttccaccgctctgaaaccgatttctaacagagagagacatagtcttgctctgttacccatgctggagtacggtggcgagatcacgactcactacaactttgaattcctggattcaagcaatcctcccatctcagcctcctgagtagctaaggactacagggcgactttgtcagtaccccaaactgtccccgcatgaggtcactctgcacggtcacgtgctcgagcccgcgggagcgccacatcgccagccgcacccctccacccccaacctgcccacgtgacccggcctagtttctccaggcccgtccctacgtctcactcgggaagccccgccccacgctgagcgctccgcctgcgaccctccgccacttacccaccccggctcaagcacgacccgtggatccacgtgctttttcttgtccaatgggagccggctcccgggcgcgaaggggcggggaggaaaggaacgactgtgctacgttgccagaaggggcgggacctgcaacgtccgacagaacgaggggacgtaacggaggcaggttggagccgctgccgtcgccatgacccgcggtaaccagcgtgagctcgcccgccagaagaatatgaaaaagcagagcgactcggttaagggaaagcgccgagatgacgggctttctgctgccgcccgcaagcagagggactcggagatcatgcagcagaagcagaaaaaggcaaacgagaagaaggaggaacccaagtagctttgtggcttcgtgtccaaccctcttgcccttcgcctgtgtgcctggagccagtcccaccacgctcgcgtttcctcctgtagtgctcacaggtcccagcaccgatggcattccctttgccctgagtctgcagcgggtcccttttgtgcttccttcccctcaggtagcctctctccccctgggccactcccgggggtgagggggttaccccttcccagtgttttttattcctgtggggctcaccccaaagtattaaaagtagctttgtaattccttgagcgcctggtttgactggggacttggggggatggggttggaagaatgactgccctttcccaccaaaaaagggagaactctttagattcagattgtgggtatgtagacttaataagtgaaacatcacagaagaagcctttattatacaatgacaaccaaacaagtactccggatatgcagtagaggaatcctctaagaaccatagagacttcttttctgtgatttttgttccccacccttgaacaccatctctaggatggagttggcctaagagtgaatgctgcaagatctgtgtttatgcctcttttcctcattcttcctcagtttgttcgtctgcttgaaagttggccaaaaaatcctgctgctcaccgacttcccgtggtcagctgctgtcaagcgttcactttctcttctgtcattcctcatggaatgagggtggttttgtcttcccgcttcccttgacctcaaaatcaggattaaaacctggggtagcctctgtgctcctttcttctatgccctggtttgttctgtggttctgggcttctt

SEQ ID NO: 2138 - DNA, 5404 bp, Homo sapiens
  source 1..5404: mol_type = genomic DNA
ggagtcggggtggcagcggcggcggttgccaggagcccgcgttgcagcctgagatccgtaatatggcggggaggaggaggagaaggcggcggcggaccgagctgcgctctgtcagtaccatttgagccattcgcttcctgacaaggcccgtggcgaggggagaggagctgaaggggccgtgggggatcagtgtgactgtgggaagatggaggagtatgagaagttctgtgaaaaaagtcttgccagaatacaagaagcatcactatccacagagagctttctccctgctcagtctgaaagtatctcacttattcgctttcatggagtggctatcctttctccactgcttaacattgagaaaagaaaggaaatgcaacaagaaaagcagaaagcacttgatgtagaagcaagaaagcaggttaacaggaagaaagctttactgactcgtgtccaggagattcttgacaatgttcaggttagaaaagcacctaatgccagtgattttgatcagtgggagatggaaacagtttactctaattcagaagtcagaaacttgaatgttcctgctacatttccaaatagctttccaagccatacggaacactctactgcagcaaagcttgataagatagctgggattttgccattggataatgaggaccaatgtaaaactgatggaatagacttagctagagattcagaaggatttaattctccgaagcaatgtgatagttccaatattagtcatgtagaaaatgaagcttttccaaagacctcttcagcaaccccacaagaaactcttatttctgatggtcccttctcagtaaatgaacaacaggatctaccacttttggcagaagtcatcccagatccctatgtaatgagtcttcagaatctgatgaaaaagtcaaaggaatatatagaaagagaacaatctagacgcagtctgagaggtagtatcaacagaattgttaatgagagtcatttagacaaagaacatgatgctgttgaagtggctgactgtgtaaaagagaaaggccagttgacaggcaaacactgtgtctcagttattcctgacaaaccaagccttaataaatcaaatgttcttctccaaggtgcttccactcaagcaagcagcatgagtatgccagttttagctagcttttcgaaagtggacatacctatacgaactggccatcccactgttctagagtctaattctgattttaaagttattcccacttttgttaccgaaaataatgttatcaaaagtcttacaggttcatatgccaaattacctagtccagagccaagtatgagtcctaaaatgcaccgaagacgttccaggacatcatcagcgtgtcatatacttataaataacccaataaatgcctgtgaattaagccctaaaggaaaagaacaggcaatggacttaattattcaagatactgatgaaaacacaaatgtgcccgaaattatgccaaagttaccaactgatttagcgggagtttgttcaagcaaggtttatgtgggcaaaaatacatctgaagtcaaagaagatgtggttttaggtaaatcaaatcaggtatgtcaatcttcaggaaatcatttagaaaataaagttactcatggacttgttactgtggaaggtcagttaacatccgatgagagaggcgcacacataatgaacagtacctgtgctgcgatgccaaagctgcatgaaccatatgccagcagtcagtgtatagcaagtccaaactttggaactgtgagtggactcaagccagccagtatgttagagaaaaactgcagtttgcaaacagaactgaataagtcttatgatgtaaaaaacccttctcctttattgatgcaaaaccagaatacgagacagcagatggacacacctatggtgtcctgtggaaatgaacaatttttggataacagttttgagaaagttaaacggagacttgatttagatattgatggtttgcaaaaagaaaactgcccttatgtcataacaagtggaataactgaacaagaaaggcaacatttgccagaaaaaagataccctaagggatctggcttcgttaacaagaataaaatgttaggaactagttccaaagaaagcgaggagttactaaaaagcaagatgttagcttttgaagaaatgcggaagagactagaagaacagcacgcccagcaattatcactactcatagctgagcaggaaagggaacaagaaagactgcaaaaggaaatagaagagcaggagaaaatgttaaaagagaagaaggcaatgacagcggaagcctctgagttggacattaacaatgcagtggaattagaatggagaaaaataagtgactctagtttgctggaaacaatgctgtctcaagcggactcactccatacttcaaattcaaatagttctggtttcacaaattctgccatgcaatatagctttgtttctgcaaacgaagcaccattctacctctggggatcatcaactagtggcttgaccaaactctcagtaacaaggccttttggaagagccaaaactagatggtctcaagtttttagtctggaaatacaagcaaaatttaacaaaataactgcagtggcaaaaggatttcttactcgtagacttatgcagacagataagctgaagcaacttcgacaaactgtaaaagatactatggaattcataagaagttttcagtcagaagcaccattaaagagaggcattgtttcagctcaagatgcttcacttcaggaaagagtgttagctcagttgcgagctgccttgtacggtattcatgacatattctttgtaatggatgcagctgaaagaatgtctattctacatcatgatcgagaagttcgcaaagagaaaatgctcaggcaaatggataaaatgaaaagtccacgagtggctctttcagctgcaacacagaagtctcttgataggaagaaatacatgaaagctgctgaaatgggaatgccaaataagaaatttctggttaaacaaaatccttctgaaacaagagtccttcagccaaaccaaggacagaatgcacctgttcataggctacttagtagacaaggaacccctaagacatcagtgaagggggttgtgcaaaatagacagaagccttcacagagcagagtgcctaacagagtgcctgtttcaggagtatatgcaggaaaaatccaaagaaagcggccaaatgttgcgacaatttaagaagacaacattcattaggataaaatggggggaaggattattattcatgttattttccctgcccaagactttatttaaccctggactccgtttacacagacaaagtgacatcagaaggctgagcacttatctggatcatttggtcagtttggtaattcctgctccacacccctattttcctcttaataatacgtttgggtgaagacaaattagtgtttagtaattgcatcatctctgtgcttacctatacaaacataagtttattttatatgcccagatgtctacagagaccctttttgtaaatgtcaaggacatttggatttacttttacagaatattgaaaagataagacaaattataaataagttctaaaacataaatttaattcatctctgcatagtgatttttgaatttgattcaaagggaaattattgcagaagaatgcctttccctcattttataactttaaaaacttggattaaccactcaatgtccactttctttgacttacagtataaccatgtagccaattgtggcccactaaaatctacagaagttaatgtgggtcaccattttggtcagaagcatacattcctgtcagacaactagttgtctgacagaaatgttaggcttcatgtatgttaccccagtactgttagaaacatttgtactaggttataagatctttctgtgacaggtaacaaatttggggaagacagcacaatcttcttgaatgtagctcttgggaatgcattattacatccatttctgtaacataataatatgttgcatgcagttatattttctatttagtctgtatattttgttcttcatagtctgttttttctagcatgcttgatttaggagagaataaagggctatataataataaatccagatttccggataagaatattgcctggttaaaattctgcattgcttaaagacacccatgtttaagatttttcatcactaacatatccattaaaagtatcaactggccaggcagggtggctcacgcctgtactcccagcattttgtgaggccaaggtgggtggatcacctgaggtcaggagtttgagaccagcctgaccaaacatggcgaaaccccatctgtactgaaaatacaaaaattaggcatggtggtgcatgcctgtagttccagctacttgggaggctgagacaggcgaattgcttgaacctgggaggcagaggttgcagtgagctgagactgtgccattgcactccagtcgggttaacagagcaagacactgtctcaaaaaaaaaaaaaaaaaaaagtatcaaccaacaaatgttaccaagataacgtgacttcatgagggagaatgtcactattaatttatcataccatttccaaaaagggctttgtgcttttcacataaaattgagacagtgtatatttaatctaatttaaattttaaagagatactggtattttgaaaatgcaacctatatatattcttaatatccttttaagaatatggagatgaagattgttttctccaattttctgtgccattttaaatttaactttgacatccagctatagacagaaataataagccaccctgggtgtaaacttgattttctttattgagatgtatcatgtattgaatgagtgaaccagaaaattagaagatggtcaaaaaaagtccaagttaccaattttttaaaatttataggcaaagtatcaaattgtcttcttaatatgataaactgtgctttatcattctgaaaactcaggatacagcttattcatagcattgtgggtctctccagtaagaaagatgctaaaagttttgtgcactttttgtgtgtgtaatgcaaattagttaaaacaaatagttttggagaaagttaaaactagctttagagtaaggatgagaaacttgagtgtttttaatttaaagataaaagcctgtgttttacacattcttttttggtgttcatagcttcttctcatacaggtgccagacactgtttgtgcttttgatggatttttatttatatactttttttgcttatttttactttgagtggaatgttcattaatgtaaattgtatttatttttatacttttattttcactagttttgcttctaggcaaaaagcaaaataaacttttcatcttaaagaaaa

SEQ ID NO: 2139 - DNA, 611 bp, Homo sapiens
  source 1..611: mol_type = genomic DNA
cgggaagctggagcgggccggcggtgcagtcacgggggagcgaggcctgctgggcttggcaacgagggactcggcctcggaggcgacccagaccacacagtgattctcttctaccttccttagacactgggtcaaggagtaagcagaggataaacaactggaaggagagcaagcacaaagtcatcatggcttcagcgtctgctcgtggaaaccaagataaagatgcccattttccaccaccaagcaagcagagcctgttgttttgtccaaaatcaaaactgcacatccacagagcagagatctcaaagattatgcgagaatgtcaggaagaaagtttctggaagagagctctgcctttttctcttgtaagcatgcttgtcacccagggactagtctaccaaggttatttggcagctaattctagatttggatcattgcccaaagttgcacgcactgcctccttacctgtgaggaatgcaaaataaagcatggattaagtgagaagggagactctcagccttcagcttcctaaattctgtgtctgtgactttcgaagttttttaaacctctgaatttgtacacatttaaaatttcaagtgtactttaaaata

SEQ ID NO: 2140 - DNA, 1594 bp, Homo sapiens
  source 1..1594: mol_type = genomic DNA
ttttgagcccctgtctggatgacttcttgcggctgttctacccctccccctccccgcggtaccttgcacttttctccctccctgccccctctcgagtccaccctccgggccttctgcccctgatcgcttggttttccttgcagtcgcctgctgctgtcgtcgggaggtgggtgaggtgacgcaaacagccccgttgttgccctccgcgtatcccctcaccacctttgcggccatccacgactttcgcaccttccgccattttcctgcctgtgagggtggacagatcgcgctcgggtctcggcctcctgagtgccggtgactgcgggaggcgacggagtgcttctgggggtgtgagctggggaagttcgtggtcacggatgcgtgtggggttgctgctcagtctgtaacggcaggaaagatgaatgggagggctgattttcgagagccgaatgcagaggttccaagaccaattccccacatagggcctgattacattccaacagaggaagaaaggagagtcttcgcagaatgcaatgatgaaagcttctggttcagatctgtgcctttggctgcaacaagtatgttgattactcaaggattaattagtaaaggaatactttcaagtcatcccaaatatggttccatccctaaacttatacttgcttgtatcatgggatactttgctggaaaactttcttatgtgaaaacttgccaagagaaattcaagaaacttgaaaattccccccttggagaagctttacgatcaggacaagcacgacgatcttcaccacctgggcactattatcaaaagtcaaaatatgactcaagtgtgagtggtcaatcatcttttgtgacatccccagcagcagacaacatagaaatgcttcctcattatgagccaattccattcagttcttctatgaatgaatctgctcccactggtattactgatcatattgtccaaggacctgatcccaaccttgaagaaagtcctaaaagaaaaaatattacatatgaggaattaaggaataagaacagagagtcatatgaagtatctttaacacaaaagactgacccctcagtcaggcctatgcatgaaagagtgccaaaaaaagaagtcaaagtaaacaagtatggagatacttgggatgagtgaaaaattacatcattggacatgaaggagtttcaacatccagcttcatctaggtggtcatgattacctgcatgctttgagctcagcagcagtcttcataaacacatttaaaacaagatcctgggtttttgtggtttgacttctatggtgttttaaaaaaacacagatttttagtgttaatattgtgtaaatgtactcaccttagggattcatttgaatgatggtattataccatgattgtatacagtttgtgaaattgttgcaagggcaaagataactcttaaaaaaccgtcgagattacaatgctctagaatcagcatataagaaaataaatgatatctgcatgttgaattggggtggatggggggagcaagcataatttttaagtgtgaagctttgcatcaagaaattattaaaaagctttttttctccagtattttc

SEQ ID NO: 2141 - DNA, 1593 bp, Homo sapiens
  source 1..1593: mol_type = genomic DNA
ccggcggtgctcgcaagcgaggcagccatgtcttatcccgctgatgattatgagtctgaggcggcttatgacccctacgcttatcccagcgactatgatatgcacacaggagatccaaagcaggaccttgcttatgaacgtcagtatgaacagcaaacctatcaggtgatccctgaggtgatcaaaaacttcatccagtatttccacaaaactgtctcagatttgattgaccagaaagtgtatgagctacaggccagtcgtgtctccagtgatgtcattgaccagaaggtgtatgagatccaggacatctatgagaacagctggaccaagctgactgaaagattcttcaagaatacaccttggcccgaggctgaagccattgctccacaggttggcaatgatgctgtcttcctgattttatacaaagaattatactacaggcacatatatgccaaagtcagttttcagtcattcagtcagtaccgctgtaagactgccaagaagtcagaggaggagattgactttcttcgttccaatcccaaaatctggaatgttcatagtgtcctcaatgtccttcattccctggtagacaaatccaacatcaaccgacagttggaggtatacacaagcggaggtgaccctgagagtgtggctggggagtatgggcggcactccctctacaaaatgcttggttacttcagcctggtcgggcttctccgcctgcactccctgttaggagattactaccaggccatcaaggtgctggagaacatcgaactgaacaagaagagtatgtattcccgtgtgccagagtgccaggtcaccacatactattatgttgggtttgcatatttgatgatgcgtcgttaccaggatgccatccgggtcttcgccaacatcctcctctacatccagaggaccaagagcatgttccagaggaccacgtacaagtatgagatgattaacaagcagaatgagcagatgcatgcgctgctggccattgccctcacgatgtaccccatgcgtattgatgagagcattcacctccagctgcgggagaaatatggggacaagatgttgcgcatgcagaaaggtgacccacaagtctatgaagaacttttcagttactcctgccccaagttcctgtcgcctgtagtgcccaactatgataatgtgcaccccaactaccacaaagagcccttcctgcagcagctgaaggtgttttctgatgaagtacagcagcaggcccagctttcaaccatccgcagcttcctgaagctctacaccaccatgcctgtggccaagctggctggcttcctggacctcacagagcaggagttccggatccagcttcttgtcttcaaacacaagatgaagaacctcgtgtggaccagcggtatctcagccctggatggtgaatttcagtcagcctcagaggttgacttctacattgataaggacatgatccacatcgcggacaccaaggtcgccaggcgttatggggatttcttcatccgtcagatccacaaatttgaggagcttaatcgaaccctgaagaagatgggacagagaccttgatgatattcacacaca

SEQ ID NO: 2142 - DNA, 3881 bp, Homo sapiens
  source 1..3881: mol_type = genomic DNA
aggccgccgcctgggtcgctcaacttccgggtcaaaggtgcctgagccggcgggtcccctgtgtccgccgcggctgtcgtcccccgctcccgccacttccggggtcgcagtcccgggcatggagccgcgaccgtgaggcgccgctggacccgggacgacctgcccagtccggccgccgccccacgtcccggtctgtgtcccacgcctgcagctggaatggaggctctctggaccctttagaaggcacccctgccctcctgaggtcagctgagcggttaatgcggaaggttaagaaactgcgcctggacaaggagaacaccggaagttggagaagcttctcgctgaattccgagggggctgagaggatcacctcctacgacttccacagcgagagtggcctcttcctcttccaggccagcaacagcctcttccactgccgcgacggcggcaagaacggcttcatggtgtcccctatgaaaccgctggaaatcaagacccagtgctcagggccccggatggaccccaaaatctgccctgccgaccctgccttcttctccttcatcaataacagcgacctgtgggtggccaacatcgagacaggcgaggagcggcggctgaccttctgccaccaaggtttatccaatgtcctggatgaccccaagtctgcgggtgtggccaccttcgtcatacaggaagagttcgaccgcttcactgggtactggtggtgccccacagcctcctgggaaggttcagagggcctcaagacgctgcgaatcctgtatgaggaagtcgatgagtccgaggtggaggtcattcacgtcccctctcctgcgctagaagaaaggaagacggactcgtatcggtaccccaggacaggcagcaagaatcccaagattgccttgaaactggctgagttccagactgacagccagggcaagatcgtctcgacccaggagaaggagctggtgcagcccttcagctcgctgttcccgaaggtggagtacatcgccagggccgggtggacccgggatggcaaatacgcctgggccatgttcctggaccggccccagcagtggctccagctcgtcctcctccccccggccctgttcatcccgagcacagagaatgaggagcagcggctagcctctgccagagctgtccccaggaatgtccagccgtatgtggtgtacgaggaggtcaccaacgtctggatcaatgttcatgacatcttctatcccttcccccaatcagagggagaggacgagctctgctttctccgcgccaatgaatgcaagaccggcttctgccatttgtacaaagtcaccgccgttttaaaatcccagggctacgattggagtgagcccttcagccccggggaagatgaatttaagtgccccattaaggaagagattgctctgaccagcggtgaatgggaggttttggcgaggcacggctccaagatctgggtcaatgaggagaccaagctggtgtacttccagggcaccaaggacacgccgctggagcaccacctctacgtggtcagctatgaggcggccggcgagatcgtacgcctcaccacgcccggcttctcccatagctgctccatgagccagaacttcgacatgttcgtcagccactacagcagcgtgagcacgccgccctgcgtgcacgtctacaagctgagcggccccgacgacgaccccctgcacaagcagccccgcttctgggctagcatgatggaggcagccagctgccccccggattatgttcctccagagatcttccatttccacacgcgctcggatgtgcggctctacggcatgatctacaagccccacgccttgcagccagggaagaagcaccccaccgtcctctttgtatatggaggcccccaggtgcagctggtgaataactccttcaaaggcatcaagtacttgcggctcaacacactggcctccctgggctacgccgtggttgtgattgacggcaggggctcctgtcagcgagggcttcggttcgaaggggccctgaaaaaccaaatgggccaggtggagatcgaggaccaggtggagggcctgcagttcgtggccgagaagtatggcttcatcgacctgagccgagttgccatccatggctggtcctacgggggcttcctctcgctcatggggctaatccacaagccccaggtgttcaaggtggccatcgcgggtgccccggtcaccgtctggatggcctacgacacagggtacactgagcgctacatggacgtccctgagaacaaccagcacggctatgaggcgggttccgtggccctgcacgtggagaagctgcccaatgagcccaaccgcttgcttatcctccacggcttcctggacgaaaacgtgcactttttccacacaaacttcctcgtctcccaactgatccgagcagggaaaccttaccagctccagatctaccccaacgagagacacagtattcgctgccccgagtcgggcgagcactatgaagtcacgttgctgcactttctacaggaatacctctgagcctgcccaccgggagccgccacatcacagcacaagtggctgcagcctccgcggggaaccaggcgggagggactgagtggcccgcgggccccagtgaggcactttgtcccgcccagcgctggccagccccgaggagccgctgccttcaccgccccgacgccttttatccttttttaaacgctcttgggttttatgtccgctgcttcttggttgccgagacagagagatggtggtctcgggccagcccctcctctccccgccttctgggaggaggaggtcacacgctgatgggcactggagaggccagaagagactcagaggagcgggctgccttccgcctggggctccctgtgacctctcagtcccctggcccggccagccaccgtccccagcacccaagcatgcaattgcctgtcccccccggccagcctccccaacttgatgtttgtgttttgtttggggggatatttttcataattatttaaaagacaggccgggcgcggtggctcacgtctgtaatcccagcactttgggaggctgaggcgggcggatcacctgaggttgggagttcaagaccagcctggccaacatggggaaaccccgtctctactaaaaatacaaaaaattagccgggtgtggtggcgcgtgcctataatcccagctactcgggaggctgaggcaggagaatcgcttgaacccgggaggtggaggttgcggtgagccaagatcgcaccattgcactccagcctgggcaacaagagcgaaactctgtctcaaaataaataaaaaataaaagacagaaagcaaggggtgcctaaatctagacttggggtccacaccgggcagcggggttgcaacccagcacctggtaggctccatttcttcccaagcccgagcagagggtcatgcgggccccacaggagaagcggccagggcccgcggggggcaccacctgtggacagccctcctgtccccaagctttcaggcaggcactgaaacgcaccgaacttccacgctctgctggtcagtggcggctgtcccctccccagcccagccgcccagccacatgtgtctgcctgacccgtacacaccaggggttccggggttgggagctgaaccatccccacctcagggttatatttccctctccccttccctccccgccaagagctctgccaggggcgggcaaaaaaaaaagtaaaaagaaaagaaaaaaaaaaaaaagaaacaaaccacctctacatattatggaaagaaaatatttttgtcgattcttattcttttataattatgcgtggaagaagtagacacattaaacgattccagttggaaacatgt

SEQ ID NO: 2143 - DNA, 9744 bp, Homo sapiens
  source 1..9744: mol_type = genomic DNA
gcgcggcgcgggagagcgcagtggcgccggcgggaaagggctgcggacctgcggcgccgcgttgtgcgttcgacgacgcggcaccggcttcgacgccctctgcccgctccagaagcagtaagaagacatgttggataacaagaagaggtgtagagtttgcatatatcaactgtggccttaatgagcatgttgacagcatcgatgctagacagacagtctttttactgctggattgtgcaagatatttaaccctattttgtttgaattatgacttaaatgtcaaacatcttaactaagaaaagggaaacattttagttttggaagtcagaatgccaaggagaaggaaaaatcttgggggaaatccttttcggaagactgcaaaccctaaggaagttgtcgtatccagtgttgctagtcgtgaggagccaaccactactctaccttccatgggtgagacaaaagttgatcaggaagaactcttcaccagtatctcagagatattttctgatctggatcctgatgtagtgtatttgatgctttctgaatgtgatttcaaaggtgagaaaaagtttagtttgaaccctgtccatcttataagaagactttgtgtactatgccatgattaatagtaatatagaaaaatgtcttgaaaatgctatggattgtctattagaattatctgccactgataccaagatagaagaatcatcttcacaaagtttcgttgcttctgagaaccaagtaggtgcagcagaaagtaaaataatggaaaaacgtcctgaagaagagagtgaagattcaaaaatggattcatttttggacatgcagctaactgaagacctggattccttaatacagaatgcttttgagaaattgaactcttctcctgatgaccaagtatactcatttttgccttcacaagatgttaatagttttaatgactcaagtgagtttataaatcctgattcaagtaatatgactcccattttttctacacaaaatatgaatttgaacggtgaaaatttagagaattctggttctactttaagtttaaacccattaccttcacattcagttttgaacgagtccaagtgttttataaaggataacacattggctttggaaagtaactacccggaagattctcttctcagtagttctttaaatgtagcaagtgactccatcgcaggttgtagcagtctcaatcaaaaacagaaagaacttttagaatctgagtgcgttgaggctcaattctctgaagctcctgtagatttggatgccagtgaacctcaggcttgtttaaaccttccagggcttgatttaccaggtacaggtggggatcagaaatctactcgggtctctgatgtgtttctaccttccgaagggttcaacttcaagccacacaaacatcctgaactgccaactaaggggaaggatgtgagttactgcccggtacttgctcctctcccattgctgttgcctcctccgccacctccaccgatgtggaatccaatgattcctgcttttgacctcttccaaggaaaccatggctttgtagctcctgttgtaaccacagctgcacactggagatctgtcaactacacatttccaccctcagttatttctcacacttccccaacaaaagtatggagaaataaagatggaacaagtgcttatcaagtacaagaaaccccagtttctcaggttgtaagaaagaagacatcttacgttggactagttcttgttcttctcagaggtcttccgggatctggaaaatcttttttggcaaggactttgcaagaggataatccaagtggagtcattcttagtactgatgattatttttatataaatggacagtaccagtttgatgtaaagtacttaggagaagcacatgaatggaaccagaatcgtgcaaaagaagcatttgagaagaagatatctcctataattatagataatacaaacctacaggcatgggaaatgaaaccatatgttgctttgtctcagaaacacaaatataaagtcctttttcgggaaccagacacatggtggaagtttaaaccaaaggaacttgcaaggcgtaacattcatggggtaagcaaagaaaaaataacaagaatgttggaacattatcaacgttttgtttcagtgccaataattatgagttcttcggttccagagaaaattgaacgtattgagttgtgtgcatattcttgtgaggatagaagcactagcccaagagacgatgaagatattatctctgaaaaagaagaaaatattttatctttatctttgaagcatctagagttcactgaagagaagaatcttgatgtaaccaaagaaacaatgttacctgagaatgttgcatatctctctaatgcagatttaaacaaaagaagaaaagaaataagtgatatgaatcctagcattcaaagtgctttaattctggaaactccacacatgtatttttctgactctgaaagcaaactacaggcaacagacaaaagtgaaaacgagcaaatagaaatggtggctgtaaaagggtatagtaaaactgacacagatagttctatggagagagtatcacctagtacttgctgtagtgaaaataatcaagaagactgtgatcttgcaaatagtggaccacttcaaaatgaaaaatcctcacctggtgaaatagtggaagaaagagcaacagtaacgaaaaaagcctttgggaaacaaaaaagcaaatcgactttggaaaagttcccaagacatgagctatcaaattttgttggtgactggccagttgataagactattggtcagaggacaaaaaggaacagaaaaactgaaaaaacttcatccgtacaaagcgacaaaaagtataattaccctcagtcacacaaattagttaacagtgtatctgtgaatacagattgtgtccagcaacgaggatctccacatgaaagtgtagaggatggcagaaagtcacagtgtgatgatgcttcagagccactcaatagctataaatatgatgcttataaaaatattgacaaaaactcattcaacattatgggtgactggccttcatctgattctttagctcagagggaacacagatcaagaatgccaaagactggtttaagtgagcccaacctagaaattggaacaaatgacaaaatgaatgaaatatccttatctacagcacatgaggcctgttggggcacaagctctcaaaaactaaagacattgggtagctccaatctaggaagttctgaaatgctgctcagtgaaatgacctgtgagagtcagacttgtctaagtaaaaagagtcatgggcaacacacatcgttgcctcttacttttaccaatagtgcaccaactgtttctggagtagtagaaccacaaacgttagctgaatgtcaagagcaaatgcctaagagagaccctggaaaagaagtaggcatgtgcacccagactgaaccacaggattttgctcttttatggaaaatagaaaagaataaaattagcatttcagattctatcaaagtattaacaggaagattagatggatttaagccgaaagttttcaatattaacacaaaatcagacgttcaagaagcaattccatatagagtaatgtatgataaaagcacgtttgttgaagaaagtgagcttaccagtgcagatgaatctgaaaatcttaacattctttgtaaactgtttggatccttttcattagaagccctgaaagacttatatgagaggtgcaataaagatattatttgggccacaagccttttgttggattctgaaactaagttatgtgaggatacagagtttgagaatttccaaaaatcgtgtgatggatcacaaattgggcctttttctctggggttgaatttgaaagaaattattagccaaagaggaactttagagaattctaattctcctgtgccagagtttagccatgggattggtattagtaacgctgactcacagtctacttgtgatgcagaaagaggaaactcagagcaggcggaaatgagagctgtcactcctgaaaaccatgaatcgatgacaagtatatttcccagtgctgctgtgggtctaaagaataataatgacatacttcctaacagccaggaagaacttttatatagcagtaagcagtcctttccaggtattctaaaagctactactcctaaagatatgagtgaaacagaaaaaaacctagtagtcacagagactggagacaacatacattctccttcacatttctctgatatttttaactttgtatctagtacttcaaatcttgaattaaatgaagaaatttattttactgattctcttgaaataaagagaaatgaaaattttccaaaggattatgtgaaattttcagatgaagaagaatttatgaatgaagatgagaaggaaatgaaggaaattctaatggcaggaagtagtttatcagctggagttagtggggaagataaaaccgagatattgaatcccactccagcgatggccaaatctctgaccatagactgtctggaattggcattaccccctgaactggcttttcaacttaatgaattatttggtcctgttggtattgattcagggtctctaacagttgaagattgtgtggttcatatagatctgaatctggcgaaagtgattcatgagaaatggaaagaatctgtaatggagcgacaaagacaagaagaggtgtcttgtggcaagtttatgcaagatccttccttggttggacatactgggcttgataatcctgaacaaaaatcatctcagagaacaggcaaaaaattactgaagactttaacagcatctgaaatgctacctttattggatcattggaatactcaaactaaaaaagtatcactcagagaaataatgtcagaagaaattgccttacaggaaaaacataatttgaaaagggagacccttatgtttgaaaaagattgtgccactaaactaaaggagaagcagctctttaagatatttccagccattaaccaaaattttctggtggacattttcaaggaccacaactattcattagaacacacagtgcaatttcttaactgtgttcttgaaggggaccctgtaaaaacagttgtagcccaagagtttgttcaccaaaatgagaatgtcacatctcatactggccagaagtctaaagagaaaaagccaaagaaattaaaagagactgaagaaacaccaagtgaactgtctttccaggactttgagtacccagactatgatgactacagagcagaggctttccttcaccaacagaagaggatggagtgctacagcaaggccaaagaagcttatcggatagggaaaaaaaatgtcgccaccttttatgcccagcagggtactcttcatgagcagaagatgaaagaagccaatcaccttgctgccatagagatctttgagaaagtcaatgcttcgctgctgccacagaatgttttagacctccatgggctgcatgtggatgaagctctagaacatttgatgagagttttagagaagaagactgaagaatttaagcagaacggtgggaagccctatttgtctgtgattacggggagaggaaaccacagccagggaggagttgctcgcatcaaaccagctgtcattaagtacctcataagccatagcttcaggttctctgaaattaaaccagggtgcttgaaagtcatgctaaagtaaaataaacatccttgaattagaagtatgaaggtttgtaggttaaaattacttttatttgcagtaattcagtcaattctaccctaaagatgtgttttattataaataatattcaattatgaaacaaaaaaattatgatgtttttcaaaatgcaagtgaggtttgattttttactgaatcaaatgcaaatgttacctgttaaagatattacagagaaattttattgattacaaaatatgtaagaaaattatcagctacagttttaaagtttaaaatgctctgattgtttctcagaaaaggttacctttgtattaattgttgtatgacatttagtaatgtcctaaaagtcttttgtgagaggtatttaaagtgctttgagacctgattcatgccccccaaagggtggtattaaaagaggaaaaaggacatagtagtggtagtaaagaaaaaaaggagatctaacaaaaacacttgaatattttttattttcaaaactaaacacataaaatgcttttattttgccatatcctacaggaaggaagacatgcttttgccctttcttctgctttgtatatgaccttgatcttttaccttttgttctgttcttctgtgtgcattttatggaaagaaagttgggtctgagattatattgtaattttatactttctatagacagaaaggttttcagagaaaaagaaatggttaaatatcttccagatgttgctgccttatcgaaatgcttctagaactgtctgtataagtcgtatttcagacagtactaaatacttatattttatttttgaggcatgtaattttaaaactgcagtaggttaaaattctattaaacaaatatagaaaatattttgtttataattggcctggtgtggtggcccacgcctgtaatcccagcactttgggaggccgaggtaggtggatcgcctgaggtcagaagttcaagaccagcctggccaacatggtgaatccccgtctctattaaaaatacaaaaattagctgggtgtggtggcgtgtgcctgtaatcccagctacttgggaggctgaggcaggagaaccgcttaaacctgggaggtggaggttgcagtgacccgagatcgagatcacaccactgcactcagcctgggtgacagagcaagactccgtctccaaaaaaaaaaaagaaaaaaaagagaaaatattttggttataatcataagaagaatccttacaatttaaaatattttcacttttattttgaaaaagagccaactttctcaaaggaagctgtcattaacttctgttgtttggttagctaataaattctgttagtatgcaagttaaacctgtgtaaaggaggttataatgtggtaaggtataattttccaatatgagacaatggcttaaatttgcctttggagatggagaatattttcaacatacataattttaacaaatagttttgttgctttttgttaagcttaaaaaaaaatttggatcagaaattataggattgagctggtaccaaaagaatcctaaagtacagaatggttttccaaaagagcagacatttcaatgaaaataaaaccccaaaacattttttttatatatcatgattgcatgcttttaaaataaggaggcttatcattgaattttagttccataaaaatgaaaatacatgtttattatttagaaatggttagtgactggtattgaagtattattcacacttatgtttgtaataatttatttaaagaatgccaacagtttagcacacttttgtaatctctagaacagttctatacattaaaaataaacattaaaaataaagcagttcctttaaacaacttactatgaaactataattgttaatgaaataagatattcctatgtatacattagtatgatttaagggtatgaaaaacagtgctaaaatgtggagttaattggaatgtgtgcagctgcatactcactttctgtgtttttatatttccttacctagttttaaaaatcatcacttttcggcacttcagctagacttatttcaatattataattatgattaatgaaggagcagtcagaagtagaggtgtggtattccgtgggcagaagtcaaatgaaaaaagctatattgtttacttgtttactatatcaatgttaatattatgccttattttgataaatcaaatagtatatcttaatcattgttgataaatatacaggcaaagtttgagcatcatatgtatttttatgaagctgcttaattccaaattgcctcccaccccactatctagcatagtttaagcaacacataattttgaaagaaaagtttgtaatccctcctttcttttttttgcccatttctaaatcctgtatgcccgcagtaaagatagtttggggattttaaaagttttctctattacccatttctaaatcctgtatgtcaaagatagtttggagattataaaaattttcatgtattggtgtaggttgagtatccctaatgagaaaattcaaaatctgaaatgcttcaaaatctgaaatttttcgagcacagacatgatgctcaaaggaaatactcacagagcattttacatttgtaggttagcgatactcaacaagtaaatataatgcacatgttctaaaatatccccccaaaccccagcaatccaaaacacttctggtcctaagcattttgagtaggggatactcactcaacctgtatatttgtgctaatacatgactcattagaatgattctttgtaaacttaatattttaaaagtacagcacttctgtagtatggaaggtttcagtaataattatattcattcagtagtctcttaccattatctcccagatggaaaaagaggactaatgtggaaaccccagagggtgtccagttggaccagggagatattagacacttaacagtattttcagtctgtccatctctttattccaatgtgagaaatggaagtgtttttttttttacgtttattggctcttcatatttctctacattatttttaatgtgcagtttcttcaattggttagtatttccatactatttgcaactttatggcctttaaatataggacatattatatagcagaaattttgactttaaatcctcttgagtagtatattttgagaagaaaagctatactgctcttctggatggtttccatcctttatttaggtcttttctttttgaattcaagtgttttgtatgcttagaaagtagacatgtataatattgagatcggttatttctgagctggaaattggaaactttggaaactcaggaaattgctctgacaatgttttaactgctctcaatttaagaaaatgacgaaatgtataaaaaagacaaaaataacgtgtgctgttttttccaagtgctttttctaagtgcttttccattgtgcaatgaggtgaagtttggtaatttttcggtgtagtagttaaatattgctcaatttttatttacatgtaaagaaaacagatttaaatgtttatgtggccaaaaggtgtcatttaaaaggtaaaataagtttatgtagaatgtatgttcatggtgcttatttttaaaatgtaattcaagtttacagtattacttaatgcttctttacagaatttaatagagaaacaaggctagaacacatctacatcctgaagagccgtttataacttcatattatatgatgacaaagttcattattttccttaaagttgagcaattgacttttatggtccaatgatgaacttattattaataaatgattgagttaactgtgaggcttctcattaaaatacaatattgcagctatcagttggagaatatattataaaattttcagacagtatatcagaaaaatgtttttatttgtactgtatagaaaatgtaattttgctgttaactctgtactttttaaattgaaaatgttttataaatttgcttttaaattttcttatgaagccatttgcaaattacatacttaatttaataaaatactttagccac

SEQ ID NO: 2144 - DNA, 2738 bp, Homo sapiens
  source 1..2738: mol_type = genomic DNA
gctcgcacccccgtcctccggccgcgacccccgcccgggaaccctagcccctggccgcggtcgcttcccggacctcgccccgcgcctccccctgcagcccgccccggccgcaccccctagcgtccccgcccccggccgcgccccctcatgggggccccctcggcggtccgggaggcggcgggcgcgccatgggcagcggcagcagccggagcagccggactctgaggcggcggcgcagccccgagagcctccccgcggggcccggagcggcagccctggagggcgggacccgccggcgggtgccggtggcggcggccgaggtcccgggggcagccgcggaggaggcgcccggccgcgaccccagccccgtggcgccccccgacggcagggacgagacgctgcgcctgctggacgagctgctggccgagtcggcggcctggggccccccggagcccgccccgcgccgcccagcccggctccgacccaccgcggtcgcggggagcgcggtgtgcgcagagcagagcacagagggccacccggggagcggcaatgtctctgaagccccaggcagcggtcgcaagaagcccgagaggccggcagccatctcctacgaccactcggaagaggggctgatggcgagcatcgagcgggagtactgccgctgaggacagcatgctccacccccgccaggcctcggaggcacctgctggctggggcaccctctgcttgcacagagctctagcaggagctgaaccacctccaaaacgcagtcactcccggatattcaaagctgccctttcaaatccactttcagaccgcgctgacctgggccagccactggcggtcatggttgctggtgggggcgattagctgtgtagacccacaggtgcgtgggcctgggccgccggcgcctcctccccaacgcggggagcctgcccagttcttctggagcctgaaatgcgtgcccctcttggttgcccgctctccacagtggggagggctcacgaggactaggtgacacaagcgagcccctcctggcatccgcgccacaacacttccggaaggttctgctgtggaaggtgcacccgcgctgctccctcagtctcgggcccatctctccaggggtggccgggtcagcttagtgcttctcaactttaactccctaatgagcagcctgggggtgctgttgacttgcagggcctgaggttctgtacgtctaaccagctcccagcccaggcccgagctccgaagccccaactgcactttgaggagcgagaaccccagctctgatctgccttgcagtgggaggtagagctcgtcactgcctctctgggcctcagtttccctctctggaaaatcagctctggcagctcttggaggccctccccagctctgacaatctggaactgctgccactgctggtcccctgccccaggcacagcagtgccttccctgcggggagccagcgcccaggtccaaccgggagagggtctgcctgatactggctttccagttctccctctcacaggcagcctggccagtgcctgcggggcttttaaattctcttcctgcctgggtggaaggtgggaaaccacagcagtgaggcaggaagagccttggaatgttcctggttgacagatgggaaaactgacctgcccaggacgccctgggaacagggggcggagctccggctagaggggactcctgtgtgggcgggcaggtctggagcctgggcccaggtgtggcctgctgggggacagctccgggggagagctgtggggagaacagcggtctagggaggcaggaggcaggcggcaggctcctccccagcagcctgcagggcatcaggacagagggggaaggaggagacagaagggaaagaaggagatagagggggaaggaggaaacagcgcggcttctgctgaagccagtacaagcctggttatctggcttgacccgcccacacggaggcctccccagcgttttctttttcccgagaagagctccagctcgcaggtccttagaacacagcagagcaggagcatctcaggaaccaacggccagctccttggcgctgtccccagccccacaggcctgctgcggccatccgcaaacgggcatttccttgaacttttgagagtgcctttgaccagctgttcgcagctgggaaactccaacttttgaagtcagagcttggagcggcccccgcaagggcgtggctcaaaccctccccagagctgggagccattgcttatgcaagcccgtttcttttgatgtaaagatggaagtcgttactatattttaataatgcaaatacatcttttaaaataagttaacatttcttaccaccagatggatcaggctttgaatttaaacatgtaaatgtttgtaattttatgtcattttgttaaaatgggacgctttcaattggtttccaagaaagatgatacctctgcattttctggtggaaaaggtgtaatacccttaatgagatcaaagtgttaggggaaaaaaattccaaaagtagttacaagctatatcaatgtcaaagtaaatgcacttcatcaaagctaagaagtcacaggaattgttctcaggtttttaaaaaaatttttcctgaattcaggaagtgtcttctgaatagcagctagccaaataaagcggtgtgtgtgtactgcagctgtaggtgaacttaaaaataataataaaaagaacaaataaagcagtgtgtaccagcc

SEQ ID NO: 2145 - DNA, 2216 bp, Homo sapiens
  source 1..2216: mol_type = genomic DNA
aaaagcgggcggcgggccgcattgtctgacggcgctccctctctgctttttgttctcgcctcgccgccccgcccctccgcagctctcgaggctcctcccgctgcgggtcggcgctcgccctcgctctcctcgccctccgccccggccccggccccgcgcccgccatggagaagactgagctgatccagaaggccaagctggccgagcaggccgagcgctacgacgacatggccacctgcatgaaggcagtgaccgagcagggcgccgagctgtccaacgaggagcgcaacctgctctccgtggcctacaagaacgtggtcgggggccgcaggtccgcctggagggtcatctctagcatcgagcagaagaccgacacctccgacaagaagttgcagctgattaaggactatcgggagaaagtggagtccgagctgagatccatctgcaccacggtgctggaattgttggataaatatttaatagccaatgcaactaatccagagagtaaggtcttctatctgaaaatgaagggtgattacttccggtaccttgctgaagttgcgtgtggtgatgatcgaaaacaaacgatagataattcccaaggagcttaccaagaggcatttgatataagcaagaaagagatgcaacccacacacccaatccgcctggggcttgctcttaacttttctgtattttactatgagattcttaataacccagagcttgcctgcacgctggctaaaacggcttttgatgaggccattgctgaacttgatacactgaatgaagactcatacaaagacagcaccctcatcatgcagttgcttagagacaacctaacactttggacatcagacagtgcaggagaagaatgtgatgcggcagaaggggctgaaaactaaatccatacagggtgtcatccttctttccttcaagaaacctttttacacatctccattccttattccacttggatttcctatagcaaagaaacccattcatgtgtatggaatcaactgtttatagtcttttcacactgcagctttgggaaaacttcattccttgatttgtgtttgtcttggccttcctggtgtgcagtactgctgtagaaaagtattaatagcttcatttcatataaacataagtaactcccaaacacttatgtagaggactaaaaatgtatctggtatttaagtaatctgaaccagttctgcaagtgactgtgttttgtattactgtgaaaataagaaaatgtagttaattacaatttaaagagtattccacataacttcttaatttctacattccctcccttactcttcgggggtttcctttcagtaagcaacttttccatgctcttaatgtattcctttttagtaggaatccggaagtattagattgaatggaaaagcacttgccatctctgtctaggggtcacaaattgaaatggctcctgtatcacatacggaggtcttgtgtatctgtggcaacagggagtttccttattcactctttatttgctgctgtttaagttgccaacctcccctcccaataaaaattcacttacacctcctgcctttgtagttctggtattcactttactatgtgatagaagtagcatgttgctgccagaatacaagcattgcttttggcaaattaaagtgcatgtcatttcttaatacactagaaaggggaaataaattaaagtacacaagtccaagtctaaaactttagtacttttccatgcagatttgtgcacatgtgagagggtgtccagtttgtctagtgattgttatttagagagttggaccactattgtgtgttgctaatcattgactgtagtcccaaaaaagccttgtgaaaatgttatgccctatgtaacagcagagtaacataaaataaaagtacattttataaaccatttactatggctttgtaacaattgcatacccatattttaagggacaggtgaatttactactttctaaagtttattgatacttcccttttatgtaaaatgtagtagtgatacctatatttccacattgtgcattgtgacacacttgtctagggatgcctggaagtgtataaaattggactgcatttcttagagtgttttactatagatcagtctcatgggccatctcttcctcagatgtaaatgatatctggttaagtgttatatggaataaagtggacattttaaaactagcaaa

SEQ ID NO: 2146 - DNA, 3502 bp, Homo sapiens
  source 1..3502: mol_type = genomic DNA
tttcttccgccgtccgccggtggcgaggcccaggctgtcgccgggtgtgcagcggcgtcgcggccagtagagggattctgggtaacggcccggacccccggctgggcttctggctcggcgcagcaggttccattcacgccaagtctgttggcagtggcagttgtagggccaagggcggttgtaggacccggagcagccggacatggaacaaccgtggccgcctccgggaccctggagcctccctcgggccgagggtgaggctgaggaagagagtgacttcgacgtgttccccagttctccccgctgcccgcagctgccaggcggcggcgcccagatgtatagccatggaattgaattggcttgccaaaagcagaaagagtttgtgaagagctctgtggcgtgcaaatggaatcttgctgaagctcaacagaaacttggtagcttagcactgcataattctgagtccttggatcaggagcatgccaaagcacaaacagcagtatcagaactgaggcaacgggaagaagagtggcgacagaaagaagaagctctagtacaaagagagaagatgtgtctgtggagcacggatgccattagcaaggatgtttttaataagagttttattaatcaagataaaagaaaagacacagaagatgaagataaatcagaatcatttatgcaaaaatatgagcaaaaaatcagacattttggtatgttgagtcgatgggatgatagccagagatttttgtctgaccatccataccttgtatgtgaagaaactgctaaatatcttattttatggtgttttcacctggaagctgagaagaaaggggctttaatggaacaaatagcacatcaagctgttgtaatgcagtttattatggaaatggccaaaaactgtaatgtggatccaagagggtgttttcgtttatttttccagaaagccaaagcagaggaagaaggttattttgaagcattcaaaaatgaacttgaagctttcaagtcaagagtaagactttattctcaatcacaaagttttcaacctatgacagttcagaatcatgttccccattctggtgttggatctataggtttattagaatccttaccacagaatccagattatcttcagtattctatcagtacagctctctgcagcttaaactcggtggtacataaagaagatgatgaacccaaaatgatggacactgtataatttggttaagactgctgaggccaagtgctattttgttacaagaaaggaagaacttggctattttcttgacacttttatgggtgctgcactttatttttgttcggtttttgatgggagggaaagagtactgaaatgttttgtaaattttttttaatgtgctgctaggttttttgttttgttttgttctgaagagaagagtggtaccatatgttgcaggaagtcaaactggactttttgtggctactaaatttgcttttaatcttattgttctcaattttggaatcaagtatgaaaatctgcacaaatgcaatgtttacaagaactggttgattctgggaggcatctgctacagtctctttttatatggatatgtacatgtcctattctacaaaaatgattaaagataaaaacatacttgtatcccactgctactttagctgtcaaatttggtgtttcatcacattaaaagcaataaatcagtagttggtaatgtactttactaaataagttggggggtacaatttttaaaagtcttaactcttaaatacttgactttcggcaccatcagttaaatccttgactataatacaaatttgatatatacattacatttaccctcaaattattctcaaaactatattccttagaatttgattttaccctgctgactttaagagttataataatatcaaatgtgatgagctaatatagattttctttttaaataagaataacttcaagctcactctttcttaacatagtctgggatctctcagggagtaagttttaaaagaatactaatggcttgtaagaacaaacaggaataataatctgatttttaaatttgtagttattttactcatgttgccttttaatttttgttattttggtttattttttgatgtagccttttaaaaaaggagtcttaaaaatgattttttttttaaaggcaagagaaatcttgtagtgctaactgccttgagctgccaattacctatttctgagaatttggtgactcttattggtaatgatggcatttacaacatttggcatttcccctttttcagctcagttaccatagaatacttccaagctttactacttcctctgtaagtcatttcagttatgccaggatatttgatgattttgtttatgtagaattaggtaacaaagccaattatgctatccttattattgaaggattaatcttatgacttaacataagctttggttatatttgggtgtagtctttggctaagtacccattaaggctagtagcaaacacttggaaggtggctaactgggactgggaatacgtgtctcaacttgagaaaccaaatagtgcgaagggactcagggtggccagacctgtgaccttggcctcatttgtatcttgttttcgctgaggtgatcagacacttagtaccctagaaatggactggaattattgaatcttcttctgtaacatcacaatcttcctggttttcagaataaacgtttttgtgcttttgatataaatatatactctataataaaatgtttgactaatttatatagtagtgtttgtcagcctgtactttttttttttttaaacccatgacctagtcgtagacatttttttctttttgttctgttctgaagcaagctcttatttttccctttctaccaaattgagagaatgggcagacacaggagccatattcctagtttcacagaaatgttacttgaattattattttcccttctttcccaggatttgcctgtaagcattcaaattgttttgaatttcattttgccttctctaagttagaggtatttaatgactgaagactggcaggagagaaagtatcaacaaactgagtaaactattcttgaggggcactgaaaagatgttctttgaaacttgatttatatatttttacttgcaaaagaatatactgtgttttgagtatgaaagtgtgattgggtctgttgtgggaaccactgactgatgccataatttgcacttaaaggctataaattacatagttagccgtactttagtactagaaacagtaaattgacatccttgaactaattcctaccttttttttgtttctgaagaaataaagagtatattaagcaaagggataatttatatttcaggttggacaatttaccctaaacaaattaaaccatggaaagtgcaaacacatgaatgaaacatttttttacatcaaagtatcatcaaagattcttgtttcatttgataaaattaatatttgaataaaaaaatttttaaatcaa

SEQ ID NO: 2147 - DNA, 1244 bp, Homo sapiens
  source 1..1244: mol_type = genomic DNA
ccgactatttcttccgccgtccgccggtggcgaggcccaggctgtcgccgggtgtgcagcggcgtcgcggccagtagagggattctgggtaacggcccggacccccggctgggcttctggctcggcgcagcaggttccattcacgccaagtctgttggcagtggcagttgtagggccaagggcggttgtaggacccggagcagccggacatggaacaaccgtggccgcctccgggaccctggagcctccctcgggccgagggtgaggctgaggaagagagtgacttcgacgtgttccccagttctccccgctgcccgcagctgccaggcggcggcgcccagatgtatagccatggaattgaattggcttgccaaaagcagaaagagtttgtgaagagctctgtggcgtgcaaatggaatcttgctgaagctcaacagaaacttggtagcttagcactgcataattctgagtccttggatcaggagcatgccaaagcacaaacagcagtatcagaactgaggcaacgggaagaagagtggcgacagaaagaagaagctctagtacaaagagagaagatgtgtctgtggagcacggatgccattagcaaggatgtttttaataagagttttattaatcaagataaaagaaaagacacagaagatgaagataaatcagaatcatttatgcaaaaatatgagcaaaaaatcagacattttggtatgttgagtcgatgggatgatagccagagatttttgtctgaccatccataccttgtatgtgaagaaactgctaaatatcttattttatggtgttttcacctggaagctgagaagaaaggggctttaatggaacaaatagcacatcaagctgttgtaatgcagtttattatggaaatggccaaaaactgtaatgtggatccaagagggtgttttcgtttatttttccagaaagccaaagcagaggaagaaggttattttgaagcattcaaaaatgaacttgaagctttcaagtcaagagtaagactttattctcaatcacaaagttttcaacctatgacagttcagaatcatgttccccattctggtgttggatctataggtttattagaatccttaccacaggctccaagattttaagaccagctttagccagtttaatctgttgtctacattgtgagaaggaaagtcttattcaaaagacaatgtgaggagagtcctatatttagttttaaacctcataaagtg

SEQ ID NO: 2148 - DNA, 5638 bp, Homo sapiens
  source 1..5638: mol_type = genomic DNA
accgcaaagaagtcgcgctttgattgggccgctgtcaggtgtcgctgcctgcaggttcggctgcgcgagcggagggaggcggttccctcttatgcttttcatctccatccccagccccacccacagccagggggcttgggttctgagctgatggggtacccccctctgcagagcgggatgagtgggtgttccggcagggatgtggtcattgacggccagtgagggcgagagtaccacggcccacttcttccttggagctggagatgaggggctgggcacccgtggaataggcatgaggccagaagagagtgacagcgagctccttgaggatgaggaggatgaagtgcctcctgaacctcagatcattgttggcatctgtgccatgaccaagaaatccaagtccaagccaatgactcaaatcctagagcgactctgcagatttgactacctgactgttgtcattctgggagaagatgtaatccttaatgaacctgtggaaaactggccatcctgccactgcctcatctctttccactccaaaggctttcctctggacaaagctgttgcttactccaagcttcgaaacccctttcttatcaatgatctggccatgcagtattacatccaagataggagggaggtgtaccggatcctgcaggaagagggtattgatctgcctcgatatgctgtgctcaaccgtgatcctgcccggcctgaggaatgcaacctgatagaaggtgaagaccaagtagaggtcaatggagctgtctttcccaagccctttgtggagaagccagtgagtgcagaagaccacaatgtttacatctactaccccagctcagctggaggaggaagccagcgtctctttcgtaagattggcagccgaagcagtgtttactctcctgagagcagcgtccgaaagacggggtcgtacatctatgaggagtttatgccaacagatggcacagatgtcaaggtgtatacagtggggccagattatgcccatgctgaagctagaaaatctccagctttggatgggaaggttgaacgagacagtgaggggaaagagattcgatatccagtcatgctgactgccatggaaaagctggtggccaggaaagtctgcgtagctttcaagcaaacagtttgtggatttgaccttcttcgtgccaatggtcattcctttgtgtgtgatgtcaatggctttagttttgtcaagaactcgatgaaatactacgatgactgtgccaagattctggggaacaccataatgcgggagcttgccccacagttccagattccatggtccatccccacggaggctgaggacattcccattgttcccaccacatctggcactatgatggaacttcgttgtgtcattgcaattattcgtcatggggatcgtactcccaagcagaagatgaagatggaagtgaaacacccaaggttttttgctctgtttgaaaaacatggtggctacaagacagggaaattaaaactcaagcgacctgagcagctccaggaggtgctggatatcacaaggctgttgttggctgaactggagaaagaaccaggtggtgagatcgaggagaagactggaaaactagagcagctgaagtctgtactggagatgtatggtcacttctcaggtataaaccggaaggtacaattgacttactaccctcatggagtaaaagcttctaatgaggggcaagatccacagagggaaactctggccccatctctgttgctggtactgaagtggggtggagaactgactcctgctggccgtgttcaggctgaggagctggggcgagcttttcgctgcatgtaccctggaggacagggtgactatgctggcttccctggttgtgggctgcttcgtctccatagcactttccgccacgatctcaagatctatgcctctgatgagggtcgtgttcagatgactgctgctgccttcgccaagggccttctggctctagaaggggagctgacacccattttggtgcaaatggtgaagagtgccaacatgaatgggctactggacagcgatggggattccttgagcagctgccagcaccgggtgaaggctcggctgcaccatattctacagcaggatgcgccctttggccctgaggactacgatcagctggctcccaccagaagtacttccctgctcaactccatgactatcatccagaatcctgtgaaggtctgtgatcaggtatttgccctgatcgaaaacctcacccaccagatccgggaacgaatgcaggaccccaggtctgtagacctgcagctctaccacagtgagacactagagctaatgctacagcgttggagcaagctggagcgtgactttcgacagaagagtgggcgctatgatatcagtaagatccctgacatctatgactgtgtcaagtatgatgtgcagcacaatgggagtctgggacttcaaggcacagcagagttgctccgtctctctaaggcactggctgatgtggtcattccccaggagtacgggatcagtcgggaggagaaactggaaattgctgtgggcttctgtcttccactgttgcggaagatactacttgacctgcagagaacccacgaggatgagtctgtcaacaagctgcatcccctgtactcccgaggcgtgctctccccaggtcgccacgttcgaacgcgtctctatttcaccagtgagagccatgtccactccctgctcagtgtcttccgttatggaggacttcttgatgagacccaggatgcacaatggcagcgagctttggattatcttagtgccatctcagagcttaactacatgacccagattgtcatcatgctttatgaggacaacacacaggatcccttatcagaggaacggttccatgtggagctacacttcagccccggagtgaaaggtgttgaggaagaaggcagtgccccggctggctgtggattccgtccagcctcttctgagaatgaggagatgaaaaccaaccaaggcagtatggagaacctgtgtccaggaaaggcatcagatgaaccagaccgggcattgcagacttcaccccagcctcctgagggccctggccttccgaggagatcacccctcattcgtaaccgaaaagctggttccatggaggtactttctgagacttcatcctcgaggcctggtggctaccggctcttttcatcttcacggccacccacagaaatgaagcagagtggcctaggctcacagtgcacagggctgttcagcaccacagtgctgggtggctcctccagtgccccgaatcttcaggactacgcccgcagccatggcaaaaagctaccacctgccagtctgaagcaccgagatgggtttgaagggtgttccatggtgcctaccatctaccctctggaaacactgcataatgccctttccctacgtcaagtgagtgaattcttgagtagagtctgccagcgccacactgatgcccaggcacaggcatctgcagccctctttgattccatgcacagcagccaggcctcagataacccattttctccaccacgtactcttcattcacctcccctgcaactccagcagcgctctgagaagcccccttggtacagcagtggcccttctagcactgtgtccagtgctggtccttcttcccctactacagtagatggtaactcccaatttggcttcagtgatcaaccctccctaaattcacacgtggctgaagaacatcaaggccttgggctgctccaggagacccctgggagtggagcacaagagctctccatagaaggggagcaagagctttttgaaccaaatcagtccccacaggtgccacctatggaaaccagccagccatacgaggaggtcagccagccatgtcaggaggtccctgacatcagccagccatgccaggacatttctgaggcgctcagccagccatgtcagaaggtccctgacatcagccagcaatgccaggagaaccatgacaatggtaaccacacatgccaggaggtccctcacatcagccagccatgccagaagtccagccaactgtgccagaaagtctctgaggaagtttgccagctatgtctggagaactccgaggaggtcagccagccatgccagggggtctctgtggaggttggcaagctggtccataagttccatgtaggggttggtagcttggtccaggaaacccttgtagaagttggcagcccagctgaagagatccctgaggaggtcatccagccataccaggagttctctgtggaggttggcaggctggcccaggagacttctgcgatcaatctgttatctcagggcatccctgagattgataaaccatcccaagagttccctgaggagattgatctgcaggcccaggaggtccctgaggagataaattagaagtcctgggtggtccctgaagtgattgatcagctgcctggagagggtattcctcaagcccagcatccatctggtgatccaaaccctcagagccagtctctagcccatgaccagcactcaccccttccaccagcaacatgtgattaattttctcattagtggtatcacactataccagccatttgagccagcaaccttttctgttggctaactcactggccagctctcaccagcggtgtctggggaagtagttctctttgtatgaagcatacctgtgccagagctgtggttgaggaggagccagttttaggttcgaagaagccattggctcctcacttagccattagacttgaataggatttccttggggtgggttggtctgtcattacccagccttctctgagcatcctaggaaatcacagattgttaaaggaaatgccgcttcactgctgaagacaccatctggcgacagcaaatgcaaaagaggggactctagggtcttcacttttctggggaaatgttcacgacttctcaaggtacgcttagaccatatgtgcattcaggggactcttgtctttgccagcactcctcaggtgagcccgggatggctatctgaaatgtctggaaaatagagtcccttccccaaacatctgacatggccactaaatctttagacttgccttatagatccttccatatcatccccaagtgccccttctgcctcagtcctgttcctctgggcaatagctctagggaaaagtaggtattagactgctgtgcaaaattcagagcaactacttaaaatgctctagaggattcttagccagtctgtgaaagtgggcctcctctgtggtggggctgtttggcttaggagatgctgtagtagtagagataatcaggttctattttaagcaatcagcagagatcaatattgtacagatacaagcaaaggtttaataaatatatatatatatatttatttctgtagttgtgccagggacagactggccaaagaccaaacactgcagggtccccaagaaatttgtccttatatcattgtgtctgagggccagatatgattatgaagctttttccaaagatccagggatgggaatgggagtgggtaggaggggtaatgcggtcattggagtcgggggctggaacattatgagtgctcaataaatataaactaatgagaatggtggtgatgga

SEQ ID NO: 2149 - DNA, 921 bp, Homo sapiens
  source 1..921: mol_type = genomic DNA
agccaagttctttccatcatcctgggccctcacctctggcataggctcttggtagtgggggcccagacagggaggcacctgccacctgcttcccttctcagccacccacagccctcatagggcagaatgggactcttgctgatgtagccgggtcccaatgataagaagtcagaactgctgccagctgggtggaacaacaataaagacctgtatgtcctccggtatgagtataaggatgggtccagaaagctccttgtgaaagccatcaccgtggagagcagcatgatcctcaatgtgctggaatatggctcacagcaagtggcagacttgaccctgaacttggatgattatatcgatgcagaacacctgggtgacttccacaggacctacaagaacagtgaggagcttcggtctcgtattgtgtctggaatcatcacacctatccatgagcagtgggaaaaggctaatgtaagcagtccccaccgggagttcccccctgctaccgccagagaggtggacccactccggattcctccacaccacccacacaccagtcggcagcctccctggtgtgatcccctgggcccgtttgttgtcgggggagaagacttagacccttttgggcctcggagaggtggcatgattgtggatcccctgagatctggcttcccaagagcacttattgacccttcctcaggcctcccgaaccgacttcctccaggcgctgtgcccccaggagctcgctttgacccctttggacccattgggaccagcccacccggcccgaggcctgacagacgcgggcagtgatgagccctgttctggagtggaaagagcacgatagagcaccaggctaagaggcacgagatcaaggcggtagtcacttccgctctgcagctagcatttcaaccatatgtggat

SEQ ID NO: 2150 - DNA, 704 bp, Homo sapiens
  source 1..704: mol_type = genomic DNA
atcatcctgggccctcacctctggcataggctcttggtagtgggggcccagacagggaggcacctgccacctgcttcccttctcagccacccacagccctcatagggcagaatgggactcttgctgatgtagacgccgaagtcgcgggcgctcatggcgggcctggaggtactgttcgcatcggcagcgccggccatcacctgcaggcaggacgcgctcgtctgcttcttgcattgggaagtggtgacacacggttacttcggcttgggtgtcggtgaccagccgggtcccaatgataagaagtcagaactgctgccagctgggtggaacaacaataaagacctgtatgtcctccggtatgagtataaggatgggtccagaaagctccttgtgaaagccatcaccgtggagagcagcatgatcctcaatgtgctggaatatggctcacagcaagtggcagacttgaccctgaacttggatgattatatcgatgcagaacacctgggtgacttccacaggacctacaagaacagtgaggagcttcggtctcgtattgtgtctggaatcatcacacctatccatgagcagtgggaaaaggctaatgtaagcagtccccaccgggagttcccccctgctaccgccagagaggtggacccactccggattcctccacaccacccacacaccagtcggcagcctccctg

SEQ ID NO: 2151 - DNA, 1737 bp, Homo sapiens
  source 1..1737: mol_type = genomic DNA
tcagctcgaccgcggagggcagctccaaaggggaccccaaaggtgcccacgcggggctggggcctcctgggcgtcgttgggagcggccactaccggcccgggtccgagctgtcagcctctccaaagcctgcgcgagaggagccgggacacgcctagcgcgggctccagtggccggtgtccagctgcctactttctgcccggatctctggctcctcatctctccggtctccgcagactaaagccctcgggatatgcagcagccatgcctgtgcacacgctgagccccggagccccgtccgcccccgccctaccttgccgcctgcggaccagggtccctggctacctgctacgggggccggcagatggtggagcccggaaaccgagcgctgtggagcgcctggaggccgacaaggccaagtacgtcaagagcctgcacgtggccaacacccgccaggagcctgtgcagcccctgctgtccaaacagccgctctttagccctgagactcgccgcacagtgctcacgcccagccgccgagccctgcctggcccctgccgacggccccagctggacctggacatcctcagcagcctcatcgacttgtgtgacagccccgtgtcccctgccgaggccagccgcactcctggacgggccgagggagccggccgtcctcccccagccacccctccgcgaccgccgcccagtacctctgcggtccgccgggtggacgtccgccccctgcccgcctcgcctgcccggccctgcccatcacccggccctgccgccgcctccagcccagcccggccgccgggtttgcaacgctccaagtcggacttgagcgagcgcttttctagggcagccgctgatctcgagcgcttttttaacttctgcggcctggacccggaggaggcgagagggttgggtgtggcccacctggcacgggccagctcggatatcgtgtccctggcagggcccagtgctgggccgggcagctctgaagggggctgctcccgccgcagctcggtgactgttgaggagcgggcccgggagcgcgttccctatggcgtgtcggtggtggagcgcaatgcccgcgtgatcaagtggttgtatgggctaaggcaggctcgggagagcccagcagctgaaggctaggcgccactgggcctggaattcgccacaggacggatcttacagaggcaagtggtccctggacctctcttgcatccattctctagacggccgtgtcagaggctccaccctgttgtgaacttggtatggaggcaaaggcttagaggctggaccagcattgttgggcaaggactgactctccaagggttttgttcttggctttggacacctgagaaccccctcctcccctcccccaatacaaggtttttgacatgagtgtactcctgcttagttcctcttgtggggctgcatttgcggtgctttgccctccccactgtgagtgaggggccaagggatctcctcaatcctgtctccccagcggctctgtttcctccttccttccttggcctctgtcctttgctgacttcctcttccttacccagcagaactcaccctggggtcggggcagtggggaggggcctatccactgctcttcctagtccttggcagctggcctaggtgggcagactataggagggactggttaggagtctgcattgctttgacttccctctccttggttaataaacacaaatgcttgtttctcaagg

SEQ ID NO: 2152 - DNA, 1809 bp, Homo sapiens
  source 1..1809: mol_type = genomic DNA
acttccccttccacggcgccccagggactttccctgcggtgggggccttcgacagtgagggccacccgctcagctcgaccgcggagggcagctccaaaggggaccccaaaggtgcccacgcggggctggggcctcctgggcgtcgttgggagcggccactaccggcccgggtccgagctgtcagcctctccaaagcctgcgcgagaggagccgggacacgcctagcgcgggctccagcagtggccggtgtccagctgcctactttctgcccggatctctggctcctcatctctccggtctccgcagactaaagccctcgggatatgcagcagccatgcctgtgcacacgctgagccccggagccccgtccgcccccgccctaccttgccgcctgcggaccagggtccctggctacctgctacgggggccggcagatggtggagcccggaaaccgagcgctgtggagcgcctggaggccgacaaggccaagtacgtcaagagcctgcacgtggccaacacccgccaggagcctgtgcagcccctgctgtccaaacagccgctctttagccctgagactcgccgcacagtgctcacgcccagccgccgagccctgcctggcccctgccgacggccccagctggacctggacatcctcagcagcctcatcgacttgtgtgacagccccgtgtcccctgccgaggccagccgcactcctggacgggccgagggagccggccgtcctcccccagccacccctccgcgaccgccgcccagtacctctgcggtccgccgggtggacgtccgccccctgcccgcctcgcctgcccggccctgcccatcacccggccctgccgccgcctccagcccagcccggccgccgggtttgcaacgctccaagtcggacttgagcgagcgcttttctagggcagccgctgatctcgagcgcttttttaacttctgcggcctggacccggaggaggcgagagggttgggtgtggcccacctggcacgggccagctcggatatcgtgtccctggcagggcccagtgctgggccgggcagctctgaagggggctgctcccgccgcagctcggtgactgttgaggagcgggcccgggagcgcgttccctatggcgtgtcggtggtggagcgcaatgcccgcgtgatcaagtggttgtatgggctaaggcaggctcgggagagcccagcagctgaaggctaggcgccactgggcctggaattcgccacaggacggatcttacagaggcaagtggtccctggacctctcttgcatccattctctagacggccgtgtcagaggctccaccctgttgtgaacttggtatggaggcaaaggcttagaggctggaccagcattgttgggcaaggactgactctccaagggttttgttcttggctttggacacctgagaaccccctcctcccctcccccaatacaaggtttttgacatgagtgtactcctgcttagttcctcttgtggggctgcatttgcggtgctttgccctccccactgtgagtgaggggccaagggatctcctcaatcctgtctccccagcggctctgtttcctccttccttccttggcctctgtcctttgctgacttcctcttccttacccagcagaactcaccctggggtcggggcagtggggaggggcctatccactgctcttcctagtccttggcagctggcctaggtgggcagactataggagggactggttaggagtctgcattgctttgacttccctctccttggttaataaacacaaatgcttgtttctcaagg

SEQ ID NO: 2153 - DNA, 2698 bp, Homo sapiens
  source 1..2698: mol_type = genomic DNA
cggcacctggcgagcggagccggagtcgggctggggaccgcggggtcgaggccggaccgcggcggggtcgggggagaaacgcgcgctgccctggcacgggcccccccccccggccgcgcggaatggtatggcccggccggagttaaggccggggggaggcggcgagtcccgcggcggcggcgacgatggggctgcgtgcaggaggaacgctgggcagggccggcgcgggtcggggggcgcccgaggggcccgggccgagcggcggcgcgcagggcggcagcatccactcgggccgcatcgccgcggtgcacaacgtgccgctgagcgtgctcatccggccgctgccgtccgtgttggaccccgccaaggtgcagagcctcgtggacacgatccgggaggacccagacagcgtgccccccatcgatgtcctctggatcaaaggggcccagggaggtgactacttctactcctttgggggctgccaccgctacgcggcctaccagcaactgcagcgagagaccatccccgccaagcttgtccagtccactctctcagacctaagggtgtacctgggagcatccacaccagacttgcagtagcagcctccttggcacctgctgccaccttcaagagcccagaagacacacctggcctccagcaggctgggccatgcagaagggatagcaggggtgcattctctttgcacctggcgagagggtctgactctgggcacccctctcaccagctacaaggccttggactcactgtacagtgtgggagccccagttcccacctctgtgacaataggatcatggccttacccttgaagcattaccgagaaggagaacagagatgggcttgaagagccacgtgctgccggctccaaattcccaaggacaaggatccctctgcatttttgtctatgtaacctcttatatggactacattcagctgcaaggaaaggaaaaccttgattgcagtggtttaaacaaacagaagattgtttttccacatagcatggattctggagatgggtggctaatggtattggttcaacaactccacgaaggtaggggtcacgtcttggatccttttgccttaatctcagtgctcgttacttcatggtcccaagatggctgctgtatccccaagaatcatgtctgcgttcaaggaaggaggggtggaggaagaggaagggccaaactagctggacccgtcaccttctatcagaaagtaaaacctcgtcagaagtctgtttcctgctctctccctctgcatatcttcacttagatgcccttggcccgagccagctaccattgcacctctagctgcaaacaaagctaagacagcagggaacagaattgtcatggctgaatagaccaatcgtgttccatctactgagactggcacactgcctcctgcaataaaactgggatcccattaccaagagagaaatgcagaattgtgtaccagttagcttttgctgtgtaacaaaccatccccaaacttggcagctagaaacaaaccctgtattttcccacaatcctatgggttggcaatttgggctgggctcaacagggcagttctgctgctcacacctgggatccctcatggagctaaggtcagctgttacctcagctgggcctggatggtctaggatagccttactcacttgcctggcaggtgacaggctgttggctggaattgcttggttctcctccatgtggcctctccagcaggctagctcaggcttattcacatgatggcttcaggattccaaagagagtgagagtagaagctgaaagacttcttgagttcttggcctggaactgggactaggacagtgtcacttctgctaagttcttttggtcagagcaaatcacaaggctttacccagattcaagggatgagaaacagactacatgtcttgatgaggggaaccacaaagagcttgtggccatttttcacctatcacaaataattttggatgggtatttatttggataaaggtatttccctcttccccctttctctctgtctcatggggcctcactctgccaagttggaaggcactaagacattgtcctggccctcagggtctaggggaagaggtgttggggcaggaagtgagtctctccatgggctggacccactgtagtaggagtgcctccttgtctgcactgctggtatggggttaggccaggtaggacattccagaggggcttctgaaaaccaagagtccctggggaaagggaacagagtaaggcaggccttgttctcactgccctctaagggaacttggtcactcggcacttttaagcctcagtttctccagttcaataataaggacaagagcttttcccatgcattctctttccccgggaaagttgactgaggtgaccagtaatagaattgaaaagggagagtgtcttcagtgcaatgtggcatcctggattgggtcttggaacaaaaacaggacattagtgggaaaattggaaatctgaaaaaagtctgaattttagttaatataccaatttcagtctcttggttttgacagatgtaccatggtgatgtaagatgttgaccttggggtaggctgggtgaagggtatacaggaactctttgtactatctctgcaacttctctgtaaatctagtatcattccaaaataaaagtttatttaatttaaaaaaaaaaa

SEQ ID NO: 2154 - DNA, 6208 bp, Homo sapiens
  source 1..6208: mol_type = genomic DNA
gcgctcccgcttgccgcagcctgcgtcgtctgccgccaccgcgcgccttcactgacctacaccaccgccgccgccgccgccgccgccgggctcgctggctggcccggtgcgggcggcggactcccgccggagaggactgccagcgccgccgccgccgccgcttcggcccgggcccgggccccgaccccgtcccgggccccagcgccggccgcccgcccggtcgggcgatgaagtgtcactatgaggcgctgggggtgcggcgcgacgccagcgaggaggagctcaagaaggcctatcggaagctggccctgaaatggcacccggataaaaatctggataatgccgcagaagcagctgaacaatttaaattaatccaagcagcatatgatgtgttgagtgaccctcaggaaagagcatggtatgataatcatagagaggccctacttaaaggtgggtttgatggcgaatatcaagatgacagcttagatttgctacgctatttcaccgttacctgttattctggttatggagatgatgaaaagggattttacacggtgtatcgtaatgtttttgaaatgattgccaaggaagaactagaatctgtgttagaggaagaggttgatgatttcccaacttttggagactcccagagtgactatgatacggtagtccatcctttctacgcttattggcagagtttctgcactcaaaagaattttgcatggaaggaagaatatgatacacgacaggcttcaaaccgctgggaaaaacgagccatggaaaaagaaaacaaaaagattcgggacaaagcaaggaaagagaagaatgagcttgtccgtcagctggtagctttcattcgtaaaagagataaaagagtgcaggcgcatcgaaaacttgtggaagaacagaatgcagagaaggcgaggaaagccgaagagatgaggcggcagcagaagctaaagcaggccaaactggtggagcagtacagagaacagagctggatgactatggccaatttggagaaagagctccaggagatggaggcacggtacgagaaggagtttggagatggatcggatgaaaatgaaatggaagaacatgaactcaaagatgaggaggatggtaaagacagtgatgaggccgaggacgctgagctctatgatgacctttactgcccagcatgtgacaaatcgttcaagacagaaaaggccatgaagaatcacgagaagtcaaagaagcatcgggaaatggtggccttgctaaaacaacagctggaggaggaagaagaaaatttttcaagacctcaaattgatgaaaatccattagatgacaattctgaggaagaaatggaagatgcaccaaaacaaaagctttctaaaaaacagaagaaaaagaaacagaaaccagcacaggatgtacctggcaaagattcatatctgcctgcagctcactttcagatggcttggggaaaaaagtgtgtgttgggagagagaagagatggagagagcgagcacaaatgtgccaaaatgttgcttgaaaacagacagaattatgatgacaatttcaatgtaaatggacctggagaaggagtaaaggttgatccagaagatactaacttaaatcaagacagtgccaaagaattggaagatagtccccaggaaaatgtcagtgtcacagagatcattaaaccatgtgatgatccaaaaagtgaagctaaaagtgttcctaaacccaaaggaaagaaaaccaaagatatgaaaaaacctgtcagagtacctgctgaaccacaaacaatgagtgttcttatcagctgtacaacctgccatagtgaatttccatctcggaataaactttttgaccatctaaaggccacaggtcatgcaagagcaccttcatcatcgtctttaaacagcgcaacaagtagtcaaagcaagaaagagaaacgtaaaaacagatagagattctgcctgtgcttttgtttgactgtctctagattttgaaaccaaaaaactgaactgaaatcatctaaagagttaaaatttcagtgatctgcaattaattacattgtggaagattattttttatcttgtaaaaacacttttttggtttaatatatatttttaaaacatttcactagtgattgaattctacttttgccatctgaattgacttgaatgtcttaaaacaggtaaatactgtaaagtgtgtattcttgatgtttattggctcatgtggacagaaatgtacagggagaattacattattttaacacacagaagtgcaactttctgctttattttctgaatttcacattacttttacttaatgcttttgtgttttgttaatacttcataatatgtgaaaaactcggatcttttaaaaagcatcatagatcatttttccatatgacactggttccgattttaaaaattatttttaaataaccgattattgattactgtattttttttctcaagaacagtgataggtagaaactaattgaacatttggtagtctttcaagaatagtgtctcttcaaggttttacttgatttaatttgatattttactggtttaccagtaaggtgtattgttcagttttttgctccgatttgaattgtggaggtggaagcaaattagtttacatggcatgtcctccctaggcacagtgacagctgtaaagtatgacggaacaaggtagcagatggtacagaatttatactatttaagaagagatgtggtgttcttcattgagtttttttcttcactattttcagaagtttttgttcttttttttttttccatcactcagtggagaaaagctttgttaatgaaagattttgtgatagagctgatgcttatacatctattctataacagtgatgaatattaacacaaaggaaatatggagaactgttataactgagtgttagaacagtcgtgtacattgatcagtattgagtccatttttaggatggattagtcagttcttttcattggtcttgaaagtaattttggctggtcgcggtggctcacgcctgtaatcccagcactttgggaggccgaggcgggcggatcacgaggtcaggagatcgagaccatcccggctaaaacggtgaaaccccgtctctactaaaaatacaaaaaattagccgggcgtagtggcgggcgcctgtagtcccagctacttgggaggctgaggcaggagaatggcgtgaacccgggaggcggagcttgcagtgagccgagatcccgccactgcactccagcctgggcgacagagcgagactccgtctcaaaaaaaaaaaaaaaaaaaaaaagaaagtaattttaaactcactggcttgaaatgtgtgctttctgtacaatgaagttattgctttccatatatccttgaatcttcagattaacgaaatgaacaaattttcggttacagatcagctctcaaacactaaagtccttaatggcaaggtcttttctgatagcttcatggatagtattgatgatcagatttcttctgtgttattgtcttaaaaataagcatttgaaccttaatttaaattcttttcttttccatttagagatatgtttttttctttaccttcatacctttctatttcttgctaatttctatcactaattccttataattgtccctgctccccttcttgatctcttcagggggaatactaggcagttttgtatcttctgatctcgtaccctgagacttcatctgaatgtgctctgccgccttcttatctgaactagatgaattggccataattatgaataggaatattaatgaaccagaggacatactagtcacatgttattatacactaaaaaataggaagtcatcttgaaaggcagttaatgtactgcaaatgtccctatgacttctttgctttctcttataccaaacatgcaggtatttaatttgtttaatgagggttgagtggagttatgtgtcgcttttattcggattgacgaaaatcaaccataattttcaagggatcttcatgggttgtgactggaagctgaccttagtcttgcgtctcatcctttatgatgttgagaaatcatctaatttctcagaactttttcttatctctaacacagttattaccataataatattgtctccatttatcatacaggatcattatgaaagtaaaatgaagtagtatatatgaaaatgctttttaaacacaaaagctttatacaaaatattgttgaatttaaataaggtaaatcttttttagtttatatatttgcagactatacatgttggattaaatgggcaattaagttttataggaatttgcttcctaagtctacttttgaagaggaaaacaggaacgtaccatatattttgctaagggtaaaatatttttggtgaattgcagacatttaatttcacttgtctgaggtaaaacaataaactaaaatacatgggcatgcatcttacactgatcttattagaggtcagtgctaagtacccatcttgattgaagttagctcagatgtggagattcatagaatgagggtccaggagaagaaagttaggggaaatctcattttctttctgtaattcattcagtggtgccaaagctgggggttccctacaatggctatttagactttccctgcttcaaaataagagcagtatccttagctctagccaagcatttttctaattcctgcctttggtcacaaagaaggaaaagcagagctgtgaatgagttagtggaggtcaagtcacatcagagttcatgacctagtgattgctggtgaagtaatattggaattttggtaccatgagaagacttataaaggatttcatcagaagttttcattttttctaaatcctcccctacaaaattttcagattggaaattactcttgtatttgtagaagattgtctctaaaattgtggtttaactcacgcaggaagtaaaattcctatagcaagacatagtttcattttagaggacccccaaaatcccgtgaattctctggtgatgattctagcctaaccttcaacataaaataatgaagagaacttttaaacttttttatgaattcctaaacattaccatttatgtggcagaagttctgttccctataatctgcaatgctgaagtatctctattcaattcccttccttatctgttaaatttaatgtctttatactaaaaatataggctcttgggattggagaggaaaaattagaggtgattttcagatttcttgttctatggaagaggaagctgagctcagggagatatgagctccacagccacagctggttaggggcggctgccagtagaacagggcagatgcctggactcccaactcagtaggccttctgttacacctcaaaatgtgttacatgggaagaaaaagattaagaaaaagcaagataattttgaagaaggacgagaggaagaggcatgaacttgtcctaacaatgtcaaagaatattttaaaggtataccagttaaagtagtgtgtggctggtgccagtagaggtcagtcaagggatccctgacgagaataaagagcccagaaacaggtccatgtttatatgggaacttgatttttgacagatacggcaagctctatggggaaaacaatatgtactaccttatacccttccccaaaaacaaagggattaaagacctaaatatgaagacaaaacttttaaatgagaatctataaggttattttcatgattttgcaaatgggaaggatttctttaaagcaagacacaaaagcatacacaggaaaaaatgatgcataaaaacatggcttctgtagaacaatagagactgtaaaagaacaagctacagacaaggaaatgtttgcaatgcatggaactgtcaaaggattcgtatctggaatacattaaagaagcaaaagaacctcatacaaaagtcattgagtaaatgacagccatgcattagaacagcaattctcaaaacttttggtctcaagatccctttacactcttcaaaagtgagaaccccaaagagttttcatgtatgtgggttaaatctattgatattttctgttagaatttaaaaattatgttaaaaaaataagaagaatgactatttttcaaaacaaaaaatgagaagagtggtattgttttacatttttacaaatctctttaacatttagcttaataaaagatagctggcctctca

SEQ ID NO: 2155 - DNA, 2583 bp, Homo sapiens
  source 1..2583: mol_type = genomic DNA
gattcccggggttggtggcagcggcggtagcagcaatggactttctcctggggaacccgttcagctctccagtgggacagcgcatcgagaaagccacagatggctccctgcagagcgaggactgggccctcaacatggagatctgcgacatcatcaacgagacggaggaaggtgactctgctgctggaggtccaggggccacaggttgtgagtccctgctaagcaatgggctaggaagattctgatgtgatcagaacctggctggatacacaaaacagtcccaaagatgccctccgagcagtaaagaagagaatcgtggggaataagaacttccacgaggtgatgctggctctcacagtcttagaaacctgtgtcaagaactgcgggcaccgcttccacgtgctggtggccagccaggacttcgtggagagtgtgctggtgaggaccatcctgcccaagaacaacccacccaccatcgtgcatgacaaagtgctcaacctcatccagtcctgggctgacgcgttccgcagctcgcccgatctgacaggtgtggtcaccatctatgaggacctgcggaggaaaggcctggagttccccatgactgacctggacatgctgtcacccatccacacaccccagaggaccgtgttcaactcagagacacaatcaggacaggattctgtgggcactgactccagccagcaagaggactctggccagcatgctgcccctctgcccgccccgcccatactctccggtgacacgcccatagcaccaaccccggaacagattgggaagctgcgcagtgagctggagatggtgagtgggaacgtgagggtgatgtcggagatgctgacggagctggtgcccacccaggccgagcccgcagacctggagctgctgcaggagctcaaccgcacgtgccgagccatgcagcagcgggtcctggagctcatccctcagatcgccaatgagcagctgacagaggagctgctcatcgtcaatgacaatctcaacaatgtgttcctgcgccatgaacgagacaggggtctcactgtgttgcccaggctagtctcaaactcttggcctcaagcagtcctccctccttggcctccgaaagcattggtattacaggcatgagccaccacacccacctgcccaccttgtatcattctgttcaagagtcacatccccaagagagacttggattggctgagcttcattgtgcctaccagctggggtttgaacggttccgaacaggccagaccaccaaggccccaagtgaggccgagccggcagctgacctgatcgacatgggccctgacccagcagccaccggcaacctctcatcccagctggcaggaatgaacctgggctccagcagtgtgagagctggcctgcagtctctggaggcctctggtcgactggaagatgagtttgacatgtttgcgctgacacggggcagctcactggctgaccaacggaaagaggtaaaatacgaagccccccaagcaacagacggcctggctggagccctggacgcccggcagcagagcactggcgcgatcccagtcacccaggcctgcctcatggaggacatcgagcagtggctgtccactgacgtgggtaatgatgcggaagagcctaagggggtcaccagcgaagaatttgacaaattcctggaagaacgggccaaagccgcggaccgattgcccaacctctccagcccctcagctgaggggcccccgggtcccccatctggcccagcgccccggaagaagacccaggagaaagatgatgacatgctgtttgccttatgagtgtggggtctggcaccctgcagcccaggtccccactgctctcacacccttaggctgggacctccctccctcctctggtgttaaggctgctttgggggtggcttgttacccccttttcctcctctttgaagacggagctgccccagctgtggctgggggtgtggaggcagtgggatgaactgggggacaggtctgcgctgcagtgggatctggctgctctgcctcctttcccaccccagctgaccatgagactttgctgagaagtggaggccccaggacaggctggctggctggctggctgcttgacccagtgtgactctccttcactgagtgataccctgctccgggcccatgccccaaggagcccttcagagcccacactgccagtcgaggcctggctggaggctggccacagtggaaattctgccgagcctcttgtcccttccctgctctgctgcatggggccccatggctttggctggccactgagggtagggtgtggaggtgtggaggccccctgaggagctgcggcggcccaggtacgaagctgcaactctgcgcgcagtgggcgagatctcatcagccccaggctgcaggtgaggcttcaggggatgctggggccccactgcccctccgctgccttgccctccatccttcctctgttccttctggccgggcaccacagcactggggctcacctcttggttgatcctcttgtactgggagaggtgccttttgtatccccaattaaaggtagaaaacc

SEQ ID NO: 2156 - DNA, 6496 bp, Homo sapiens
  source 1..6496: mol_type = genomic DNA
ccgagccgggagccgagcgcgctgggcgcggccgtcccgctgccgccgccaagcccggagtgcgccagcggccatggttcccgcggcggcgccgggcgcctgagccccgggacgcaagcgctggaggcgggctgccggctgtgcgggcgctccggagagaccgacagaaggtgagcactgtgggctatgggatggatgaggtggagcaggaccagcatgaggcccgactcaaggagctgtttgacagttttgacacgacgggcacagggtccctggggcaggaggaactcaccgacctttgccacatgttgagcttggaggaggtggccccagtgctgcagcagacattacttcaggacaacctcttgggcagggtacattttgaccaatttaaagaagcattaatactcatcttgtccagaactctgtcaaatgaagaacactttcaagaaccagactgctcactagaagctcagcccaaatatgttagaggtgggaagcgttacggacgaaggtccttgcccgagttccaagagtccgtggaggagtttcctgaagtgacggtgattgagccactggatgaagaagcgcggccttcacacatcccagccggtgactgcagtgagcactggaagacgcaacgcagtgaggagtatgaagcggaaggccagttaaggttttggaacccagatgacttgaatgcttcacagagtggatcttcccctccccaagactggatagaagagaaactgcaagaagtttgtgaagatttggggatcacccgtgatggtcacctgaaccggaagaagctggtctccatctgtgagcagtatggtttacagaatgtggatggagagatgctcgaggaagtattccataatcttgatcctgacggtacaatgagtgtagaagattttttctatggtttgtttaaaaatggaaaatctcttacaccatcagcatctactccatatagacaactaaaaaggcacctttccatgcagtctttcgatgagagtggacgacgtaccacaacctcatcagcaatgacaagtaccattggctttcgggtcttctcctgcctggatgatgggatgggccatgcatctgtggagagaatactggacacctggcaggaagagggcattgagaacagccaggagatcctgaaggccttggatttcagcctcgatggaaacatcaatttgacagaattaacactggcccttgaaaatgaacttttggttaccaagaacagcattcaccaggcggctctggccagctttaaggctgaaatccggcatttgttggaacgagttgatcaggtggtcagagaaaaagagaagctacggtcagatctggacaaggccgagaagctcaagtctttaatggcctcggaggtggatgatcaccatgcggccatagagcggcggaatgagtacaacctcaggaaactggatgaagagtacaaggagcgaatagcagccttaaaaaatgaactccgaaaagagagagagcagatcctgcagcaggcaggcaagcagcgtttagaacttgaacaggaaattgaaaaggcaaaaacagaagagaactatatccgggaccgccttgccctctctttaaaggaaaacagtcgtctggaaaatgagcttctagaaaatgcagagaagttggcagaatatgagaatctgacaaacaaacttcagagaaatttggaaaatgtgttagcagaaaagtttggtgacctcgatcctagcagtgctgagttcttcctgcaagaagagagactgacacagatgagaaatgaatatgagcggcagtgcagggtactacaagaccaagtagatgaactccagtctgagctggaagaatatcgtgcacaaggcagagtgctcaggcttccgttgaagaactcaccgtcagaagaagttgaggctaacagcggtggcattgagcccgaacacgggctcggttctgaagaatgcaatccattgaatatgagcattgaggcagagctggtcattgaacagatgaaagaacaacatcacagggacatatgttgcctcagactggagctcgaagataaagtgcgccattatgaaaagcagctggacgaaaccgtggtcagctgcaagaaggcacaggagaacatgaagcaaaggcatgagaacgaaacgcacaccttagaaaaacaaataagtgaccttaaaaatgaaattgctgaacttcaggggcaagcagcagtgctcaaggaggcacatcatgaggccacttgcaggcatgaggaggagaaaaaacaactgcaagtgaagcttgaggaggaaaagactcacctgcaggagaagctgaggctgcaacatgagatggagctcaaggctagactgacacaggctcaagcaagctttgagcgggagagggaaggccttcagagtagcgcctggacagaagagaaggtgagaggcttgactcaggaactagagcagtttcaccaggagcagctgacaagcctggtggagaaacacactcttgagaaagaggagttaagaaaagagctcttggaaaagcaccaaagggagcttcaggagggaagggaaaaaatggaaacagagtgtaatagaagaacctctcaaatagaagcccagtttcagtctgattgtcagaaagtcactgagaggtgtgaaagcgctctgcaaagcctggaggggcgctaccgccaagagctgaaggacctccaggaacagcagcgtgaggagaaatcccagtgggaatttgagaaggacgagctcacccaggagtgtgcggaagcccaggagctgctgaaagagactcttaagagagagaaaacaacttctctggtcctgacccaggagagagagatgctggagaaaacatacaaagaacatttgaacagcatggtcgtcgagagacagcagctactccaagacctggaagacctaagaaatgtatctgaaacccagcaaagcctgctgtctgaccagatacttgagctgaagagcagtcacaaaagggaactgagggagcgtgaggaggtcctgtgccaggcaggggcttcggagcagctggccagccagcggctggaaagactagaaatggaacatgaccaggaaaggcaggaaatgatgtccaagcttctagccatggagaacattcacaaagcgacctgtgagacagcagatcgagaaagagccgagatgagcacagaaatctccagacttcagagtaaaataaaggaaatgcagcaggcaacatctcctctctcaatgcttcagagtggttgccaggtgataggagaggaggaggtggaaggagatggagccctgtccctgcttcagcaaggggagcagctgttggaagaaaatggggacgtcctcttaagcctgcagagagctcatgaacaggcagtgaaggaaaatgtgaaaatggctactgaaatttctagattgcaacagaggctacaaaagttagagccagggttagtaatgtcttcttgtttggatgagccagctactgagttttttggaaatactgcggaacaaacagagcagtttttacagcaaaaccgaacgaagcaagtagaaggtgtgaccaggcggcatgtcctaagtgacctggaagatgatgaggtccgggacctgggaagtacagggacgagctctgttcagagacaggaagtcaaaatagaggagtctgaagcttcagtagagggtttttctgagcttgaaaacagtgaagagaccaggactgaatcctgggagctgaagaatcagattagtcagcttcaggaacagctaatgatgttatgtgcggactgtgatcgagcttctgaaaagaaacaggacctactttttgatgtttctgtgctaaaaaagaaactgaagatgcttgagagaatccctgaggcttctcccaaatataagctgttgtatgaagatgtgagccgagaaaatgactgccttcaggaagagctgagaatgatggagacacgctacgatgaggcactagaaaataacaaagaactcactgcagaggttttcaggttgcaggatgagctgaagaaaatggaggaagtcactgaaacattcctcagcctggaaaagagttacgatgaggtcaaaatagaaaatgaggggctgaatgttctggttttgagacttcaaggcaagattgagaagcttcaggaaagcgtggtccagcggtgtgactgctgcttatgggaagccagtttagagaacctggaaatcgaacctgatggaaatatactccagctcaatcagacactggaagagtgtgtgcccagggttaggagtgtacatcatgtcatagaggaatgtaagcaagaaaaccagtaccttgaggggaacacacagctcttggaaaaagtaaaagcacatgaaattgcctggttacatggaacaattcagacacatcaagaaaggccaagagtacagaatcaagttatactggaggaaaacactactctcctaggctttcaagacaaacattttcagcatcaggccaccatagcagagttagaactggagaaaacaaagttacaggagctgactaggaagttgaaggagagagtcactattttagttaagcaaaaagatgtactttctcacggagaaaaggaggaagagctgaaggcaatgatgcatgacttgcagatcacgtgcagtgagatgcagcaaaaagttgaacttctgagatatgaatctgaaaagcttcaacaggaaaattctattttgagaaatgaaattactactttaaatgaagaagatagcatttctaacctgaaattagggacattaaatggatctcaggaagaaatgtggcaaaaaacggaaactgtaaaacaagaaaatgctgcagttcagaagatggttgaaaatttaaagaaacagatttcagaattaaaaatcaaaaaccaacaattggatttggaaaatacagaacttagccaaaagaactctcaaaaccaggaaaaactgcaagaacttaatcaacgtctaacagaaatgctatgccagaaggaaaaagagccaggaaacagtgcattggaggaacgggaacaagagaagtttaatctgaaagaagaactggaacgttgtaaagtgcagtcctccactttagtgtcttctctggaggcggagctctctgaagttaaaatacagacccatattgtgcaacaggaaaaccaccttctcaaagatgaactggagaaaatgaaacagctgcacagatgtcccgatctctctgacttccagcaaaaaatctctagtgttctaagctacaacgaaaaactgctgaaagaaaaggaagctctgagtgaggaattaaatagctgtgtcgataagttggcaaaatcaagtcttttagagcatagaattgcgacgatgaagcaggaacagaaatcctgggaacatcagagtgcgagcttaaagtcacagctggtggcttctcaggaaaaggttcagaatttagaagacaccgtgcagaatgtaaacctgcaaatgtcccggatgaaatctgacctacgagtgactcagcaggaaaaggaggctttaaaacaagaagtgatgtctttacataagcaacttcagaatgctggtggcaagagctgggccccagagatagctactcatccatcagggctccataaccagcagaaaaggctgtcctgggacaagttggatcatctgatgaatgaggaacagcagctgctttggcaagagaatgagaggctccagaccatggtacagaacaccaaagccgaactcacgcactcccgggagaaggtccgtcagttggaatccaatcttcttcccaagcaccaaaaacatctaaacccatcaggtaccatgaatcccacagagcaagaaaaattgagcttaaagagagagtgtgatcagtttcagaaagaacaatctcctgctaacaggaaggtcagtcagatgaattcccttgaacaagaattagaaacaattcatttggaaaatgaaggcctgaaaaagaaacaagtaaaactggatgagcagctcatggagatgcagcacctgaggtccactgcgacgcctagcccgtcccctcatgcttgggatttgcagctgctccagcagcaagcctgtccgatggtgcccagggagcagtttctgcagcttcaacgccagctgctgcaggcagaaaggataaaccagcacctgcaggaggaacttgaaaacaggacctccgaaaccaacacaccacagggaaaccaggaacaactggtaactgtcatggaggaacgaatgatagaagttgaacagaaactgaaactagtgaaaaggcttcttcaagagaaagtgaatcagctcaaagaacaagtgagcctacccggtcatctctgttcacccacctcacattccagctttaactccagttttacatccctttattgccattaactcgttaacttatgttgtctaataaaggcaaa

SEQ ID NO: 2157 - DNA, 4216 bp, Homo sapiens
  source 1..4216: mol_type = genomic DNA
gagagaccgacagaaggtgagcactgtgggctatgggatggatgaggtggagcaggaccagcatgaggcccgactcaaggagctgtttgacagttttgacacgacgggcacagggtccctggggcaggaggaactcaccgacctttgccacatgttgagcttggaggaggtggccccagtgctgcagcagacattacttcaggacaacctcttgggcagggtacattttgaccaatttaaagaagcattaatactcatcttgtccagaactctgtcaaatgaagaacactttcaagaaccagactgctcactagaagctcagcccaaatatgttagaggtgggaagcgttacggacgaaggtccttgcccgagttccaagagtccgtggaggagtttcctgaagtgacggtgattgagccactggatgaagaagcgcggccttcacacatcccagccggtgactgcagtgagcactggaagacgcaacgcagtgaggagtatgaagcggaaggccagttaaggttttggaacccagatgacttgaatgcttcacagagtggatcttcccctccccaagactggatagaagagaaactgcaagaagtttgtgaagatttggggatcacccgtgatggtcacctgaaccggaagaagctggtctccatctgtgagcagtatggtttacagaatgtggatggagagatgctcgaggaagtattccataatcttgatcctgacggtacaatgagtgtagaagattttttctatggtttgtttaaaaatggaaaatctcttacaccatcagcatctactccatatagacaactaaaaaggcacctttccatgcagtctttcgatgagagtggacgacgtaccacaacctcatcagcaatgacaagtaccattggctttcgggtcttctcctgcctggatgatgggatgggccatgcatctgtggagagaatactggacacctggcaggaagagggcattgagaacagccaggagatcctgaaggccttggatttcagcctcgatggaaacatcaatttgacagaattaacactggcccttgaaaatgaacttttggttaccaagaacagcattcaccaggcggctctggccagctttaaggctgaaatccggcatttgttggaacgagttgatcaggtggtcagagaaaaagagaagctacggtcagatctggacaaggccgagaagctcaagtctttaatggcctcggaggtggatgatcaccatgcggccatagagcggcggaatgagtacaacctcaggaaactggatgaagagtacaaggagcgaatagcagccttaaaaaatgaactccgaaaagagagagagcagatcctgcagcaggcaggcaagcagcgtttagaacttgaacaggaaattgaaaaggcaaaaacagaagagaactatatccgggaccgccttgccctctctttaaaggaaaacagtcgtctggaaaatgagcttctagaaaatgcagagaagttggcagaatatgagaatctgacaaacaaacttcagagaaatttggaaaatgtgttagcagaaaagtttggtgacctcgatcctagcagtgctgagttcttcctgcaagaagagagactgacacagatgagaaatgaatatgagcggcagtgcagggtactacaagaccaagtagatgaactccagtctgagctggaagaatatcgtgcacaaggcagagtgctcaggcttccgttgaagaactcaccgtcagaagaagttgaggctaacagcggtggcattgagcccgaacacgggctcggttctgaagaatgcaatccattgaatatgagcattgaggcagagctggtcattgaacagatgaaagaacaacatcacagggacatatgttgcctcagactggagctcgaagataaagtgcgccattatgaaaagcagctggacgaaaccgtggtcagctgcaagaaggcacaggagaacatgaagcaaaggcatgagaacgaaacgcacaccttagaaaaacaaataagtgaccttaaaaatgaaattgctgaacttcaggggcaagcagcagtgctcaaggaggcacatcatgaggccacttgcaggcatgaggaggagaaaaaacaactgcaagtgaagcttgaggaggaaaagactcacctgcaggagaagctgaggctgcaacatgagatggagctcaaggctagactgacacaggctcaagcaagctttgagcgggagagggaaggccttcagagtagcgcctggacagaagagaaggtgagaggcttgactcaggaactagagcagtttcaccaggagcagctgacaagcctggtggagaaacacactcttgagaaagaggagttaagaaaagagctcttggaaaagcaccaaagggagcttcaggagggaagatatgaatctgaaaagcttcaacaggaaaattctattttgagaaatgaaattactactttaaatgaagaagatagcatttctaacctgaaattagggacattaaatggatctcaggaagaaatgtggcaaaaaacggaaactgtaaaacaagaaaatgctgcagttcagaagatggttgaaaatttaaagaaacagatttcagaattaaaaatcaaaaaccaacaattggatttggaaaatacagaacttagccaaaagaactctcaaaaccaggaaaaactgcaagaacttaatcaacgtctaacagaaatgctatgccagaaggaaaaagagccaggaaacagtgcattggaggaacgggaacaagagaagtttaatctgaaagaagaactggaacgttgtaaagtgcagtcctccactttagtgtcttctctggaggcggagctctctgaagttaaaatacagacccatattgtgcaacaggaaaaccaccttctcaaagatgaactggagaaaatgaaacagctgcacagatgtcccgatctctctgacttccagcaaaaaatctctagtgttctaagctacaacgaaaaactgctgaaagaaaaggaagctctgagtgaggaattaaatagctgtgtcgataagttggcaaaatcaagtcttttagagcatagaattgcgacgatgaagcaggaacagaaatcctgggaacatcagagtgcgagcttaaagtcacagctggtggcttctcaggaaaaggttcagaatttagaagacaccgtgcagaatgtaaacctgcaaatgtcccggatgaaatctgacctacgagtgactcagcaggaaaaggaggctttaaaacaagaagtgatgtctttacataagcaacttcagaatgctggtggcaagagctgggccccagagatagctactcatccatcagggctccataaccagcagaaaaggctgtcctgggacaagttggatcatctgatgaatgaggaacagcagctgctttggcaagagaatgagaggctccagaccatggtacagaacaccaaagccgaactcacgcactcccgggagaaggtccgtcagttggaatccaatcttcttcccaagcaccaaaaacatctaaacccatcaggtaccatgaatcccacagagcaagaaaaattgagcttaaagagagagtgtgatcagtttcagaaagaacaatctcctgctaacaggaaggtcagtcagatgaattcccttgaacaagaattagaaacaattcatttggaaaatgaaggcctgaaaaagaaacaagtaaaactggatgagcagctcatggagatgcagcacctgaggtccactgcgacgcctagcccgtcccctcatgcttgggatttgcagctgctccagcagcaagcctgtccgatggtgcccagggagcagtttctgcagcttcaacgccagctgctgcaggcagaaaggataaaccagcacctgcaggaggaacttgaaaacaggacctccgaaaccaacacaccacagggaaaccaggaacaactggtaactgtcatggaggaacgaatgatagaagttgaacagaaactgaaactagtgaaaaggcttcttcaagagaaagtgaatcagctcaaagaacaagtgagcctacccggtcatctctgttcacccacctcacattccagctttaactccagttttacatccctttattgccattaactcgttaacttatgttgtctaataaaggcaaattctattataaat

SEQ ID NO: 2158 - DNA, 3317 bp, Homo sapiens
  source 1..3317: mol_type = genomic DNA
gttctccgctgaggaggagcggggcagaggagggaggcagcgggtgagagttcagagttcagcagcagcagcccgagcccatgattcccatatgccctgtagtttctttcacctatgtgcccagccggctgggggaagatgccaaaatggcgaccggcaactactttggattcacccacagcggggcggcggcggcggcggctgcggcccaatatagccagcagccagcttcgggtgtagcctattctcatccaactacagttgctagctacactgtccatcaggctccagtagctgctcacacagttactgctgcctatgcaccagcagccgccacagttgcagttgccaggcctgctccagtagctgttgcagctgctgcaacagctgctgcttatggaggctaccccactgcacacacagcaactgactatggttatactcagaggcaacaagaagcaccaccaccaccacccccagctactacacaaaactaccaggattcatactcatatgtaaggtccacagctcctgctgtagcttatgatagtaagcaatactaccaacaaccaacagcaactgctgctgctgtagctgccgctgcccaacctcagccttctgttgctgaaacttactatcagacagcccccaaagcaggttacagccaaggtgcaactcagtatactcaagcccagcaaactcgacaagtgacagccataaaaccagccacaccaagtccagctaccactactttctccatctatcctgtatcctccaccgtacagccagtagcagctgcggctactgtggtgccatcctatactcagagtgctacttacagtaccacagcagttacatattctggtacgtcttattcaggttatgaagcagcagtgtattcagctgcatcttcctactatcaacagcagcagcagcaacagaagcaggcagcagcagcagctgctgctgctgctgcaacagctgcctggacagggaccacctttactaaaaaagcaccattccaaaataaacaactgaaaccaaaacagcctcccaaaccaccacagattcactattgtgatgtttgtaagatcagctgtgctggaccacagacttataaagaacatttagaaggacagaaacataaaaaaaaagaagctgcattgaaagcctcacaaaataccagcagcagcaacagttctactcgtgggactcaaaatcagctacgttgtgagctctgcgatgtgtcttgtacaggagcagatgcgtatgctgcccacattcgtggtgctaagcatcagaaagtggttaagttacacacaaaacttggtaaacccattccatcaacagaaccaaatgttgttagccaagctacttcttcaacagctgtatctgcttcaaagccgactgcctctccttcaagcattgcagcaaacaattgtactgtgaatacgtcatcagttgcaacgtcttcaatgaagggtcttacgactacaggaaactcgtctcttaatagcacatctaacactaaagtatcagcagtgcctacaaatatggctgccaagaaaacatctacccccaaaataaattttgttggtggtaataagctgcagtcaacaggaaataaagcagaagacataaaaggaaccgaatgtgttaaaagtactcctgtcacttctgctgtgcagattcctgaagtaaagcaagacacagtgtcagaaccagtcacacctgcatctcttgctgctttacagagtgatgtgcagccagtgggccatgattatgtggaagaggtacgaaatgatgaaggaaaagtaattcggttccattgtaaattatgcgagtgcagctttaatgatcccaatgctaaggagatgcacttaaaagggcgaagacacagacttcaatataaaaaaaaagtaaatccagatttgcaagtagaagtaaagcctagtattcgagcaagaaagattcaagaagagaaaatgaggaagcaaatgcagaaggaggagtactggcgaagacgagaagaagaggagcgttggagaatggaaatgagacgttatgaagaggacatgtactggaggagaatggaggaagaacaacatcattgggatgatcgccgccgaatgccagatggaggttatcctcatggtcctccaggcccattaggccttctgggagtccgaccaggcatgcctcctcagcctcaggggcctgcacccttacgtcgtcctgactcatctgatgaccgttatgtaatgacaaaacatgccaccatttatccaactgaagaggagttacaggcagttcagaaaattgtttctattactgaacgtgctttaaaactcgtttcagacagtttgtctgaacatgagaagaacaagaacaaagagggagatgataagaaagagggaggtaaagacagagctttgaaaggagttttgcgagtgggagtattggcaaaaggattacttctccgaggagatagaaatgtcaaccttgttttgctgtgctcagagaaaccttcaaagacattattaagccgtattgcagaaaacctacccaaacagcttgctgttataagccctgagaagtatgacataaaatgtgctgtatctgaagcggcaataattttgaattcatgtgtggaacccaaaatgcaagtcactatcacactgacatctccaattattcgagaagagaacatgagggaaggagatgtaacctcgggtatggtgaaagacccaccggacgtcttggacaggcaaaaatgccttgacgctctggctgctctacgccacgctaagtggttccagcaagctagagctaatggtctgcagtcctgtgtgattatcatacgcattcttcgagacctctgtcagcgagttccaacttggtctgattttccaagctgggctatggagttactagtagagaaagcaatcagcagtgcttctagccctcagagccctggggatgcactgagaagagtttttgaatgcatttcttcagggattattcttaaaggtagtcctggacttctggatccttgtgaaaaggatccctttgataccttggcaacaatgactgaccagcagcgtgaagacatcacatccagtgcacagtttgcattgagactccttgcattccgccagatacacaaagttctaggcatggatccattaccgcaaatgagccaacgttttaacatccacaacaacaggaaacgaagaagagatagtgatggaatggatttgaagctgaggggaaaaaagacaaaaaagattatgataacttttaaaaagtgtctgtaa

SEQ ID NO: 2159 - DNA, 561 bp, Homo sapiens
  source 1..561: mol_type = genomic DNA
cctccctctcacctgctcctctacctgctccaccctcaatccaccagaaccatgggctgctgtggctgctctggaggctgtggctccggctgtgggggctgtggctctggctgtgggggctgtgggtccagctgctgtgtgcccatctgctgctgcaagcccgtgtgctgctgtgtgccagcctgttcctgcaccagctgtggctcttgtgggggctccaaggggtgctgtggctcttgtgggggctccaaagggggctgtggctcttgtgggggctccaagggaggctgtggctcttgtggctgctcccagtgcagttgctgcaagccctgctactgttcctcaggctgtgggtcatcctgctgccagtccagctgctgcaagccctgctgttcccaggccagctgctgtgtccccatttgctgccagtgcaaaatctgaggctctgactttggacctcaggtgagtccagcatatccacaccacccaagaagtgaccagtgctgcatttcagttctggctgtcccacagctccaggagttgtgtcccctgaattttgca

SEQ ID NO: 2160 - DNA, 1958 bp, Homo sapiens
  source 1..1958: mol_type = genomic DNA
gttttggcacgacagttatgaaaaagaaagacacttgagggattccgggttttcactttggaattggagataagggatcgtgggcccgtgtagtctcggaagaggttgtgtagtttaggatcaaagagctggccgtgatgagggcagggatgcaggcgcagcccgtctgactccaaactgccttgctcttaacccgactgcaagaccctcaagaacacgggccccatggttttcctcttatgtttctatcatctctaaaatacaacagcctggtgggcagggcctcctgcactggccatgcccatgcccacggagggcaccccgccacctctgagtggcacccccatcccagtcccagcctacttccgccacgcagaacctggattctccctcaagaggcccagggggctcagccggagcctcccacctccgccccctgccaagggcagcattcccatcagccgcctcttccctcctcggaccccaggctggcaccagctgcagccccggcgggtgtcattccggggcgaggcctcagagactctgcagagccctgggtatgacccaagccggccagagtccttcttccagcagagcttccagaggctcagccgcctgggccatggctcctacggagaggtcttcaaggtgcgctccaaggaggacggccggctctatgcggtaaagcgttccatgtcaccattccggggccccaaggaccgggcccgcaagttggccgaggtgggcagccacgagaaggtggggcagcacccatgctgcgtgcggctggagcaggcctgggaggagggcggcatcctgtacctgcagacggagctgtgcgggcccagcctgcagcaacactgtgaggcctggggtgccagcctgcctgaggcccaggtctggggctacctgcgggacacgctgcttgccctggcccatctgcacagccagggcctggtgcaccttgatgtcaagcctgccaacatcttcctggggccccggggccgctgcaagctgggtgacttcggactgctggtggagctgggtacagcaggagctggtgaggtccaggagggagacccccgctacatggcccccgagctgctgcagggctcctatgggacagcagcggatgtgttcagtctgggcctcaccatcctggaagtggcatgcaacatggagctgccccacggtggggagggctggcagcagctgcgccagggctacctgccccctgagttcactgccggtctgtcttccgagctgcgttctgtccttgtcatgatgctggagccagaccccaagctgcgggccacggccgaggccctgctggcactgcctgtgttgaggcagccgcgggcctggggtgtgctgtggtgcatggcagcggaggccctgagccgagggtgggccctgtggcaggccctgcttgccctgctctgctggctctggcatgggctggctcaccctgccagctggctacagcccctgggcccgccagccaccccgcctggctcaccaccctgcagtttgctcctggacagcagcctctccagcaactgggatgacgacagcctaggtccatgtgttctgaaaaggacagagggggccttggagtgcagccagatggaaggactttgaaggctgtccaagtgctgctttcagagtgcaccaagtttttattgtccctgactgtggctccctgcctgtttgtcaggcgggagcctggagcctgcacagggacagagctggtttcatccggcactccctagccctggacaccctccttgtctcgcctgccctcctgcaggccttcactctcccctgaggctgtcctggcccggactgtggggagcacctccaccccccggagcaggtgcacacccagggatgccctggacctaagtgacatcaactcagagcctcctcggggctccttcccctcctttgagcctcgg

SEQ ID NO: 2161 - DNA, 3759 bp, Homo sapiens
  source 1..3759: mol_type = genomic DNA
cacgcgccccgatacccggcacaggagccacctcccagagccccgcagtccatgcctcagtcggcctgcgctcctcagcctggcggttctacctccgagggttcgcccgcccttggttttccttacaccttagcctttggctcctttgaccactcgaagccccacagcgtgttccagcggacttcaccagcagacccagaagtggtgggtgaaacactgcctctgttcctccttgagcctgtcgggagctgctgcctgccaccaccatgtctgctgcaaatcctgagactccaaactcaaccatctccagagaggccagcacccagtcttcatcagctgcagctagccaaggctgggtgttaccagaaggcaaaatcgtgccaaacactgtttttgttggtggaattgatgctaggatggatgaaactgagattggaagctgctttggtagatacggttcagtgaaagaagtgaagataatcacgaatcgaactggtgtgtccaaaggctatggatttgtttcgtttgttaatgacgtggatgtccagaagatagtaggatcacagatacatttccatggtaaaaagctgaagctgggccctgcaatcaggaaacaaaagttatgtgctcgtcatgtgcagccacgtcctttggtagttaatcctcctcctccaccacagtttcagaacgtctggcggaatccaaacactgaaacctacctgcagccccaaatcacgccgaatcctgtaactcagcacgttcaggcttactctgcttatccacattcaccaggtcaggtcatcactggatgtcagttgcttgtatataattatcaggaatatcctacttatcccgattcagcatttcaggtcaccactggatatcagttgcctgtatataattatcagccatttcctgcttatccaagatcaccatttcaggtcactgctggatatcagttgcctgtatataattatcaggcatttcctgcttatccaaattcaccatttcaagtcgccactggatatcagttccctgtatacaattatcagccatttcctgcttatccaagttcaccatttcaggtcactgctggatatcagttgcctgtatataattatcaggcatttcctgcttatccaaattcaccatttcaagtcgccactggatatcagttccctgtatacaattatcaggcatttcctgcttatccaaattcaccagttcaggtcaccactggatatcagttgcctgtatacaattatcaggcatttcctgcttatccaaattcaccagttcaggtcaccactggatatcagttgcctgtatacaattatcaggcatttcctgcttatccaagttcaccatttcaggtcaccactggatatcagttgcctgtatataattatcaggcatttcctgcttatccaagttcaccatttcaggtcaccactggatatcagttgcctgtatataattatcaggcatttcctgcttatccaagttcaccatttcaggtcaccactggatatcagttgcctgtatataattatcaggcatttcctgcttatccaagttcaccatttcaggtcaccactggatatcagttgcctgtatataattatcaggcatttcctgcttatccaagttcaccatttcaggtcaccactggatatcagttgcctgtatataattatcaggcatttcctgcttatccaaattcagcagttcaggtcaccactggatatcagttccatgtatacaattaccagatgccaccgcagtgccctgttggggagcaaaggagaaatctgtggaccgaagcatacaaatggtggtatcttgtctgtttaatccagagaagagactgataaattccgttgttactcaagatgactgcttcaagggtaaaagagtgcatcgctttagaagaagtttggcagtatttaaatctgttggatcctctcagctatctagtttcatgggaagttgctggttttgaatattaagctaaaagttttccactattacagaaattctgaattttggtaaatcacactgaaactttctgtataacttgtattattagactctctagttttatcttaacactgaaactgttcttcattagatgtttatttagaacctggttctgtgtttaatatatagtttaaagtaacaaataatcgagactgaaagaatgttaagatttatctgcaaggatttttaaaaaattgaaacttgcattttaagtgtttaaaagcaaatactgactttcaaaaaagtttttaaaacctgatttgaaagctaacaattttgatagtctgaacacaagcatttcacttctccaagaagtacctgtgaacagtacaatatttcagtattgagctttgcatttatgatttatctagaaatttacctcaaaagcagaatttttaaaactgcatttttaatcagtggaactcaatgtatagttagctttattgaagtcttatccaaacccagtaaaacagattctaagcaaacagtccaatcagtgagtcataatgtttattcaaagtattttatcttttatctagaatccacatatgtatgtccaatttgattgggatagtagttaggataactaaaattctgggcctaattttttaaagaatccaagacaaactaaactttactgggtatataaccttctcaatgagttaccattcttttttataaaaaaaattgttccttgaaatgctaaacttaatggctgtatgtgaaatttgcaaaatactggtattaaagaacgctgcagcttttttatgtcactcaaaggttaatcggagtatctgaaaggaattgtttttataaaaacattgaagtattagttacttgctataaatagatttttatttttgttttttagcctgttatatttccttctgtaaaataaaatatgtccagaagaggcatgttgtttctagattaggtagtgtcctcattttatattgtgaccacacagctagagcaccagagcccttttgctatactcacagtcttgttttcccagcctcttttactagtctttcaggaggtttgctcttagaactggtgatgtaaagaatggaagtagctgtatgagcagttcaaaggccaagccgtggaatggtagcaatgggatataatacctttctaagggaaacatttgtatcagtatcatttgatctgccatggacatgtgtttaaagtggctttctggcccttctttcaatggcttcttccctaaaacgtggagactctaagttaatgtcgttactatgggccatattactaatgcccactggggtctatgatttctcaaaattttcattcggaatccgaaggatacagtctttaaactttagaattcccaagaaggctttattacacctcagaaattgaaagcaccatgactttgtccattaaaaaattatccatagtttttttagtgcttttaacattccgacatacatcattctgtgattaaatctccagatttctgtaaatgatacctacattctaaagagttaattctaattattccgatatgaccttaaggaaaagtaaaggaataaatttttgtctttgttgaagtatttaatagagtaaggtaaagaagatattaagtccctttcaaaatggaaaattaattctaaactgagaaaaatgttcctactacctattgctgatactgtctttgcataaatgaataaaaataaactttttttcttcaaa

SEQ ID NO: 2162 - DNA, 1392 bp, Homo sapiens
  source 1..1392: mol_type = genomic DNA
tcagtcggcctgcgctcctcagcctggcggttctacctccgagggttcgcccgcccttggttttccttacaccttagcctttggctcctttgaccactcgaagccccacagcgtgttccagcggacttcaccagcagacccagaagtggtgggtgaaacactgcctctgttcctccttgagcctgtcgggagctgctgcctgccaccaccatgtctgctgcaaatcctgagactccaaactcaaccatctccagagaggccagcacccagtcttcatcagctgcagctagccaaggctgggtgttaccagaaggcaaaatcgtgccaaacactgtttttgttggtggaattgatgctaggatggatgaaactgagattggaagctgctttggtagatacggttcagtgaaagaagtgaagataatcacgaatcgaactggtgtgtccaaaggctatggatttgtttcgtttgttaatgacgtggatgtccagaagatagtaggatcacagatacatttccatggtaaaaagctgaagctgggccctgcaatcaggaaacaaaagttatgtgctcgtcatgtgcagccacgtcctttggtagttaatcctcctcctccaccacagtttcagaacgtctggcggaatccaaacactgaaacctacctgcagccccaaatcacgccgaatcctgtaactcagcacgttcaggcttactctgcttatccacattcaccaggtcaggtcatcactggatgtcagttgcttgtatataattatcaggaatatcctacttatcccgattcagcatttcaggtcaccactggatatcagttgcctgtatataattatcagccatttcctgcttatccaagatcaccatttcaggtcactgctggatatcagttgcctgtatataattatcaggcatttcctgcttatccaaattcaccatttcaagtcgccactggatatcagttccctgtatacaattatcagccatttcctgcttatccaagttcaccatttcaggtcactgctggatatcagttgcctgtatataattatcaggcatttcctgcttatccaaattcaccagttcaggtcaccactggatatcagttgcctgtatacaattatcaggcatttcctgcttatccaagttcaccatttcaggtcaccactggatatcagttgcctgtatataattatcaggcatttcctgcttatccaaattcagcagttcaggtcaccactggatatcagttccatgtatacaattaccagatgccaccgcagtgccctgttggggagcaaaggagaaatctgtggaccgaagcatacaaatggtggtatcttgtctgtttaatccagagaagagactgataaattccg

SEQ ID NO: 2163 - DNA, 3273 bp, Homo sapiens
  source 1..3273: mol_type = genomic DNA
tcagtcggcctgcgctcctcagcctggcggttctacctccgagggttcgcccgcccttggttttccttacaccttagcctttggctcctttgaccactcgaagccccacagcgtgttccagcggacttcaccagcagacccagaagtggtgggtgaaacactgcctctgttcctccttgagcctgtcgggagctgctgcctgccaccaccatgtctgctgcaaatcctgagactccaaactcaaccatctccagagaggccagcacccagtcttcatcagctgcagctagccaaggctgggtgttaccagaaggcaaaatcgtgccaaacactgtttttgttggtggaattgatgctaggatggatgaaactgagattggaagctgctttggtagatacggttcagtgaaagaagtgaagataatcacgaatcgaactggtgtgtccaaaggctatggatttgtttcgtttgttaatgacgtggatgtccagaagatagtaggatcacagatacatttccatggtaaaaagctgaagctgggccctgcaatcaggaaacaaaagttatgtgctcgtcatgtgcagccacgtcctttggtagttaatcctcctcctccaccacagtttcagaacgtctggcggaatccaaacactgaaacctacctgcagccccaaatcacgccgaatcctgtaactcagcacgttcaggcttactctgcttatccacattcaccaggtcaggtcatcactggatgtcagttgcttgtatataattatcaggaatatcctacttatcccgattcagcatttcaggtcaccactggatatcagttgcctgtatataattatcagccatttcctgcttatccaagatcaccatttcaggtcactgctggatatcagttgcctgtatataattatcaggcatttcctgcttatccaaattcaccatttcaagtcgccactggatatcagttccctgtatacaattatcagccatttcctgcttatccaagttcaccatttcaggtcactgctggatatcagttgcctgtatataattatcaggcatttcctgcttatccaaattcaccagttcaggtcaccactggatatcagttgcctgtatacaattatcaggcatttcctgcttatccaagttcaccatttcaggtcaccactggatatcagttgcctgtatataattatcaggcatttcctgcttatccaaattcagcagttcaggtcaccactggatatcagttccatgtatacaattaccagatgccaccgcagtgccctgttggggagcaaaggagaaatctgtggaccgaagcatacaaatggtggtatcttgtctgtttaatccagagaagagactgataaattccgttgttactcaagatgactgcttcaagggtaaaagagtgcatcgctttagaagaagtttggcagtatttaaatctgttggatcctctcagctatctagtttcatgggaagttgctggttttgaatattaagctaaaagttttccactattacagaaattctgaattttggtaaatcacactgaaactttctgtataacttgtattattagactctctagttttatcttaacactgaaactgttcttcattagatgtttatttagaacctggttctgtgtttaatatatagtttaaagtaacaaataatcgagactgaaagaatgttaagatttatctgcaaggatttttaaaaaattgaaacttgcattttaagtgtttaaaagcaaatactgactttcaaaaaagtttttaaaacctgatttgaaagctaacaattttgatagtctgaacacaagcatttcacttctccaagaagtacctgtgaacagtacaatatttcagtattgagctttgcatttatgatttatctagaaatttacctcaaaagcagaatttttaaaactgcatttttaatcagtggaactcaatgtatagttagctttattgaagtcttatccaaacccagtaaaacagattctaagcaaacagtccaatcagtgagtcataatgtttattcaaagtattttatcttttatctagaatccacatatgtatgtccaatttgattgggatagtagttaggataactaaaattctgggcctaattttttaaagaatccaagacaaactaaactttactgggtatataaccttctcaatgagttaccattcttttttataaaaaaaattgttccttgaaatgctaaacttaatggctgtatgtgaaatttgcaaaatactggtattaaagaacgctgcagcttttttatgtcactcaaaggttaatcggagtatctgaaaggaattgtttttataaaaacattgaagtattagttacttgctataaatagatttttatttttgttttttagcctgttatatttccttctgtaaaataaaatatgtccagaagaggcatgttgtttctagattaggtagtgtcctcattttatattgtgaccacacagctagagcaccagagcccttttgctatactcacagtcttgttttcccagcctcttttactagtctttcaggaggtttgctcttagaactggtgatgtaaagaatggaagtagctgtatgagcagttcaaaggccaagccgtggaatggtagcaatgggatataatacctttctaagggaaacatttgtatcagtatcatttgatctgccatggacatgtgtttaaagtggctttctggcccttctttcaatggcttcttccctaaaacgtggagactctaagttaatgtcgttactatgggccatattactaatgcccactggggtctatgatttctcaaaattttcattcggaatccgaaggatacagtctttaaactttagaattcccaagaaggctttattacacctcagaaattgaaagcaccatgactttgtccattaaaaaattatccatagtttttttagtgcttttaacattccgacatacatcattctgtgattaaatctccagatttctgtaaatgatacctacattctaaagagttaattctaattattccgatatgaccttaaggaaaagtaaaggaataaatttttgtctttgttgaagtatttaatagagtaaggtaaagaagatattaagtccctttcaaaatggaaaattaattctaaactgagaaaaatgttcctactacctattgctgatactgtctttgcataaatgaataaaaataaactttttttcttcaaatg

SEQ ID NO: 2164 - DNA, 3287 bp, Homo sapiens
  source 1..3287: mol_type = genomic DNA
gctgccacccattggctcaggccgataccacgcgccccgatacccggcacaggagccacctcccagagccccgcagtccatgcctcagtcggcctgcgctcctcagcctggcggttctacctccgagggttcgcccgcccttggttttccttacaccttagcctttggctcctttgaccactcgaagccccacagcgtgttccagcggacttcaccagcagacccagaagtggtgggtgaaacactgcctctgttcctccttgagcctgtcgggagctgctgcctgccaccaccatgtctgctgcaaatcctgagactccaaactcaaccatctccagagaggccagcacccagtcttcatcagctgcagctagccaaggctgggtgttaccagaaggcaaaatcgtgccaaacactgtttttgttggtggaattgatgctaggatggatgaaactgagattggaagctgctttggtagatacggttcagtgaaagaagtgaagataatcacgaatcgaactggtgtgtccaaaggctatggatttgtttcgtttgttaatgacgtggatgtccagaagatagtaggatcacagatacatttccatggtaaaaagctgaagctgggccctgcaatcaggaaacaaaagttatgtgctcgtcatgtgcagccacgtcctttggtagttaatcctcctcctccaccacagtttcagaacgtctggcggaatccaaacactgaaacctacctgcagccccaaatcacgccgaatcctgtaactcagcacgttcaggcttactctgcttatccacattcaccaggtcaggtcatcactggatgtcagttgcttgtatataattatcaggaatatcctacttatcccgattcagcatttcaggtcaccactggatatcagttgcctgtatataattatcagccatttcctgcttatccaagatcaccatttcaggtcactgctggatatcagttgcctgtatataattatcaggcatttcctgcttatccaaattcaccatttcaagtcgccactggatatcagttccctgtatacaattatcagccatttcctgcttatccaagttcaccatttcaggtcactgctggatatcagttgcctgtatataattatcaggcatttcctgcttatccaaattcaccagttcaggtcaccactggatatcagttgcctgtatacaattatcaggcatttcctgcttatccaaattcagcagttcaggtcaccactggatatcagttccatgtatacaattaccagatgccaccgcagtgccctgttggggagcaaaggagaaatctgtggaccgaagcatacaaatggtggtatcttgtctgtttaatccagagaagagactgataaattccgttgttactcaagatgactgcttcaagggtaaaagagtgcatcgctttagaagaagtttggcagtatttaaatctgttggatcctctcagctatctagtttcatgggaagttgctggttttgaatattaagctaaaagttttccactattacagaaattctgaattttggtaaatcacactgaaactttctgtataacttgtattattagactctctagttttatcttaacactgaaactgttcttcattagatgtttatttagaacctggttctgtgtttaatatatagtttaaagtaacaaataatcgagactgaaagaatgttaagatttatctgcaaggatttttaaaaaattgaaacttgcattttaagtgtttaaaagcaaatactgactttcaaaaaagtttttaaaacctgatttgaaagctaacaattttgatagtctgaacacaagcatttcacttctccaagaagtacctgtgaacagtacaatatttcagtattgagctttgcatttatgatttatctagaaatttacctcaaaagcagaatttttaaaactgcatttttaatcagtggaactcaatgtatagttagctttattgaagtcttatccaaacccagtaaaacagattctaagcaaacagtccaatcagtgagtcataatgtttattcaaagtattttatcttttatctagaatccacatatgtatgtccaatttgattgggatagtagttaggataactaaaattctgggcctaattttttaaagaatccaagacaaactaaactttactgggtatataaccttctcaatgagttaccattcttttttataaaaaaaattgttccttgaaatgctaaacttaatggctgtatgtgaaatttgcaaaatactggtattaaagaacgctgcagcttttttatgtcactcaaaggttaatcggagtatctgaaaggaattgtttttataaaaacattgaagtattagttacttgctataaatagatttttatttttgttttttagcctgttatatttccttctgtaaaataaaatatgtccagaagaggcatgttgtttctagattaggtagtgtcctcattttatattgtgaccacacagctagagcaccagagcccttttgctatactcacagtcttgttttcccagcctcttttactagtctttcaggaggtttgctcttagaactggtgatgtaaagaatggaagtagctgtatgagcagttcaaaggccaagccgtggaatggtagcaatgggatataatacctttctaagggaaacatttgtatcagtatcatttgatctgccatggacatgtgtttaaagtggctttctggcccttctttcaatggcttcttccctaaaacgtggagactctaagttaatgtcgttactatgggccatattactaatgcccactggggtctatgatttctcaaaattttcattcggaatccgaaggatacagtctttaaactttagaattcccaagaaggctttattacacctcagaaattgaaagcaccatgactttgtccattaaaaaattatccatagtttttttagtgcttttaacattccgacatacatcattctgtgattaaatctccagatttctgtaaatgatacctacattctaaagagttaattctaattattccgatatgaccttaaggaaaagtaaaggaataaatttttgtctttgttgaagtatttaatagagtaaggtaaagaagatattaagtccctttcaaaatggaaaattaattctaaactgagaaaaatgttcctactacctattgctgatactgtctttgcataaatgaataaaaataaactttttttcttcaaatgtg

SEQ ID NO: 2165 - DNA, 3831 bp, Homo sapiens
  source 1..3831: mol_type = genomic DNA
cacgcgccccgatacccggcacaggagccacctcccagagccccgcagtccatgcctcagtcggcctgcgctcctcagcctggcggttctacctccgagggttcgcccgcccttggttttccttacaccttagcctttggctcctttgaccactcgaagccccacagcgtgttccagcggacttcaccagcagacccagaagtggtgggtgaaacactgcctctgttcctccttgagcctgtcgggagctgctgcctgccaccaccatgtctgctgcaaatcctgagactccaaactcaaccatctccagagaggccagcacccagtcttcatcagctgcagctagccaaggctgggtgttaccagaaggcaaaatcgtgccaaacactgtttttgttggtggaattgatgctaggatggatgaaactgagattggaagctgctttggtagatacggttcagtgaaagaagtgaagataatcacgaatcgaactggtgtgtccaaaggctatggatttgtttcgtttgttaatgacgtggatgtccagaagatagtaggatcacagatacatttccatggtaaaaagctgaagctgggccctgcaatcaggaaacaaaagttatgtgctcgtcatgtgcagccacgtcctttggtagttaatcctcctcctccaccacagtttcagaacgtctggcggaatccaaacactgaaacctacctgcagccccaaatcacgccgaatcctgtaactcagcacgttcaggcttactctgcttatccacattcaccaggtcaggtcatcactggatgtcagttgcttgtatataattatcaggaatatcctacttatcccgattcagcatttcaggtcaccactggatatcagttgcctgtatataattatcagccatttcctgcttatccaagatcaccatttcaggtcactgctggatatcagttgcctgtatataattatcaggcatttcctgcttatccaaattcaccatttcaagtcgccactggatatcagttccctgtatacaattatcagccatttcctgcttatccaagttcaccatttcaggtcactgctggatatcagttgcctgtatataattatcaggcatttcctgcttatccaaattcaccatttcaagtcgccactggatatcagttccctgtatacaattatcaggcatttcctgcttatccaaattcaccagttcaggtcaccactggatatcagttgcctgtatacaattatcaggcatttcctgcttatccaaattcaccatttcaagtcgccactggatatcagttccctgtatacaattatcaggcatttcctgcttatccaaattcaccagttcaggtcaccactggatatcagttgcctgtatacaattatcaggcatttcctgcttatccaagttcaccatttcaggtcaccactggatatcagttgcctgtatataattatcaggcatttcctgcttatccaagttcaccatttcaggtcaccactggatatcagttgcctgtatataattatcaggcatttcctgcttatccaagttcaccatttcaggtcaccactggatatcagttgcctgtatataattatcaggcatttcctgcttatccaagttcaccatttcaggtcaccactggatatcagttgcctgtatataattatcaggcatttcctgcttatccaagttcaccatttcaggtcaccactggatatcagttgcctgtatataattatcaggcatttcctgcttatccaaattcagcagttcaggtcaccactggatatcagttccatgtatacaattaccagatgccaccgcagtgccctgttggggagcaaaggagaaatctgtggaccgaagcatacaaatggtggtatcttgtctgtttaatccagagaagagactgataaattccgttgttactcaagatgactgcttcaagggtaaaagagtgcatcgctttagaagaagtttggcagtatttaaatctgttggatcctctcagctatctagtttcatgggaagttgctggttttgaatattaagctaaaagttttccactattacagaaattctgaattttggtaaatcacactgaaactttctgtataacttgtattattagactctctagttttatcttaacactgaaactgttcttcattagatgtttatttagaacctggttctgtgtttaatatatagtttaaagtaacaaataatcgagactgaaagaatgttaagatttatctgcaaggatttttaaaaaattgaaacttgcattttaagtgtttaaaagcaaatactgactttcaaaaaagtttttaaaacctgatttgaaagctaacaattttgatagtctgaacacaagcatttcacttctccaagaagtacctgtgaacagtacaatatttcagtattgagctttgcatttatgatttatctagaaatttacctcaaaagcagaatttttaaaactgcatttttaatcagtggaactcaatgtatagttagctttattgaagtcttatccaaacccagtaaaacagattctaagcaaacagtccaatcagtgagtcataatgtttattcaaagtattttatcttttatctagaatccacatatgtatgtccaatttgattgggatagtagttaggataactaaaattctgggcctaattttttaaagaatccaagacaaactaaactttactgggtatataaccttctcaatgagttaccattcttttttataaaaaaaattgttccttgaaatgctaaacttaatggctgtatgtgaaatttgcaaaatactggtattaaagaacgctgcagcttttttatgtcactcaaaggttaatcggagtatctgaaaggaattgtttttataaaaacattgaagtattagttacttgctataaatagatttttatttttgttttttagcctgttatatttccttctgtaaaataaaatatgtccagaagaggcatgttgtttctagattaggtagtgtcctcattttatattgtgaccacacagctagagcaccagagcccttttgctatactcacagtcttgttttcccagcctcttttactagtctttcaggaggtttgctcttagaactggtgatgtaaagaatggaagtagctgtatgagcagttcaaaggccaagccgtggaatggtagcaatgggatataatacctttctaagggaaacatttgtatcagtatcatttgatctgccatggacatgtgtttaaagtggctttctggcccttctttcaatggcttcttccctaaaacgtggagactctaagttaatgtcgttactatgggccatattactaatgcccactggggtctatgatttctcaaaattttcattcggaatccgaaggatacagtctttaaactttagaattcccaagaaggctttattacacctcagaaattgaaagcaccatgactttgtccattaaaaaattatccatagtttttttagtgcttttaacattccgacatacatcattctgtgattaaatctccagatttctgtaaatgatacctacattctaaagagttaattctaattattccgatatgaccttaaggaaaagtaaaggaataaatttttgtctttgttgaagtatttaatagagtaaggtaaagaagatattaagtccctttcaaaatggaaaattaattctaaactgagaaaaatgttcctactacctattgctgatactgtctttgcataaatgaataaaaataaactttttttcttcaaa

SEQ ID NO: 2166 - DNA, 2382 bp, Homo sapiens
  source 1..2382: mol_type = genomic DNA
ctttgaccactcgaagccccacagcgtgttccagcggacttcaccagcagacccagaagtggtgggtgaaacactgcctctgttcctccttgagcctgtcgggagctgctgcctgccaccaccatgtctgctgcaaatcctgagactccaaactcaaccatctccagagaggccagcacccagtcttcatcagctgcagctagccaaggctgggtgttaccagaaggcaaaatcgtgccaaacactgtttttgttggtggaattgatgctaggatggatgaaactgagattggaagctgctttggtagatacggttcagtgaaagaagtgaagataatcacgaatcgaactggtgtgtccaaaggctatggatttgtttcgtttgttaatgacgtggatgtccagaagatagtaggatcacagatacatttccatggtaaaaagctgaagctgggccctgcaatcaggaaacaaaagttatgtgctcgtcatgtgcagccacgtcctttggtagttaatcctcctcctccaccacagtttcagaacgtctggcggaatccaaacactgaaacctacctgcagccccaaatcacgccgaatcctgtaactcagcacgttcagtctgctgcaaatcctgagactccaaactcaaccatctccagagaggccagcacccagtcttcatcagctgcagctagccaaggctgggtgttaccagaaggcaaaatcgtgccaaacactgtttttgttggtggaattgatgctaggatggatgaaactgagattggaagctgctttggtagatacggttcagtgaaagaagtgaagataatcacgaatcgaactggtgtgtccaaaggctatggatttgtttcgtttgttaatgacgtggatgtccagaagatagtaggatcacagatacatttccatggtaaaaagctgaagctgggccctgcaatcaggaaacaaaagttatgtgctcgtcatgtgcagccacgtcctttggtagttaatcctcctcctccaccacagtttcagaacgtctggcggaatccaaacactgaaacctacctgcagccccaaatcacgccgaatcctgtaactcagcacgttcagtctgctgcaaatcctgagactccaaactcaaccatctccagagaggccagcacccagtcttcatcagctgcagctagccaaggctgggtgttaccagaaggcaaaatcgtgccaaacactgtttttgttggtggaattgatgctaggatggatgaaactgagattggaagctgctttggtagatacggttcagtgaaagaagtgaagataatcacgaatcgaactggtgtgtccaaaggctatggatttgtttcgtttgttaatgacgtggatgtccagaagatagtaggatcacagatacatttccatggtaaaaagctgaagctgggccctgcaatcaggaaacaaaagttatgtgctcgtcatgtgcagccacgtcctttggtagttaatcctcctcctccaccacagtttcagaacgtctggcggaatccaaacactgaaacctacctgcagccccaaatcacgccgaatcctgtaactcagcacgttcaggcttactctgcttatccacattcaccaggtcaggtcatcactggatgtcagttgcttgtatataattatcaggaatatcctacttatcccgattcagcatttcaggtcaccactggatatcagttgcctgtatataattatcagccatttcctgcttatccaagatcaccatttcaggtcactgctggatatcagttgcctgtatataattatcaggcatttcctgcttatccaaattcaccatttcaagtcgccactggatatcagttccctgtatgtgaaatttgcaaaatactggtattaaagaacgctgcagcttttttatgtcactcaaaggttaatcggagtatctgaaaggaattgtttttataaaaacattgaagtattagttacttgctataaatagatttttatttttgttttttagcctgttatatttccttctgtaaaataaaatatgtccagaagaggcatgttgtttctagattaggtagtgtcctcattttatattgtgaccacacagctagagcaccagagcccttttgctatactcacagtcttgttttcccagcctcttttactagtctttcaggaggtttgctcttagaactggtgatgtaaagaatggaagtagctgtatgagcagttcaaaggccaagccgtggaatggtagcaatgggatataatacctttctaagggaaacatttgtatcagtatcatttgatctgccatggacatgtgtttaaagtggctttctggcccttctttca

SEQ ID NO: 2167 - DNA, 1584 bp, Homo sapiens
  source 1..1584: mol_type = genomic DNA
ttcgccgttactctgcgcgtaagtcgcttgtccgtggcttctctgagaagaaaagttgaaaaagggtaaaagttttcaggaatattcgggctctctattgctaagcatagcgagtgtcggttttctctctccaacagacatcgctattgcggttccgaggcagtgggaagagatgcggcccctggacatcgtcgagctggcggaaccggaggaagtggaggtgctggagcccgaggaggatttcgagcagtttctgctcccggtcatcaacgagatgcgcgaggacatcgcgtcgctgacgcgcgagcacgggcgggcgtacctgcggaaccggagcaagctgtgggagatggacaatatgctcatccagatcaaaacgcaggtggaggcctcggaggagagcgccctcaaccacctccagaacccgggcgacgcggccgagggccgggcggccaagaggtgcgagaaggccgaggagaaggccaaggagattgcgaagatggcagagatgctggtggagctggtccggcggatagagaagagcgagtcgtcgtgagcgcggtcggcggtttccagccaatggattctggtcaactggtggagattggctgacaccctggagaagccgaaaccagagagccttttgttttctcttttttcctgtctatgctctgtctcacttaacactacgttttctgctatggtctgtggttgatgacctcaatatgagtttcgattgttaacgtgtttttgtttgggaagtaattttgtttgaaaatgctctcacatacaggaattagggcctagattgtaagctcttgcagcagtcacatttgttcccgggctttggtggttatttctaaatttttgaggtgctttgctatttcttgtgtgacctgatagctccctggaactttgggtctgtgtgtgacacatgagactcacagttggagttctccagctctggaggtgctgaaggagctgcattaattctggaagacgactccatgcagcaactactgaagaaaggaccagacttcaacggggagtgtggatgggccgacctggctgggactcgtgaatctggagaagagctggagaatggatagtattgtctgtatttggagactttaatttctgtgtgagaccaaaggaggagagatgtgttttgttcaaaatttaaatttgttgtggtacactatcttatgtaacctgtctggtgagtttgtttggacaacctaactcagctttatttgacatggaacctaaaatagaagataagatcttgatattctgtacaagttgatgtaataccctgatgcgttttagaggacttggcataaaatgaaagattggcaaaggcccttgaggggcttggggatgacagtatggaactgtctgcattggaccctaaactggactagaagaggcatcttcaaggttcatacgttgtccagctgtaagttcatttgagtagcagacctaacaaatatttgaggtcagaaccctaccatgttaaaacaaacaaaaacttaccatgttaataaaagtattcatttgcttgaaaagacgaaagacctaaaa

SEQ ID NO: 2168 - DNA, 936 bp, Homo sapiens
  source 1..936: mol_type = genomic DNA
agctgcacagggccgcactaaagtcatactcacactaccctgggggactggtttctggacaaggtgttgagaaagggagaaaactcttccttttaggatggtgaggaaggaaagccggtctgaactggatgatgagggccatgaagcccccaggaggagaatcgagcaatctttttggaagtccagaagaagctactccttccagcaggcctaataggatggcatctaatatttttggaccaacagaagaacctcagaacatacccaagaggacaaatcccccagggggtaaaggaagtggtatctttgacgaatcaacccccgtgcagactcgacagcacctgaacccacctggagggaagaccagcgacatttttgggtctccggtcactgccacttcacgcttggcacacccaaacaaacccaaggatcatgttttcttatgtgaaggagaagaaccaaaatcggatcttaaagctgcaaggagcatcccggctggagcagagccaggtgagaaaggcagcgccagaaaagcaggccccgccaaggagcaggagcccatgcccacagtcgacagccatgagccccggctggggccgcggcctcgctctcacaacaaggtcctgaacccaccgggaggcaaatccagcatctccttctactaagagaagccactgctccacccggagccagaccagaaactcaagagatagggtagccatgttttcatttccttttgcccaaatgagcggggtgggaagagggttagtcttatgtgagcctggctgctcagcgtctcctggccgtcatgacagctgcttggagacccgtgccttccagatggctgggagatgcctctgtggggatgaaatggggcacccctggccatcactcatgtgtagtccaggtttgagaggaactggaaggggggtgagg

SEQ ID NO: 2169 - DNA, 965 bp, Homo sapiens
  source 1..965: mol_type = genomic DNA
acggcgcgcggcgagctgagggtggcggcggtcgacatgttccaggtcccggatagcgagggcggccgcgccggctccaggaaatggcaactgctgacaggaagtttggcatccacctcccccagcctcctgagtggacaggggccctgggcaccacttcagagggccatgaagcccccaggaggagaatcgagcaatctttttggaagtccagaagaagctactccttccagcaggcctaataggatggcatctaatatttttggaccaacagaagaacctcagaacatacccaagaggacaaatcccccagggggtaaaggaagtggtatctttgacgaatcaacccccgtgcagactcgacagcacctgaacccacctggagggaagaccagcgacatttttgggtctccggtcactgccacttcacgcttggcacacccaaacaaacccaaggatcatgttttcttatgtgaaggagaagaaccaaaatcggatcttaaagctgcaaggagcatcccggctggagcagagccaggtgagaaaggcagcgccagaaaagcaggccccgccaaggagcaggagcccatgcccacagtcgacagccatgagccccggctggggccgcggcctcgctctcacaacaaggtcctgaacccaccgggaggcaaatccagcatctccttctactaagagaagccactgctccacccggagccagaccagaaactcaagagatagggtagccatgttttcatttccttttgcccaaatgagcggggtgggaagagggttagtcttatgtgagcctggctgctcagcgtctcctggccgtcatgacagctgcttggagacccgtgccttccagatggctgggagatgcctctgtggggatgaaatggggcacccctggccatcactcatgtgtagtccaggtttgagaggaactggaaggggggtgaggg

SEQ ID NO: 2170 - DNA, 5428 bp, Homo sapiens
  source 1..5428: mol_type = genomic DNA
ggcccaccgccgcccaggcaaggccgccctgccttgggcgcagcgctgccatggctgggggccgtggggcccccgggcgcggccgggacgagcctccggagagctacccgcaacgacaggaccacgagctacaggccctggaggccatttacggcgcggacttccaagacctgcggccggacgcttgcggaccggtcaaagagccccctgaaatcaatttagttttgtaccctcaaggcctaactggtgaagaagtatatgtaaaagtggatttgagggttaaatgcccacctacctatccagatgtagttcctgaaatagagttaaaaaatgccaaaggtctatcaaatgaaagtgtcaatttgttaaaatctcgcctagaagaactggccaagaaacactgtggggaggtgatgatctttgaactggcttaccacgtgcagtcatttctcagcgagcataacaagccccctcccaagtcttttcatgaagaaatgctggaaaggcgggctcaggaggagcagcagaggctgttggaggccaagcggaaagaagagcaggagcaacgtgaaatcctgcatgagattcagagaaggaaagaagagataaaagaagagaaaaaaaggaaagaaatggctaagcaggaacgtttggaaattgctagtttgtcaaaccaagatcatacctctaagaaggacccaggaggacacagaacggctgccattctacatggaggctctcctgactttgtaggaaatggtaaacatcgggcaaactcctcaggaaggtctaggcgagaacgtcagtattctgtatgtaatagtgaagattctcctggctcttgtgaaattctgtatttcaatatggggagtcctgatcagctcatggtgcacaaagggaaatgtattggcagtgatgaacaacttggaaaattagtctacaatgctttggaaacagccactggtggctttgtcttgttgtatgagtgggtccttcagtggcagaaaaaaatgggtccattccttaccagtcaagaaaaagagaagattgataagtgcaaaaagcagattcaaggaacagaaacagaattcaactcactggtaaaattgagccatccaaatgtagtacgctaccttgcaatgaatctcaaagagcaagacgactccatcgtggtggacattttagtggagcacattagtggggtctctcttgctgcacacctgagccactcaggccccatccctgtgcatcagcttcgcaggtacacagctcagctcctgtcaggccttgattatctgcacagcaattctgtggtgcataaggtcctgagtgcatctaatgtcttggtggatgcagaaggcaccgtcaagattacggactatagcatttctaagcgcctcgcagacatttgcaaggaggatgtgtttgagcaaacccgagttcgttttagtgacaatgctctgccttataaaacggggaagaaaggagatgtttggcgtcttggccttctgctgctgtccctcagccaaggacaggaatgtggagagtaccctgtgaccatccctagtgacttaccagctgactttcaagattttctaaagaaatgtgtgtgcttggatgacaaggaaagatggagtccccagcagttgttgaaacacagctttataaatccccagccaaaaatgcctctagtggaacaaagtcctgaagattctgaaggacaagattatgttgagactgttattcctagcaaccggctacccagtgctgccttctttagtgagacacagagacagttttcccgatacttcattgagtttgaagaattacaacttcttggtaaaggagcttttggagctgtcatcaaggtgcagaacaagttggacggctgctgctacgcagtgaagcgcatccccatcaacccggccagccggcagttccgcaggatcaagggcgaagtgacactgctgtcacggctgcaccatgagaacattgtgcgctactacaacgcctggatcgagcggcacgagcggccggcgggaccggggacgccgcccccggactccgggcccctggccaaggatgaccgagctgcacgcgggcagccggcgagcgacacagacggcctggacagcgtagaggccgccgcgccgccacccatcctcagcagctcggtggagtggagcacttcgggcgagcgctcggccagtgcccgtttccccgccaccggcccgggctccagcgatgacgaggacgacgacgaggacgagcacggtggcgtcttctcccagtccttcctgcctgcttcagattctgaaagtgatattatctttgacaatgaagatgagaacagtaaaagtcagaatcagatggagtactgtgagaagagcactttacgagacaccattgaccagggactgtatcgagacaccgtcagactctggaggctttttcgagagattctggatggattagcttatatccatgagaaaggaatgattcaccgggatttgaagcctgtcaacatttttttggattctgatgaccatgtgaaaataggtgattttggtttggcgacagaccatctagccttttctgctgacagcaaacaagacgatcagacaggagacttgattaagtcagacccttcaggtcacttaactgggatggttggcactgctctctatgtaagcccagaggtccaaggaagcaccaaatctgcatacaaccagaaagtggatctcttcagcctgggaattatcttctttgagatgtcctatcaccccatggtcacggcttcagaaaggatctttgttctcaaccaactcagagatcccacttcgcctaagtttccagaagactttgacgatggagagcatgcaaagcagaaatcagtcatctcctggctgttgaaccacgatccagcaaaacggcccacagccacagaactgctcaagagtgagctgctgcccccaccccagatggaggagtcagagctgcatgaagtgctgcaccacacgctgaccaacgtggatgggaaggcctaccgcaccatgatggcccagatcttctcgcagcgcatctcccctgccatcgattacacctatgacagcgacatactgaagggcaacttctcaatccgtacagccaagatgcagcagcatgtgtgtgaaaccatcatccgcatctttaaaagacatggagctgttcagttgtgtactccactactgcttccccgaaacagacaaatatatgagcacaacgaagctgccctattcatggaccacagcgggatgctggtgatgcttccttttgacctgcggatcccttttgcaagatatgtggcaagaaataatatattgaatttaaaacgatactgcatagaacgtgtgttcaggccgcgcaagttagatcgatttcatcccaaagaacttctggagtgtgcatttgatattgtcacttctaccaccaacagctttctgcccactgctgaaattatctacactatctatgaaatcatccaagagtttccagcacttcaggaaagaaattacagtatttatttgaaccataccatgttattgaaagcaatactcttacactgtgggatcccagaagataaactcagtcaagtctacattattctgtatgatgctgtgacagagaagctgacgaggagagaagtggaagctaaattttgtaatctgtctttgtcttctaatagtctgtgtcgactctacaagtttattgaacagaagggagatttgcaagatcttatgccaacaataaattcattaataaaacagaaaacaggtattgcacagttggtgaagtatggcttaaaagacctagaggaggttgttggactgttgaagaaactcggcatcaagttacaggtcttgatcaatttgggcttggtttacaaggtgcagcagcacaatggaatcatcttccagtttgtggctttcatcaaacgaaggcaaagggctgtacctgaaatcctcgcagctggaggcagatatgacctgctgattccccagtttagagggccacaagctctggggccagttcccactgccattggggtcagcatagctatagacaagatatctgctgctgtcctcaacatggaggaatctgttacaataagctcttgtgacctcctggttgtaagtgttggccagatgtctatgtccagggccatcaacctaacccagaaactctggacagcaggcatcacagcagaaatcatgtacgactggtcacagtcccaagaggaattacaagagtactgcagacatcatgaaatcacctatgtggcccttgtctcggataaagaaggaagccatgtcaaggttaagtctttcgagaaggaaaggcagacagagaagcgtgtgctggagactgaacttgtggaccatgtactgcagaaactgaggactaaagtcactgatgaaaggaatggcagagaagcttccgataatcttgcagtgcaaaatctgaaggggtcattttctaatgcttcaggtttgtttgaaatccatggagcaacagtggttcccattgtgagtgtgctagccccggagaagctgtcagccagcactaggaggcgctatgaaactcaggtacaaactcgacttcagacctcccttgccaacttacatcagaaaagcagtgaaattgaaattctggctgtggatctacccaaagaaacaatattacagtttttatcattagagtgggatgctgatgaacaggcatttaacacaactgtgaagcagctgctgtcacgcctgccaaagcaaagatacctcaaattagtctgtgatgaaatttataacatcaaagtagaaaaaaaggtgtctgtgctatttctgtacagctatagagatgactactacagaatcttattttaaccctaaagaactgtcgttaacctcattcaaacagacagaggcttatactggaataatggaatgttgtacattcatcataatttaaaattaaattctaagaagaggctgggtgcagtggctcacacctttaatcccagcactttgggaagccaaggcaggaagactgcttgaaaccaggagtttgagaccagcctgagcaacaaagcaagaccccatctctataaaaactaaaaaaattagttgggcatggtggcacatgcctgtagtcccagctactccagaggctgagatggatcatctgagcctcaggaggttgaggctgcagtgagctgtgactgcgccactgcactccagtctgggacaacagagcaagaccctgtcttaaaaaaaaaaagaaaaaaaaaatttttttctaagaagctgtcctacaaagttgagctttgttagtttttcatgtgtaatatattataaatttatcttttgggatataataaatgctttcatatacctgc

SEQ ID NO: 2171 - DNA, 3931 bp, Homo sapiens
  source 1..3931: mol_type = genomic DNA
aaataaaacggacaccttaagcgctacaatcaaggtgcgcacggggtgctacagaacaatacgcagacaggaggaggtggggggaaaggtgagacttcccaggcaggtgtcatcccagaataacttttacacagggtgactaagcgagttagtgactgcgcggaaaacgggcttccaaggttcacaaggctcgtgctgcggctccgggagttatgtcacagtaagcttactatcatcctttgggcatctgctttacggatgagttcatcaggatttaaaggatcttggttccatatccttccccttcctcacagaggccgccagcccggagcccctctaggccctcctccctcctgcatctactggccgcgagcctttccctccccgcccccttcacacaggccgcccccagcctcccaaccccccggttccgttccacgggaggccccggcctccctgccctctcctccaccgttctacccgcatcgcccggcttcccgcaagccgctggcaccgtcccctcaacaccctccgcccaccgccactcccttccactgagggggaccgggctgccttctctctgacccgccgttctccgcccccacccacttccccaggcctcccgcaccacccccttcccgccgcgctctctcccgcccccgcgcttccggccccgcccgcccccgcgcggaggactgtgggagcggcttccttggattccgcgcttggcaacggctcggcgtcgcgctttggccaaccgctgcgtcgtccctgggcccgaataactgtcgcccgcttccctcagcgtgaggtgaagcacttcaaattgcctgatgaaagttgaatcaggaatgaagataaaagtacacaacaatgcagaaagcggtacttagcctcacaaagatggaaacattccaaaaacgtgaagtactgttgtcccaagattctttctaagcctaaaattacacttttactagtccgattttctggttgtgagttttttttgtttgttttttttttttcgagaaactgcagtaggcttcttggaagtagaccaagggtgtccaatctttggcttccctgggccacatcggaagaagaattgtcttgggccacacatgaaattcacaaacactaaggtacaaatgatgcaaaatgtgcacctggctccagagacagatgaagatgatctttattccggctataatgactacaatccaatctatgatatcgaggaattggagaatgatgcagcttttcagcaagctgtgaggactagtcatggcagaagacctccaataactgctaaaatatcaagcacggcagttactagacctatagctactggatatgggtccaagacatctctggcatcatcaataggaagaccaatgacaggggctattcaggatggagttactagacccatgacagcagtgagagcagctggttttaccaaagcagctttgagaggctctgcatttgacccccttagtcagtcaaggggccctgcttcccctttggaagccaagaaaaaagatagcccagaggaaaaaataaagcaattagagaaggaagtaaatgagttggtagaagaaagctgtattgccaatagttgtggagacttaaaattggccttagaaaaggcaaaagatgcaggaagaaaagagagagtcctggtgagacagcgagaacaagttacaactccagaaaatatcaatttggatttaacttactcagttcttttcaatttggccagtcagtattcagttaatgaaatgtatgccgaagcacttaacacttatcaagttatagtcaaaaataagatgtttagcaatgcaggaatattgaaaatgaatatgggaaatatctatttaaagcaaagaaattattccaaagccattaaattctaccgaatggcattagaccaagttccaagtgtcaataagcaaatgaggattaaaataatgcagaatattggagttacatttattcaggctggtcagtattcagatgctattaattcatatgagcacataatgagcatggcaccaaatctgaaggcaggctacaacctaactatctgttattttgctattggagaccgagaaaaaatgaagaaggcattccaaaaattgattactgttccattagaaattgatgaagataaatatatttcaccaagtgatgatcctcatactaacttagtaactgaagctataaaaaatgatcacctcaggcaaatggaacgtgaaaggaaagccatggcagaaaaatatattatgacatctgcaaaactcattgctcctgtaattgaaacatcttttgctgcaggttatgattggtgcgtggaagtggtgaaagcttctcaatatgtagagctagccaatgatctggaaataaacaaagcagttacatacttgagacaaaaagactataaccaagctgtagagatcttaaaagtgttggaaaaaaaggacagtagagtgaaaagtgcagctgcaaccaatctctcagccctgtattatatgggaaaggattttgcacaagccagcagctatgcagatatagctgtgaactctgatagatataatccagcagctcttactaataaagggaatacagtttttgcaaatggtgattatgagaaggccgctgaattctataaagaggctctaagaaatgattcttcttgtactgaagcactttataatattggccttacctatgagaaactaaatcggctagatgaggctttggactgtttcctgaaacttcacgcaatcctacgaaacagtgccgaagttctttaccagatagcaaatatatatgaattaatggaaaatcccagtcaagctattgaatggctaatgcaggtggtcagtgttattccaaccgatcctcaagttttatctaagctaggagaattatatgatcgtgaaggagataaatctcaagcatttcaatattactatgagtcatataggtattttccttgtaatattgaagtcattgagtggcttggagcctattacattgacacccaattttgggaaaaagctattcagtactttgaaagagcttctcttatacagcctacacaagtgaaatggcagctgatggtagctagttgtttcagaagaagtggtaactaccaaaaagcattagatacttacaaagatactcacagaaaatttccagaaaatgtcgaatgttctggcagcgtgaggacaggacacatggagagagaccctttaaacctccttccaaggaagtcagttctccctggtccagagattgcaaagtgtaattatttttcaggagaaaaatactatttgtctgcgtttcttagttcgtctctgcacagatcttggattaaaagatgctcaagaatatgccagaaaactgaagaggttggaaaaaatgaaagaaataagggaacagcgcataaagtcaggcagagatggcagtgggggctcccgtggcaaaagagaaggaagtgctagcggtgatagtggccagaactatagtgccagtagtaaaggtgaacgactaagtgccagactcagagctttacctgggacaaatgaaccttatgaaagtagcagtaacaaagaaatagatgcctcctatgtggacccacttggccctcaaatagaacgaccaaaaactgcagccaagaaaaggatcgatgaggatgattttgctgatgaagaattaggagatgatttgcttccagaataatattcactttaatatttattaaaggaaagaaattgccttatgagatcatcctcatgttaaaccttggattaaatatctaacctgtaattattttttttcactgtcaaaacttaagtaagtgtattctattctgtatgtatgcatttaagttgtttttttcttttaaggaataaaaacaggtaaaact

SEQ ID NO: 2172 - DNA, 318 bp, Homo sapiens
  source 1..318: mol_type = genomic DNA
ttgacctccaaacacatctacagttgctgaaccatgagctactacagaagctattatggaggcctgggctatggctatggaggctttggtggctggggctatggctatggctgcggctatggcagcttccgcaggttgggctatggctgtggctacggaggctatggattcagctgttgccgaccattatactacggaggatatggattctctgccttctactgaagagtgaactcattctttggatcactagaatctgtctatcatcctgacttaattctcctttcaggtctttttaccccctctgtgaattgcgca

SEQ ID NO: 2173 - DNA, 273 bp, Homo sapiens
  source 1..273: mol_type = genomic DNA
ggctagagacttaaatcctgacacaatgagctactatggcaactactacggaggactgggctatggctatgactgtaaatatagttatacctctggctttggtgcctttagaatcctggactgtggctacagatgtggctgtggtggggtatggatttgactgctgccaccaatatgattatgctacatgcttattatcaggcactgactgaataatatctacaattgggtccattttcttatgagacaggggtgctgttctactacactttt

SEQ ID NO: 2174 - DNA, 224 bp, Homo sapiens
  source 1..224: mol_type = genomic DNA
tccacaactgaaacatccacttctgaacaccatgtcctactacagccatctttctggtggcctgggctgcggcttggctgtggctgtgactatgggaaggactgtggctgtggctgagtatggcaggtgcagacatggctgccactcatcttactctgccaggtaatgacaccatggattccactgaggaacacctagagcagttcagtctactgcactcctcc

SEQ ID NO: 2175 - DNA, 293 bp, Homo sapiens
  source 1..293: mol_type = genomic DNA
attgaactccatcttctgacaccatgtgctactaccacaactattatggtagcctggactatggttgcagctatggctctgaatatggtaactctggatatgcctgcaactttccgtgctcctatggaagattcctattggctcctagaaagaaattctgattgctgatcactttgagccattttcttgtgatgcactaattgcatcaacagggttatttatggattcgttattgtctctccaattttaactaactctaattattgattaccacaggtcatatttgcattgga

SEQ ID NO: 2176 - DNA, 682 bp, Homo sapiens
  source 1..682: mol_type = genomic DNA
gaccatctttaaggatttttagcaatatgcctcatagccactgccattcactcaggagcttccacaatgccccaccactctctgccatcacacatggcactaatcctataacctttgaagacagattgtgtttgcccagcagcttccatagcagaacctgtttcctggacaactttcaagaaacctgcaatgaaaccaccagctgccaaatgaccaattgtgaacaggacttattcacagacgatagctgtgtgcaaagtaactgcttccccggagttgtccaaactacttactccaattccaggccctgcgaaaggacagcgtgccaatcagaaagttcttcagcagggctggcttgtgtttctcagccttgccaatcagaaagcactcagcagatgggttttgtagcccagagctgccaacctgcaagcctcaagggaaacagttgcccacccaagacttctaagtctaaaaatttcgaaactctggaacgtgcatctagccaatgtcagtgtcagtctcagaaccctgaatccagttcctgtagacctctggtcaatgttgcacctgagccacaactcctggaatcttctccaggagttgaaccaacttgctgtgttactggtggttctcaattgcctagtaagtgaagatctgtaggggagatggcttatattctcat

SEQ ID NO: 2177 - DNA, 1390 bp, Homo sapiens
  source 1..1390: mol_type = genomic DNA
agcatttgaagctgcagtcctgaaaaccatgcaggccggaagagtagataaagaaatatttatttgagatggcacatgtttcttcagaaactcaagatgtttcccccaaagatgaattaactgcttcagaagcctccactaggtctccattgtgtgaacacaccttccctggggactcagacttacggtcaatgattgaagaacatgcttttcaggttttgtcacaaggatccttgttagaaagtccaagttacacagtttgtgtctctgagccagataaagatgatgattttctttctctgaactttcccaggaaactttggaaaatagtggaaagtgaccaattcaagtctatttcatgggatgagaatggaacttgcatagtgattaatgaagaactcttcaagaaagaaattttggaaacaaaggctccttacagaatatttcaaactgatgctatcaaaagttttgttcgacagctcaacctttatggatttagtaaaattcaacagaattttcaaagatctgcctttctagccacctttctgtcagaagagaaagaatcgtctgtcttaagcaagcttcatgtctttgtgtttcaccacagtctatttggagcaacattcggagaacatcactttcagccatgccctttaccatctggtaacaaggctcccatttctacttggagtggagattcctggttgctgtgatgaaatgggatacactggggatccagctgcacaacttttcggaagcagcattcactgtggatttggtatattatgcagcttttggtgtcacaggctaaggtctgacaagattcaccatgcagttttctgggatagcagaaaatgaacatggatttggacagccagattcctcaggatggaaacctagtggtgccatctaaccatatacgtatatttccaagttgtgcataagtagaaaaagtttagaatccatcatctaaaaagggaatcctgatttcctttcctggcagaccatgacagaaagacaaaggtcatttcacctatatccacatgctattaactttttagttctcaaactgggttttcagaaggtagtgtgatagacatggttaaatggttaacaggaagaatgtttaaaaaaaaaattccggctggggtggtggctcaggcctgtaatcacagcattttgggaggccaagctgagtcaggagaatcgcttgaacccaggaggcggaggttgcagtaagctgagatcctgcttttgcgctccagcctgggtgacagagtaagacttcatcttaaagaaatccacaacaataaaaaggctaatgccagacacaataaaaaatgaaaagaataacttgggtgaacagcaaggcaagaaagaaaaaaggaaa

SEQ ID NO: 2178 - DNA, 1374 bp, Homo sapiens
  source 1..1374: mol_type = genomic DNA
agcatttgaagctgcagtcctgaaaaccatgcaggccggaagagtagataaagaaatatttatttgagatggcacatgtttcttcagaaactcaagatgtttcccccaaagatgaattaactgcttcagaagcctccactaggtctccattgtgtgaacacaccttccctggggactcagacttacggtcaatgattgaagaacatgcttttcaggttttgtcacaaggatccttgttagaaagtccaagttacacagtttgtgtctctgagccagataaagatgatgattttctttctctgaactttcccaggaaactttggaaaatagtggaaagtgaccaattcaagtctatttcatgggatgagaatggaacttgcatagtgattaatgaagaactcttcaagaaagaaattttggaaacaaaggctccttacagaatatttcaaactgatgctatcaaaagttttgttcgacagctcaacctttatggatttagtaaaattcaacagaattttcaaagatctgcctttctagccacctttctgtcagaagagaaagaatcgtctgtcttaagcaagcttcatgtctttgtgtttcaccacagtctatttggagcaacattcggagaacatcactttcagccatgccctttaccatctggtaacaaggctcccatttctacttggagtggagattcctggttgctgtgatgaaatgggatacactggggatccagctgcacaacttttcggaagcagcattcactgtggatttggtatattatgcagcttttggtgtcacaggctaaggtctgacaagattcaccatgcagttttctgggatagcagaaaatgaacatggatttggacagccagattcctcaggatggaaacctagtggtgccatctaaccatatacgtatatttccaagttgtgcataagtagaaaaagtttagaatccatcatctaaaaagggaatcctgatttcctttcctggcagaccatgacagaaagacaaaggtcatttcacctatatccacatgctattaactttttagttctcaaactgggttttcagaaggtagtgtgatagacatggttaaatggttaacaggaagaatgtttaaaaaaaaaattccggctggggtggtggctcaggcctgtaatcacagcattttgggaggccaagctgagtcaggagaatcgcttgaacccaggaggcggaggttgcagtaagctgagatcctgcttttgcgctccagcctgggtgacagagtaagacttcatcttaaagaaatccacaacaataaaaaggctaatgccagacacaataaaaaatgaaaagaataacttgggtgaacagcaaggcaa

SEQ ID NO: 2179 - DNA, 1586 bp, Homo sapiens
  source 1..1586: mol_type = genomic DNA
gtttccggttcgcctccggagccatggcggcggcactgaagtgtctactgacattaggaagatggtgccccggccttggagtggctccccaggcccgggcgctcgccgccttagtacccggagtgacccaggtagataacaagtccggtttcctgcagaagaggcctcatcgccagcaccctggcatcctaaagctgccgcacgtgcggctgccacaggcactggctaacggtgcccagttattgctacttgggagcgctgggcccactatggagaatcaggtgcaaacactgaccagttatctctggagcagacatttgcctgtagagccagaggagttgcaaagacgggctaggcatcttgagaaaaaattcctggaaaacccagacttatctcagacagaggagaaacttcgtggagcagtgctacacgcactacgtaaaactacctaccattggcaagaactgagctacactgagggactgagcctggtgtatatggcagcaagactggatggtggctttgcagcagtctccagagcattccatgagatccgggctcgaaatccagcatttcagccacaaactttgatggactttggctcaggtactggttctgtcacctgggctgctcacagtatttggggccagagcctacgtgaatatatgtgtgtggacagatcagctgccatgttggttttggcagaaaaactactgaaaggtggttcagaatctggggagccttatattccaggtgtctttttcagacagtttctacctgtatcacccaaggtgcagtttgatgtagtagtgtcagctttttccttaagtgaactgcccagcaaggctgaccgcactgaggtagttcaaaccttatggcgtaagacaggtcatttcctggtactggtggagaatggaacaaaagctgggcacagccttctcatggatgccagggatctggtccttaagggaaaagagaagtcacctttggaccctcgacctggttttgtctttgccccgtgtccccatgaactcccttgtccccagttgaccaacctggcctgtagcttctcacaggcgtaccatcccatccccttcagctggaacaagaaaccaaaggaagaaaagttctctatggtgatccttgctcgggggtctccagaggaggctcatcgctggccccgtatcactcagcctgtccttaaacggcctcgccatgtgcattgtcacttgtgctgtccagatgggcacatgcagcatgctgtgctcacagcccgccggcacggcaggtatggggggtgtgaccaaaatcagtgggatgtggcaggaagctgcagcccacgccagcatctgtttccacagggatttgtatcgttgtgcccgtgtcagctcctggggagatcttttacctgtgcttactccgtctgcgtttcctccatctacggctcaggatccctctgagagttgatgaggatgtgtaacaagtattttcttctatcgtgcctgccagggctgaagctgcctggtatccaggaggggaatgctggtatccccatatgtctgtgtttgtttgagatttttaataat

SEQ ID NO: 2180 - DNA, 1717 bp, Homo sapiens
  source 1..1717: mol_type = genomic DNA
gtgcggtgtggggcaccgggcggggccgcgggaaccggcgccccacggagctgctgctgtcagaccaaccccgggcccccatcatcactgcgccgcgctttcaggcgccgagaactaccgttcccggcatgccatgaaattggcctcggcgctgaggcggggtccggccctccacccgctcccgccgcgcgcgaatcgcggtcgcgagccatggaggaggaggcatcgtccccggggctgggctgcagcaagccgcacctggagaagctgaccctgggcatcacgcgcatcctagaatcttccccaggtgtgactgaggtgaccatcatagaaaagcctcctgctgaacgtcatatgatttcttcctgggaacaaaagaataactgtgtgatgcctgaagatgtgaagaacttttacctgatgaccaatggcttccacatgacatggagtgtgaagctggatgccagtgatgatcagccagagaagcctcactttgactctcgcagtgtgatatttgagctggattcatgcaatggcagtgggaaagtttgccttgtctacaaaagtgggaaaccagcattagcagaagacactgagatctggttcctggacagagcgttatactggcattttctcacagacacctttactgcctattaccgcctgctcatcacccacctgggcctgccccagtggcaatatgccttcaccagctatggcattagcccacaggccaagcaatggttcagcatgtataaacctatcacctacaacacaaacctgctcacagaagagaccgactcctttgtgaataagctagatcccagcaaagtgtttaagagcaagaacaagatcgtaatcccaaaaaagaaagggcctgtgcagcctgcaggtggccagaaagggccctcaggaccctccggtccctccacttcctccacttctaaatcctcctctggctctggaaaccccacccggaagtgagcacccctccctccaactccctaccagctccagagtggtggtttccatgcacagatggccctaggggtgacctccagttttgcgtgtggaccgtaggcctctttctagttgaatgaccaaaattgtaaggcttttagtcccaccgacattagccaggctcgtagtgaggcctccagagcaggttgtgctgtcccctgcctctggaagcaatggggaatttggaatcttgtgtaagtgcccaaataagtctgagtgctttcctcttcttcaacactcaaccctcaatcccttagcactgattgattagagaggtcccccaaagaaaccactggttttgacccatgaagcattagaactgcattgttcattcaggagccactagtcacatatgactatttaaatttaaagtaaattgtatgaaaaattcatttcttcaattgcattagccacattttgagtattcatgtggctggtagattctgtattagcacaaagatatggaacatttccatcaccacagaaagttctgttggacagcactgcattagaatattttcatactgctcttcctcaattaatttttgttgttaatgttgatgtcttcattggatgggtcataatgttccatgaaacctctcaagtacacaattgtatgttctttgtatcccttaccacaaatatctcgctctgctcatttcttttgcagcttcctataaagtttgtcttcctcatc

SEQ ID NO: 2181 - DNA, 2133 bp, Homo sapiens
  source 1..2133: mol_type = genomic DNA
ggctttcctggcaggcctggcgggggggccaggttgccatgacgaccgcggctaggtcgcggcagactcgagccatgggcagcaggaagaaggaaattgccctgcaggctggaatgcagcggcatgatctcatctcagtgcaacctccacctctcacgttcaagcagttctcatgtctcagcctcccgagtagctggtaaaacaggtcaacatcagcacccaagagctttgggaggaaatgctcagttccaaaggactaactgttgttgatgtctatcaaggctggtgtggcccctgcaaacctgtggtgagcctcttccagaagatgaggatcgaggtcggcctggaccttctgcactttgcattagcagaggcagatcgtcttgatgtcctcgaaaagtacagagggaagtgcgagccaacctttctgttttatgcaattaaagatgaggctctttctgatgaagatgaatgtgtttcccatggaaagaataatggtgaagatgaggacatggtttcatcagagaggacctgtaccttggccatcattaaaccagatgcagtggcccatggaaagactgatgagattatcatgaagattcaggaagctgggtttgaaattctaacaaatgaagagagaaccatgacagaggcagaagtgcgacttttctaccaacacaaagctggagaggaggcatttgagaagctggtacatcacatgtgcagtggaccaagccacctcctgatcctcaccaggactgagggcttcgaggacgtggtcactacctggcgaaccgtcatgggcccccgtgaccccaatgtggccaggagggagcagccagaaagtctccgagctcagtacggcacagaaatgcccttcaatgccgtccatggaagccgggacagagaagatgctgacagagaactggcattgctcttccccagtttgaaattttcagacaaagatacagaagcccctcagggtgagtccagtacacagccaaggttgaagatcactgacctagactaaaatgagaggattcagaagtctgaccttagaacatgagagagtggaaaacctcaggatgtttcagccaaacaagaagagaagaaaatattgttgaaattaacaatgatcagggaaaatatcatctattaagaacagggaaccacattttagctgtagattaggaatggtaatttttatctggtgttttagtttccaaaacatttacatattgatctactcctcgccctagaccaaacctaattccattcttactgatatgcacaatcactctctgtcctcattgtcacctctagcccctaaattcctccctttctcagtctacctactctttgtgactccctcatatcttttccccctggcatggatgtcctgctcagacactccacttagaagacagtttccctttttcactgtcctcccaccattcattactcctcctccagataccaactgctgatgttgctctagaaaaaccaccaaacatgactgttctttccgtgtaagctatcccacctcagcggcaccctcactgctggtgaccagccttgtaaccccctggagatgcccatgttccttatggtagctacctcttacttcaaattcttctgcctccctcatgctcgcagccactctgtgcccacctcatcttcgtagggaccttgattttggggacacacattgcaacttcccacttctgacgaaaggtctccatgcttttgctgttttctttactcttgtcaaggttgggtacttcaagctcaaagcctatctaccttgatccaaaaactacctttccataatgttctcacatctttactctgtcctacctctcattttcaatcctgtttaaaagacgtttaagtgtccaaactttaacctcttgaagctagtcctctccccactttccatctttaaatgggcatatatacaataaaggctctgtccatctccatctcttatatataacaatactgtgacttaaaaaccaactcagtattggaaattttctaaagttctgtcctagagttctttcctgacctctagctccatacttctgattgcctaataaatatgacatggatgttcagtggaacttcccatct

SEQ ID NO: 2182 - DNA, 521 bp, Homo sapiens; identical to SEQ ID NO: 1926
  source 1..521: mol_type = genomic DNA

SEQ ID NO: 2183 - DNA, 2028 bp, Homo sapiens
  source 1..2028: mol_type = genomic DNA
gttcatttgctcgcgtgcaggggaagtctggagaaggcattgtttcaattattaaaagtgtgggggcagtgggcggaacaaacgcgccgactacagaggctggacgtaagcttagcggtggcgcgcgtgcgcagcgccggcccgagttgccaaaacaaaggggatttggtgatggaggctttgttagaaggaatacaaaatcgagggcatggtgggggatttttgacatcttgtgaagcagaactacaggagctcatgaaacagattgacataatggtggctcataaaaaatctgaatgggaaggacgtacacatgctctagaaacttgcttgaaaatccgtgaacaggaacttaagagtcttaggagtcagttggatgtgacacataaggaggttggaatgttgcatcagcaggtagaagaacatgaaaaaatcaagcaagagatgaccatggaatataagcaggagttgaagaaactacatgaagaattatgcatactgaagagaagctatgaaaagcttcagaaaaagcaaatgagggaattcagaggaaataccaaaaatcacagggaagatcggtctgaaattgagaggttaactgcaaaaatagaggaattccgtcagaaatcgctggactgggagaagcaacgcttgatttatcagcaacaggtatcttcactggaggcacaaaggaaggctctggctgaacaatcagagataattcaggctcagcttgtcaatcggaaacagaaattagagtctgtggaactttctagccaatcagaaattcaacacttaagcagtaaactggagcgggctaatgacactatctgtgccaatgagttggaaatagagcgcctcaccatgagggtcaatgacttggttggaaccagtatgactgtcctacaggagcagcagcaaaaagaagaaaaattgagggaatctgaaaaactattagaggctctgcaggaagaaaagagagaattgaaggcagctcttcagtctcaagaaaatctcatacatgaggccagaatacaaaaggagaagttacaagaaaaagtaaaggcaactaacactcaacatgctgtagaagctataaggccacgggaagaatctctggcagaaaagaagtacacctctcaagggcagggggacttagacagtgtgctctcccagttgaattttacccatactagtgaggaccttctgcaggcagaggtgacttgtcttgaaggcagtttggaatctgtgagtgcaacgtgtaaacagctgagccaagaactaatggaaaaatatgaagaactgaagaggatggaagcacataacaatgaatacaaagcagagattaagaagttgaaagaacagattttacagggtgaacaaagttacagttctgcactagaaggaatgaagatggaaatctcccatctaactcaggagttacatcagcgagatatcactattgcttccaccaaaggttcttcctcagacatggaaaagcgactcagagcagagatgcaaaaggcagaagacaaagcagtagagcataaggagattttggatcagctggagtcactcaaattagaaaatcgtcatctttctgaaatggtgatgaaattggaattgggtttacatgagtgttccttgcctgtatctccccttggttcaatagctaccagatttttggaagaggaggaactgaggtctcatcacattctagagcgcttggatgcccatattgaagaactaaaaagagagagtgaaaagacagtgagacaattcacagccttaaagtagcctcttaaaaaaatcactatcttggaaataaaaataaacaccaaagagttactgtcatctgaagtagcagctctttaaaaacatgaagagataaaattataaaaatgatacatctaaagcagtggtgaagaaagctgaaaaactgatacttttgataggcattttctctgcactggtttgtttaaaggacttcttccagcaataagttgaaagaataaaccactttgctag

SEQ ID NO: 2184 - DNA, 1476 bp, Homo sapiens; identical to SEQ ID NO: 1945
  source 1..1476: mol_type = genomic DNA

SEQ ID NO: 2185 - DNA, 1456 bp, Homo sapiens; identical to SEQ ID NO: 1946
  source 1..1456: mol_type = genomic DNA

SEQ ID NO: 2186 - DNA, 4073 bp, Homo sapiens
  source 1..4073: mol_type = genomic DNA
gccagctgctgcgcatgcgccggccggggccccgcccccatgcgccgcgcggctccagggccacgttccagggtcgggtttggtggattcctcagtccctgccgccgcggggcgccctgggatagcggcggggcctcctggtgagcgcgcgccggggcggcctccgggaagtgggagacgctgcgggtcctgggcccaggccttgggatgggcgggaaggcctggccgcgccgggctgtgggcactgcaggaggcccctgtgcaggtggagatcgccgcggccctggcgggactctttgctggctcttgggcgcgctgatgcccatcatctccctgagtttctgagccctatctctcatgtgtcagtggtcaccgccgaatccagacactccggccctgttccggaagagccctgatatccgtggctccatggcgctgtctgtcgataccatgcactctagctctcaaggaggaaaggttttgtggaagggaatagagacttggaataacagacctgtgctaattagagacgggaaagatggaacaaggggagtgacccttctccacccccatatcctaatgtgctctctctctatccagaacagatctcggcccctttccaaacactcctgatgcctcatttgcctctcgcttcttttcgaccaccattttgggggctgaggcactcacggggcctccccaggtttcactccgtttctacacagtcggagccccatggatctcccatctcccggaggaaccgtgaagccaaacagaagcgcctgcgagagaagcaggctactctggaggctgagatagcaggggagagcaagtcacctgcagaatccattaaggcctggaggcctaaggagttagtattgtatgaaatccctacgaaacccggtgaaaagaaagatgtctctgggcccctgcctcctgcatacagcccccgatatgttgaggctgcctggtacccgtggtgggtacgagagggcttcttcaaaccagaatatcaggcccggctgccccaagctacaggggagaccttttccatgtgtatcccacctcccaatgtcactggctccctgcacattggccacgcactcacggtggccatacaggatgccctcgtgcgctggcaccggatgcgtggggatcaagtgctgtgggtccctggttcagatcatgcaggaattgctacacaagctgtggtggagaaacaactgtggaaggaacggggagtgaggagacatgagctgagccgggaggccttccttagggaggtgtggcagtggaaggaggcgaaaggtggagagatctgtgagcagctgcgagctctgggtgcctccctggactgggatcgagagtgttttaccatggatgttggctcctcagtggctgtgactgaagcttttgtgcggctctacaaggcggggttgctgtaccggaaccatcagcttgtcaactggtcatgtgctttaagatcagccatctcggacattgaggtggagaaccggcccctgcctggccacacacagcttcgactgcctggctgccccacccccgtgtcttttggcctcctattttctgttgccttccccgtggatggagagcctgatgcagaggttgtggtaggaaccacaaggccagagacgctgcctggagatgtggctgtggccgttcatccagacgactcgcgatacacacatctacacgggcgacagcttcgtcaccccttgatggggcagcctcttcccctcatcacagactatgctgttcagccacatgtgggcacgggggcagtgaaggtgactccagctcacagtcctgccgatgctgagatgggggcccgacatggcttgagccccttgaatgtcattgcggaggatgggaccatgacctccctctgcggggactggttgcagggtcttcaccggtttgtggcccgggaaaagataatgtctgtgctgagtgaacggggcctattccggggcctccagaaccaccccatggtactgcccatctgcagccgttctggggatgtgatagaatacctgctgaagaaccagtggtttgtccgctgccaggaaatgggggcccgagctgccaaggctgtggagtcgggggccctggagctcagtccctccttccaccagaagaactggcagcactggttttcccatattggggactggtgtgtctcccggcagctgtggtggggccatcagattccagcctacctggttgtagaggaccatgcgcagggagaagaggactgttgggtggttgggcggtcagaggctgaggccagagaggtagcagcggaactgacagggaggccaggggcagagctgaccctggagagggatcctgatgtcctagacacatggttttcttctgccctgttccccttttctgccctgggctggccccaagagaccccagaccttgctcgtttctaccccctgtcacttttggaaacgggcagcgaccttctgctgttctgggtgggccgcatggtcatgttggggacccagctcacagggcagctgcccttcagcaaggtgcttcttcatcccatggttcgggacaggcagggccggaagatgagcaagtccctggggaatgtgctggacccaagagacatcatcagtggggtggagatgcagttgctgcaggaaaagctgagaagcggaaatttggaccctgcagagctggccattgtggctgcagcacagaaaaaggactttcctcacgggatccctgagtgtgggacagatgccctgagattcacactctgctcccatggagttcaggcgggcgacttgcacctgtcagtctctgaggtccagagctgccgacatttctgcaacaagatctggaatgctcttcgctttatcctcaatgctttaggggagaaatttgtgccacagcctgctgaggagctgtctccctcctccccgatggatgcctggatcctgagccgccttgccctggctgcccaggagtgtgagcggggcttcctcacccgagagctctcgctcgtcactcatgccctgcaccacttctggcttcacaacctctgtgacgtctacctggaggctgtgaagcccgtgctgtggcactcgccccgccccctggggccccctcaggtcctgttctcctgcgctgacctcggcctccgcctcctggccccactgatgcccttcctggctgaagagctctggcagaggctgccccccaggcctggttgcccccctgcccccagcatctcggttgccccctaccctagcgcctgcagcttggagcactggcgccagccagagctggagcggcgcttctcccgggtccaagaggtcgtgcaggtgctaagggctctccgagccacgtaccagctcaccaaagcccggccccgagtgctgctgcagagctcagagcctggggaccagggcctcttcgaggccttcttggagcccctgggcaccctgggctactgtggggctgtgggcctgttacccccaggcacagcagctccctccggctgggcccaggctccactcagtgacacggctcaagtctacatggagctgcagggcctggtggacccgcagatccagctacctctgttagccgcccgaaggtacaagttgcagaagcagcttgatagcctcacagccaggaccccatcagaaggggaggcagggactcagaggcaacaaaagctttcttccctccagctggaattgtcaaaactggacaaggcagcctctcacctccggcagctgatggatgagcctccagccccagggagcccggagctctaactcatcatccccatcagttttcctccctctcagacctgtctttgaggacaaacagatttgtcagctgtcagggtgcagtgggacgtcagagactatgtggtccatcgccttcattgtgtaaatgaggacacagactggcttggtcgcagtgactgtggtgtccttgagatgctcacattactgcccggcctgcctcccacctggaagtctgggaatgaggagattgagataaacttttgaaatcccaaa

SEQ ID NO: 2187 - DNA, 3247 bp, Homo sapiens
  source 1..3247: mol_type = genomic DNA
tcaggaatggagagaagggtaatggttttacctcttattgtggaaacctgttgagatcacagagaatatactgacggcataaaagggcagaaccatagcagggtgcgcgctgctgtagttgccttccatggatctataggagagcaagtcctccaggagaagaagtcctcaccagtgaacggagacctctctgaactaaggataccatggccacgtcagccccactacggagcctggaagaggaggtgacctgctccatctgtcttgattacctgcgggaccctgtgaccattgactgtggccacgtcttctgccgcagctgcaccacagacgtccgccccatctcagggagccgccccgtctgcccactctgcaagaagccttttaagaaggagaacatccgacccgtgtggcaactggccagcctggtggagaacattgagcggctgaaggtggacaagggcaggcagccgggagaggtgacccgggagcagcaggatgcaaagttgtgcgagcgacaccgagagaagctgcactactactgtgaggacgacgggaagctgctgtgcgtgatgtgccgggagtcccgggagcacaggccccacacggccgtcctcatggagaaggccgcccagccccacagggaaaaaatcctgaaccacctgagtaccctaaggagggacagagacaaaattcagggcttccaggcaaagggagaagctgatatcctggccgcgctgaagaagctccaggaccagaggcagtacattgtggctgagtttgagcagggtcatcagttcctgagggagcgggaggaacacctgctggaacagctggcgaagctggagcaggagctcacggagggcagggagaagttcaagagccggggcgtcggggagcttgcccggctggccctggtcatctccgaactggagggcaaggcgcagcagccagctgcagagctcatgcaggacacgagagacttcctaaacaggtatccacggaagaagttctgggttgggaaacccattgctcgagtggttaaaaaaaagaccggagaattctcagataaactcctctctctgcaacgaggcctgagggaattccaggggaagctgctgagagacttggaatataagacagtgagcgtcaccctggacccacagtcggccagtgggtacctgcagctgtcagaggactggaagtgcgtgacctacaccagcctgtacaagagtgcctacctgcacccccagcagtttgactgtgagcctggggtgctaggcagcaagggcttcacctggggcaaggtctactgggaagtggaagtggagagggagggctggtctgaggatgaagaagagggggatgaggaggaagagggagaagaggaggaggaggaagaggaggccggctatggggatggatatgacgactgggaaacggacgaagatgaggaatcgttgggcgatgaagaggaagaagaggaggaggaagaggaggaagttctggaaagctgcatggtgggggtggctagagactctgtgaagaggaagggagacctctccctgcggccagaggatggcgtgtgggcgctgcgcctctcctcctccggcatctgggccaacaccagccccgaggctgagcttttcccagcactgcggccccggagagtgggcatcgccctggattatgaagggggcaccgtgactttcaccaacgcagagtcacaggaactcatctacaccttcactgccaccttcacccggcgcctggtccccttcctgtggctcaagtggccaggaacacgcctcctgctaagaccctgagccctgacatctgcccccagccccaaccctcagatgcttcacttctttggaattccaggactctcaatggggggacgggatgcctggcctaagcacctggagcaggggaccccatatccactggtagccacctccccattgctgtggccccctgaaatctcactcagtgctgttgctccatctactgccctaatggggctcttttcccacctcctgctggtttcccgagggaacttctgaccctggagtccatgagggctcctttcctttttgaccacgaccttggccccagctctgcactctctggaataagggcccgatgcagcattttcttgcccagtgtggcaagacctcagaaaaaccagtcaattacgcctaagatcattttgctgtccttaaaccccccaggttccttcttgcacaaatccactctgctgcccaccttccctggcattttaaacagacctaccccaccccaactcagagttaagcatacatggcaatgctgaaaataaacaaaatccactgaggcttcccaggccatttaaagcctggagtaccagcgcatatcatctcatggggtccagagtggagtccaggcttctctgaaaccagggctgagcatatttccatagccaaggaggtgggactccctggagctatctgtggtcttagggaaggatccagacatacacggctttggggtacaagctgtgatcactgatcaataaattatctctagattggtccttgtgaggggagttttaagaatccagaacatcttgctcttgatcagcacatccaaaaacaccaagacaaacatccagtggagcagaacctctcctgcctcgggagttctgaccgggttccccagcagggtgttaagcctctgtctctggccctaccagcatccaggttccactttcctaggagagagtggagatgggaagacagggaaaggaaggcagcaggaggccacaagcccaccaggtcttcatgtcaagagagggagtaacatgtcttctcattgcccacggacccaacctctgtccaggtgcccctcatcatcacagtttaacacaagctcccctgctccagccaaattgatctcccagtcttgtccttacccattccaagtgctctgccagcccctgttcatccaagttttaagtcctccaccctgttctaagagactgttccaacggctctgggcctcagtggtcacttgaccaccattgtctcagagctgcccactttgtgtgtgtcacatgctgcctgagtcacatgtacatcttatttctgcctctagttttgtaagctcctggagggcggataacatcttatactactcttgtattctcatggcacctagtgcagtgctgggcacagagtaggtgctcaataaagacttgttgaatgaa

SEQ ID NO: 2188 - DNA, 2018 bp, Homo sapiens
  source 1..2018: mol_type = genomic DNA
ggcgggagtcgccggggctccttcctgtggtgcagcttcgggtctcggagtttggcccctactctgaccccaccccagctccgctccgccttgggttccggcagaacccgccttgcggtagccatggcagcaggctccgaggcgaccactcctgtgatcgttgcggctggggctggaggggaggaaggtgaacatgtcaaaccttttaagccagagaaagcaaaagaaattatcatgtctttacaacaacctgcaatcttctgtaacatggtgtttgattggccagcacgacactggaatgctaaatacctttcgcaggtccttcatggcaagcagatacgattcagaatggggatgaaaagcatgagcacagttcctcagtttgaaactacatgtaattacgtagaagctacactcgaagagtttctgacctggaactgtgaccagtctagtatttctggaccatttagagattatgaccattccaagttctgggcttatgctgactataaatattttgtcagtctatttgaagacaagacagatcttttccaggatgtgaaatggtctgacttcgggtttcctggaagaaatggacaggaaagtacattgtggattggctccttgggagcccacacaccctgtcatctggactcctatggttgtaacttggtattccaggtacaaggaaggctggagtgcaatggcatgatcatagctcctggacctcaagccatcctcctgccgcagcctctcaagtatctaggactacaggaaacgatggcatctctttcctcctgaagatactcctttcctttatccaactagaatcccttatgaagaatctagtgtgttcagtaaaatcaatgttgtcaatcctgatttaaagcgttttcctcagttccggaaagctcaaagacatgcggttacactgagcccaggacaggttctctttgttcccagacactggtggcattacgtagaatccattgatcctgtcactgtcagtataaactcatggattgaactggaagaggatcacctagcccgggtagaagaggcaatcacccgtatgcttgtgtgtgccctgaaaactgcagagaatccacaaaataccagagcctggttaaaccccactgaggttgaggaaacgtcccatgcagtcaactgttgctacttaaatgcagctgtttctgcattttttgatcgctgcagaacatctgaggtagtagaaatccaagcactgagaacagatggagagcacatgaaaaaggaagaattaaatgtgtgcaaccacatggaggtgggccaaacaggtagccagaacttgaccacaggaacagacaaaccggaggcagcaagtccctttggccctgatctggtccctgtagcacagaggtccgaagaaccgccttcagaaagaggaggcatatttggaagtgatgggaaagactttgtggacaaggatggagaacactttggaaaattgcattgtgccaagagacaacaaataatgagcaacagtgaaaatgcaattgaggaacagattgcctcaaatactactacgactcctcaaacattcatttctacggatgacttgctggactgcttggtgaatccacaagtaaccaggatagtggcacaacttttgatacaaggaagaagtttatgattcaagtggaagatgacttttaaaataatattttttaaatatatatttttaagtagtatgactaaaataaagatgaaccagcaaaaggtcagtttgcacatttgtaaatgtatttatccttaccgaattacatgtcagtctgttgccaccttctttcatgcacattcctctttggccaaactggctgctctttgtttgtaagcttttgttcctctctcatcccatacttttagcctgtgtcaaatgtaagtcccaagtatttccagcaggaagtaatgtcttcctcagcctcaaccagggaccaaccggctgcttacttttgcaaataaaattttactagaacacg

SEQ ID NO: 2189 - DNA, 2787 bp, Homo sapiens
  source 1..2787: mol_type = genomic DNA
ttgtacaggtagccaggtgtcggtctccagcctgagaactctggctgttgttccttgtgtcgtcccatattcctgcctggcctgcgatggacatcagcaagggcctcccaggcatgcagggaggcctccacatatggatctctgagaaccggaagatggtgccggtacccgagggggcttacgggaacttttttgaggaacactgctatgtcatcctccacgtcccccagagcccgaaggccacgcagggggcgtccagcgacctgcactactgggtcgggaagcaggcgggtgcggaagcgcagggcgctgcggaggccttccagcagcgcctacaggacgagctggggggccagaccgtgctgcaccgcgaggcgcagggccacgagtccgactgcttctgcagctacttccgcccgggaatcatctacaggaagggaggcctagcatctgacctcaagcatgtggagaccaacttgttcaacatccagcgactgctgcacatcaaagggaggaagcacgtgtctgccactgaggtggagctctcctggaacagctttaataagggtgacatcttcctgctggacctaggcaagatgatgattcagtggaatgggcccaagaccagcatttctgagaaggctcgggggctggctttgacctacagcctccgggacagggaacgtggtggtggtcgtgcacagattggtgtggtggatgatgaggccaaagccccggacctcatgcagatcatggaggctgtgctgggccgcagggtgggcagcctgcgtgccgccacgcccagcaaggatatcaaccagctgcagaaggccaatgttcgcctgtaccatgtctatgagaagggcaaagacctggtggtcctggagttggcgacccccccactgacccaggacctgctgcaggaggaggacttctacatcctggaccagggtggcttcaagatctatgtgtggcagggacgcatgtctagcctccaggagagaaaggctgccttcagccgggctgtgggcttcatccaggccaagggctacccgacctacaccaacgtggaggtggtgaacgacggcgccgagtcggccgcgttcaagcagctcttccggacttggtctgagaagcggcgcaggaaccagaagctcggcgggagggataaatcgattcatgtaaagctggacgtgggcaagctgcacacccagcctaagttagcggcccagctcaggatggtggacgacggctctgggaaggtggaggtgtggtgcatccaggacttacacaggcagcccgtggaccccaagcgtcatggacagctgtgtgcaggcaactgctaccttgtgctctacacataccagaggctgggccgtgtccagtacatcctgtacctatggcagggccaccaggccactgcggatgagattgaggccctgaacagcaacgctgaggaactagatgtcatgtatggtggcgtcctagtacaggagcatgtgaccatgggcagcgagcccccccacttcctcgccatcttccagggccagctggtgatcttccaggagagagctgggcaccatggaaaggggcagtcagcatccaccacaaggcttttccaagtgcaaggcactgacagccacaacaccaggaccatggaggtgccagcccgtgcctcatccctcaactccagtgacatcttcttgctggtcacagccagcgtctgctacctctggtttgggaagggctgtaatggtgatcagcgtgagatggcacgggtggtggtcactgtcatttccaggaagaatgaggaaacggtgctggagggtcaggagcctccccacttctgggaggccctgggaggccgggccccctaccccagcaacaagaggctccctgaggaggtccccagcttccagccacgactgtttgagtgctccagccacatgggctgcctggtcctcgcagaagtggggttcttcagccaggaggacctggacaagtatgacatcatgttactggacacctggcaggagatcttcctgtggcttggggaagctgcaagtgagtggaaggaggcggtggcctggggccaggagtacctgaagactcacccagcagggaggagcccggccacacccatcgtgctggtcaagcagggccatgagcctcccaccttcattggatggttcttcacttgggacccctacaagtggactagccacccgtcccacaaggaagtggtggatggcagcccggcagcagcatcaaccatctctgagataacagcagaagtcaacaacttgcggctatccagatggccgggcaatggcagggcaggtgccgtggccctgcaggccctcaagggctcccaggacagctcagagaatgatctggtgcgaagccccaagtcggctggcagcagaaccagcagctccgtcagcagcaccagcgccacgatcaacgggggcctgcgccgggaacaactgatgcaccaggctgttgaggacctgccagagggcgtggaccctgcccgcagggagttctatctctcagactctgacttccaagatatctttgggaaatccaaggaggaattctacagcatggccacgtggaggcagcggcaggagaaaaagcagctgggcttcttctgaacccaagccctctcgactgcccctatcccctggaccccaacatacctacaatgctggggaggccctgcttccactcccctcagaggcttttggtcatcctctgcgtgtcagtaaaagcaggcagcccata

SEQ ID NO: 2190 - DNA, 3138 bp, Homo sapiens
  source 1..3138: mol_type = genomic DNA
gctctctcctcctcctcctcctcttcctctctggtctcctccctcctccgggctgggttgcaaatggcttcgttccccgagaccgatttccagatctgcttgctgtgcaaggagatgtgcggctcgccggcgccgctctcctccaactcgtccgcgtcgtcgtcctcctcgcagacgtccacgtcgtcggggggcggcggcgggggccctggggcggcggcgcgccgcctacacgtcctgccctgcctgcacgccttctgccgcccctgcctcgaggcgcaccggctgccggcggcgggcggcggcgcggcgggagagccgctcaagctgcgctgccccgtgtgcgaccagaaagtagtgctagccgaggcggcgggtatggacgcgctgccttcgtccgccttcctgcttagcaacctgctcgacgcggtggtggccactgccgacgagccgccgcccaagaacgggcgcgccggcgctccggcgggagcgggcggccacagcaaccaccggcaccacgctcaccacgcgcacccgcgcgcgtccgcctccgcgccgccactcccgcaggcgccgcagccgcccgcgccttcccgctcggcacccggcggccctgccgcttccccgtcggcgctgctgctccgccgtcctcacggctgcagctcgtgcgatgagggcaacgcagcttcttcgcgctgcctcgactgccaggagcacctgtgcgacaactgcgtccgagcgcaccagcgcgtgcgcctcaccaaggaccactacatcgagcgcggcccgccgggtcccggtgccgcagcagcggcgcagcagctcgggctcgggccgccctttcccggcccgcccttctccatcctctcagtgtttcccgagcgcctcggcttctgccagcaccacgacgacgaggtgctgcacctgtactgtgacacttgctctgtacccatctgtcgtgagtgcacaatgggccggcatgggggccacagcttcatctacctccaggaggcactgcaggactcacgggcactcaccatccagctgctggcagatgcccagcagggacgacaggcaatccagctgagcatcgagcaggcccagacggtggcggaacaggtggagatgaaggcgaaggttgtgcagtcggaggtcaaagccgtgacggcgaggcataagaaagccctggaggaacgcgagtgtgagctgctgtggaaggtagaaaagatccgccaggtgaaagccaagtctctgtacctgcaggtggagaagctgcggcaaaacctcaacaagcttgagagcaccatcagtgccgtgcagcaggtcctggaggagggtagagcgctagacatcctactggcccgagaccggatgctggcccaggtgcaggagctgaagaccgtgcggagcctcctgcagccccaggaagacgaccgagtcatgttcacaccccccgatcaggcactgtaccttgccatcaagtcttttggctttgttagcagcggggcctttgccccactcaccaaggccacaggcgatggcctcaagcgtgccctccagggtaaggtggcctccttcacagtcattggttatgaccacgatggtgagccccgcctctcaggaggcgacctgatgtcggctgtggtcctgggccctgatggcaacctgtttggtgcagaggtgagtgatcagcagaatgggacatacgtggtgagttaccgaccccagctggagggtgagcacctggtatctgtgacactgtgcaaccagcacattgagaacagccctttcaaggtggtggtcaagtcaggccgcagctacgtgggcattgggctcccgggcctgagcttcggcagtgagggtgacagcgatggcaagctctgccgcccttggggtgtgagtgtagacaaggagggctacatcattgtcgccgaccgcagcaacaaccgcatccaggtgttcaagccctgcggcgccttccaccacaaattcggcaccctgggctcccggcctgggcagttcgaccgaccagccggcgtggcctgtgacgcctcacgcaggatcgtggtggctgacaaggacaatcatcgcatccagatcttcacgttcgagggccagttcctcctcaagtttggtgagaaaggaaccaagaatgggcagttcaactacccttgggatgtggcggtgaattctgagggcaagatcctggtctcagacacgaggaaccaccggatccagctgtttgggcctgatggtgtcttcctaaacaagtatggcttcgagggggctctctggaagcactttgactccccacggggtgtggccttcaaccatgagggccacttggtggtcactgacttcaacaaccaccggctcctggttattcaccccgactgccagtcggcacgctttctgggctcggagggcacaggcaatgggcagttcctgcgcccacaaggggtagctgtggaccaggaagggcgcatcattgtggcggattccaggaaccatcgggtacagatgtttgaatccaacggcagcttcctgtgcaagtttggtgctcaaggcagcggctttgggcagatggaccgcccttccggcatcgccatcacccccgacggaatgatcgttgtggtggactttggcaacaatcgaatcctcgtcttctaattgcatttcctaggtttctgtgtttggggtgtgtgtgcgtgtctctctctctctctctctctttctctttctctctctttttgaatttcaaagaagaaacagtctcagggaaatttcttttttcttttttttttttaaagagaacaagaaaagtacaacattgcttaagtcctacctcatctttatttttttacagatgaatgtacttatcttttctgcagggattgagcctgtgaagtgataatttctatctacctcataaatctttacatttccttctgcaacaggccctcttcccctcctcagtggagtttgcatttccctcttcccctgcgtggggcatgatatgcacaagcctggcatctgtatggctgggagggcactggatgtgtgtggtggggtgtattctgtagattgagccaaggaaacacaaaaaaaaactactaagtaaaaaaacaaaaaactata

SEQ ID NO: 2191 - DNA, 1479 bp, Homo sapiens
  source 1..1479: mol_type = genomic DNA
gtccgagacctggagcagccaccgccgcaatcatgacttcggggacctggtttttagagagtctagaatctgatgagagaacctgtgcttacttggtgtgtacctcttgaactgctttgcagccatcctcttccactgtctgcctttctgaaatcacaagtcaaactttatacctacagggcttgtgctggaaaagatgaaatggggaaaatggtgtcagtaattaacactgtggatacctcccatgaggacatgattcacgacgcccagatggactactatggcacccgcctggcaacctgctcatcagacaggtccgtcaaaatctttgatgtgcgcaatggagggcagatccttatcgccgacctcaggggtcatgagggtcctgtgtggcaagtggcctgggctcaccccatgtacggcaacatcctggcatcgtgctcctatgaccggaaagtcattatctggagagaggaaaacggcacctgggagaagagccacgagcatgcgggacacgactcctcagtgaactcggtgtgctgggccccccatgactacggcctgatcctggcctgtgggagctcggatggggccatctccctgctgacttacaccggggaaggccaatgggaagtaaagaagatcaacaacgctcacaccattggctgcaatgccgtcagctgggcccctgctgttgtacctggaagcctcatagaccacccatcggggcagaaacccaattacatcaagaggtttgcatcaggtggctgtgacaacctcatcaagctgtggaaggaggaggaggacggccagtggaaggaggagcagaagctagaagcgcacagtgactgggttcgagatgtggcctgggccccctccatcggcctgcccaccagcaccatcgccagctgctcccaggatggtcgtgtgttcatttggacctgtgatgatgcctcaagcaatacgtggtcccctaaattgttgcacaagttcaacgatgtggtgtggcatgtgagctggtccatcacagccaacatcctggctgtctctggtggagacaataaggtgaccctgtggaaggagtcagttgatgggcagtgggtgtgcatcagtgatgtcaacaagggccagggctccgtatcagcatcagtgacagagggccagcagaacgagcagtgacaagacaggtggggcctggctccccacccgccagctccaggactgccccttcctgggccaactaaccagacaactgggaagagcccccaactccaacaggattattttcccaggaggagttacagatgcagccacagattgatcatctgccttaacgtgatcggagatgctttgtaatctactgtccagctgaaagcactcatgttacgaggaagaaactacaagtgatgttcaaatctattttgggtcatttttatgtacctttgggttcaggcattatttggggggttttgtttccaa

SEQ ID NO: 2192 - DNA, 4834 bp, Homo sapiens
  source 1..4834: mol_type = genomic DNA
ttcttttttttttttgagacggagtctcgctctgtcacccaggctggggtgcagtggcgcgatcttggctcactgcaagctccgcctcccaggttcccgccattctcctgcctcagcctcccgagtagctgggactacaggcgcccgccatcacgcctggctaattttttgtatttttagtagagacggggtttcactgtgttagccaggatggtctcgatctcctgacctcatgatccatccacctcagcctcccaaagtgctgggattacaggcgtcagccaccgtgaccagcctgaaacaggagcaagttctaaactcaggctctagagtcagaaaaggtagagtcaggttctggatccaaaatggggcaagtcatgatcaggttctggaaccagaacaggcctcaagcctaggggctgagcagggtatcccctggcctgggagcagaggacttctggctgactgctgcccgcaacgttctcaagctggtggtgaagtctgagtggaagtcataccctattcaggcagtagaggaagaggcctcaggtaagtactgtggttacctccactctcccacccatttatcctccacccatccgcccttccacctatctgcccttctacctatctattcatccacgcacctactggttcatccacacatctgtgtatgattcacatctacccatctatccatccatccaccagccatccatccactcatccacccacgtattcacccactctctgatctaccgattcacccacccacccttccactcatccttccatcctcccacctgtcacccattgttaatctcgtcattcatctacctgatgtcagctccatactccccatccatctatccactccctgcctacctatccttccacagatccacctacccatctatctacctgctattccattctcccatctactacctatctgttcttcaggccatccactcatccattcttctgtcccaggtacttagacacttgtcttcccatccgtttgttagttgatccactcctcattcagccctcccatgggcctggcatgtagccgagcaccctggagagggcagactaagaagacatggtccgtccctgcctgtgaggagttcaggtctctgaggaggaggaagcagtgaaactgggctttacacatggcctgagaacagcttaggcctgaacataaggaacagcttggagtggaggggacacagaggaaccctcactatcatgcatgccaacccaaccactgcctgccctttcccttctggatttagctcgtgtctccaggctcctagtcctgtaatccagggacccatcagcgagggattcagggaagcagaggcagctctccaggaaggaggaaaatccctgcctcttccagagagactcccccattgctgtctcttgtgtgtgtcatgcacaaggaaggcttggttgtgtgccaggataaggggcacaagggcctcgggtgtggccagagaccccatgcttaagcttttatggtataggtcaggctgcaggggtttgagggcctcagttgtatatcagaatcttcagagcactgcgatgttcaggggtgagtcaggtctgtagatgtgcacggggtcttctgaagggtcagtttctgtaatcactttcaggtgtgtcagggccttgtgcagtaacagtgcacacagaagttagtgtttctgtgggctaagggttgtagctctgtatcaggattctgggagtgggtctggatttctggtgtgtggacttaagaagctgtgtcagacttgggggaggggcgttcatgtataactgggttcacataggccaagactcccaggtgcattttaggcagagcctcaggtgtgttagaggtcccaggggcagagaggctataggtgctgtcagaggccttggggacatttagggcagagcctcgagtgacaggtcctgggacagtgggagccaagggcaagtgctagagttgcagtgaatttagagcaaagcctcagctaagtgacacatcccagggcagtaggggatctatctaggttcgtgctgggcctcaggtaagtgacaggccttaggacaatgggggctgtggcatgcgtcaggttacctgccttgatatgggatcgtgacaggcccctccctatgtgcaggagacaagcagcccaagaaacaggagaaaaacccagtgttggtgtccccagagtttgtggatgaagctctgtgtgcgtgcgaggagtaccttagcaacttggcccacatggacatcgacaaggacctggaggccccgctgtacctcacccccgagggctggtccctcttcctccagcgctactaccaagtggtccacgaaggggcagaactcaggcacctcgacactcaggtccagcgctgtgaggacatcctgcagcagctgcaggccgtggtaccccagatagacatggaaggggatcgcaacatctggatcgtgaagccaggagccaagtcccgcggacgaggcatcatgtgcatggaccacctggaggagatgctgaagctggtgaacggcaaccccgtggtgatgaaggacggcaagtgggtggtgcagaagtatattgagcggcccctcctcatctttggcaccaagtttgacctcagacagtggttcctggtaactgactggaacccacttaccgtgtggttctaccgcgacagctatatccgcttttccacgcagcccttctccctgaagaacctggacaactcagtgcacctgtgcaacaactccatccagaagcacctggagaactcatgccatcggcatccactgcttccgccagacaacatgtggtctagccagaggttccaggcccacctgcaggagatgggtgccccaaatgcttggtccaccatcatcgtgcctggcatgaaggatgctgtgatccacgcacttcagacctcccaggacaccgtgcagtgtcggaaggccagctttgagctctatggcgctgacttcgtgttcggggaggacttccagccctggctgattgagatcaacgccagccccacgatggcaccctccacagcagtcactgcccggctctgtgctggcgtgcaagctgacaccctgcgcgtggtcattgaccggatgctggaccgcaactgtgacacaggagcctttgagctcatctataagcagcccgtcaccacttccccagcctccacaccaaggcccagctgccttctccccatgtactccgacaccagggccaggtcctcagacgacagcacagcaagctggtgggcactaaggccctgtcgaccacaggcaaggccttgaggactctacccacggctaaggtcttcatttccctcccaccgaaccttgatttcaaggtggcacccagcatcctgaagccaagaaaggtgggcctcgacctgtgactcacacccagtggacagtgctgagcacggggtcagggctggagggcacaggcagagggcagctcccaggctggctggcaccccaagggaagagctggtctccctcagaagccccttcctccacagacttctgatcatctccctcttctcccctcctttcacaccgaggctcctgctctcctgtgcctccgaggcccccagctggaagtgccttgttgcctctgccctttgaagtcggaacaattcctagcacctgtcggaaggtcaaggccaaaggcaaattcaaggccagactgtgacaaacccagggctgaggcctgccccatgaagaggctgagccccctgaaacccctgccccttgttggtacattccagaggcgcaggggcctgggggatatgaagctagggaagcccctgcttcgattccccactgcccttgtcctggatccaacaccaaataaaaagaaacaagtgaagtatttggggcttgactccattgctgttggagggtcaagagtggatggggcgaggccgtgtaccccagggtccacagcaagagcctgaggccatcagcagctcctccgtgcagcgaggcccagaattcccacctaaggacagacatggggcttcctatttagggactcccccagcatctccgatccaggggtggggagcgtgagccttcactttacagatgaagaaactgagtctgaaagaggaggcatggcttacccaagatcacgtggcagtgagtcgacgcagggacatattgccagaactgccgagcactgggagccccccaaccccagagaacaagccaagctagcagaatgacacctaccgggcataggaacgttaatgccatgagacaggggaaggaattggccttgcctaaacctcagcccttctgcagagggcatgggtctatcccttcttcagcaaggggccaaggtcacctaaaaatgaaacatccaataagccacacccacctgaagaaaagtgtggcactgcttagttgtagtgggttgaactgtggtcccctgaaaagagatgtctacttggaccctgtgaatgtgaccttatgtgggaaaagagtctttgtagctgggtatggtggctcacacctgttatcccagcactttgagaggccaaggcaggagatcgcttgagcccgcaagttcaagaccagtctgggcaacatggtgaaaccgtttctacagaaaattagctgggtgtggtggcacacacctgtagtcctagctactcgggaggcctaggtgggaggattacctgagcctgggaagatcaaaactgtggtgagctgtgatcacgccactgcgctctgagcctgggagacagagtgaaaccctaaatcaaaaaaaaaaaaaaa

SEQ ID NO: 2193 - DNA, 2335 bp, Homo sapiens
  source 1..2335: mol_type = genomic DNA
caagattcgagcctgagcggcctgggcgtctcgagaggtgagagagttggcggcgaggtctcggcggctaagcgagcgtcggcgactgtctctccgcgagaggaggcaagttggggtccaggctccaaagccggtggccgcgtaccgcggtggagccgctgtctttgaggtctgaggagagaacagagtctagctctttcacccaggctggagtgaagtggtgcaatctcagctcagtgcaacctccgccccctgggttcaagtgattctcctgcctcagcctccccagtagctgggattacagtgatatcctgagagaagatgggaaagggctgcaaggttgtggtttgtggattgttatctgtggggaaaactgcaattttggagcagctcctttatggaaatcatactattggaatggaagattgcgaaacaatggaagatgtatacatggcttcagtagaaacagaccgaggagtaaaagaacagttacatctttatgacaccagaggtctacaggaaggcgtggagctgccaaagcattatttttcatttgctgatggcttcgttcttgtgtacagtgtgaataaccttgaatcctttcaaagagtggagcttctgaagaaagaaatcgataagttcaaagacaaaaaagaggtagcaattgtggtattaggaaacaaaatcgacctttctgagcagagacaagtggacgctgaagtggcacagcagtgggcaaaaagtgagaaagtaagactgtgggaggtgactgttacagatcggaaaactctgattgaaccattcactttattagccagtaaactttctcaaccccagagcaaatcaagctttcctttgcctgggaggaaaaacaaagggaactctaattctgagaactaaaaatcagtaatttccacaattgtatgttgaatagtgattgcctttaagtgtctgtgaacatggagtaatattactatttaaaataggccatttgtatctacctttggtccttaggaaaattcctaaggaagtcaattaatgcactttagatgttaaaagtatttgggctaaggttattattgcctgatatgaaataatatattcttattctcattgtttgaaacctgtctttgaaattagcacctttgttatttatgttgtacttgtgaaaacagtaaaatagtttggatagttatgcaaatgcacctatgtgtaacttccccccaaccccaagctgtttcggaagatatcataatcattctgtgtaacattatgcaaacttctaagcccaaacatgactttgtttttaaaaagttcattaatctaatgtctaggattataaaacatttttttgtgtctaaattggacccaaaacattgaacagtttggggtagtaagctaaatttcatcttgtggagattttgctaaacagactaagacccatgatttagctttgctcaaattagaatgtttagcatgagttgaggtaccaggtagtgttaagtaggttcatcacgctctaaggccgttttttccttagccagacccctgttgatagaccagatacttgagggcaaactgtttgctcctcctcttgaaaatgattaggcacttaaggacagtaaagctgtattttctggaaggaagactgtatcttctggaatagttttctagaaaactagtcatatacaataaaagtatcaaaaatattgggctctaatttgatctgacttagatgtctgagtttgtgttgtttctctaaagattttggcaagactcaagcaatgtggctgactgtaactttattaatttaaaaggtaggaagtaagctacttagtggtttcacctgtgaaataactattttgactgaaatgtaaaataagctattcaacaaagaacatattaaaacatcaagtaatttgtaacatcttaaatggaatacttttttcatgagctctagtgaagaactactacatataaaagacgatacttacaaatcagctattgctgctacagtataattcttcaaaatttctcatcataaattcattttttggtaaaaaaaaattaccagacactaactcacccccttacccttttcccccggttattgaatattaatctagcttcccacccatgcatgttacatagatggacaaatgctttcataatgatttttaaataagtaccttccagtttgctttgtttcctactaatgcaacttagtctatattagtacaaacagttaccaattctttttaaattctgtaatgaatgtatgtgtatccagataagtttctctgaaagagacatacagaaacagaactgctgggtc

SEQ ID NO: 2194 - DNA, 2397 bp, Homo sapiens
  source 1..2397: mol_type = genomic DNA
ctatgagcagacgtgtggttcggcaaagcaagttccgccatgtgtttgggcaggcagcaaaggccgaccaggcctacgaggacatccgtgtgtccaaggtcacatgggacagctccttctgtgccgtcaaccccaaattcctggccattattgtggaggctggaggcgggggtgccttcatcgtcctgcctctggccaagacagggcgagtggataagaactacccactggtcactgggcacactgcccctgtgctggatattgactggtgtccacacaatgacaacgttatcgccagtgcctcagacgacaccaccatcatggtgtggcagattccagactatacccccatgcgcaacattacggaacctatcatcacacttgagggccactccaagcgtgtgggcatcctctcctggcaccctactgccaggaatgtcctgctcagtgcaggtggtgacaatgtgatcatcatctggaatgtgggcaccggggaggtgctgctgagcctggatgatatgcacccagacgtcatccacagtgtgtgctggaacagcaacggtagcctgctagccaccacctgcaaggacaagaccttgcgcatcattgaccccagaaaaggccaagtggtggcggagaggtttgcggcccacgaggggatgaggcccatgcgggccgtcttcacgcgccagggccatatcttcaccacgggcttcacccgcatgagccagcgagagctgggcctgtgggacccgaacaacttcgaggagccagtggcactgcaggagatggacacaagcaacggggtcctattgcccttttacgatcccgactccagcatcgtctacctgtgtggcaagggcgacagcagcattcggtactttgagattaccgacgagccgcctttcgtgcactacctgaacacgttcagcagcaaagagccgcagcggggcatgggtttcatgcccaaaaggggactggatgtcagcaagtgtgagatcgcccggttctacaagctacacgaaagaaagtgtgaacctatcatcatgactgtgccccgcaagtcagacctcttccaggacgatctgtacccggatacgccaggcccggagccggccctagaagcggacgaatggctatccggccaggacgccgaacccgtgctcatttcgctgagggacggctatgtgccccccaagcaccgcgagctccgggtcacgaagcgcaacatcctggacgtgcgcccgccctccggcccccgccgcagccagtcggccagcgacgcccccttgtcgcagcagcacaccctggagacgctgctggaagagatcaaggccctccgcgagcgggtgcaggcccaggagcagcgcatcacggctctggagaacatgctgtgcgagctggtggacggcacggactagccccgcgcgccaggcaggcggagcggggcggggcgcacaagctcggccccgccccggcttttagtcccgaactccggaccccgccttcttgggctgggcccgggggcgggactggggagggaactccgcccctcgcgggagaccagaactcttggagcttaggggagacccacgtcgctccagcggaggctggactgcgagcctcgtctgggactcggctggagctggcctagggaggcctggggtaacctggggggctcagcaatggtgctgcacggcgaggtggtgtccccctttgtcctccgcccagggcagggaaagtgcttagtattagcgtgatgcttggggttattggagcctgagcttgacctcaaacgggtggcgatttgatgggtacccccaggctggggaaaatgacagcgcttctcctaatcagctcactggattccatcaccctgagcggtaaaccagatgggcgtcaccccagttctgcagacacatacacaacccgtttgctgcagagccggacccagtggctacacccacagcggtctgtggtagagaactctcttccttctttccaccgacaggggcgagggctgcttcctcgcggcagcccccgcgaagaaatctcgagagaactggcatgaggagttaggttcatcacaaatacacacacactgcccccaaccctctgccgttgcctctctcagaaaaacaagacgtactgaatgaaatattttactaagcgttcagtctgtgcctcctgcatgggtgggagtgaggggaacgagacccccagcctctgcaaatgctacccccaggctcctgggagacctggcgatgcactcctgggctcagggtccatcaggcagcctcttaccctagagctctctccactctgaggttcagaaggaccccaacccacaccgtaggcgttccccccaagtaaagttaggtagcaaaagcctccggt

SEQ ID NO: 2195 - DNA, 2963 bp, Homo sapiens
  source 1..2963: mol_type = genomic DNA
gggtgacgcaggcgcagcgcgggctgcgcgcgctactgcccatccccggttgtcccacttttgttcgcctctcttcggccctctactcaagagctccgtctccgtctcgccctcctcgaagtcctcgtcgcgcgcccgcgacccaggtcgccctgaaatctagcccgtccgagcgcgagtccaacgccgcggccgcaccaaggccccctcagaccgtgccatgggtgacagtgatgacgagtacgatcgaaggcgcagggacaagttcagaagagagcgcagcgactacgaccgttcccgcgagagagatgaaagacgtcgaggggacgattggaatgacagagagtgggaccgtggccgtgagcgccgtagtcggggtgaatatcgggactatgaccggaatcggcgagagcgcttctcgccacctcgccacgaactcagcccgccacagaagcgcatgaggagagactgggatgagcacagctctgacccataccacagtggctatgagatgccctatgctggggggggtgggggcccaacttatggcccccctcagccctggggccaccctgacgtccacatcatgcagcaccatgtcctgcctatccaggccaggctgggcagcattgcagagattgacctgggtgtgccgccgcccgtgatgaagaccttcaaggagtttctcctctccctggatgactcggtggatgagacggaggccgtcaagcgctataatgactacaagctggatttccggaggcaacagatgcaggatttcttcctggcgcacaaagatgaggagtggtttcggtctaagtaccacccagatgaggtggggaagcgtcggcaggaggcccggggggccctgcaaaaccgactgagggtcttcctgtccctcatggagactggctggtttgataaccttctcctggacatagacaaagctgatgccattgtcaagatgctggatgcagccgtgattaagatggaaggaggcacggagaatgatcttcgcatcctggagcaggaggaggaggaggagcaggcaggaaagcctggggagcccagcaagaaagaagaaggacgggctggagcaggcctaggggacggggagcgcaaaaccaacgacaaggatgagaagaaggaagacggcaagcaggctgagaatgacagttctaatgatgacaaaacaaagaagtcggagggtgatggggacaaggaagagaagaaagaagactccgagaaggaagccaaaaagagtagcaagaagcggaaccggaagcacagtggtgacgacagctttgacgagggcagcgtgtcagagtctgagtcggagtcagagagcggccaggctgaggaggagaaggaggaggccgaagcgctcaaggagaaggagaagcccaaggaagaagaatgggagaagcccaaggacgccgcggggctggagtgcaagccgcggccgctgcataagacctgctccctcttcatgcgcaacatcgcgcccaacatctcccgggccgagatcatctccctttgtaaaaggtacccaggctttatgcgggtggcgctctcagagccccagccagagaggaggtttttccgtcgtggctgggtgaccttcgaccgcagtgttaacattaaagagatctgttggaacctgcagaacatccgtctccgggagtgtgagctgagccctggtgtgaacagggacctgacccggcgcgttcgcaacatcaacggcatcacccagcacaagcagattgtgcgcaacgacatcaagctggcggccaagctgatccacacgctggatgacaggacacagctttgggcctcagaaccagggacgcctcccctgcccacgagcctgccctcgcaaaacccgatcttgaagaatatcaccgactacctgatcgaggaagtaagcgccgaggaggaggagctgctggggagcagcgggggcgctcctcctgaggagcctcctaaggaagggaacccggcagagatcaacgtggagcgggatgagaagttgattaaggtcttggacaagctcctcctttacctgcgcatcgtgcattccttggattattacaacacctgtgagtaccccaacgaggacgagatgcccaatcgctgtgggatcatccacgttcgggggcccatgccacccaaccgcatcagtcacggggaagtgctggagtggcagaagacttttgaggagaagctcacgccgttgctgagtgtgcgggagtcactctcagaggaagaggcccagaagatggggcgcaaagacccagagcaggaagtggagaagttcgtcacctccaacacgcaggaactgggcaaggataagtggctgtgtcctctcagtggcaagaaattcaagggtcctgagtttgtgcgcaaacatatcttcaacaagcatgcagagaaaattgaggaagtgaaaaaggaagtcgcgttttttaacaacttcctcactgatgctaagcgcccagctctgcctgagatcaagccagcccagccacctggccccgcccagatactccccccaggtttgaccccaggactcccctacccacaccagactccccagggcctgatgccctatggtcagccccggcccccgatcttgggctatggagctggtgctgtccgccctgcagtccccacaggaggccctccatacccccatgccccgtatggtgctggtcgagggaactatgatgccttccgaggccagggaggttatcctgggaaacctcgcaacaggatggttcgtggagacccaagggccattgtggaatatcgggacctggatgccccagacgatgttgatttcttttgagccgtcccccgttcctcagtcctgtatcatccatacttgtactaccttgtcctatgaagctctgagaattttttgtacgatcagccttactgctaataaaagcacttccacaggg

SEQ ID NO: 2196 - DNA, 826 bp, Homo sapiens
  source 1..826: mol_type = genomic DNA
ctcagcgaagatggcggcagtggagaagcggcggcaagcggtaccaccgccggccggtttcacggacagcggccgccagtcggtatcccgggcggcgggggcggccgagagcgaggaggacttcctgcggcaggtcggcgtgacggaaatgctacgtgcggccctgctgaaggtgctggaggcgcggcccgaggagccgatcgccttcctggctcactacttcgagaacatgggcctgcgctcgcctgtaaacggcggcgccggggagcccccgggccagctcctgctgcagcagcagcgcctgggccgcgcgctatggcaccttcgcctggcccaccactcccagagggccgccttcaacaacaacgtgagcgtggcctacgagtgcctgagcgccggcgggcgcaggaagaggccggggctggacgggcgcacctacagcgagctgctcaggcgcatctgccgggacggccaagcccccgaggaggtggtggcgccgctgctgcgcaaggtgcagtgccgtgaccacgaggcggtgccgctgagcgtcttccgcgcgggcacactcacctgcttcgtgctgctggagttcgtggcgcgcgccggcgcgctcttccagctgctggaggactcggccgccgccgtggccgaccgccgcgtgggccaggccgtgctggacaccctggagggcgcgctgcaggccagcgacgccgccgcgcccgcgcgcttcctggaggccggctcgcgcttggcgcccatgacccgcgaggagtttctggagagggccgccgcgctcttcatcgcgaaggtcaagccggtgggctga

SEQ ID NO: 2197 - DNA, 2429 bp, Homo sapiens
  source 1..2429: mol_type = genomic DNA
gctgattgcccgcctgcccgtgggtcatggcctgccagcagtcgcggtaccacagcttctcgtccgcgtcgaggtaggcgctggcagggatgagggcagagatgagggtttgagtacttctagagagggaaatggcacttgatccggacctctgcacctcctgctggcctctgaccattgatctagggctccagcaccacagagtcaatggttagaatcgggctgatttagcccagtgaagacgttacgtgctagcaaaacgattacagccacggccttcaggagtgaccatagacgaatcctttctcacagaagacaagagcacccagaatcgcaagcttcttcagaaacgaaggacgctgactggtcagttctccatgggtgggcacctgtccccatggcccacatacaccagtggccagaccattttgcaaaatcgaaaaccctgttcagatgactaccggaagcgagtagggagctgccagcagcacccctttcgcactgccaagccccagtacttggaggaactggaaaactacctacgcaaggagctcctcctgctggacctgggcacagattccacccaggaactaaggctgcagccttacagagagatctttgagttcttcatagaggacttcaaaacgtacaagccattactatcctccatcaagaatgcgtatgaggggatgctggcccaccaaagggagaagattcgggctctggagcccctgaaggccaagcttgtcactgtgaatgaggactgcaatgagaggatcctggccatgagagctgaggagaaatatgaaatctccctgctcaagaaagagaagatgaacttgctaaaactcatcgacaaaaagaatgaggagaagatttcattgcagagcgaggtgaccaaactgaggaagaacttggctgaggagtacctgcactacctcagtgagcgagatgcctgtaagatcctcatcgcagacctgaatgagctgcggtaccagcgggaggacatgtcattagcccagtcgccaggcatctggggggaggaccctgtgaagttaaccctggctcttaagatgacccggcaagacctgacccgcacgcagatggaactcaacaacatgaaggccaactttggagatgtggtccccaggagggactttgaaatgcaggagaagaccaacaaggatcttcaggagcagctggacaccctgagagccagctacgaggaggttcgcaaggagcatgagatcctcatgcagctgcacatgagcacgctgaaggaacgggaccaattcttctctgagctgcaggagatccagcgcacttccacgccgcggcctgactggaccaagtgcaaagatgtggtggctgggggcccagagcgctggcagatgctggctgagggcaagaacagcgaccagctggtggacgtgctcctggaagagattggttcggggctgctgcgggagaaagacttcttccctggtctgggctatggggaagccatccctgcttttcttcggtttgatggcctcgtggagaacaagaagccaagcaagaaggacgtggtcaacctcctcaaggatgcctggaaggaacgtcttgctgaggagcagaaagagacgttcccagatttcttcttcaatttcctggagcatcgctttgggcccagtgatgccatggcctgggcttatactatttttgaaaatatcaagatcttccactccaacgaggttatgagtcagttctatgcagtcttgatgggaaagcggagtgagaatgtgtatgtcacccagaaggagacagtagcccagctgctgaaggagatgacaaatgctgacagtcagaacgaggggctactaaccatggagcagttcaacactgtcctcaagagtaccttccctctcaagacagaagagcaaatccaggagctgatggaggcagggggctggcatcccagcagcagcaatgcagacttgctcaactaccgctcactgtttatggaggatgaggagggccagagtgagccctttgtgcaaaaactctgggaacaatacatggatgagaaggacgagtacttacagcagctaaagcaggagcttggcatagaactccatgaggaagtgactctgcccaagctgcgagggggcctgatgaccatcgaccccagcctggacaagcagacagtgaacacctacatgagccaggccttccagctccctgagtcggaaatgccagaggagggtgacgagaaggaagaagccgtggtggaaatcctccagactgccctggagcggcttcaggtgattgacatcaggcgtgtgggacctcgagagccagagcctgcaagctaggaacttgtgggcagcctgcgtactccagtcctgctaacccctagcttttaatataaaagtgtttgtctgaatcca

SEQ ID NO: 2198 - DNA, 1287 bp, Homo sapiens
  source 1..1287: mol_type = genomic DNA
atggagccgctgaaggtggaaaagttcgcaaccgccaagaggggaaacgggctgcgcgccgtgaccccgctgcgccccggagagctactcttccgctcggatcccttggcgtacacggtgtgcaaggggagtcgtggcgtcgtctgcgaccgctgccttctcgggaaggaaaagctgatgcgatgctctcagtgccgcgtcgccaaatactgtagtgctaagtgtcagaaaaaagcttggccagaccacaagcgggaatgcaaatgccttaaaagctgcaaacccagatatcctccagactccgttcgacttcttggcagagttgtcttcaaacttatggatggagcaccttcagaatcagagaagctttactcattttatgatctggagtcaaatattaacaaactgactgaagataagaaagagggcctcaggcaactcgtaatgacatttcaacatttcatgagagaagaaatacaggatgcctctcagctgccacctgcctttgacctttttgaagcctttgcaaaagtgatctgcaactctttcaccatctgtaatgcggagatgcaggaagttggtgttggcctatatcccagtatctctttgctcaatcacagctgtgaccccaactgttcgattgtgttcaatgggccccacctcttactgcgagcagtccgagacatcgaggtgggagaggagctcaccatctgctacctggatatgctgatgaccagtgaggagcgccggaagcagctgagggaccagtactgctttgaatgtgactgtttccgttgccaaacccaggacaaggatgctgatatgctaactggtgatgagcaagtatggaaggaagttcaagaatccctgaaaaaaattgaagaactgaaggcacactggaagtgggagcaggttctggccatgtgccaggcaatcataagcagcaattctgaacggcttcccgatatcaacatctaccagctgaaggtgctcgactgcgccatggatgcctgcatcaacctcggcctgttggaggaagccttgttctatggtactcggaccatggagccatacaggatttttttcccaggaagccatcccgtcagaggggttcaagtgatgaaagttggcaaactgcagctacatcaaggcatgtttccccaagcaatgaagaatctgagactggcttttgatattatgagagtgacacatggcagagaacacagcctgattgaagatttgattctacttttagaagaatgcgacgccaacatcagagcatcctaa

SEQ ID NO: 2199 - DNA, 1235 bp, Homo sapiens
  source 1..1235: mol_type = genomic DNA
gcgggcgctgcggcccctgctctacctcctagcgccggtgcgcggccgaggccgcactacctgtctgcgggaaagcgggatccaccccaggacgtcgggtcgctgccgacataatgtcaagtggaaactatcagcagtcagaggctcttagcaaacccactttcagtgaggaacaagcctctgcgttagtggagtcagtgtttgggttgaaagtttccaaggtccggccacttcctagctatgatgaccaaaactttcatgtctacgtttcaaaaaccaaagatggcccaactgaatatgtcctcaaaataagcaacaccaaggctagcaaaaatccagacctgattgaagtgcagaatcacatcatcatgtttctgaaagccgctggatttccaacagcctctgtgtgtcacactaaaggagacaacacagcttctctcgtgtctgtagatagtggctctgaaatcaaaagctacttggtgaggctgctgacttacctcccaggaagacccatcgctgagcttcccgtcagcccccagctattgtatgaaattggaaaactagctgccaaattggataagacactgcagagattccatcacccaaagttaagtagtcttcatcgggagaacttcatctggaatctgaaaaatgttcctcttctggagaaatacctgtatgccctgggccagaatcgaaaccgagagattgttgagcatgtcattcatctgttcaaggaggaagtaatgaccaaattaagtcattttcgagaatgtatcaatcacggagatcttaatgaccataatattttaatagagtccagcaagtcagcctctggaaatgctgaatatcaagtgtctgggattttagactttggtgacatgagctatggctactatgtgtttgaagtggcaattaccatcatgtacatgatgattgagagcaagagtcctatacaagtaggaggccatgtccttgcagggtttgaaagcatcaccccactgacagctgtagagaagggtgctttgtttttacttgtatgcagtcgtttttgtcagtcacttgtcatggctgcatactcttgccagctatacccagagaacaaagactatctcatggttactgcaaaaaccgggtggaaacacttacagcaaatgtttgacatgggtcagaaagctgtagaagaaatctggtttgaaactgccaaatcctatgaatctgggatctccatgtga

SEQ ID NO: 2200 - DNA, 2766 bp, Homo sapiens
  source 1..2766: mol_type = genomic DNA
atggctttgctgtgtggccttgggcaagtcactctgcgtatctgggtttcacttccttcccaatccgaaaacgggattgggagcggcggcatggaggctctcaccactcagctggggccggggcgcgagggcagttcctcgcccaactccaagcaggagctgcagccgtactcgggctccagcgctctcaaacccaaccaggtgggcgagacgtcgctgtacggggtgcccattgtgtcgctggtcatcgacggccaggagcgcctatgcctggcgcagatctccaacaccctcctcaagaactacagctataatgagatccacaaccgccgcgtggccctgggcatcacgtgcgtgcagtgcacgccggtacagctggagattctgcgtcgggccggggccatgcccatctcgtcgcgccgctgcggcatgatcactaagcgagaggccgaacgcctgtgcaagtcgttcctgggcgagcacaaaccacccaagctgcccgagaacttcgccttcgatgtggtgcacgagtgcgcgtggggctcgcgtggtagcttcatccctgcgcgttacaacagctctcgtgccaagtgcatcaagtgcggctactgcagcatgtacttctcgcccaacaagttcatcttccactcgcaccgaacacccgacgccaagtacacgcagcccgatgccgccaacttcaactcctggcgtcgtcacctcaaactcagtgacaagtcggccacagacgaactgagccatgcttgggaggacgtcaaggccatgtttaatggcggcacgcggtgcggtgcagagatggccccaggcccgccgccccacaaaagcctgcgctgtggcgaagatgaggctgccgggcctccggggccacctccaccccacccgcagcgcggacttggcctggcgactggagctagtggcccggcgggcccaggagggcccggtggcggcgccggcgtacgaagctacccggtgatcccggtgcccagcaaaggctttgggctcctgcaaaagctgcccccaccacttttcccccatccttacggcttccctacggccttcggcctatgccccaaaaaggacgacccggttttaggcgcgggcgagccaaagggcggtcctggcactgggagcggcggcggcggcgcggggacaggcgggggtgcggggggcccgggagccagccacttgcccccgggggcaggggcgggcccgggcggcggcgccatgttctgggggcatcaaccctccggggcagccaaggacgcagcggcagtggctgcagcggccgccgccgccactgtgtacccgacgtttcccatgttctggccagcagcaggcagcctcccggtaccgtcctaccccgctgctcagagccaagccaaggccgtggcggcagccgtggcggcggcagcggcggcggcagcggcagctgctggcagcggtgccccagagcccctggacggtgccgagccagccaaagagagtggcctcggcgcggaggagcgctgcccgagcgctctgtcccgcgggcccctggacgaagacggcacggacgaggcgctgccaccgcccctggccccgttgcccccgccgcccccgccgcccgcacgcaaaggctcctacgtgtcggccttccggccggtggtcaaggacaccgagagcatcgctaagctctacgggagcgcccgggaggcgtacggcgcggggcctgctcgggggccgggacccggcgctgggagcggcggctacgtgagcccggactttctgagcgagggcagctccagctacaattccgcctcgcccgacgtggacaccgcggacgagcccgaggtggacgtggaatccaaccgcttccccgacgacgaggacgcccaagaggagaccgagcccagcgcacccagcgcagggggcggcccagacggtgaacagcccactggacccccttccgccacctcctctggcgcggacggtcccgcaaactctcccgacggcggcagcccccgcccccggcgccgcctcgggccacccccagctggccggcccgcatttggggacttggcagccgaagacttggtgcggagacctgagaggagcccgccaagcggcggcggcggctacgagctgcgagagccttgcgggcccctaggaggccccgcgccggccaaggtgttcgcgcccgagagggatgagcacgtgaagagcgcggcggtggcgctggggcccgcggcctcctacgtctgcacccccgaggcccacgagccagataaggaagacaatcactcgcccgccgatgatttggaaacgaggaaatcctatccagaccaaaggagtatctcccagccaagtcctgcaaatacagacagaggcgaagatgggcttaccttggatgtcacaggaactcatttggtggagaaagatatcgagaacctggccagagaggaattgcaaaaactgctcctggaacaaatggagctccgcaagaagctggaacgggaatttcagagtctcaaagataattttcaggatcaaatgaagagggaattggcttatcgagaagaaatggtgcaacagctgcaaattgtcagagataccctgtgtaacgaactcgaccaggagcggaaggcgcgctatgccatccagcagaaattgaaagaagcccacgacgccctgcaccatttctcctgcaagatgctgacgccccgccactgcactggcaactgctccttcaagccaccgctgttgccctag

SEQ ID NO: 2201 - DNA, 5068 bp, Homo sapiens
  source 1..5068: mol_type = genomic DNA
gagagttcagggaggccgccctgagattccggcgaggccgcgggtcccacctcccgggggcggggcgagggcggagcggggagaagggagctgacgggcgcccggccggctgcggtccgtgcggaggctgagccggccgcgggcgcgaccggaggcagtttccgttactatggcaatgacggcagggactacaacaacctttcctatgagcaaccatacccgggaaagagtgactgtagccaagctcacattggagaatttttatagcaacctaattttacagcatgaagagagagaaaccaggcagaagaaattagaagtggccatggaagaagaaggattagcagatgaagagaaaaagttacgtcgatcacaacacgctcgcaaagaaacagagttcttacggctcaaaaggaccagacttggcttggatgactttgagtctctgaaagttataggaagaggagcttttggagaggtgcggttggtccagaagaaagatacaggccatatctatgcaatgaagatattgagaaagtctgatatgcttgaaaaagagcaggtggcccatatccgagcagaaagagatattttggtagaagcagatggtgcctgggtggtgaagatgttttacagttttcaggataagaggaatctttatctaatcatggaatttctccctggaggtgacatgatgacattgctaatgaagaaagacaccttgacagaagaggaaacacagttctacatttcagagactgttctggcaatagatgcgatccaccagttgggtttcatccatcgggatattaagccagacaaccttttattggatgccaagggtcatgtaaaattatctgattttggtttatgtacgggattaaagaaagctcacaggactgaattttatagaaatctcacacacaacccaccaagtgacttctcatttcagaacatgaactcaaagaggaaagcagaaacttggaagaagaacaggagacaactggcatattccacagttgggacaccagattacattgctccagaagtattcatgcagactggttacaacaaattgtgtgactggtggtctttgggagtgattatgtatgaaatgctaataggatatccacctttctgctctgaaacacctcaagaaacgtacagaaaagtgatgaactggaaagaaactctggtatttcctccagaggtacctatatctgagaaagccaaggacttaattctcagattttgtattgattctgaaaacagaattggaaatagtggagtagaagaaataaaaggtcatcccttttttgaaggtgtcgactgggagcacataagggaaaggccagcagcaatccctatagaaatcaaaagcattgatgatacttcaaattttgatgacttccctgaatctgatattttacaaccagtgccaaataccacagaaccggactacaaatccaaagactgggtttttctcaattatacctataaaaggtttgaagggttgactcaacgtggctctatccccacctacatgaaagctgggaagttatgaatgaagataacattcacccataaccaagagaactcaggtagctgcatcaccaggcttgcttggcgtagataacaatacactgaaatactcctgaagatggtggtgcttattgactacaagaggaaattctacaggattaggatttctaagactactataggaattggttggcagtgccagctggctcttttttttaatattttattatttttgttaactttattatatgaaggtactggaataaaaggaacagacatccctttctaactgcactgcctacatgcgtattaaggtccattctgcctgtgtgtgctgtggctttgaactgtaacacctctaatcaattcaggagaaacacatatcatttaaagcaacataggctaacctgtaggtaacactgcagtattgatgttttactgcaaatcttatgggtctagataatcagtaaaagccatcttccatagttggtgttagaacattgccctattggtttggacatctgtagaatatatatgaagacaatttctgtaatggttttaagagatttaaaaagaaattcactggttctttacaaaatagaatttatcatcaagttattacacaaacttcacagtaaggagtgacaagtttataataaggaagacaaagtttaacaccttcactcaagcactccactaatatatttacgttgcattcagaaatactgatgaccttcatatacgtagtctgtatactcatagggagatgtactgtattatataacatgtaaagttgattttcttgtgacaagagaacttctttttttaacaagaggacatggcattattttaatttgattatggtgagttgaatttaagacatgaccatgaaggctgcttgtagaattagtgtatttttattaaactatttttttaaatgtcaaacttctatcatgtaaatggacttatagagaacaaaaagctatttactttggttttctagaaagttgttacatatcatggctggttaacttttatttcttttgatgaaaatttttcctttgatagtacttgtattattgtgccattattttcttatgctccaaatgtaccaaagatcttgaacagagtggatgttcacaactgagtagaattttcctttcctgtgggcatgctgtattcagacctgacagatctttgatagaggtcagcttattaaagggcaatattgttcttgtttagctacatcactgtggtgaatatagatggaattaaggaagtaaatgcaggccagggggttgtgatgagaggataggggagataatatcagcatcaaattctttgggtatctctctaagaattaaataatcttttctagcttaatattttaattctaattcaaacaactctgaggttttggtttcattagtaatagttgaggaataatatactagcaaagaatggcctaatgtttgtcataactgttaatggatgaaattttttaaagatacaaccatgataaccattataaatgatctatgatcaaaatctaaagtgatgaattatttgtaggaatgtcttcctaatggggaagaattgcataggagcattatgcaaatctacacaagcttttataaatgttgctgctgggtagctccacagtgtttcataaggccatcctgtttcccccaactcccccatttttggtttgtttctttttaaatatttgttgagtacttacgtgtttatctaacagttcacttccatttttctagtctggattttttgagtatttaggaaagagagctattaaaaactggggatttctcaatgtgactaactctaatttttctaattataactgcctttaattaacataatattaacttttgctgaggtttatgagattttctcaccccacatcgctcccctttttttaaaaaggactgttttgctagtgtgataatgaataggtaagatatgagataattgcaacattgtctagttctagtatggtaactattcttgaaatggtattgaaaaataccgttaattcaaattgacagagattgataaaaagaaactgatttacctaagtttactttttaattgcataatagagcattttttgttttgagttccctcattcttattaccagaaagagcttgcaaatagttttactttcttggcactggaagggtagttctggaaagctactttgttgagagtctcattcttccctggagttaatagagtgattcacaatctttggggttttctcctcatcaaaagcatttcttaagtgcctatctaaaagcaattaaagactgtgtctgccctttagaagctaagaatttgattcatgatgcaaattaactagataatttgcaaagtacccttgagattgaattttctctattatatatttcccatatttcaggtgaataatttaatttaaatgacaaaaccctatctagtcaactgggcataatgacattttctttaaattagactctattttgaattaaaagagttttattataaaccgtgtgtttttggtttttctaagtatatagaaagcttgtataattcagatttatcaatttcctgatttaatgtagactttgacttttttattaaaaacctttgtattaaagcaagttatgttatttttcttttatgcatttattactaacatagctttaaatctttaaatgtattgaagcattgtgctgtctgaaaataaggaattgcttataaaccagccacttctgaatacaatatgtagctgatttaataagctagttagtgaatggaaaataagtgtggagtattaaaaatgttctttggttggtaaggcctaagatagggtttcatttatttctatactttttctgttttttaaacacctgcatatttttatgtaaatctctaaatttaaaatattttaagtacatttatttttggtgttttattgtataaaaccttagacaatcaatcagtcagtctttactgacaggagcagcagctatctgtcttttgctgatctacaaataaatgaattgagaatttagtccatagaggtccctggctaccaaacacattctcctttgaattgttaaaattcagaacattcaaaataactgttttgctacaacccatgattattttcctgttgtgtttatttaaatttactttctctttagaagtgcacttatttctgaaaaatcttaatgaaacaaacgcttagaacaaatataaatatgagacacttgggactactagagatattttagatttttatgaaaaaaatgtgaggggatattgctgctttaaaaaggaataaagtaataaaaatatatctcagctatttttttaaagcaatataattcagcaattgtctagaaaagtaatcatgaggctactgagtttggtgttcagttactgagtttcaaaaatgttttggtggcatgaggacaaaatttcattgaaggtaagataagaataaaaactatgtttacaaaa

SEQ ID NO: 2202 - DNA, 4057 bp, Homo sapiens
  source 1..4057: mol_type = genomic DNA
cctgaacggacgccgtagccaagaggttgggcggatgttgtgagccgggtcgctgcggccgaggctccggcccccaggaccactggctgcccatgagagatgaaggatggcatccaagggggccggcatgtctttctcccgcaagagctataggctgacctcagatgctgagaaatccagggtcacaggcattgtgcaggagaagctgctgaatgactacctgaaccgcatcttttcctcttctgaacatgcacccccagcagccaccagcaggaaacccctgaacttccagaacctgccagaacatttggaccagttgctacaggtggacaatgaggaggaggaaagccagggacaggttgaagggcggcttggcccatccactgtggtcctggaccacacaggcggctttgaggggcttctcctggtggatgatgacctgctgggggtgattggacacagcaactttggcaccatccgctctaccacatgcgtgtacaaagggaaatggctctacgaggtcctcatctcctcccaggggctcatgcagatcggctggtgcaccatcagctgccgcttcaaccaggaggagggggttggagatacacacaactcctatgcctatgatggcaaccgcgtgcgcaagtggaatgtgaccacaacgaattatggcaaggcgtgggcagcgggggacatcgtgagctgcctgattgacctggatgatggcactctgtccttctgcctgaacggtgtatcactgggcactgcctttgagaacctgtccaggggcctgggtatggcctacttcccagccatcagcctctctttcaaggagtccgtggccttcaactttggcagccgtcctctgcgctacccagtggcaggctaccggcccctgcaggacccaccgagtgctgacctggtgcgggcacagaggttgctgggctgcttccgggcagtgctgagtgtggagctggaccctgtggaggggcggctgttggacaaggagagctccaagtggcggttgcggggccagcccaccgtcctcctcacactggcccacatcttccatcactttgcaccgcttctgcgcaaggtgtatctggtggaggctgtgctcatgagcttcttgctgggcatcgtggagaagggcacacccacacaggcacagtccgtggtgcaccaggtcctggacctcttgtggctcttcatggaggactacgaggtacaagattgcctcaagcagttgatgatgtctctgcttcggctgtaccgattctcacccattgtcccagacctgggcctacagatccattacctgcggctcactatcgccatcctgaggcatgagaagtcccgcaagtttctgcttagcaatgtcctcttcgacgtgctccgctccgtcgtcttcttttacatcaagagccccctgcgtgtggaggaggccggcctgcaggagctcattcccaccacctggtggccccactgctccagtagggagggcaaagagagcacggagatgaaggaggagaccgcagaggagcggctgcggcggcgagcctacgaacggggctgtcagcggctcaggaagcgcatcgaagtggtggaagaactacaggtccagatcctgaagctgctgctggacaataaagatgacaatgggggtgaagcttctaggtatatcttcctgaccaagtttcgcaagtttctgcaggagaacgccagtggccgggggaacatgcccatgctctgcccccctgagtacatggtctgcttcttacaccggctgatctctgccctgcgctactattgggatgaatacaaggcttccaatcctcatgcttccttcagtgaggaggcctacatcccgccccaggtcttctataatggcaaggtggactactttgacctgcagcgcctggggggcctcctctcgcacctgcggaagaccctcaaagatgaccttgcttccaaagccaacattgtgatcgacccactggagctccagtcaaccgccatggatgacctagatgaggatgaggagccagccccagctatggcccagcgccccatgcaggccctggctgttggggggccactgcccctgccccggcccggctggctcagttctccaactttgggccgagccaaccgcttcctcagcacagcggctgtgagcctcatgaccccacggcggcctctgagcacctcggagaaagtgaaggtccgcacgctgagcgtggagcagaggacccgtgaggacattgaaggcagccactggaatgagggcttgctgctggggcggccccccgaggagcctgagcagcccctcaccgagaactcgctgctggaagtcctggatggggcggtcatgatgtacaacctcagcgtacaccagcagctgggcaagatggtgggtgtctccgatgatgtcaatgaatacgctatggctctgagggacacagaggacaagctccgccggtgccccaagaggaggaaggacatccttgcagagttgaccaagagccagaaggttttctcagaaaagctggaccacctgagccgccgtcttgcctgggtccatgccactgtctactcccaggagaagatgctggacatctactggctgctgcgcgtctgcctgcggaccattgagcacggtgatcgcacagggtctctctttgccttcatgcccgagttctacctgagcgtggccatcaacagctacagtgctctcaagaattactttggtcccgtgcacagcatggaggagctcccaggctatgaagagaccctgacccgcctggctgccattctcgccaaacactttgccgacgcacgcattgtgggcactgacatccgagactcactgatgcaggccctggccagctacgtgtgctacccacactccctgcgggctgtggagcgaatccccgaggagcagcgtatcgccatggtgaggaacctcctggcgccctatgagcagcggccctgggcccagaccaactggatcctggtgcggctctggaggggctgtggcttcgggtaccgctatacacggctgccacatctgctgaaaaccaaacttgaggacgccaatttgcccagcctccagaagccctgcccttccaccctgctgcagcagcacatggcggacctcctacagcagggtcctgatgtggcacccagcttcctcaacagcgtcctcaatcagctcaactgggccttctctgaattcattggcatgatccaagagatccagcaggctgctgagcgcctggagcggaactttgtggacagccggcagctcaaggtatgtgccacctgctttgacctctcggtcagcctgctgcgtgtcttggagatgactatcacactggtgcctgagatattccttgactggacccggcctacctctgagatgctgctgcggcgtcttgcacagctgctaaaccaggtgctgaaccgggtgacagctgagaggaacctgtttgatcgtgtggtcaccctacggctgcctggcctagagagcgtggaccactatcccattctggtggcagtgacgggcatcctggtgcagctcctggtgcgtggcccagcctcagagagagagcaagccacatcagtgctcctggcagatccctgcttccagctacgctcaatatgctatctcctgggacagccagagcccccagcacctggcactgctctgccagcccctgaccggaagcgcttctccctgcagagctatgcggattatatcagtgccgatgagctggcccaagtggaacagatgctggcgcacctgacctctgcatctgcccaggcagcagctgcctccctgcccaccagtgaggaggacctctgccccatctgctatgcccaccccatctctgctgtgttccagccctgtggccacaagtcctgcaaagcctgtatcaaccagcacctgatgaacaacaaggactgcttcttctgcaaaaccaccacatccaacctccttgcctgcctgtatcctcattggtgggagcccagccatggccctaattgtgcctga

SEQ ID NO: 2203 - DNA, 5078 bp, Homo sapiens
  source 1..5078: mol_type = genomic DNA
atgccgtcggtttcgaaagcggcggcagcggcgctgagcgggtcccccccgcagactgagaagccgacccactacaggtacctgaaggagttcaggacggagcagtgccccctgttttcacagcacaagtgcgcgcagcaccggccgttcacctgcttccactggcacttcctcaaccagcggcgccgcaggcccctccgcaggcgcgacggcaccttcaactacagccccgacgtgtactgctccaagtacaacgaagccaccggcgtgtgccccgacggcgacgagtgtccctacctgcaccggacgacgggggacacagaacgcaagtaccacctgcgttactacaaaacaggaacctgcatccacgagacagacgcacgtggccactgcgtgaagaatgggctgcactgtgccttcgcgcacggccccctggacctgcggccgcccgtgtgtgacgtcagggagctgcaggcccaggaagccttgcagaacggccagctgggcggcggggaaggggtcccggatctgcagcctggggtcttggccagccaggccatgattgagaagatcctgagcgaggacccccggtggcaagatgccaacttcgtgctgggcagctacaagacggagcagtgcccgaagccgccacgcctgtgccgccagggctatgcgtgcccacactaccacaatagccgggacaggcggcgcaacccccggcggttccagtacaggtccacgccctgccccagtgtgaagcacggggatgagtggggggaaccctcacgctgcgatggcggcgacggctgccagtattgccactcccgcacggagcagcagttccatcccgagtctacaaaatgcaacgacatgcgccaaaccgggtactgcccgcgcggccccttctgtgcctttgcacacgttgagaagagcctggggatggtgaatgaatggggctgtcacgacctccacctcacgagtccttcctccacgggcagcggccagccgggaaatgccaagcggagagactcgccggccgagggtggccctaggggcagcgagcaagacagcaagcagaaccacctggccgtgtttgcagcggtccacccgccggcccccagcgtgagctccagcgtggcgtccagcctggcgtccagcgccggctccggcagctcctcccccactgcgctgcccgcgccccccgcccgtgccctcccgctcggccccgccagcagcactgtggaggccgtcctcggttctgcgttagacctgcatcttagcaatgtgaatattgcatccctagagaaggacctggaagagcaagacggccacgacctgggagcagcaggtcccaggtcgctggccggctctgcacctgtcgccatccccggctccctgcccagagcaccatcgctacactcgccatcctctgcgtccacctcgccgctcggttcgctgtcccagcccctcccagggccggtgggctcctcagccatgacgcctccccagcagccgccacccctgcgttcagagccgggcacactgggctctgcagcctcatcctacagccccctaggtttgaacggtgtccccgggagcatctgggactttgtttccggcagcttctcccccagcccctcccccatcctgagtgccggccccccatcctcttcgagtgcaagtccaaacggagctgagctggcccgggtcaggcggcagctggacgaggccaagaggaagatccggcagtgggaggagtcctggcagcaggtgaagcaggtctgcgatgcctggcagcgagaggcgcaggaggccaaggagcgtgcccgtgtggccgatagcgaccggcagctggcgctgcagaagaaggaggaggtggaggcacaggtgatcttccagctccgcgccaagcagtgtgtggcctgccgggagcgggcccacggtgctgtcctgcggccctgtcagcaccacatcctctgtgagccgtgtgcggccaccgcacctgagtgcccctactgcaagggccagcccctgcagtggtgacctcagcggggacagccacctcctgctgggcaccctggctccagcgctcctcctgaccacggacatgtcgtcactcgcttctggtgccaccgacgtgaggaccgaggctgggagcccttcctgttacacgttatcatgaggctgggagccccgcctgcgcttggcctgacagcctttcctgtcacacgttgtcacctatctagtcctaccgacggtttcaaggtattttcctcaaaaaccttaaatgcaaacccacagaacccgcctgcctgtccctgaggggcctggtgcctccgggatccacgcggcgctgtgatcacagcagtttgtggtcctgacactactgtgactaggccactgggagctggggtctttcaaagcactttgtaaaccgaggaatttagttagaggttataaattgctctaagctgctttctgtttttttttaatatgcgataatatgaagctttatatgtgtactgtgaacttaaatatttcatatcagtttattgtcaattcatagtatgctaaatatattagatttcatattctgaaactagtacttatgaaatgagtgtttatctagtagtaagacctaggatttttacattttccaattaagtgcaaatagtatttataagcagagtgattatggattgagatgtttttaacttgatggaaggagctagttttcctgagcctgtgtgtgcaccaggcactggggctgatgttccagcctcgtggcgtgggagcaggagagctccgtcctgcatttctgtggtccgtggccgctgtttctgtgcgcctgcgcctcggagagcaagtgaaggagcatcatgggttttgttttctcccttaaccctctgaaagacagtttgatactaacaaaaaacgcagcagaggggatccgacgtcagagcttttagaattacttttttaagcagctgtcttctggctgggtgcggtggctcatgcctgtgatcccagcactttgggaggcgggtggatcacctaaggtcaggagttcaagaccagcctggccaacatggtgcaaccccgtcttagtaaaaatacaaaaattggcctggcgtgagagcgggcacctgtagtcccagctactcgggaggctgaggcaggagaatcgcttgaacctgggaggcagaggttgcagtgagccgagatcgcgccaccgcactccagcccgggtgacagagcgagactctggctcaaaaaaaaaaaaaaaaagctgttttctgattactcagagctgtcctaggcaatggtgctttgtagctccttggagatgtcgctgggcgtcctggcaggggtcaggcagtgaactgggagagtggttgcctccccagcacccgtgaccaccctggtcctgctcgtgtgggagatgctcgggccgtgtgtgcgccagggtccggggtgccgggtgtatgtggcagtcacctgacccgcgctgccagttatcatcggagctcatccatgtggccagtgaggtcacaggagaggacccggccacagcctctcagtggcctggagcacacgggggaagcgaccccccccaggtcccggctctgctgtggtcccctgtcccgtctgcccctggagcgacagtgtggtttcggccgcagcagaaacgtgactgagaacgcatccccgcgatgacctgacccttctgctcagggctgggactgtccctaggagttgagcaggaacaggcatctgtggtttacggcgacctggctctccgcgggccacgtgggtggtgagggcacacgagtgggaagcggcaccgacgtgtttctccccgaccgtggctttgccaaagacttttaatagcattttttaagtgcaaaacgtctaggtaaaaatctttatcatcagtgaccaaattagaatgtatttaatatagtaggtggtttaagaactgttttaacgtaagacaaactgatagcaacattctgttgttttaaaggaagtgggtccgtgacattctgcagctagtccactactccaaggtaactatcgacttggtttcagtgaatctattttgtttttaactacagtgatttattagctcagtatctagaaattacgtatattttgtgctactgtcatcgatgtgtaaactctgtttttatttgtatttatgcacttggttcccatttggagcctctggtcttttctgggataagtggtgtctgccgagacatctcccggttgtcagtggtcaggagcagctgagctctagtctgccagctgctctgctctttctgggaaggaggtggcgcccgcccctcagggtgtctccagggctcagcttccggggtggtagagctggggagccccaggggtggggggacagctgggagatggaggtggcacctgctcccctagatcagtactggctctgaggacaggtgagcagtgggaagaccaaagaatggctggcagcgctgccagggttggaaatgggggcaagatcctggggctgtgtgccctggggcctccctcacctgtcttggtggccatggcctcagggatggctcctaggtggctgaggcacagcagtggctggaaggtgccccgtggaggctgaggtggaggcgcgcccagcagctcccccctgtggccatggcgggcacggggcgtaggagctggctggcggccggctctgcatgttcttgttgcctgtcgtctgtaactctagtgttcgacattcgccgtgatacagtggtgtcacgacgtgtgtaactgtggtcagcagaccttgttccgcgtggacgcctcaagtggattaatttctggaagcctcaatctgtatgtttgagtatttacatgagaatgttatttgaatggaattttcttaacccagaaggtagtatttataatcatttacttgtagcgaactgtttaaagttaacacttgtttaaatttttttacactatagcatttatgcaatggtttacagaattcatggagttatttttatcagtatgggaattaattaaaaccttgaatcttt

SEQ ID NO: 2204 - DNA, 1510 bp, Homo sapiens
  source 1..1510: mol_type = genomic DNA
acaagatggcggcgctgcgggacggctagcggccctgcgtgggagttcctgacagctggattctagaagtagaactatgagctcacctttggcctcccttagcaagacccgaaaagtgcccctgccctcggagcctatgaatcctgggaggcgaggaatccgcatctatggagatgtccctgcatcccatgactcggagctgatggccttcatgacgaggaagttgtgggacctggagcagcaggtgaaggcccagactgatgagatactgtccaaggatcagaagatagcggccctagaggacctggtgcagaccctccggccacacccagccgaggcaaccctgcagcggcaggaggaactggagacgatgtgtgtgcagctgcagcggcaggtcagggagatggagcggttcctcagtgactatggcctgcagtgggtgggcgagcccatggaccaggaggactcagagagcaagacagtctcagagcatggcgagagggactggatgacagccaagaagttctggaagccaggggactcattggcgccccctgaggtggactttgacaggctgctggccagcctgcaggatcttagtgagctggtggtagagggtgacacccaagtgacaccagtgcccggcggggcacggctgcgtaccctcgagcccatcccgctgaagctctaccggaatggcatcatgatgttcgacgggcccttccagcccttctacgatccctccacacagcgctgcctccgagacatattggatggcttctttccctcagagctccagcgactgtaccccaatggggtcccctttaaggtgagtgacttgcgcaatcaggtctacctggaggatggactggaccccttcccaggcgagggccgtgtggtgggcaggcagctgatgcacaaggccttggacagggtggaggagcacccaggctccaggatgactgctgagaaatttctgaacaggctccccaagtttgtgatccggcaaggcgaggtgattgacatccggggccccatcagggacaccttgcagaactgctgcccattgcctgcccggatccaggagattgtggtggagacgcccaccttggccgctgagcgagagaggagccaggagtcacccaacacgccggcacccccgctctccatgctgcgcatcaagtctgagaatggggaacaggccttcctactgatgatgcagcctgacaacaccattggggacgtgcgagctctgctagcgcaggccagggtcatggatgcctctgcctttgagatcttcagcacattcccgcccaccctctaccaggacgatacactcacgctgcaggctgcaggccttgtgcccaaagcagcactgctgctgcgggcacgccgagccccgaagtccagcctgaaattcagtcctggtccctgtccccccggtcccggtcccggccccagtccctgtcctggacccagtcccagcccccaataaagcacccgccccctc

SEQ ID NO: 2205 - DNA, 2382 bp, Homo sapiens
  source 1..2382: mol_type = genomic DNA
atgggccagtgctataatttggaggatgatgacttggaaacagacgtgaacaagctgagttccaaacctggtcttgaccgacctgaagaggaactgatgcaatatgaggtgatgtgtcttgagctctcctatagctttgaggaactgcagtccaaacttggagatgatttgaactctgaaaagactcagtatgccaatcaccaccacattccagccgctgcctcctcaaaacagcattgctacagcaaggaccaaagctcctgtgggcaagaaagagaatatgctgtccagacttcccttctgtgcagggtgaagacgggaaggtccactgtgcatctaggctccaaaaaaaatcctggagtgaacctgtaccaaaatgtgcaatccaatagtctcaggagagattcttctgaaagtgaaatccctgacattcaggcttccccgaaagcagatgcctgggacgtagatgcaattttctgcccaaggatgagtgcctccttttctaattccactaggactagagaagttgtcaaagtaatagataagcttctgcagacacatctgaagcgtgtccctttccacgatccctatctttatatggccaaagccagaagaaccagctctgtggtggacttcaagatgatggcatttcctgatgtctggggacactgtccccctcccaccacccagcctatgttggaacgaaaatgtggagtccaaaggatcaggatatttgaggatattcggaggctcatccagccaagtgatgttataaataaagttgtcttcagtttagatgagccttggcctttgcaagacaatgcttccaattgtttacggttcttctccaaatttgagtcaggaaatcttcgcaaagccatccaagtgcgtgagttcgagtatgacttgctggtcaacgcagatgtgaatagcacccagcaccagcagtggttctatttcaaagtgagcggtatgcaggcggccatcccttaccacttcaacatcatcaactgtgagaagcccaacagccagtttaattatgggatgcagcccaccctatattctgtgaaggaggctcttcttggcaaacccacctggataaggacaggccatgaaatatgttattacaaaaatcattatcgccagagtacagctgttgcaggcggagcatctgggaagtgctactataccctcacctttgctgtcaccttcccacacagtgaggatgtctgctacctggcctaccactatccctatacctacacagccctcatgactcatcttgacatcctggaaaagagtgtcaacctcaaagaggtctacttccggcaagatgttctctgccagacgctgggagggaatccgtgtcccttggtgaccatcacggccatgcctgagtccaacagtgatgagcatctagagcagttccgacatcgtccatatcaggtgatcactgctcgagttcatccaggagagagcaatgccagttgggtgatgaagggtaccttggagttcctggtcagcagtgaccctgtggctaggctcttgagggaaaacttcatcttcaagatcatacccatgctcaacccagatggtgtcatcaacggcaaccacagatgctcactgagcggggaagatttgaacagacaatggctttctcccagtgctcatctgcagccaaccatttaccatgccaaaggcctcctctaccacctgagcagcattggccgaagtcccgtggttttctgtgacttccatggccactcccaaaagaagaatgtgttcctttatggctgtagcatcaaggaaaccttgtggcaagcagcatgcactgtgggcacatctactatcctagaggaggtcaactacaggactcttcccaaaatccttgataagctagcaccagcattcacaatgagcagctgcagctttctcgtggagaaatctcgagcttccacggcccgggtggtggtgtggagagagatgggggtgtccagaagctacaccatggaaagcagctactgtggctgcaaccagggcccttatcagtgtacacagaggctgttggagaggacaaagaatgaaagggctcacccagtggatggccttcagggtctacagtttggtaccagagaactggaggagatgggagccatgttctgtttgggcctcctcatcctggagctcaaatctgccagctgcagccatcagctcctggctcaagctgcaactctgctgagtgctgaggaggacgctctggaccagcacctccaacgattaaaatcatccaatttcctgccaaagcatatttggtttgcttaccacttttttgccattacaaactttttcaagatgaaccttcttctgcatgtctccccgtga

SEQ ID NO: 2206 - DNA, 575 bp, Homo sapiens
  source 1..575: mol_type = genomic DNA
cgcgcttggcaacggctcggcgtcgcgctttggccaaccgctgcgtcgtccctgggcccgaataactgtcgcccgcttccctcagcgtgaggtgaagcacttcaaattgcctgatgaaagttgaatcaggaatgaagataaaagtacacaacaatgcagaaagcggtacttagcctcacaaagatggaaacattccaaaaacgtgaagtactgttgtcccaagattctttctaagcctaaaattacacttttactagtccgattttctggttgtgagttttttttgtttgttttttttttttcgagaaactgcagtaggcttcttggaagtagaccaagggtgtccaatctttggcttccctgggccacatcggaagaagaattgtcttgggccacacatgaaattcacaaacactaaggtacaaatgatgcaaaatgtgcacctggctccagagacagatgaagatgatctttattccggctataatgactacaatccaatctatgatatcgaggaattggagaatgatgcagcttttcagcaagctgtgaggactagtcatggcagaagacct

SEQ ID NO: 2207 - DNA, 3054 bp, Homo sapiens
  source 1..3054: mol_type = genomic DNA
cgcaccacccccttcccgccgcgctctctcccgcccccgcgcttccggccccgcccgcccccgcgcggaggactgtgggagcggcttccttggattccgcgcttggcaacggctcggcgtcgcgctttggccaaccgctgcgtcgtccctgggcccgaataactgtcgcccgcttccctcagcgtgaggtgaagcacttcaaattgcctgatgaaagttgaatcaggaatgaagataaaagtacacaacaatgcagaaagcggtacttagcctcacaaagatggaaacattccaaaaacgtgaaaaactgcagtaggcttcttggaagtagaccaagggtgtccaatctttggcttccctgggccacatcggaagaagaattgtcttgggccacacatgaaattcacaaacactaaggtacaaatgatgcaaaatgtgcacctggctccagagacagatgaagatgatctttattccggctataatgactacaatccaatctatgatatcgaggaattggagaatgatgcagcttttcagcaagctgtgaggactagtcatggcagaagacctccaataactgctaaaatatcaagcacggcagttactagacctatagctactggatatgggtccaagacatctctggcatcatcaataggaagaccaatgacaggggctattcaggatggagttactagacccatgacagcagtgagagcagctggttttaccaaagcagctttgagaggctctgcatttgacccccttagtcagtcaaggggccctgcttcccctttggaagccaagaaaaaagatagcccagaggaaaaaataaagcaattagagaaggaagtaaatgagttggtagaagaaagctgtattgccaatagttgtggagacttaaaattggccttagaaaaggcaaaagatgcaggaagaaaagagagagtcctggtgagacagcgagaacaagttacaactccagaaaatatcaatttggatttaacttactcagttcttttcaatttggccagtcagtattcagttaatgaaatgtatgccgaagcacttaacacttatcaagttatagtcaaaaataagatgtttagcaatgcaggaatattgaaaatgaatatgggaaatatctatttaaagcaaagaaattattccaaagccattaaattctaccgaatggcattagaccaagttccaagtgtcaataagcaaatgaggattaaaataatgcagaatattggagttacatttattcaggctgaccgagaaaaaatgaagaaggcattccaaaaattgattactgttccattagaaattgatgaagataaatatatttcaccaagtgatgatcctcatactaacttagtaactgaagctataaaaaatgatcacctcaggcaaatggaacgtgaaaggaaagccatggcagaaaaatatattatgacatctgcaaaactcattgctcctgtaattgaaacatcttttgctgcaggttatgattggtgcgtggaagtggtgaaagcttctcaatatgtagagctagccaatgatctggaaataaacaaagcagttacatacttgagacaaaaagactataaccaagctgtagagatcttaaaagtgttggaaaaaaaggacagtagagtgaaaagtgcagctgcaaccaatctctcagccctgtattatatgggaaaggattttgcacaagccagcagctatgcagatatagctgtgaactctgatagatataatccagcagctcttactaataaagggaatacagtttttgcaaatggtgattatgagaaggccgctgaattctataaagaggctctaagaaatgattcttcttgtactgaagcactttataatattggccttacctatgagaaactaaatcggctagatgaggctttggactgtttcctgaaacttcacgcaatcctacgaaacagtgccgaagttctttaccagatagcaaatatatatgaattaatggaaaatcccagtcaagctattgaatggctaatgcaggtggtcagtgttattccaaccgatcctcaagttttatctaagctaggagaattatatgatcgtgaaggagataaatctcaagcatttcaatattactatgagtcatataggtattttccttgtaatattgaagtcattgagtggcttggagcctattacattgacacccaattttgggaaaaagctattcagtactttgaaagagcttctcttatacagcctacacaagtgaaatggcagctgatggtagctagttgtttcagaagaagtggtaactaccaaaaagcattagatacttacaaagatactcacagaaaatttccagaaaatgtcgaatgtctgcgtttcttagttcgtctctgcacagatcttggattaaaagatgctcaagaatatgccagaaaactgaagaggttggaaaaaatgaaagaaataagggaacagcgcataaagtcaggcagagatggcagtgggggctcccgtggcaaaagagaaggaagtgctagcggtgatagtggccagaactatagtgccagtagtaaaggtgaacgactaagtgccagactcagagctttacctgggacaaatgaaccttatgaaagtagcagtaacaaagaaatagatgcctcctatgtggacccacttggccctcaaatagaacgaccaaaaactgcagccaagaaaaggatcgatgaggatgattttgctgatgaagaattaggagatgatttgcttccagaataatattcactttaatatttattaaaggaaagaaattgccttatgagatcatcctcatgttaaaccttggattaaatatctaacctgtaattattttttttcactgtcaaaacttaagtaagtgtattctattctgtatgtatgcatttaagttgtttttttcttttaaggaataaaaacaggtaaaactaatactttaggccagtgacttccttagctttttgaaaacattgacacacaggaagaaataaatttcataac

SEQ ID NO: 2208 - DNA, 3270 bp, Homo sapiens
  source 1..3270: mol_type = genomic DNA
caatggcggcggccgcggcggagcagcaacagttctacctgctcctgggaaacctgctcagccccgacaatgtggtccggaaacaggcagaggctagacaaatggccgccgttctcctaagacgtctcttgtcctctgcatttgatgaagtctatccagcacttccctctgatgttcagactgccatcaagagtgagctactcatgattattcagatggaaacacaatctagcatgaggaaaaaagtttgtgatattgcggcagaactggccaggaatttaatagatgaggatggcaataaccagtggcccgaaggtttgaagttcctttttgattcagtcagctctcaaaatgtgggactgcgggaagctgcccttcacattttctggaactttcctggaatttttgggaaccagcaacaacactatttagatgtcatcaaacgaatgttagttcagtgtatgcaagatcaggaacacccgtcgatcaggacgttatctgctagagctacagctgcatttatacttgcaaatgagcataatgttgctctgttcaaacattttgcagacttgctaccgggattcctacaggcggtaaatgactcgtgctaccagaatgatgattctgtcctaaaatccctcgttgagattgcagatactgttccaaagtatttgcgtcctcacttggaagcaactctacagctaagtctaaagttgtgtggagacactagcctcaacaatatgcaacgccagcttgcccttgaagtgatcgtcaccctctctgagactgcagctgctatgttaagaaaacataccaatattgttgcacagactattcctcagatgttagcaatgatggttgatttggaagaagatgaggactgggcaaatgcagatgaactagaagatgatgattttgacagcaatgcagttgcaggcgagagtgctctagatcgaatggcttgcggacttggtggaaagctcgttctgccgatgatcaaggaacacattatgcaaatgcttcaaaatcctgactggaaataccggcatgcaggattgatggccttatctgccattggtgaagggtgccaccagcaaatggaaggaattctaaatgagatcgtaaattttgttttactttttctccaggatcctcatccaagagtaaggtatgcagcctgtaatgccgtgggacagatggctacagattttgcacctggtttccaaaagaaatttcatgagaaggtgattgcagctctgctgcagaccatggaagaccaaggcaatcaacgtgtgcaggcccatgcagctgctgccctcattaactttactgaagactgtcccaagtcactacttattccatacttggataatttggtgaaacatctgcattccattatggtactgaagcttcaagagctgattcagaaaggcaccaagttagttttggaacaagttgtgacatccattgcatcagttgccgatactgcagaagaaaaatttgtcccctactatgatttatttatgccatcactgaagcacatcgttgagaatgcggttcaaaaagaactgagacttctgagaggaaaaactattgaatgcattagcctcattggtctggctgttgggaaggaaaaattcatgcaggatgcatcagatgtgatgcagcttttgttaaagacccagacagacttcaatgatatggaagatgatgatcctcagatctcttacatgatctcagcatgggccagaatgtgcaaaatccttggaaaagaatttcagcaataccttccagtggttatggggcctttaatgaagacggcttcaattaagcccgaagtagcccttttagatacccaagacatggagaatatgagtgatgatgatggttgggaatttgtgaaccttggagatcagcaaagctttggtattaaaactgcaggactagaagaaaaatcaactgcttgccagatgttggtttgctatgctaaggagttaaaggaaggctttgtggagtacaccgaacaggttgtcaaactgatggtccctttactgaaattttatttccacgatggtgttcgagtggcagcagcggaatccatgcctcttctcctggagtgtgcaagagtccgtggtcctgagtatctcacacagatgtggcattttatgtgtgatgctctaattaaggccattggtacagaaccagattcagacgtcctctcagaaataatgcattcttttgcaaagtgcattgaagtaatgggagatggatgccttaataatgaacactttgaagaactgggaggtatattgaaagcaaagcttgaagaacattttaaaaatcaagaattacgacaagttaaaagacaagatgaagactatgatgaacaggtcgaagagtcactacaagatgaggatgataatgatgtttatattctgaccaaagtgtcagatattttacactcaatattcagtagctacaaagaaaaggtgttaccatggtttgaacagctgcttccattaattgtcaacctcatttgtccacatagaccatggccagacagacaatggggattatgcatctttgatgatgtcatagaacactgtagtccagcctcatttaaatacgcagaatatttcttaagaccaatgctccaatatgtatgtgacaacagcccagaagtcaggcaagcagctgcatatggcctgggagtcatggcacagtacggtggagataattatcgccctttttgtacagaagcacttcccctgctggtaagagttattcagtctgcggattctaagaccaaagaaaatgtcaatgctacagagaactgcatctcagcagtagggaaaatcatgaagttcaagcctgactgtgtaaacgttgaagaggtccttccacactggttgtcttggcttccactacatgaagataaagaagaagctgttcagactttcaattatctgtgtgacctgattgaaagtaatcatccaattgttcttggcccaaacaataccaatctgcccaaaatatttagtataattgcggaaggagaaatgcacgaggcaattaaacatgaagatccttgtgccaaacgtctggccaatgtcgttcgccaagtacagacttctggaggactgtggactgagtgcatagcacagctcagtcctgagcagcaggccgccattcaggagctcctgaactctgcgtgaagggccttaatgtcacccaccagaaaactaactccaaataaacgcttaccctttc

SEQ ID NO: 2209 - DNA, 2949 bp, Homo sapiens
  source 1..2949: mol_type = genomic DNA
ggccgggatagaagccgcagcccaggcggcggtccctcccgctgtcgccgcccgggtgtagcgcatcacccggagcccaccggccgcaggtgcctcctccggccccagggggccccgggagccctgaagggcgaagcggcagggacgcctctcttgggcgaagaggcggcctcaccgccccggatgcggccggagggcgcgggaatggagctcggaggcggcgaggagcgcctgcctgaggagagcaggagggagcactggcagttgctgggtaatttgaagacgacggtggagggtttggtatcaaccaacagccccaacgtctggtctaagtatggtggcttggagcggctttgcagggacatgcagagcatcctctatcacgggcttatccgtgaccaggcgtgccgccgccagacggattactggcagttcgtgaaagacatccggtggctcagtccccactcagcccttcacgtggagaagttcatcagcgtgcacgagaacgaccagagcagtgctgatggtgccagtgaacgtgctgttgccgagctgtggctgcagcacagcctgcagtaccactgcctctcagcccagctccggcccctgctcggggatagacagtatatcagaaaattctacacagatgctgccttcctgctaagtgacgctcatgtcacggccatgctgcagtgcctggaagcagtggaacagaacaacccccgcctcctggctcagatcgatgcgtccatgtttgccagaaagcacgagagcccgctcctggtgacaaagagccagagcctgacagccctgcccagttccacatacacccctccaaacagctatgctcagcattcctactttgggtccttctctagcctccaccaatccgtgcccaacaatggctcagagagaagatctacttcctttccactctctggccctccccggaaacctcaagaaagcagagggcacgtctcaccagcagaggatcaaaccatccaagcccccccagtttcagtctctgcactagccagggattcccctttgaccccaaatgaaatgagctccagtactctgaccagccccatagaggcatcctgggtcagcagccagaatgattccccaggtgatgccagtgaggggcctgagtacctggccattggcaacttggacccccgaggccggactgccagctgtcagagtcacagcagcaatgccgagagcagcagttccaatttgttctcctccagcagctcccagaagccagattctgctgcctcttccttaggggaccaggaaggaggtggggagagccagctgtccagtgtcctccgcaggtccagcttctcagaggggcagacactcactgtcaccagtggggcaaagaaaagccacattcgctcccattcggataccagcattgcctccaggggagctccagaatcctgcaatgataaggcgaagttgagaggccctttgccctactctggtcaaagcagtgaagtcagcacacccagctctctgtacatggaatatgaaggtggtcggtacctgtgctcaggggaaggcatgttccgaagaccatcagaaggacagtccctcatcagctacctctctgagcaagacttcggcagctgtgccgacctggaaaaggagaatgcccacttcagcatctcagagtccttaattgctgccatcgagctaatgaagtgcaacatgatgagccagtgcctagaggaggaggaagtggaagaggaagacagtgatagagagatccaggagctgaagcagaagatccgccttcggcgccagcaaatccgcaccaagaacctgctccccatgtaccaggaggctgagcacggaagctttcgggtcacctccagcagctcccagttcagctcacgtgattcggcacagctctctgactctggctctgctgatgaggttgatgaatttgaaatccaagatggtagcgaaggatctaacctgactcacatatcaaagaacggactgtcagtgtcactggcctcgatgttctcagatgctgacatcagaaggaacacagcctcaagcagcaaatccttcgtttcctcccagtccttctcccactgcttcctgcactccacgtctgctgaggcggtggccatggggctcctgaagcagtttgaggggatgcagcttccagccgcctcggagctggagtggcttgtcccggagcatgatgcccctcagaagctcctgcccattcctgactcactgcccatctcaccggatgacgggcagcacgctgacatctacaagctgcggattcgtgttcgtggcaacttggagtgggccccgccccggcctcagataatttttaatgttcatccagccccaacgaggaaaattgccgtggccaagcagaattaccgctgtgcaggatgtggcatccggactgaccctgattacatcaagcgactgcggtactgtgagtacctgggcaagtacttctgccagtgctgccacgagaatgcccagatggccatccccagccgggttctgcgcaagtgggacttcagcaagtactacgtcagcaacttctccaaggacctgctcattaagatctggaatgatcctctcttcaacgtgcaggacataaacagtgccctctataggaaggtcaagctgctcaatcaagtccggctgctgcgggtccagctgtgtcacatgaagaacatgttcaagacttgccgactggccaaggagcttctggattcctttgacacagtcccaggccacctgacagaggacctccacctgtactcactgaatgacctgactgcgaccaggaagggggagctggggccccggcttgctgagctcaccagggcaggggctacccatgtggagagatgcatggtgagaaagtctcactgtagcatgcagctgagcccttgcttttag

SEQ ID NO: 2210 - DNA, 2714 bp, Homo sapiens
  source 1..2714: mol_type = genomic DNA
acctgctgggagctggaggaggcgcggagcgaagccggccctgccagccacgcggagaagcagaggcaggtgagcgcgatgcagccggcgccgggtctggggctcggggactcctccctgcaccgctacctggacggcgacttctggagcctcaagaacgagctgcgcggactcctcggcggcgcccgctcttccggcaaaggtatgatttaagcttggatgaaatgagagctttgacagttcagagagtgaagtttgccatggacctgcctctgttaaaacgtgcaggtcaggatctggcagagaaaacaaagaattttgtcagccgaagccttgtcataggagaagtcctctccatggcggacatggccacaggagtgaagtgcggaataatttattggctatttggtggtgctatcaggaatctcggaagccctgaacatgttactaagtggtttcagccactccaggagcagaaatacactgggatgtttgcaatgaccgagaggggccatgggagcaacgcgagagggatccagaccgaagccacctttgacctctctgcccaggagtttgtaattgacacgccgtgtgaaaatgcggagaagatgtatattggaaatgccatgtacgggaattatgcagctgtctttgcccagctcatcatagatggaagatctcaagggccccactgtttcatcgttcctgtccgggatgaaaacggaagcttgtacccaggagtcacagctattgatatgatgtacaaggagggtctgcatggtgtggacaatgggatattaatatttgacaaggttcggatacccagggagaacctgctggataagtttggttccgtggctccagatggacagtaccattcgcctattaggaacaagagtgcaagattcaatgccatgctggcagcactgaccccttcgagattagctgtggctttccaagctatgggtgccatgaagcttgggttgacgatagccattcgctatagccacagccggaggcagtttgggcccaaaaccaaggaagaggtgaagatcattgagcaccaaacacagaccctgcggctgatgccccacctggccacagccttggccctgaccttcgtcagcaggtatgctggggccctcctggatgaggatgtcttccagggaaaggagctggtcaacagtcgctcgctgcaggctctggtggcggggctgaaggcctacagcacctgggagaacatccgctgcctgcaggactgccgcgagtgcactggaggcatgggttacatgatggaaaatcgaatctcaggcttaaagtgtgacacagatgtgtttgccacttttgaaggtgacgatgttgttatgcttcaggttgtggggcgggaactgctggcccaatacaccaaacagtatgaagaaaaaccactctttggcctgctccaaaactgggctgaatctgtgggggacaagctgagaaccagtttcctggcatttaacatggacacagttgatgatctcgcctttctgttgaaagcagtgaaatttcgtgaaagggttcttcagcggggtttggtggccagaatttattataaggtaaagaccaagaaggaggattttttccatgcctggaactcgtgtctgcaccacgtggcttctctgtccctggcacacactcaccgagttaccttagagcagttctccctagcagtgaagagctgtcctgaccaagaggaccagactttgttaatgaagttttgtctgttgtatggaaccaagctggtgtttcaggagcgggcctggtatttagaacataaatacttgactcccatggccagcacgaggatcaggaatcaggagagatgctgaaacacaaacaggtataagactcagtctccacatgaagggagctcatatccaaggacacaaaaccactttaaaaacataaatactggccaggtgcagtggctcatgcctgtaatcccagcactatgggaggctgaggcgggcagatctcctgagctcaggagttcgacaccatcttgggcaacatggtgaaaccctgtctactaaaatacaaaaaaattagctgggcgtggtggcatgtggctgtagtcccagctactcgggaggctgaggcacgagaatcgcttgagccctggagttggaggttgcagtgagcagagattgcgccactgtactccagtttggactacagagtgagactccatctcaaaacaaaacaaaacaacaacagcaaaaaacaacaaaacaaaacacaaatactctcacagggcatggaggttttcgaatgaacttggccataagaataaattcagagttgacagaacagacgtcttaggaataaatgccattcttatgctagaccttgaagagtagaaaattaagagatggtggcccaattgagaggggaaaatgcagttgaaacttcagacagggttgataaagtgaggacgatcatagacatggagtacttagacatattaataaacaataaagactttacctgtctaatggaaaacctggagaagtcgtcaggaaccagactacagtggaccctggagaaccttgaagaacatttttccttttcaggaaaacggaggttacagagaaaagtatatgtaatgatgctacagtaatgtatttctgtataacaaatgactccaaacttacgacttaaaacaaccaccactt

SEQ ID NO: 2211 - DNA, 7474 bp, Homo sapiens
  source 1..7474: mol_type = genomic DNA
tgctcgctgcggagccgttttgtgccgcggcgcgggggaacggggacgcggggcggggggcgcggagccggcgggcgcagcctcagcatggacgtgacagtctcggagctcctggagctcttcctgcagagcccgctggtgacctgggtgaaaacttttggcccgtttggaagcggcagccaggacaacctgactatgtacatggatttagtggacggcatctttttgaaccaaattatgctgcaaatagatcccaggcccacaaatcaacgcatcaataagcacgtcaacaatgatgtgaaccttcgcattcagaatttgaccatcttggtgagaaacattaagacctactaccaggaagttctccagcagctgattgtaatgaatttgcccaatgttttgatgattggcagagacccactgtctgggaagagcatggaggaaatcaagaaggtgctgctgctggtgctgggctgtgctgtccagtgtgagaggaaagaggagttcattgaaagaatcaaacagctggacattgagacccaggctggcatcgtggcccatatccaggaggtgactcacaaccaagagaacgtgtttgacctgcagtggctggagctgcccgacgtggctccggaggagctggaggccctgtcgaggagcatggtgctccacctgcggaggctcatcgaccagcgggacgagtgcaccgagctgatcgtggacctcactcaggaacgggactacctgcaggcacagcatccacccagccccatcaagtcctccagcgccgactccactcccagccccaccagcagcctctctagcgaagacaagcagcacctggccgtagagctggccgacaccaaggccaggctgcggcgcgtcaggcaggagctggaggataagacagagcagcttgtggacaccagacatgaggtggaccagctggtgctggaactgcagaaagttaagcaggagaacatccagctagcggcagacgcccggtctgctcgtgcctatcgagacgagctggattccctgcgggagaaggcgaaccgcgtggagaggctggagctggagctgacccgctgcaaggagaagctgcacgacgtggacttctacaaggcccgcatggaggagctgagagaagataatatcattttaattgaaaccaaggccatgctggaggaacagctgactgctgctcgggcccggggcgataaagtccatgagctggaaaaggagaacctgcagctgaaatccaagcttcacgacctggaattggaccgggacacagataagaaacgaattgaggagctgctggaagaaaacatggtccttgagattgcacagaagcagagcatgaacgaatctgcccaccttggctgggagctggagcagctgtccaagaacgcagacttgtcagacgcctccaggaagtcgtttgtgtttgagctgaacgaatgtgcgtccagccgcatcctgaagctggagaaggagaatcagagcctccagagcaccatccaggggctgcgggacgcgtccctggtgttggaggagagcggcctcaagtgcggggagctggagaaggagaaccaccagctcagcaagaagattgaaaagttacaaacccagctggagagagaaaagcagagcaaccaagatctggagaccctcagtgaggagctgatcagagagaaggagcagctgcagagtgacatggagaccctgaaggctgacaaagccaggcagatcaaggaccttgagcaggaaaaggaccacctcaaccgagccatgtggtcgctgcgggagaggtcgcaggtcagcagtgaggcccgcatgaaagacgtggagaaggagaacaaagccctccaccagacggtgacggaggccaatggcaagctcagccagttggagtttgagaagcggcagctgcacagggacttggagcaggccaaggagaagggggagcgggcagagaagctggagagggagctacagcgactccaggaggagaacgggaggctggccaggaaggtgacctccctggagacagccaccgagaaagtcgaggccctggagcatgagagccagggcctgcagctggagaaccggactctgaggaagtctctggacaccttgcagaacgtgtccctgcagcttgagggcctggagcgtgacaacaagcagctggacgcagagaacctggagctgcgcaggctggtggagaccatgcgcttcaccagcaccaagctggcacagatggagagggagaaccagcagctggagcgtgagaaggaggagctgaggaagaacgtggatctgctcaaggcgctgggcaagaagtcagagcgcctggagctcagctaccagagcgtgagcgctgagaacctccggctgcagcagagcctggagagcagcagccacaagacgcagaccttggagagtgagctgggcgagctggaggctgagcgccaggcgctgcggcgggacctggaggccctccggctggccaatgcacagttggagggggccgagaaggacaggaaggccctggagcaggaggtggcccagctcgagaaggataagaagctgctggagaaggaggccaagcggctgtggcagcaggtggagctcaaggatgcagtcttggacgatagcactgccaaactgtccgccgttgagaaggagagccgcgcgctggacaaggagctggcccgctgcagggacgcagccggcaagctgaaggagctggagaaggacaaccgggacctcaccaagcaagtcaccgtgcatgcaaggacactgacaactctgagggaggacctggtgctcgagaagctgaagagccagcagctcagcagtgagctggacaagctgagccaggaactggagaaggtcggcctcaacagggagctgctgttgcaggaggacgacagcggcagtgacacaaaatacaagattttggagggcagaaatgaatcagcattaaaaacaacactagccatgaaagaagaaaagattgtgctcttagaagcacagatggaagagaaagcgagcctaaatcgccagttagagagtgagctgcagatgctaaagaaggagtgtgagaccctcaggcagaaccagggagaggggcagcacttgcagaactctttcaagcaccctgcggggaagacagccgccagtcaccaggggaaggaggcctgggggcccggccataaggaagccaccatggagcttctccgagtgaaggaccgggccatcgagctggagcggaataatgcagctctgcaggctgagaagcagctgctaaaggaacagctgcagcacctggagacccagaacgtgaccttcagcagccagatcttgacactgcagaaacagagcgccttcctgcaggagcacaacaccacactgcagacccagaccgccaagctgcaggtggagaactccacgctgagttcccagagcgcagcgctcaccgcgcagtacacgctgctgcagaaccaccacacggccaaggagacggagaacgaaagcctgcagaggcagcaggagcaacttacagcggcctacgaggccctgctgcaggaccacgagcacctgggcacgctgcacgagcggcaatcggccgagtacgaggccctcatccgccagcacagctgcctaaagacactgcatcggaatctggagctggagcacaaggagctcggggagaggcacggtgacatgctgaagcgcaaggcggagctggaggagcgggagaaggtcttgaccactgagcgagaggcgctgcagcaggagcagaggacaaacgccctcgccatgggcgagaaccagaggctgcggggcgagctggacagggtcaatttcctgcaccaccagctgaagggggagtacgaggagctgcacgcccacaccaaggagctgaaaacctcactgaacaacgcgcagctggagctcaaccgctggcaggcccgcttcgacgagctgaaggagcagcaccagaccatggacatctcgctgaccaagctggacaaccactgtgagctgctctcccgtctcaaggggaacttggaggaagaaaatcatcacctcctgagccagatccagctgttgagccagcagaaccagatgcttctggagcagaacatggagaacaaggagcagtaccatgaggagcagaagcagtacatagacaaattaaatgccttacgaagacataaggaaaagctggaagaaaaaatcatggatcaatacaagttctatgatcctcctccaaagaagaagaaccactggattggagccaaagccttagtcaaactcatcaaaccaaagaaagagggttcgagggaacgcttaaaatccaccgtggacagccctccctggcagctggagtcctcagaccccgcctcgccggcggcctctcagccgctcagatcacaggccgagaaccccgacacccccgcactgggctccaactgtgcagaagagcgcgacgcccacaacgggtctgtggggaaaggccctggggatctaaaaccaaagcgaggctccccacacagaggcagccttgaccgcacagatgcctccaccgatctggccatgaggtcctggccctcggagctgggctcccggacttgctcaacttcagccaccactacagccccttccaactccacccccatcgcccggcacccaggccgcaccaaaggctataactcagatgacaacctctgtgagccatccctggagtttgaggtccccaaccacaggcagtacgtgtcgcggccaagtagcttagagagcagtagaaacacatccagcaacagctcacctcttaacctaaaaggctcctccgagcagctccatggccggtctgagagcttcagcagcgaagacctgatccccagcagggacctggccactttgccccgggaagccagcacaccgggacgcaacgccctcggccgccacgagtaccccttgcctcggaacgggcctctcccacaggagggtgcccagaagaggggcacagcccctccctacgtcggagtgcggccctgctcggcctcccccagcagtgagatggtcaccttggaggagttcctggaggagagcaaccgcagctcccccacccatgacactcccagttgccgggatgacctgctgagtgactacttccgaaaggccagcgatcccccagccatcggaggccaaccaggaccacctgccaagaaagaaggggccaagatgcccaccaactttgtggcccccaccgtcaaaatggccgcccccacctcggaggggaggccgctgaagcccgggcagtacgtaaagccaaacttcagactgactgaggccgaggccccacccagcgtggccccgagacaggcccagcctccccagagcctgtctctgggcagaccccggcaggctccggtgcccccagcttcccatgcacctgccagccgcagtgcctccttgagccgggccttcagcctggcctcagctgaccttctccgggccagcgggccagaggcctgcaaacaggagtcccctcagaagctgggggctcctgaggccttagggggcagagagacaggcagccacaccctgcaaagccccgcaccccccagctcccatagcctggcccgggagcggaccccacttgtgggaaaggctggcagctcctgtcagggcccaggtccccgcagccggccgctggacacgaggcgcttctccctggctcccccaaaggaggagaggctggcccccctgcatcagtctgccacagcccccgccattgccactgcaggtgctggtgctgctgctgctggcagtggcagcaactcccagctcctgcacttctcacctgctgcagccccggctgccaggaccaagcccaaggcgcccccacgctcaggggaggtggccaccatcacccctgtccgggcagggctcagcctctcagagggagacggggtcccggggcagggctgcagtgaggggcttccggccaagagcccaggtcggtctcccgatttggctccccacctcggccgggccctggaggactgcagtcgagggagcgtctcaaagagcagtccggcctccccggagcccggcggggatccgcagaccgtgtggtatgagtacggctgtgtgtgactgtctcgtggttgagctcgcaaacctgaaaactactgacgcgccttccgactctcacggccttttctcttgcttgcctgcggtgccaggagagggtttggaatgaggaaaggggttcccacgcatttctgctgtttgttctgtgaatggaaacactgtgccaagccccaagaggattacgcttccaggtgtgtaacgtgttttctgtgtctgccgcttccagcagctgatatctttggaacaaataatccacgtcagcatggggaccaattaggatgcaatgacaaactgacttcccccaaagcagacactactccagtatgtcccagtagaacactcatttgcaatgtgttgagctccgttaagcacacacacactcacacaacaggcttacgaggctcaggcctggcgggtcagaaagcccactccctctcccaaggccactggatcccaggagaagcccagactggcgatactacaaaggtctccagggcctggcagaccccagagtcaggcctgctgttaaaaagtgagagtgctgctgttccattcctggggtcccaagcacttccctttaccccaggacccagggcagcctgcagggcagctggcggtggccttggccatttgcccccagcctccagctggctcctgagctctgcaccagggggtttggggaccacacaggcacctgccttcctagatttccctggctcacttttctgcaaacactggatctgccaggcctggggattggggggcaggaaagaggcccccatccagccccctccaggccagtgtgcacagtgcaccgaggggtcatccgcacagagcgaggtgcaagctcgatgtgtaacctggctgcggcacccgacatccccggtctcggggtgttgatttatttctgaataactttttgggtatagaaaccaattttttttaatatatgacatgtatatgtacacactcatgtgaaatatgtatactttggggggatctatttatgttccagtgggagtcactctcttctgtcgggaatcttatctgctgctttgtgtctttggtcagattcctgacaatttagtttcctgttgtaaaggtgcttttcctggggtgaactaaacctattgattttttttttttaagatttttttttccttttgatttaatatactgagaaagaaatgggagacttttgaatgttaacaagatccattttaggagtgtttggggttgtgtattaaatagccattcattctggaactcaaggacaggactgtaataaaatggaatggaaccg

SEQ ID NO: 2212 - DNA, 8215 bp, Homo sapiens
  source 1..8215: mol_type = genomic DNA
ccgagccgggagccgagcgcgctgggcgcggccgtcccgctgccgccgccaagcccggagtgcgccagcggccatggttcccgcggcggcgccgggcgcctgagccccgggacgcaagcgctggaggcgggctgccggctgtgcgggcgctccggagagaccgacagaaggtgagcactgtgggctatgggatggatgaggtggagcaggaccagcatgaggcccgactcaaggagctgtttgacagttttgacacgacgggcacagggtccctggggcaggaggaactcaccgacctttgccacatgttgagcttggaggaggtggccccagtgctgcagcagacattacttcaggacaacctcttgggcagggtacattttgaccaatttaaagaagcattaatactcatcttgtccagaactctgtcaaatgaagaacactttcaagaaccagactgctcactagaagctcagcccaaatatgttagaggtgggaagcgttacggacgaaggtccttgcccgagttccaagagtccgtggaggagtttcctgaagtgacggtgattgagccactggatgaagaagcgcggccttcacacatcccagccggtgactgcagtgagcactggaagacgcaacgcagtgaggagtatgaagcggaaggccagttaaggttttggaacccagatgacttgaatgcttcacagagtggatcttcccctccccaagactggatagaagagaaactgcaagaagtttgtgaagatttggggatcacccgtgatggtcacctgaaccggaagaagctggtctccatctgtgagcagtatggtttacagaatgtggatggagagatgctcgaggaagtattccataatcttgatcctgacggtacaatgagtgtagaagattttttctatggtttgtttaaaaatggaaaatctcttacaccatcagcatctactccatatagacaactaaaaaggcacctttccatgcagtctttcgatgagagtggacgacgtaccacaacctcatcagcaatgacaagtaccattggctttcgggtcttctcctgcctggatgatgggatgggccatgcatctgtggagagaatactggacacctggcaggaagagggcattgagaacagccaggagatcctgaaggccttggatttcagcctcgatggaaacatcaatttgacagaattaacactggcccttgaaaatgaacttttggttaccaagaacagcattcaccaggcggctctggccagctttaaggctgaaatccggcatttgttggaacgagttgatcaggtggtcagagaaaaagagaagctacggtcagatctggacaaggccgagaagctcaagtctttaatggcctcggaggtggatgatcaccatgcggccatagagcggcggaatgagtacaacctcaggaaactggatgaagagtacaaggagcgaatagcagccttaaaaaatgaactccgaaaagagagagagcagatcctgcagcaggcaggcaagcagcgtttagaacttgaacaggaaattgaaaaggcaaaaacagaagagaactatatccgggaccgccttgccctctctttaaaggaaaacagtcgtctggaaaatgagcttctagaaaatgcagagaagttggcagaatatgagaatctgacaaacaaacttcagagaaatttggaaaatgtgttagcagaaaagtttggtgacctcgatcctagcagtgctgagttcttcctgcaagaagagagactgacacagatgagaaatgaatatgagcggcagtgcagggtactacaagaccaagtagatgaactccagtctgagctggaagaatatcgtgcacaaggcagagtgctcaggcttccgttgaagaactcaccgtcagaagaagttgaggctaacagcggtggcattgagcccgaacacgggctcggttctgaagaatgcaatccattgaatatgagcattgaggcagagctggtcattgaacagatgaaagaacaacatcacagggacatatgttgcctcagactggagctcgaagataaagtgcgccattatgaaaagcagctggacgaaaccgtggtcagctgcaagaaggcacaggagaacatgaagcaaaggcatgagaacgaaacgcacaccttagaaaaacaaataagtgaccttaaaaatgaaattgctgaacttcaggggcaagcagcagtgctcaaggaggcacatcatgaggccacttgcaggcatgaggaggagaaaaaacaactgcaagtgaagcttgaggaggaaaagactcacctgcaggagaagctgaggctgcaacatgagatggagctcaaggctagactgacacaggctcaagcaagctttgagcgggagagggaaggccttcagagtagcgcctggacagaagagaaggtgagaggcttgactcaggaactagagcagtttcaccaggagcagctgacaagcctggtggagaaacacactcttgagaaagaggagttaagaaaagagctcttggaaaagcaccaaagggagcttcaggagggaagatatgaatctgaaaagcttcaacaggaaaattctattttgagaaatgaaattactactttaaatgaagaagatagcatttctaacctgaaattagggacattaaatggatctcaggaagaaatgtggcaaaaaacggaaactgtaaaacaagaaaatgctgcagttcagaagatggttgaaaatttaaagaaacagatttcagaattaaaaatcaaaaaccaacaattggatttggaaaatacagaacttagccaaaagaactctcaaaaccaggaaaaactgcaagaacttaatcaacgtctaacagaaatgctatgccagaaggaaaaagagccaggaaacagtgcattggaggaacgggaacaagagaagtttaatctgaaagaagaactggaacgttgtaaagtgcagtcctccactttagtgtcttctctggaggcggagctctctgaagttaaaatacagacccatattgtgcaacaggaaaaccaccttctcaaagatgaactggagaaaatgaaacagctgcacagatgtcccgatctctctgacttccagcaaaaaatctctagtgttctaagctacaacgaaaaactgctgaaagaaaaggaagctctgagtgaggaattaaatagctgtgtcgataagttggcaaaatcaagtcttttagagcatagaattgcgacgatgaagcaggaacagaaatcctgggaacatcagagtgcgagcttaaagtcacagctggtggcttctcaggaaaaggttcagaatttagaagacaccgtgcagaatgtaaacctgcaaatgtcccggatgaaatctgacctacgagtgactcagcaggaaaaggaggctttaaaacaagaagtgatgtctttacataagcaacttcagaatgctggtggcaagagctgggccccagagatagctactcatccatcagggctccataaccagcagaaaaggctgtcctgggacaagttggatcatctgatgaatgaggaacagcagctgctttggcaagagaatgagaggctccagaccatggtacagaacaccaaagccgaactcacgcactcccgggagaaggtccgtcagttggaatccaatcttcttcccaagcaccaaaaacatctaaacccatcaggtaccatgaatcccacagagcaagaaaaattgagcttaaagagagagtgtgatcagtttcagaaagaacaatctcctgctaacaggaaggtcagtcagatgaattcccttgaacaagaattagaaacaattcatttggaaaatgaaggcctgaaaaagaaacaagtaaaactggatgagcagctcatggagaactcagtggttggaagtagcagagaagggtgcagttctctgcctgagatagtgtgtgaagatgcagcacctgaggtccactgcgacgcctagcccgtcccctcatgcttgggatttgcagctgctccagcagcaagcctgtccgatggtgcccagggagcagtttctgcagcttcaacgccagctgctgcaggcagaaaggataaaccagcacctgcaggaggaacttgaaaacaggacctccgaaaccaacacaccacagggaaaccaggaacaactggtaactgtcatggaggaacgaatgatagaagttgaacagaaactgaaactagtgaaaaggcttcttcaagagaaagtgaatcagctcaaagaacaactctgcaagaacactaaggcagacgcaatggtgaaggacttgtatgttgaaaatgcccagttgttgaaagctctggaagtgactgaacagcgacagaaaacagcagagaagaaaaattacctcctggaggagaagattgccagcctcagtaatatagttaggaatctgacaccagcgccattgacttctacacctcctttgaggtcatagccaaaccaaagggtacactcatatttgtgcactttactgaaatagatgaacatttcagtaggttctcaacttaaaattaagcctaacctaaaactgccagcaacacaactggagtttccatttatcataattagtttttctaaatagacccttatgggagtttgaaaataaatactcacatatttcactacttaaattattcccaagatttgaatttattttaaaattttaatagccaccaagaatgtggacatatgaaaattcaagaacctaaaaaataccagttttgaatgagtttttgtggttttggttttttttttaattattacaaatctatgtgtaaaatctagatatttgaagtttgagatctgatgagaatggttgttataaactttattttaaaaccaaatttaggtgttcttacatatttaaatactggaaagtcattataatagttttggttctttgaattggtagacaattagtagagtataattggttaggaggcagggcttattaagtggttattaaccgctgacatcagacaaacccaaatctgtagaattctaaccttctaacacctgtgacagtattaccactcttcttgtattatagatttagaactgatttactcaattgcactcttaactaatgttaaaagcttacttgctttaaacagccttttcttctttctcttaaaagtttcatttggggagctggtcttctaagaaacggataaagccacataattaaagcagttgaactatagggaaagcactgaacaaaccactttggagtaaatagctactcttagaaaagagggataagcagaccatgtaggttttctgtctctcaaatcttagagttcataaatttacttgaggttgcctcaagaactcagggaacaatactgtaaactgtcttcctgaactactgtagggcctctctaagaatttgaaatgtataaaccatgtgacctcatttatttgtcttatatatttacagccatactagaatttttatttctacgtttttagtaaatttaatattctgggggaaaaaaggccttgattttagggttaaaaacctgacttatagaagagtttatttaatataggtcaaaattttctgtgtttcttattccttctatacctcaaatctgattctaagaatttcttactgtgataatcattggcatgccacctgaggtcaaggagtgccaaataggactttccactcatgctcaagatcaaaactttatagaacagtcaacattttagattcggtaaccttttttttcttccaattataatctctgctagccacttccgccagcagttggtggaagacttactaggtgcagggcactttccaagttcatcacaacaacctgcttgttttcatgagacaataatccgaaaagttcgctttgatatattcctggagggccaagcccatctatttacaaaaggtgaacagcaaaatcaagcactgctttatgggcaggaacacaagagaaagcaaactgcccaagaagtcatcatgtcagaaactcaatctcaacaaaataatttccatcagggaacttcagggtttcttgggggcttatgagtctcaccggtcaacccaggaggcctcactacaagagccttgacaaggcactgttttttgtgggactgggagttcacactgatgaagcaaacctttgaatttttgcacagctcttgtcagaaagccctgagttccccctggataaagagttaattttaatccttccctataattatacttcaaaatatttgacatctgctattatgccttctttagatctttcttctgtggtgcagacatttctagtaagtgtttgactacttgtatggcattagctttcacagaaaattgtttcacttaaaactgtggattggcctaggctaaggacaaaaataaactaagtacctgtagtgtatttatgtgatatgtgtcaagttactcaaagttattgctgttggaactgaacaataatatttcccagatagctggccttagcatgtgatcacggttgttgtatttttaatttttgtcttttacagtatgagaggtgtaggttaatttgtttatttcctataaatttgtatttatgtgtatataaaatgtacaatgaatgtaaatatgactttctggaaagtttagactacatttagaatctctattcaaaatcaaaatgctgctcaaatgaatttaaccaacatctaggtgcttaatttctcattttatcccacttatgagattgggaaaaagatcaatatgagaaataccatacagataccttaaatgtatgcatttgtgcaacaatttttgagaaggtgagtggcaatttataatttagttggcaatttataatagaacttatagcttttaaaagaccttttaaagacattaaatgtaaacttaaaaatgtttagatcttgtttcaaactttacaatagcattcttcaaaatattaagttatatattttataggcatttagttgcttattaaaagcactgattttcaaactttttgatttaagaacaattatttaagatcgtctcagaagatgggatcttcgtttcaagaaaagggaatcaagtttgcctttgagataatacgttacactaagaaaaggaaaatgtggatagtaaaacccacctctctcatcctattgtactctcttctgctttttagaagcctgcacttaagcttagatttgtgaagggagagtagaaggggagaagtagaaccacagtgttttatttatttttctaaaactcttactaaatccagattttttaaactgttttaaatgtgaattcttcccagaaatttcaatgcattgcatatttagccttcggcatatttttcatgaatagatcatgaagtcataggcttccaaggcataggaagagatcttgcaggtctagtattttaataatgcactattacccagggcagatattatgagaaactgtttcttctctaagggtttatggcagactttgcttttttaacatgtgagaaatgaattttttattttgtgatttatgtgatttcttttgctgagtgaaggaaaggagaaattgttgctattgtcagcatcttaaaggtatttccagtcaaggcaaggctaagtgctttgtgatagtattaagcaagtcatgttttgaatggattacctgtagtgactcattggaatgatataattatacaagtaatgccaaaaaccaagtcaaagcctaattaaccaaagcactcatttaaaaatcatcatgtttggacctatctggacctctcagcactgtaaaatagttttggttttgtggcatatgaatagctgtttaacaaatcaaagttagctttttgcttctcagcttttttgggcaatacaagttaagttcttaatggggagacattatcatggcatgacttaagggaacattggtttgtgaaggaaaaacagattatctaaagccatctctatgtttctgttcagataaagattaatgagttctgtgtttatatcagctttgtatatttcatcttagccattctatcctagaaagattttaatgtgagcttaagatgtaaataaataattttgcaaacatgccttttgttttctatataccctgaccttttaataaagtttcagtgtatttatca

SEQ ID NO: 2213 - DNA, 3643 bp, Homo sapiens
  source 1..3643: mol_type = genomic DNA
gcgttgttggtttcgggttgtcaggcagcgcgcgaggcggcgggcagctagcagctggcggacgcgacccggaggcggtgggggtgcggctgagccatgcccggtggcgcggcctgagcccctccacctgctgcaatcatgaaggacagcggggactccaaggaccagcaactcatggtggcgcttcgggtccggcccatcagcgtggcagagctggaggaaggagctaccctcatcgcccataaagtggatgagcagatggtggttctcatggacccaatggaggatcccgacgacatcctgcgggcgcatcgctcccgggagaagtcctacctgttcgacgtggcctttgacttcaccgccacccaggagatggtgtatcaggccaccaccaagagcctcatcgagggcgtcatctcaggctacaatgccactgtctttgcctatggccccacaggctgtgggaaaacctacaccatgctgggcacagaccaggagcctggcatctatgttcagaccctcaacgacctcttccgtgccatcgaggagaccagcaatgacatggagtatgaggtctccatgtcctacctggagatctacaatgagatgatccgggacctgctgaacccctccctgggctacctggagctgcgggaggactctaagggggtgatccaggtggccggcatcaccgaagtctccaccatcaatgccaaggagatcatgcagctgctgatgaaggggaaccggcagaggacccaggagcccacggccgccaaccagacgtcctcccgctcccacgcggtactgcaggtgaccgtgcgccagcgcagccgggtcaagaacatcttgcaggaggtgcggcagggccgcctgttcatgatcgacctggctggctcagagcgcgcctcgcagacacagaatcgtgggcagcgtatgaaggagggggcccacatcaaccgctcactgctggcactgggcaactgcatcaacgccctgagcgacaagggtagcaacaagtacatcaactatcgcgacagcaagctcacccggctcctgaaggactctctgggaggaaacagccgcacagtgatgatcgctcacatcagtcctgcgagcagtgccttcgaggagtcccggaacaccctgacctacgccggccgggccaagaacattaagactagggtgaagcagaacctcctgaacgtctcctaccacatcgcccagtacaccagcatcatcgctgacctgcggggcgagatccagcgactcaagcgcaagattgatgagcagactgggcggggccaggcccggggccggcaggatcggggtgacatccgccacatccaagctgaggtccagctgcacagcgggcagggtgagaaggctggcatgggacagcttcgggagcagctcgccagcgccttccaggagcagatggatgtgcggaggcgcctgctggagctggagaaccgcgccatggaggtccagattgacacctcccgacacctgctcaccatcgccggctggaagcatgagaagtcccgccgggccctcaaatggcgggaggagcagcgaaaggagtgctacgctaaggacgacagcgagaaggactcagacacaggtgatgaccaaccagacatcctggagccacccgaggtggccgcagcccgggagagcattgcagccctggtggacgagcagaagcaactgcgcaagcagaagctggcgctggagcagcgctgccgggagctgcgcgcgcggggccggcgcctggaggagacgctgccgcggcgcatcggctccgaggagcagcgcgaggtgctcagcctgctgtgccgcgtgcacgagctcgaggtggagaacaccgagatgcagtcgcacgcgctgctccgcgacggtgcgctccgccaccgccacgaggccgtgcgccgcctggagcagcaccgcagtctctgcgacgagattatccagggccagcggcagatcatcgacgactacaacctggccgtcccgcagcgcctggaagagctctacgaagtgtacctgcgggagctggaggagggcagcctggagcaggccaccatcatggaccaagtggcctccagggccctgcaggacagctccttgcccaaaattaccccagcaggaacctcactgaccccagattctgacctggagagtgtgaagacattgagctctgatgcccagcacctgcagaacagcgccctccctcccctcagcacagagagtgaaggccaccacgtgttcaaggctggtactggggcctggcaggcaaaaagctcctctgtgcccaccccacctcccatccagctcggcagcctggtgacgcaggaggccccggctcaggacagcctgggcagctggatcaactcttcccctgacagcagtgagaacctgtcggagatccccttgtcccacaaagagaggaaggagatcctgactggcaccaagtgcatctgggtgaaggccgcccggcggcgctcgcgggccctgggaaccgaggggcgacacctgctggcacccgcgacagagcgcagcagcctgtccctgcactcactgagcgagggcgacgatgcgcggccaccaggcccactggcctgcaagcggccgcccagccccacactacagcatgctgccagtgaggacaacctgtccagcagcacgggcgaggccccgtcccgggcagtcggacatcatggggacggccccaggccctggctgcgtggccagaagaaaagcctgggcaagaaaagggaggagtcgctggaggcaaagagaaggaagcggaggtcccgatccttcgaggtcaccgggcaagggctctcccaccccaagacacacctcctggggccccatcaggcggagcgcatctcggaccacaggatgccagtgtgcaggcacccagcccctggtatccggcatctgggaaaggtcacgctacctttggccaaagtcaaactccctccaagccagaacacgggcccgggggactcctcacccctggctgttccccccaacccaggtggtggttctcgacgggctacccgtgggccccgcctgccccacggcacaagcacccatggcaaagatggatgctcccggcataactgaggggccctgcctggaactggctctctcacctcccaagactgaatggggtctagcagggcatgggaggtggaggctgggcagatggagatgaccaggaagtaagctcaggatctcagcaggccagggctcctgagacccaggaactggggtctctgcccaaccctcccatgctttcagtgccactggggaaaagaggtgaggccaggggacatggccaggacggctgggctccctggcttcccagccctggacagaatgctgttgccaaaacctgcacagccctgaggccagcctcggccttggtaacggaggaaagcagctgacagtgagacggggctcctggcccacgtgtggggcacgggcatcctggatggttggggaggcgccgacaggcacttcacgtattacaattggggatgtgggtgagggagggaatctggttttgttacttggcagtggttttttctcacccttcctttttaacaataaaatcccatttgggtcttga

SEQ ID NO: 2214 - DNA, 1777 bp, Homo sapiens
  source 1..1777: mol_type = genomic DNA
ctactccgccgagcctacgtgacacgacgtcaagtggcaatggcggcggacgagggctgtgcccccggcccgccccgttaggagccgcgagtaaggcgagtgtccaacgccgagctggctgacagagcccggccgcggcctccgcgggcccaggggcctccaggccccgtgaccaccggaccgagcaccctggaacggccccagcttggcctcgggacagtccgcgcgctcaccgactccctggtgaacgccgcttggccgccgccgccgccgcaggacccacgagaagcggaaaccggcgcaaggacccggtccccccggcgccgaatgtagtaagaaaacaaaaactgatgaccaagagaatgtgtcagccgatgcaccgagtccagcccaggaaaatggagagaagggagaattccacaagttggctgatgccaagatatttttgagcgactgcctggcatgtgacagctgtatgactgcagaggaaggagtccaactttcccagcaaaatgccaaggacttcttccgcgttctgaaccttaacaagaaatgtgatacctcaaagcacaaagtgctggtagtgtctgtgtgtcctcaatctttgccttattttgctgctaaattcaacctcagtgtaactgatgcatccagaagactctgtggtttcctcaaaagtcttggggtgcactatgtatttgatacgacgatagctgcggattttagtatcctggagagtcaaaaagaattcgtgcgtcgctatcgccagcacagtgaggaggaacgcaccctgcccatgctgacctctgcctgtcctggctgggtccgatacgccgagcgggtgctgggtcgccccatcactgcccacctctgcaccgccaagtccccccagcaggtcatgggctctttggtgaaggattatttcgccagacagcagaacctgtctccagagaagattttccacgtcattgtggccccttgttatgacaagaagctggaggctcttcaggaaagccttccccctgctttgcatggctcccggggcgctgactgcgtgttaacatcaggtgaaattgctcaaataatggagcaaggtgacctctcagtgagagatgctgccgtcgacactctgtttggagacttgaaggaggacaaagtgacgcgtcatgatggagccagctcagacgggcacctggcacacatcttcagacatgcggccaaggagctgttcaacgaggatgtggaggaggtcacttaccgagccctgagaaacaaagacttccaagaggtcacccttgagaagaacggagaggtggtgttacgctttgctgcagcctatggctttcgaaacatccagaacatgatcctgaagcttaagaagggcaagttcccattccactttgtggaggtcctcgcctgtgctggaggatgcttaaatggcagaggccaagcccagactccagacggacatgcggataaggccctgctgcggcagatggaaggcatttacgctgacatccctgtgcggcgtccggagtccagtgcacacgtgcaggagctgtaccaggagtggctggaggggatcaactcccccaaggcccgagaggtgctgcataccacgtaccagagccaggagcgtggcacacacagcctggacatcaagtggtgaagtcaggccagggccttccagctgctcttggggccagagccaagagcctctcagtagagggaggggctgccctgagtggagtattaaagacacttaagaaaaccgctc

SEQ ID NO: 2215 - DNA, 3888 bp, Homo sapiens
  source 1..3888: mol_type = genomic DNA
atgaaggttgcaggaggacttgaacttggagctgctgctctgctctcagcatcaccacgtgctcttgtcactctttccacaggtcctacttgctctatattaccaaagaatccacttttcccccaaaacctgagctctcagccttgtatcaagatggaaggagacaaatcgctcaccttttccagctacgggctgcaatggtgtctctatgagctagacaaggaagaatttcagacattcaaggaattactaaagaagaaatcttcagaatcgaccacatgctctattccacagtttgaaatcgagaatgccaacgtggaatgtctggcactcctcttgcatgagtattatggagcatcgctggcctgggctacgtccattagcatctttgaaaacatgaacctgcgaaccctctcggagaaggcacgggatgacatgaaaagacattcaccagaagatcctgaagcaacgatgactgaccaaggaccaagcaaggaaaaagtgccaggaatttcacaagctgtgcaacaagatagtgccacagctgcagagacaaaagaacaagaaatttcacaagctatggaacaagaaggtgccacagcagcagagacagaagaacaagaaatttcacaagctatggaacaagaaggtgccacagcagcagagacagaagaacaaggacatggaggtgacacatgggactacaagagtcacgtgatgaccaaattcgctgaggaggaggatgtacgtcgtagttttgaaaacactgctgctgactggccggaaatgcaaacgttggctggtgcttttgattcagaccggtggggcttccggcctcgcacggtggttctgcacggaaagtcaggaattgggaaatcggctctagccagaaggatcgtgctgtgctgggcgcaaggtggactctaccagggaatgttctcctacgtcttcttcctccccgttagagagatgcagcggaagaaggagagcagtgtcacagagttcatctccagggagtggccagactcccaggctccggtgacggagatcatgtcccgaccagaaaggctgttgttcatcattgacggtttcgatgacctgggctctgtcctcaacaatgacacaaagctctgcaaagactgggctgagaagcagcctccgttcaccctcatacgcagtctgctgaggaaggtcctgctccctgagtccttcctgatcgtcaccgtcagagacgtgggcacagagaagctcaagtcagaggtcgtgtctccccgttacctgttagttagaggaatctccggggaacaaagaatccacttgctccttgagcgcgggattggtgagcatcagaagacacaagggttgcgtgcgatcatgaacaaccgtgagctgctcgaccagtgccaggtgcccgccgtgggctctctcatctgcgtggccctgcagctgcaggacgtggtgggggagagcgtcgcccccttcaaccaaacgctcacaggcctgcacgccgcttttgtgtttcatcagctcacccctcgaggcgtggtccggcgctgtctcaatctggaggaaagagttgtcctgaagcgcttctgccgtatggctgtggagggagtgtggaataggaagtcagtgtttgacggtgacgacctcatggttcaaggactcggggagtctgagctccgtgctctgtttcacatgaacatccttctcccagacagccactgtgaggagtactacaccttcttccacctcagtctccaggacttctgtgccgccttgtactacgtgttagagggcctggaaatcgagccagctctctgccctctgtacgttgagaagacaaagaggtccatggagcttaaacaggcaggcttccatatccactcgctttggatgaagcgtttcttgtttggcctcgtgagcgaagacgtaaggaggccactggaggtcctgctgggctgtcccgttcccctgggggtgaagcagaagcttctgcactgggtctctctgttgggtcagcagcctaatgccaccaccccaggagacaccctggacgccttccactgtcttttcgagactcaagacaaagagtttgttcgcttggcattaaacagcttccaagaagtgtggcttccgattaaccagaacctggacttgatagcatcttccttctgcctccagcactgtccgtatttgcggaaaattcgggtggatgtcaaagggatcttcccaagagatgagtccgctgaggcatgtcctgtggtccctctatggatgcgggataagaccctcattgaggagcagtgggaagatttctgctccatgcttggcacccacccacacctgcggcagctggacctgggcagcagcatcctgacagagcgggccatgaagaccctgtgtgccaagctgaggcatcccacctgcaagatacagaccctgatgtttagaaatgcacagattacccctggtgtgcagcacctctggagaatcgtcatggccaaccgtaacctaagatccctcaacttgggaggcacccacctgaaggaagaggatgtaaggatggcgtgtgaagccttaaaacacccaaaatgtttgttggagtctttgaggctggattgctgtggattgacccatgcctgttacctgaagatctcccaaatccttacgacctcccccagcctgaaatctctgagcctggcaggaaacaaggtgacagaccagggagtaatgcctctcagtgatgccttgagagtctcccagtgcgccctgcagaagctgatactggaggactgtggcatcacagccacgggttgccagagtctggcctcagccctcgtcagcaaccggagcttgacacacctgtgcctatccaacaacagcctggggaacgaaggtgtaaatctactgtgtcgatccatgaggcttccccactgtagtctgcagaggctgatgctgaatcagtgccacctggacacggctggctgtggttttcttgcacttgcgcttatgggtaactcatggctgacgcacctgagccttagcatgaaccctgtggaagacaatggcgtgaagcttctgtgcgaggtcatgagagaaccatcttgtcatctccaggacctggagttggtaaagtgtcatctcaccgccgcgtgctgtgagagtctgtcctgtgtgatctcgaggagcagacacctgaagagcctggatctcacggacaatgccctgggtgacggtggggttgctgcgctgtgcgagggactgaagcaaaagaacagtgttctggcgagactcgggttgaaggcatgtggactgacttctgattgctgtgaggcactctccttggccctttcctgcaaccggcatctgaccagtctaaacctggtgcagaataacttcagtcccaaaggaatgatgaagctgtgttcggcctttgcctgtcccacgtctaacttacagataattgggctgtggaaatggcagtaccctgtgcaaataaggaagctgctggaggaagtgcagctactcaagccccgagtcgtaattgacggtagttggcattcttttgatgaagatgaccggtactggtggaaaaactgaagatacggaaacctgccccactcacacccatctgatggaggaactttaaacgctgttttctcagagcaagctatgcacctgggagttccttctcaaagatggagaatgatttctgattctcacaaagccctcaatggtagtgattcttctgtgttcactctacgttggttactggatttgaaggctagagaccttcaagtcataggactcagtatctgtgaaatgtccgtcatatctcagagcatatagagggaattaaataaacacaaagcatttggaaaagtt

SEQ ID NO: 2216 - DNA, 3608 bp, Homo sapiens
  source 1..3608: mol_type = genomic DNA
ggttccgctgaggcgtggtaggaagtggctgccgtcaatcactcggggagactccaaacagtgagcctagagctggagactagcgttaaccggcggggcggccggttttatgaatgaagctatggctacagattccccaagaagacccagtcgttgtactggtggagttgtggttcgcccccaggctgtcacagagcagtcctacatggaaagtgttgtgacttttctgcaggatgttgtgccacaggcttacagtggaacacctctaacagaagaaaaggagaaaatagtctgggtcagatttgaaaatgcagatttaaatgatacatcaagaaatctggaatttcatgaaatacatagtactgggaatgaaccgcctttgttgattatgattggctacagtgatggaatgcaggtctggagcatccctatcagtggtgaagcacaagagctcttctctgttcgacatggcccaattcgagcggctagaatcttgcctgctccacagtttggtgctcaaaaatgtgataactttgctgaaaaaagacccctccttggtgtttgtaagagcattggatcttctggcacaagcccaccgtactgttgtgtggatctgtattcacttcgtactggggagatggtcaagtccattcaatttaagacacctatttatgatctccattgcaataaacggatccttgtcgtagtcttgcaggagaaaattgctgcctttgatagctgtactttcacgaagaaattctttgttacaagctgctatccatgtccagggccaaacatgaatcctattgctcttgggagccgctggcttgcttatgcagaaaacaagttgattcgatgtcatcagtcccgtggtggagcctgtggagacaacattcagtcttatactgccacagtcattagtgctgctaaaacattgaaaagtggcctgacaatggtagggaaagtggtgactcagctgacaggcacactgccttcaggtgtgacagaagatgatgttgccatccacagtaattcacggcggagtcctttggtcccaggcatcatcacagttattgacaccgaaaccgttggagagggccaggtgcttgtgagtgaggattctgacagtgatggcattgtggcccacttccctgcccatgagaagccagtgtgctgcatggcttttaatacaagtggaatgcttctagtcacaacagacacccttggccatgactttcatgtcttccaaattctgactcatccttggtcctcatcacaatgtgctgtccaccatctgtatactcttcacaggggagaaactgaagccaaagtacaggacatctgcttcagccatgactgtcgctgggttgtggtcagtactctccggggtacttcccacgttttccccatcaacccttatggtggccagccttgtgttcgtacacatatgtcaccacgagtagtgaatcgcatgagccgtttccagaaaagtgctggactggaagagattgaacaagaactgacgtctaagcaaggaggtcgctgtagccctgttccaggtctatcaagcagcccttctgggtcacccttgcatgggaaactgaacagccaagactcctataacaattttaccaacaacaaccctggcaaccctcggctctctcctcttcccagcttgatggtagtgatgcctcttgcacaaatcaagcagccaatgacattggggaccatcaccaaacgaaccgggccttatctctttggagcggggtgtttttccataaaagccccatgcaaagttaaacctcctccacaaatttcacccagcaaatcgatgggcggagaattttgtgtggctgctatcttcggaacatccaggtcatggtttgcaaataatgcaggtctgaaaagagaaaaagatcagtccaaacaagttgtagttgagtccctgtacattatcagttgctatggcaccttagtggaacacatgatggagccgcgacccctcagcactgcacccaagattagtgacgacacaccactggaaatgatgacatcgcctcgagccagctggactctggttagaacccctcaatggaatgaattgcagccaccgtttaatgcaaaccaccctctgctcctcgctgcagatgcagtacagtattatcagttcctgcttgctggcctggttccccctggaagtcctgggcccattactcgacatgggtcttacgacagtttagcttctgaccatagtggacaggaagatgaagaatggctttcccaggttgaaattgtaacacacactggaccccatagacgtctgtggatgggtccacagttccagttcaaaaccatccatccctcaggccaaaccacagttatctcatccagttcatctgtgttgcagtctcatggtccgagtgacacgccacagcctcttttggattttgatacagatgatcttgatctcaacagtctcaggatccagccagtccgctctgaccccgtcagcatgccagggtcatcccgtccagtctctgatcgaaggggagtttccacagtgattgatgctgcctcaggtacctttgacaggagcgtgaccctgctggaggtgtgcgggagctggcctgagggcttcgggctgcggcacatgtcctccatggagcacacggaggagggcctccgggagcgacttgccgacgccatggccgagtcacctagccgggacgtcgtgggatccggaacagaacttcagcgagagggaagcatcgagactctgagtaacagctcaggctccaccagcggcagcataccaagaaactttgatggctaccgatctccgctgcccaccaatgagagccagcccctcagcctcttcccgactggcttcccgtaggtaccagcaacctgcttctgactggccagccccctcccctgctggaggaggggagaagccccgctctggtcctacccttcagtctctgctcttccttcatcaaccaccttccccaagcttagtgacagcagccgcccatcctacctggatggagaagagacccttctccaagcacctcagcgcacttgccctctgccacacctgtcggtggaggctgtggccaggagagactgtagaagctcggtccctgtgtatgtttgcatatgacatcctgcattggatccgcttttgtattttttaaccatacccacggtggggcgggtggggggagcctggaacagtgaccagatctgggggcctgagtggggacagagttgatcgtccacctggccattttgaccctgagtggacagtcacagcctcagctcatgtctggctgtgacacacactgcccccagcttcccttggtcagccccactccagcacggggtgaacggaggcccagagtactagggaaggaggaagggaggacatgcctcttcttcctcctttctttccccatctgttcatgggaagagtttgtctttcttatctttaagcccctttaccctggtcctgtactgatcagtgaaggaaaccgtggttactgaggccctgttgaaaagtgcacgtcttgtccaataaatcacgctgcagttggtgtccatccctg

SEQ ID NO: 2217 - DNA, 1074 bp, Homo sapiens
  source 1..1074: mol_type = genomic DNA
cttcctggaaacccacccagaacctccaccctctgacaccatggtcaactcctgttgtggctctgtgtgctctgaccagggctgtggcctagagaactgctgccgtcccagctactgccagaccacctgctgcaggaccacctgctgccgccccagctgctgtgtgtccagctgctgcagaccccagtgctgccagaccacctgctgcaggaccacctgctgccaccccagctgctgtgtgtccagctgctgcagaccccagtgctgccagtctgtgtgctgccagcccacctgctgcagaccccaatgctgccagactacctgctgtaggaccacctgctgccgccccagctgctgcaggccccagtgctgccagtctgtgtgctgccagcccacctgctgctgccccagctactgtgtgtccagctgctgcagaccccagtgctgccagaccacctgctgcagaaccacctgctgccgccccagctgctgtgtgtccaggtgctacaggccccattgtggccagtctctatgctgctagcccatctgctggcaaaccacctgctacaggaccacctgctgccaccccagctattgcatttccagctgctgccagccttcctgcagtatctctagcagcagtagctcctcctgctgtggcttcagctgctgcaggctctcctgctgcatctccagttgctgccgccccaactgctgccagaccatgtgctgccgcccaacctgctctagtgcttcttgctgctgaggctgtcatctggactcaccagattctcatcaaccagcattcttgatgtagctcatctatgagctgagttatgggaagctagttggaaaacttcagttccaaccaattcttagattgaatctggcctccaaatatatgctccccccacattttacctctctaccaaatgaacataagttgtaatttgctctgaaatctgtcaactatcttaattgaaatatttgctctctgccataatttctcatatggagctattccattttaaacaaatatttatctaaataaatcttaaataaattttcaggcat

SEQ ID NO: 2218 - DNA, 2478 bp, Homo sapiens
  source 1..2478: mol_type = genomic DNA
ttcactcgctgaagtcatctgggagacagtgccaaatgttccactccagagtcttggcctctaggaggcaggaacagcaggcctggccagcccaaaggactctctatccaggatgtaaatgagcacactgctggcccatgcgcctcggggctgtagagggcagcctcagaggcactgggcattcctggcaccatggatgacgctgctgtcctcaagcgacgaggctacctcctggggataaatttaggagagggctcctatgcaaaagtaaaatctgcttactctgagcgcctgaagttcaatgtggcgatcaagatcatcgaccgcaagaaggcccccgcagacttcttggagaaattccttccccgggaaattgagattctggccatgttaaaccactgctccatcattaagacctacgagatctttgagacatcacatggcaaggtctacatcgtcatggagctcgcggtccagggcgacctcctcgagttaatcaaaacccggggagccctgcatgaggacgaagctcgcaagaagttccaccagctttccttggccatcaagtactgccacgacctggacgtcgtccaccgggacctcaagtgtgacaaccttctccttgacaaggacttcaacatcaagctgtccgacttcagcttctccaagcgctgcctgcgggatgacagtggtcgaatggcattaagcaagaccttctgtgggtcaccagcgtatgcggccccagaggtgctgcagggcattccctaccagcccaaggtgtacgacatctggagcctaggcgtgatcctctacatcatggtctgcggctccatgccctacgacgactccaacatcaagaagatgctgcgtatccagaaggagcaccgcgtcaacttcccacgctccaagcacctgacaggcgagtgcaaggacctcatctaccacatgctgcagcccgacgtcaaccggcggctccacatcgacgagatcctcagccactgctggatgcagcccaaggcacggggatctccctctgtggccatcaacaaggagggggagagttcccggggaactgaacccttgtggacccccgaacctggctctgacaagaagtctgccaccaagctggagcctgagggagaggcacagccccaggcacagcctgagacaaaacccgaggggacagcaatgcaaatgtccaggcagtcggagatcctgggtttccccagcaagccgtcgactatggagacagaggaagggcccccccaacagcctccagagacgcgggcccagtgagcttcttgcggcccagggaatgagatggagctcacggcttaaagcccaagctctgaagaagtcaagggtggagccagagaaggaaggcagtcccagatgagcctctattttcatcagcttcttctctctccccttgaacttggtaacccacatggttctcccgtggcccctaggtggatgaggccaaagtcaaatccaaggctgagacagtcgtgcgactcctactcccccagagcgtgacccggagcaggtgctggacacagagcctgtctcagcagagggtccccactggccgcaacggctcagtgacagcaagagcaggaagagcagcaggaaggcaccgctgtccaccttgggcaccatttatcctcctttcatcgtccccggggcagttgcgtgaccctgctgggaggccagaccgggccagactgagggtcaggggaccaggctgggttgggggttgggtggggctggacggggacgaggcgcggagaggcggcgggaaagagcttcggctgggccacgggctcgcgggcactctcggcggcagcctcgggggctccgactccagctctgggcaagatccataaacttttaaagaagcctcaaaacatacttttaaagcattaagctttaaagtgctagaaatcttgtgccccatatgtgcttctttcagtattatcctagatcctcaggagtagcatggcaactggagaaaatgggaggaaagacaagaagaaatagaagctgatttaacatcaagtttattcagttttgatttttcttatctctactggctttctcctgttcaaaccttgcagcgataatatttggaaaagagcacttggaaattatattcctgtttttaactctttatatttaatcattctccttgtaattgattttgtagctaatttactccccagcacccccagaagaaaattttacaaaggaaaatgttttatttttattttttccttatcaactttttatttaaatgctaatatccaattaatggacaaacgaatcagctaatactggaaacaatgtaacaatagtgaaaagcatgaacttttgatttctatagaccgaatttgactctgctactaaatgatcttgggcaagttggttaatctatatgtctcagtttctttatctataaaatgagaataatacaacttc

SEQ ID NO: 2219 - DNA, 646 bp, Homo sapiens
  source 1..646: mol_type = genomic DNA
acaaaccaactcaccactcctgacaccatgagtcactacggcagctactacggaggcctgggctacagctgtggaggcttcggtggcctgggctatggctatggctgtggatgtggcagcttctgcagacggggttctggctgtggctatggaggctacggatatggctctggctttggaagctacggatatggctctggctttggaggctacggatatggctctggctttggaggctatggatatggctgctgccgcccatcgtacaatggaggatacggattctctggcttttattaaatgaattgctgaaattggaagcagaggagaaacctccaaatgtgtttggtcctgtcccgtgctttcattccaaaaatccattctattgccttcagcatcaatggagagatatttagctatgttaaatctttaaaatagatttaagctgcttctgtgaatatttgttgtctttttactttcggagtccgtcacctgaaatcatattcatgtataactactctaggttgttcttctaaatttgctttatttttcttaccaccattaccttgatgttatctatcaagatcctagcaaaaacttgtattttgcttttatctaataaatgaagtaaagtataaatatttta

SEQ ID NO: 2220 - DNA, 704 bp, Homo sapiens
  source 1..704: mol_type = genomic DNA
ttaaaactcagaatcttcccaggtacactcagctgaactcacatcttcccgtcaacatgtcctacaactgttgctctagaaacttctcctcctgctcccacgggggttacttgcactacccaggctcctcctgtggctcttcctaccccagcaacctggtctacagcactgacctctgctctcccagcacctgccagctgggttcctctctctataggggctgtcaggagacctgctggaggcccaacagctgtcagacattgtgtgttgagtccagcccctgccacacctcctgctactaccccaggactcacatgctctgcaattcttgcctgactatgcatgttgggtctcggggttttggatccaatagctgctgctccctgagctgtggatccaggagctgctcctcactgggctgtggatccaatggcttcagatatctgaattatagaatccatacctccccttcccagagttatagatccagattctgccatccaatctattttccacctagaaggtggttccattcatcttgttatcagccattctgtagatctggtttctactgactaatgtggtgactggtaaaactcatttgagaaatgcatattctttagtaaggtcatctgttaatttcttcctttgagaagtattctaatattattgatcaccaggtcttccttactttccagccctca

SEQ ID NO: 2221 - DNA, 1554 bp, Homo sapiens
  source 1..1554: mol_type = genomic DNA
atgtctggcagttgctcttctaggaaatgcttctccgtgccagccacctctctctgctccactgaggtgagctgtggaggccccatctgcctgcccagttcctgccagagccagacatggcagctggtgacttgtcaagacagctgtggatcatccagctgtgggccacagtgccgtcagccctcctgtcctgtgagtagctgtgcccaacccctgtgctgtgatcctgtcatttgtgagccttcttgctccgtgagcagcggctgccaacccgtgtgctgtgaggccaccacctgtgagccttcttgctctgtgagcaactgctaccaacctgtgtgcttcgaggccaccatctgtgagccttcttgctcagtgagcaactgctgccaacctgtgtgctttgaggccaccgtttgtgagccttcttgttccgtgagcagctgtgctcaacctgtgtgctgtgagcctgctatttgtgagccttcttgctccgtgagcagctgctgccagcctgtaggctctgaagccacttcctgccaaccagtcctctgtgtgcccacttcctgccagcctgtcctctgcaaatccagctgctgccagccagttgtctgtgagcccagctgctgttcagctgtctgcaccctgcctagttcctgccaacctgtggtctgtgagccttcctgctgtcagccggtgtgcccgacacctacctgctctgtgaccagtagctgccaggctgtctgctgtgaccccagcccttgtgagccaagttgctcagagtctagcatctgccagccagctacgtgtgtggctctggtctgtgagccagtttgcctccgccctgtctgctgtgttcagagctcgtgcgagccaccttctgtccccagcacttgccaagagccttcttgttgtgtctccagtatctgccaacccatctgctctgagcccagcccctgctcaccagctgtctgtgtgtccagtccatgccaacctacttgctatgtagtcaagcgctgtccttctgtctgccctgagccagtttcctgcccatctacctcctgccgacctctttcctgcagtccagggtcttctgcatctgccatctgccgaccaacttgtcctaggactttctacatacccagttccagcaaacggccttgcagtgctacgatttcctaccgcccggtctcccgtccgatctgccgcccaatctgctctggactcctcacctataggcagccatacatgacatccatctcctaccgtcctgcctgctatcgcccatgctactccatcctgcgccgcccagcctgtgtcacttcctactcttgccgcccagtctacttccgcccatcttgcactgagtctgactcttgcaaacgggattgcaaaaaatccacttccagccaactggattgtgttgacacaaccccctgcaaggtggatgtctcagaagaggctccctgccagcccactgaagccaaacccatcagcccaaccacccgtgaggccgcagcagctcagcctgctgccagcaagcctgccaactgctaa

SEQ ID NO: 2222 - DNA, 1026 bp, Homo sapiens
  source 1..1026: mol_type = genomic DNA
atggcagacggctgttgtcctggaaacaccacagccattccagctgtgcccaccatcaccacatacccagttaaaggtggatttcgacatgctctctgtttgcctagttcctgccacagcagaatgtggcaactggtcacatgccaagaaagctgtcagccatccattggtgccccaagtggctgtgatcctgcttcgtgtcaacctacccgccttccagcaacgtcttgtgtgggttttgtttgccaacctatgtgctcccacgcagcctgctatcagtctggcactggtcagtctccttgtctggttagctcatgtcagccatcctgctcggaatctacttgttgtcaggaaaagtgctgcgatgccagtccctgccagcaaagctcctgccaggaatctgtctgcatgtctggatcatgtcaggcagcttgtggccaatcagtctgctgtgatgctggatcctgccagccatcctgctctgaagtgacctcctgtccggaaacttcttgcctaccaaccatctgtacagctagtccatgccaaccaacttggtgccaaggaagttcatgtcaacccgtcagtggtgaaggccagccctgtaaatcaacttattatcaacccatctgctatattttcaagccttgccaatcagccctctacatgcctgttccctgccagccatcgacttgtgtgttcagttcttgcaatactacttgctgtgtgccttcccattgccagccacctcactgccaactggttccttccacatgcttcatctaccagccagtggctaactgccaggccccttgttccacaaagaactgttgcaaaccagcttcttgtgacactgtgatttctggccaaccaacttgtgatggacccccttcctataaccagagtggctgcaaatcagcttgctgtgtgactggtttaggcacatcacccagtagtggctccaattgcttgccgacttcatgccaacccagctgtgagtccagcttctgcaaggcaacactttgttaa

SEQ ID NO: 2223 - DNA, 941 bp, Homo sapiens
  source 1..941: mol_type = genomic DNA
atggtcagctcctgctgtggctctgtctgctctgaccagagctgtggtcaaggtctcggccaggagagctgctgccgccccagctgctgccagaccacctgctgcaggaccacctgctgccgccccagctgctgcatttccagttgctgcaggccttcctgctgtatctccagctgctgcaaacccagctgctgcaggaccacctgctgccgccccagctgctgcatttccagttgctgcaggccttcctgctgtatctccagctgctgcaaacccagctgctgcaggaccacctgctgccgccccagctgctgcatttctagttgctgcaggccttcctgctgtatctctagctgttgcaaacccagctgctgccagaccacctgctgccgccccagctgctgtatctccagctgctacaggccccagtgctgccagccctcctgctgccgcccggcttgctgcatttctagttgctgtcatcccagctgctgtgtgtccagctgccgctgccctttcagctgcccgaccacctgctgtagaacaacctgcttccaccccatctgctgcggcagttcttgctgctgagtgaagctgctctggatttgtgcaccttcttgctctcaaccttcagttcaggcacagagtatctattcagagaacatgtggacttcctgatgtcgtgaaaacagaggcatggactgatttggaaaatattttattagtatgtattctcttttatagaagtttttattcctattgaatctgaatttacagtcaaattccacatcacatgttttagaattctttattctaattcaatatacataaatcttcaaatggtatccttctagatgtttcttcctaatgttttctgtggtatcaattttcatgtggaattgtttgatgttcctcaataaaacttcatagtgttcaaaagc

SEQ ID NO: 2224 - DNA, 1174 bp, Homo sapiens
  source 1..1174: mol_type = genomic DNA
ctcctagaaacccaactagatccttcaccctctgacaccatggtaaactcctgttgtggctccgtgtgctctcaccaaggctgtggccgagacctctgccaggagacctgctgccgccccagctgctgtgagaccacctgctgcaggaccacctactgtcgccccagctgctgtgtgtccagctgctgcaggccccagtgctgccagtctgtgtgctgccagcccacctgctgccgccccagatgctgcatctccagctgctgtcgccccagctgctgtgtgtccagctgctgcaagccccagtgctgccagtctatgtgctgccagcccacttgctgccgccccagatgctgcatctccagctgctgtcgccccagctgctgtgtgtccagctgctgcagaccccagtgctgccagtctgtgtgctgccagcccacctgctgccaccccagctgcagcatctccagctgctgccgcccctcttgctgtgaatccagctgctgccgcccctgctgctgcctgcgtccagtctgtggccgagtctcctgccacaccacttgctatcgcccaacctgtgtcatctccagctgcccccgccccttgtgctgtgcctcctcttgctgctgagcccactgccctggctcatctctcccttcactgcaggcccacagttgtagaccattcttctgtgctgactattaggacacatggagtgggattgatgtcattcagcagggtggacttcatgtttccaatgagcccatcaccatcccactgactctgtgagaacattctggttcattttaaactccctcccttgctttctttctcttccagtcatggcaccaaatatgaaataatttgtaatccactagctaagaaattattccaatcctctaaattcctcattttttaaatcgttttgagcctacagaatatccttcccagtgaggtacacattatctccatttcaaacatattatttgtctgtcagcctttcagtcattcttttctcttggaaaggtaggaggctgcccctcccatgctctcctgctttctccctgttctctctttgtctctgtttgttcaagtttgccagaatttttctattttattggttctttatctttattgtgttcacaaaatatattgtattaaacttttcatttagaaa

SEQ ID NO: 2225 - DNA, 1157 bp, Homo sapiens
  source 1..1157: mol_type = genomic DNA
aaacccaagaacttcactctcttggaagcccacccagatcctccccgttctgacaccatggtcagctcctgttgtggctccgtgtgctctgaccagggctgcggccaagacctctgtcaggagacctgctgccgccccagctgctgtgagaccacctgctgcaggaccacctgctgccgccccagctgttgtgtatccagctgctgcaggccccagtgctgccagtctgtgtgctgccaacccacttgttcccgccccagctgctgtcagaccacctgttgcaggaccacctgctaccgccccagctgttgtgtgtccagctgctgcaggccccagtgctgccagcctgcgtgctgccaacccacttgctgtcgccccagctgctgtgagacgacctgctgccaccctaggtgctgcatctccagctgctgtcgccccagctgctgtgtgtccagctgctgcaagccccagtgctgccagtctgtgtgctgccagcccaactgctgccgccccagctgcagcatctccagctgctgccgcccctcttgctgtgaatccagctgctgccgcccctgctgctgcgtgcgtccagtctgtggccgagtctcctgccacaccacttgctatcgcccaacctgtgtcatctccagctgcccccgccccttgtgctgtgcctcctcttgctgctgagcccactgccctggcttatctcccccttcaccactggcccacagatgtagacccttctactgtgctgaccattaggatacaggaagtggggttgatgtcattcaatagaatggaactcatgtttccaatgagcccatcaccatttcactgactctttgagaacattctgattcattttaaactccctcccttgctttctttttcttccggtggtggcaccaaatgtgaattaatttgtaatccactagctagaaattattccaatcctctaatttcctcattttctttatcactttgaggtacagatcttcttctcagtgaggcagacattatctgcaggaccagttttgtcactgaggttgcaccctcagatccagccgcccagttatattctgtgtttctcctagtgtgaatttcttatgctttgttgcatctctgctttttaataaaatttctgtacataagaa

SEQ ID NO: 2226 - DNA, 850 bp, Homo sapiens
  source 1..850: mol_type = genomic DNA
ctcctctcaacagcccaacccacaccagcctcagacaccaccatgaccggctcctgctgcggctccaccttgtcctccctgagctacgggggaggctgctgccagccctgctgctgccgcgacccctgctgctgccgccccgtgacctgccagaccaccgtgtgccgccccgtgacctgcgtgccccgctgcacgcgccccatctgcgagccctgccgccgcccggtgtgctgcgacccctgctccctgcaggaaggctgctgccgccccatcacctgctgcccctcgtcgtgcacggctgtggtgtgcaggccctgctgctgggccaccacctgctgccagcctgtgtctgtgcagtccccctgctgccggcctccctgcggccagccgaccccttgcagcaccacctgcaggacctcctcctgctgagaccccacctctcctctcaacgcacgaaacattcccaggtgcacagaagcttgtgcagactcttctaccccttctggatcagatgagagactccacctttgcagcctagctgatcctcaagcacgaattcaacaataacatcctatctatttccccacataattatgcagctaatcctggccctctctgacaatcttgagaaaaattccagctttcatcattcgaattcctggcttgaaaaaaaaaacgagtaaataaaaatcaaagctcctcttgaatagaactctgtcccactgactcatcacccttttttctactgtttcaaggttctcagatgagatttttttcttccaggataatactatttgtatgctgtatttttgcactgtaaaaaaaaataaaattatatttctggggaagc

SEQ ID NO: 2227 - DNA, 776 bp, Homo sapiens
  source 1..776: mol_type = genomic DNA
catccagctcctctccacagcccaacccacaccagcctcagacaccaccatgaccggctcctgctgcggctccaccttctcctccctgagctacgggggaggctgctgccagccctgctgctgccgcgacccctgctgctgccgccccgtgacctgccagaccaccgtgtgccgccccgtgacctgcgtgccccgctgcacgcgccccatctgcgagccctgccgccgcccggtgtgctgcgacccctgctccctgcaggaaggctgctgccgccccatcacctgctgcccctcgtcgtgcacggctgtggtgtgcaggccctgctgctgggccaccacctgctgccagcctgtgtctgtgcagtccccctgctgccggcccccctgcggccagccgaccccttgcagcaccacctgcaggacctcctcctgctgagccaccacctgctgccagcctgtgtctgtgcagtccccctgcggccagccgaccccttgcagcaccacctgcaggacctcctcctgctgagcagtgcactgactgcccggaacgcgtaactcaccttctgaaaaagtcacactcccatttctctactttaacaaacctcctgccctgagcccacaaaaccccacatcaaccaagcagggaaccgagcactgggctcatctattaagacctgggccattctgaagtctgtaaaagaagcaatttccttcttcttaagatttcgtggcatgtttattttctaataaatatctgttctttggccttgcaaaaa

SEQ ID NO: 2228 - DNA, 700 bp, Homo sapiens
  source 1..700: mol_type = genomic DNA
caatcaaacccataaataccacagactctaatagccatggattgctgtgcctctcgaggctgcagtgtccccaccgggcctgccaccaccatctgctcctctgacaaatcctgccgctgtggagtctgcctgcccagcacctgcccacacacagtttggttactggagcccacctgctgtgacaactgtcccccaccctgccacattcctcagccctgcgtgcccacctgcttcctgctcaactcctgccagccaactccaggcctggagaccctcaacctcaccaccttcactcagccctgctgtgagccctgcctcccaagaggctgctaatggatggctactttgctcagtgcctgagattgaaaaagtcaacatagaagctttagcattcacctatctcagtacctacaactaatgtactctgctttagaaattggaacaaggatggtactaccacaatcaccccctgcaaaaaaaaagagaccaagaaactttcaatgaccattcagctataaccaactgcagtttgaatcagtggatgcctatagcttcctgaagctgttcgattccttcatattaaagtgtctctttctgtgggtggtttgggaattctgttttcagtcttgggtggtatctttctgaaaattaaggaagttcttcatgattatcctaataaattttacatctctggcatagc

SEQ ID NO: 2229 - DNA, 692 bp, Homo sapiens
  source 1..692: mol_type = genomic DNA
aagaaactgaaagctaaccagacgcccattgccatggattgctgtgcctctcgcagctgcagtgtccccactgggcctgccaccaccatctgctcctccgacaaatcctgccgctgtggagtctgcctgcccagcacctgcccacacacagtttggttactggagcccatctgctgtgacaactgtcccccaccctgccacattcctcagccctgcgtgcccacctgcttcctgctcaactcctgccagccaactccgggcctggagaccctcaacctcaccaccttcactcagccctgctgtgagccctgcctcccaagaggctgctgatggatggctactttgctcagtgcccgacaacgaagaatccagaagctgtcccttcagtattcacttgcctcagtagtttgccagatgttaaggtagaccagatgacccagatatgaagaacttacctttggttttaatgggggaaaaaaagaaaagtattttttatggttatttagctgaaaaaccatttggttcctgtgggcaggtgaatgagttttattagcaaaatactgtttcaatctttaagacctcagattacatgttcttgatcatattgcttcctggctcttgtttcttgtactgggtattttcatagaagaaaatttcttggtgggttttccaataaactatatttctctggc

SEQ ID NO: 2230 - DNA, 591 bp, Homo sapiens
  source 1..591: mol_type = genomic DNA
agacttctctcaactcaacaaaaacccacctcccattgccatgtattgctgtgctctccgctcctgcagcgtccccaccggccctgccaccaccttctgctcatttgataaaagctgccgctgtggagtctgcctacccagcacctgcccacatgagatcagcctccttcagcccatctgctgtgacacctgccccccaccctgctgcaagcctgatacctatgtgccaacttgctggctgctcaacaactgtcacccgactcccggactgagtgggatcaacctgaccacctatgttcagcctggctgtgagagtccctgtgagccccgctgttaaccagccgagtctgcacaggttccgtgaggtggctgcccaatgtcctctgcaccatctgggcttcagcactcactactgcctacatcaaggctaaggccatcccaatccccggggccaagtcttgatgaatcttcttaattatttgcacatttgggtaccattggagacctcccttctgtcttttaggctatttcatcactctttgagaaataaccattttgaccatttgttaataaactttattctggcttagc

SEQ ID NO: 2231 - DNA, 588 bp, Homo sapiens
  source 1..588: mol_type = genomic DNA
cactgccctctgcctcgaccttatccagccacacgccaccatgtgccacaccagctgctcctcgggctgccagccagcctgctgcgcgcccagcccctgccaggcatcctgttacatccccgtgggctgccagtcctccgtgtgcgtgcccgtgagcttcaagccagccgtgtgtgtgcccgtgagatgccagtcctctgtgtgcgtgcccgtgagctgcaggcccgtcgtgtatgcggctccctcctgccagtcctctgggtgctgccagccttcctgcaccagcgtcctctgcagacccatctcctgcagcaccccttcctgctgctgagcatgaatctccagacccgctgctcccagtgcagatgaggccacacctgtacactccctggatgagtcctcagttggtcttctgcacatggtgcaggtgaaaagcatgctcagtgaaccctctgaattctggatcgagaatataatagaatgatctggagccctggctgaacttgcctatccccccagggaagtctggggtcccagagtcattctctgaccccatgagagtcaaataaaccagctttccccatgcaa

SEQ ID NO: 2232 - DNA, 447 bp, Homo sapiens
  source 1..447: mol_type = genomic DNA
agaccagccctgtcctctgcgccccccacctgtccacactccatcatgtgccacaccagccactcttcgggctgcccaatggcctgccctggctccccgtgctgtgtccccagcacctgctacccacccgagggctatgggacctcctgctgctgctcagccccctgtgtggctctgctgtgccggcccctgtgtggggtatccacctgctgccagccagcctgctgtgtgcccagcccctgccaggtggcctgctgtgtgcctgtgagctgcaagcctgttttgtgtgtggcttccttctgcccaacctctgggtgctgccagcccttctgccccaccctggtctatagacctgtcacctggagcacccccactggctgctgagcaggtggcctcctatgaccctcgtaggtgcgaggtcagaagccagcaggctctctgaactcc

SEQ ID NO: 2233 - DNA, 971 bp, Homo sapiens
  source 1..971: mol_type = genomic DNA
tcactcactcacgtctcccccagctcacctcctccccaccccagcatggccacgtctaccatgtccgtctgctccagcgcttactctgactcctggcaggtggacgcctgcccagagagctgctgtgagcccccctgctgcgccaccagctgctgcgccccggccccctgcctgaccctggtctgcaccccagtgagctgtgtgtccagcccctgctgccaggcggcctgtgagcccagcccctgccagtcaggctgcaccagctcctgcacgccctcgtgctgccagcagtctagctgccagccagcttgctgcacatcctccccctgccagcaggcctgctgcgtgcctgtctgctgcaagccagtctgctgtgtgcccgtctgctgcaagcctgtctgctgcaagcccatctgctgtgtgcccgtctgctctggggcttcctcttcatgctgccagcagtctagccgccagccggcttgctgcaccacctcctgctgcagaccctcctcctccgtgtccctcctctgccgccccgtgtgcaggtccacctgctgtgtgcccatcccctcctgctgtgcccctgcctccacctgccagcccagctgctgccgcccggcctcctgcgtgtccctcctctgccgccccacgtgctcccgcctctcttccgcgtgctgcggcctctcctcaggccagaagtccagctgctgacgggcaggtcccgtttctccagagttgttccagggccatctctgacttccgaaaatccttgcagccctgagccctgtctgagtctcctctgcccatagccactgcacctccagccagcaatgctgagctttcatgccgattccctccaggcatgcatctctcccacaccctcatctccatgctggccagccggtggtcactgtgtcctgccccatgtgagtgatcagtctgtcaacaaataaagtcaccaatgtgccctc

SEQ ID NO: 2234 - DNA, 1149 bp, Homo sapiens
  source 1..1149: mol_type = genomic DNA
tcactcactcacacacctcccccagctcacctcctccccactccagcatggccgcctccaccatgtccatctgctccagcgcctgcaccaactcctggcaggtggacgactgcccagagagctgctgtgagctcccctgcggcacccccagctgctgtgccccagccccctgcctgaccctggtctgcaccccagtgagctgtgtgtccagcccctgctgccaggcggcctgtgagcccagcgcctgccaatcaggctgcaccagctcctgcacgccctcgtgctgccagcagtctagctgccagccggcttgctgcacctcctccccctgccagcaggcctgctgcgtgcccgtctgctgcaagcctgtgtgctgtgtgcccgtctgctgtggggcttcttcatgctgccagcagtctagctgccagccagcttgctgtgcctcttcctcctgccagcagtcctgccgtgtgcctgtctgctgcaaagctgtgtgctgcgtgcccacctgctctgagtcatcctcttcatgctgccagcagtctagctgccagccggcttgctgcacctcctccccgtgtcagcagtcctgctgtgtgtccgtctgctgcaagcctgtctgctgcaagtccatctgctgtgtacctgtttgctctggggcttcctctccgtgctgccagcagtctagctgccagccagcttgctgcacctcctcctgctgcagaccctcctcctctgtgtccctcctctgccgccccgtgtgctcccgcccagcctcctgcagcttttcctcaggccaaaagtctagctgctgatggccatgtcccccagggccagccgggctcaggccccacctccctgccagtccttggacctcccagcccacccagcctcagcacagctcagcacagaaggagcagccccagccacagccgcccagccccggggtctcagatgctcactggctcctctctgacctcccgccgggcgggcgagccctggcttctcctcacggtgcttcctggctgcagaccacaaccctccgctggtcgctggtcgctggttggggatgggccctcctgacctgggtctcacccccaggagcgtcaccctctgcctctgagcaccaataaagcgtctgcggcccca

SEQ ID NO: 2235 - DNA, 636 bp, Homo sapiens
  source 1..636: mol_type = genomic DNA
ccaaggatgacctcaacaaccaacaccatgtgtggcagctactacagaaactacaatggtggccatggctatgggtgctgtggctacggaggcctgggctgtggttatggcggctgtggctatgggtgctgtggctacggaggcctgggctttggctatggaggcctggactgtggctatggaggcctgggctgtggctatggctccttctgtggctgtggctacagaggcctggactgtggctatggctgtggctatggctatgtctcccactccttctgtggctgtggctataggtgcggctctggctatggctccagctttggctactactattgaggacaccatgggagactctcaccctctatcctgtgacattgcaattcaccaattctgaagcccacatgctctgagcctttcccttgattgatgatatcctgcagtggaagtctaatatgatctgttgttgatctaccatctaacccaaaaataccctgagtttccatcatgaagtgggataaggtgaagttcacctgtcacttctccttttatcaggatgatggtgtcacagtgactcctttgatgactttcatgctgtagtttgtttctctgctgacctaataaacacatttaatc

SEQ ID NO: 2236 - DNA, 3420 bp, Homo sapiens
  source 1..3420: mol_type = genomic DNA
caacctgcagccctcatctccgccggcgagtagggccaggtgttgggagctcccacgtgggacaagatggtgtcttcggcgcagatgggcttcaacctgcaggctctcctggagcagctcagccaggatgagttgagcaagttcaagtatctgatcacgaccttctccctggcacacgagctccagaagatcccccacaaggaggtagacaaggctgatgggaagcaactggtagaaatcctcaccacccattgtgacagctactgggtggagatggcgagcctccaggtctttgaaaagatgcaccgaatggatctgtctgagagagcaaaggatgaagtcagagaagcagctttgaaatcctttaataaaaggaagcctctatcattagcgtttacagaaacgaaaggaaatgtcatctgcctgggtaaagaagtctttaaaggaaaaaagccagacaaagacaataggtgcaggtatatattgaagacgaagttccgggagatgtggaagagctggcctggagatagcaaagaggtccaggttatggctgagagatacaagatgctgatcccattcagcaaccccagggtgcttcccgggcccttctcatacacggtggtgctgtatggtcctgcaggccttgggaaaaccacgctggcccagaaactaatgctagactgggcagaggacaacctcatccacaaattcaaatatgcgttctacctcagctgcagggagctcagccgcctgggcccgtgcagttttgcagagctggtcttcagggactggcctgaattgcaggatgacattccacacatcctagcccaagcacggaaaatcttgttcgtgattgacggctttgatgagctgggagccgcacctggggcgctgatcgaggacatctgcggggactgggagaagaagaagccggtgcccgtcctcctggggagtttgctgaacagggtgatgttacccaaggccgccctgctggtcaccacgcggcccagggccctgagggacctccggatcctggcggaggagccgatctacataagggtggagggcttcctggaggaggacaggagggcctatttcctgagacactttggagacgaggaccaagccatgcgtgcctttgagctaatgaggagcaacgcggccctgttccagctgggctcggcccccgcggtgtgctggatcgtgtgcacgactctgaagctgcagatggagaagggggaggacccggtccccacctgcctcacccgcacggggctgttcctgcgtttcctctgcagccggttcccgcagggcgcacagctgcggggcgcgctgcggacgctgagcctcctggccgcgcagggcctgtgggcgcagacgtccgtgcttcaccgagaggatctggaaaggctcggggtgcaggagtccgacctccgtctgttcctggacggagacatcctccgccaggacagagtctccaaaggctgctactccttcatccacctcagcttccagcagtttctcactgccctgttctacaccctggagaaggaggaggaagaggatagggacggccacacctgggacattggggacgtacagaagctgctttccggagtagaaagactcaggaaccccgacctgatccaagcaggctactactcctttggcctcgctaacgagaagagagccaaggagttggaggccacttttggctgccggatgtcaccggacatcaaacaggaattgctgcgatgcgacataagttgtaagggtggacattcaacggtgacagacctgcaggagctcctcggctgtctgtacgagtctcaggaggaggagctggtgaaggaggtgatggctcagttcaaagaaatatccctgcacttaaatgcagtagacgttgtgccatcttcattctgcgtcaagcactgtcgaaacctgcagaaaatgtcactgcaggtaataaaggagaatctcccggagaatgtcactgcgtctgaatcagacgccgaggttgagagatcccaggatgatcagcacatgcttcctttctggacggacctttgttccatatttggatcaaataaggatctgatgggtctagcaatcaatgatagctttctcagtgcctccctagtaaggatcctgtgtgaacaaatagcctctgacacctgtcatctccagagagtggtgttcaaaaacatttccccagctgatgctcatcggaacctctgcctagctcttcgaggtcacaagactgtaacgtatctgacccttcaaggcaatgaccaggatgatatgtttcccgcattgtgtgaggtcttgagacatccagaatgtaacctgcgatatctcgggttggtgtcttgttccgctaccactcagcagtgggctgatctctccttggcccttgaagtcaaccagtccctgacgtgcgtaaacctctccgacaatgagcttctggatgagggtgctaagttgctgtacacaactttgagacaccccaagtgctttctgcagaggttgtcgttggaaaactgtcaccttacagaagccaattgcaaggaccttgctgctgtgttggttgtcagccgggagctgacacacctgtgcttggccaagaaccccattgggaatacaggggtgaagtttctgtgtgagggcttgaggtaccccgagtgtaaactgcagaccttggtgctttggaactgcgacataactagcgatggctgctgcgatctcacaaagcttctccaagaaaaatcaagcctgttgtgtttggatctggggctgaatcacataggagttaagggaatgaagttcctgtgtgaggctttgaggaaaccactgtgcaacttgagatgtctgtggttgtggggatgttccatccctccgttcagttgtgaagacctctgctctgccctcagctgcaaccagagcctcgtcactctggacctgggtcagaatcccttggggtctagtggagtgaagatgctgtttgaaaccttgacatgttccagtggcaccctccggacactcaggttgaaaatcgatgactttaatgatgaactcaataagctgctggaagaaatagaagaaaaaaacccacaactgattattgatactgagaaacatcatccctgggcagaaaggccttcttctcatgacttcatgatctgaatccccccgagtcattcattctccatgaagtcatcgattttccaggtgttggtgaactgcctgtgactcctctcctccccggcccctacccctcagggataatgagttcattgctgggctagatgttttagccatgattctgcctctgttttatacctgcacacatccttatctttgttacatatgaaatatctgtatcacgggtatattgagagaaataaaggtgagagcattcac

SEQ ID NO: 2237 - DNA, 1205 bp, Homo sapiens
  source 1..1205: mol_type = genomic DNA
atttgaaacaacaactttattagcacctggcactaggcggagagaggcggtaagccgcgaggaggaaagggactcacgtcccgctgtggaccgatcctgctaagcagagaatcgctgtggccggacgacggggcgtcgagacaagaagaaagacgttggcaactcagaggactggttgcggcgttagacaagaaagcaaggcctttaagcagggattcggggtggacgtgggggtgggccgaagcgaagccggaaacaggaaactacaactcccacaaggcctagggccacgtcccgccgtcctcggctgctgagcctgatgggacaagtagttttgcgaacggcttaacctacagattgaagaggtcggaagctctgaggcccggggcttccggaggtcgcggagatggaattggagcagagagaagggaccatggcagccgtgggctttgaggagttctcagcgccgccaggctcagagttggcgttgcctcccctatttggtggccacatcctggagagcgagctggagacggaagtggagtttgtgtcaggtggtctgggcggctcagggctccgggagcgagatgaagaggaagaggcagcccggggtcggcggcggcgccagcgggaattaaatcgcagaaagtaccaggcactaggtcggcgctgccgggagatcgagcaggtgaacgagcgggtcctgaacaggctccatcaggtgcagaggataactcggaggctgcagcaggaacggaggttcctcatgagagtgctggactcctacggggatgactaccgggccagccagttcaccattgtgctggaggatgagggcagccagggcacggatgcccccaccccaggcaatgcggagaatgagcctccagagaaagagacactgtccccgcccagaaggactcctgcacccccagaacccggcagcccagcccccggtgaggggcccagtgggcggaagaggcggcgagtgccacgggatggacgccgagcaggaaatgcgctgactccagagctggccccggtgcagattaaggttgaggaagactttggctttgaagcagatgaggccctggattccagttgggtttctcggggtccagacaaactgctgccctacccgaccctggccagcccagcctctgactgacgcatgcccaataaactgaccccacactcaccccggc

SEQ ID NO: 2238 - DNA, 3205 bp, Homo sapiens
  source 1..3205: mol_type = genomic DNA
attggtgagtggggcagggcaggagggaactgaagagtgagaaagcattatttcagcaaaaggtctttcctcccttgctctctcctccaaccactggctcagcctctccgcccgctgcctgtgaatgatgcaatggaaggtgtgctggggtcgccctgtgtcccgtgcataggagcatctcagcctccaggtcctctcctttggggctcacggcacccccatgctacgaaccgcaggcagggacggcctctgtcgcctgtccacctacttggaagaactcgaggctgtggaactgaagaagttcaagttatacctggggaccgcgacagagctgggagaaggcaagatcccctggggaagcatggagaaggccggtcccctggaaatggcccagctgctcatcacccacttcgggccagaggaggcctggaggttggctctcagcacctttgagcggataaacaggaaggacctgtgggagagaggacagagagaggacctggtgagggataccccacctggtggcccgtcctcacttgggaaccagtcaacatgccttctggaagtctctcttgtcactccaagaaaagatccccaggaaacctacagggactatgtccgcaggaaattccggctcatggaagaccgcaatgcgcgcctaggggaatgtgtcaacctcagccaccggtacacccggctcctgctggtgaaggagcactcaaaccccatgcaggtccagcagcagcttctggacacaggccggggacacgcgaggaccgtgggacaccaggctagccccatcaagatagagaccctctttgagccagacgaggagcgccccgagccaccgcgcaccgtggtcatgcaaggcgcggcagggataggcaagtccatgctggcacacaaggtgatgctggactgggcggacgggaagctcttccaaggcagatttgattatctcttctacatcaactgcagggagatgaaccagagtgccacggaatgcagcatgcaagacctcatcttcagctgctggcctgagcccagcgcgcctctccaggagctcatccgagttcccgagcgcctccttttcatcatcgacggcttcgatgagctcaagccttctttccacgatcctcagggaccctggtgcctctgctgggaggagaaacggcccacggagctgcttcttaacagcttaattcggaagaagctgctccctgagctatctttgctcatcaccacacggcccacggctttggagaagctccaccgtctgctggagcaccccaggcatgtggagatcctgggcttctctgaggcagaaaggaaggaatacttctacaagtatttccacaatgcagagcaggcgggccaagtcttcaattacgtgagggacaacgagcctctcttcaccatgtgcttcgtccccctggtgtgctgggtggtgtgtacctgcctccagcagcagctggagggtggggggctgttgagacagacgtccaggaccaccactgcagtgtacatgctctacctgctgagtctgatgcaacccaagccgggggccccgcgcctccagcccccacccaaccagagagggttgtgctccttggcggcagatgggctctggaatcagaaaatcctatttgaggagcaggacctccggaagcacggcctagacggggaagacgtctctgccttcctcaacatgaacatcttccagaaggacatcaactgtgagaggtactacagcttcatccacttgagtttccaggaattctttgcagctatgtactatatcctggacgagggggagggcggggcaggcccagaccaggacgtgaccaggctgttgaccgagtacgcgttttctgaaaggagcttcctggcactcaccagccgcttcctgtttggactcctgaacgaggagaccaggagccacctggagaagagtctctgctggaaggtctcgccgcacatcaagatggacctgttgcagtggatccaaagcaaagctcagagcgacggctccaccctgcagcagggctccttggagttcttcagctgcttgtacgagatccaggaggaggagtttatccagcaggccctgagccacttccaggtgatcgtggtcagcaacattgcctccaagatggagcacatggtctcctcgttctgtctgaagcgctgcaggagcgcccaggtgctgcacttgtatggcgccacctacagcgcggacggggaagaccgcgcgaggtgctccgcaggagcgcacacgctgttggtgcagctcagaccagagaggaccgttctgctggacgcctacagtgaacatctggcagcggccctgtgcaccaatccaaacctgatagagctgtctctgtaccgaaatgccctgggcagccggggggtgaagctgctctgtcaaggactcagacaccccaactgcaaacttcagaacctgaggctgaagaggtgccgcatctccagctcagcctgcgaggacctctctgcagctctcatagccaataagaatttgacaaggatggatctcagtggcaacggcgttggattcccaggcatgatgctgctttgcgagggcctgcggcatccccagtgcaggctgcagatgattcagttgaggaagtgtcagctggagtccggggcttgtcaggagatggcttctgtgctcggcaccaacccacatctggttgagttggacctgacaggaaatgcactggaggatttgggcctgaggttactatgccagggactgaggcacccagtctgcagactacggactttgtggtggttatttgggatggacctgaataaaatgacccacagtaggttggcagcgcttcgagtaacaaaaccttatttggacattggctgctgaatggtcctatctgctggctctcccctgagatctggacagaggaagatgggagggtgctcatcacccccccagcataatgatcagcctccttcctagagacagactcatgcagattgagatcaaaagtccctctgcttgggatcaaattaatgtttgacagagctggccaggcgtggtggctcatgtatgtaatcctagcacttcgagaggccgaggcaggtggatcacgaggtcaggagtttgagattagcctggccaagatggtgaaaccctgtctctactaaaaataaaaaaaaattagccagg

SEQ ID NO: 2239 - DNA, 3715 bp, Homo sapiens
  source 1..3715: mol_type = genomic DNA
attggtgagtggggcagggcaggagggaactgaagagtgagaaagcattatttcagcaaaaggtctttcctcccttgctctctcctccaaccactggctcagcctctccgcccgctgcctgtgaatgatgcaatggaaggtgtgctggggtcgccctgtgtcccgtgcataggagcatctcagcctccaggtcctctcctttggggctcacggcacccccatgctacgaaccgcaggcagggacggcctctgtcgcctgtccacctacttggaagaactcgaggctgtggaactgaagaagttcaagttatacctggggaccgcgacagagctgggagaaggcaagatcccctggggaagcatggagaaggccggtcccctggaaatggcccagctgctcatcacccacttcgggccagaggaggcctggaggttggctctcagcacctttgagcggataaacaggaaggacctgtgggagagaggacagagagaggacctggtgagggataccccacctggtggcccgtcctcacttgggaaccagtcaacatgccttctggaagtctctcttgtcactccaagaaaagatccccaggaaacctacagggactatgtccgcaggaaattccggctcatggaagaccgcaatgcgcgcctaggggaatgtgtcaacctcagccaccggtacacccggctcctgctggtgaaggagcactcaaaccccatgcaggtccagcagcagcttctggacacaggccggggacacgcgaggaccgtgggacaccaggctagccccatcaagatagagaccctctttgagccagacgaggagcgccccgagccaccgcgcaccgtggtcatgcaaggcgcggcagggataggcaagtccatgctggcacacaaggtgatgctggactgggcggacgggaagctcttccaaggcagatttgattatctcttctacatcaactgcagggagatgaaccagagtgccacggaatgcagcatgcaagacctcatcttcagctgctggcctgagcccagcgcgcctctccaggagctcatccgagttcccgagcgcctccttttcatcatcgacggcttcgatgagctcaagccttctttccacgatcctcagggaccctggtgcctctgctgggaggagaaacggcccacggagctgcttcttaacagcttaattcggaagaagctgctccctgagctatctttgctcatcaccacacggcccacggctttggagaagctccaccgtctgctggagcaccccaggcatgtggagatcctgggcttctctgaggcagaaaggaaggaatacttctacaagtatttccacaatgcagagcaggcgggccaagtcttcaattacgtgagggacaacgagcctctcttcaccatgtgcttcgtccccctggtgtgctgggtggtgtgtacctgcctccagcagcagctggagggtggggggctgttgagacagacgtccaggaccaccactgcagtgtacatgctctacctgctgagtctgatgcaacccaagccgggggccccgcgcctccagcccccacccaaccagagagggttgtgctccttggcggcagatgggctctggaatcagaaaatcctatttgaggagcaggacctccggaagcacggcctagacggggaagacgtctctgccttcctcaacatgaacatcttccagaaggacatcaactgtgagaggtactacagcttcatccacttgagtttccaggaattctttgcagctatgtactatatcctggacgagggggagggcggggcaggcccagaccaggacgtgaccaggctgttgaccgagtacgcgttttctgaaaggagcttcctggcactcaccagccgcttcctgtttggactcctgaacgaggagaccaggagccacctggagaagagtctctgctggaaggtctcgccgcacatcaagatggacctgttgcagtggatccaaagcaaagctcagagcgacggctccaccctgcagcagggctccttggagttcttcagctgcttgtacgagatccaggaggaggagtttatccagcaggccctgagccacttccaggtgatcgtggtcagcaacattgcctccaagatggagcacatggtctcctcgttctgtctgaagcgctgcaggagcgcccaggtgctgcacttgtatggcgccacctacagcgcggacggggaagaccgcgcgaggtgctccgcaggagcgcacacgctgttggtgcagctcagaccagagaggaccgttctgctggacgcctacagtgaacatctggcagcggccctgtgcaccaatccaaacctgatagagctgtctctgtaccgaaatgccctgggcagccggggggtgaagctgctctgtcaaggactcagacaccccaactgcaaacttcagaacctgaggctgaagaggtgccgcatctccagctcagcctgcgaggacctctctgcagctctcatagccaataagaatttgacaaggatggatctcagtggcaacggcgttggattcccaggcatgatgctgctttgcgagggcctgcggcatccccagtgcaggctgcagatgattcagttgaggaagtgtcagctggagtccggggcttgtcaggagatggcttctgtgctcggcaccaacccacatctggttgagttggacctgacaggaaatgcactggaggatttgggcctgaggttactatgccagggactgaggcacccagtctgcagactacggactttgtggctgaagatctgccgcctcactgctgctgcctgtgacgagctggcctcaactctcagtgtgaaccagagcctgagagagctggacctgagcctgaatgagctgggggacctcggggtgctgctgctgtgtgagggcctcaggcatcccacgtgcaagctccagaccctgcggttgggcatctgccggctgggctctgccgcctgtgagggtctttctgtggtgctccaggccaaccacaacctccgggagctggacttgagtttcaacgacctgggagactggggcctgtggttgctggctgaggggctgcaacatcccgcctgcagactccagaaactgtggctggatagctgtggcctcacagccaaggcttgtgagaatctttacttcaccctggggatcaaccagaccttgaccgacctttacctgaccaacaacgccctaggggacacaggtgtccgactgctttgcaagcggctgagccatcctggctgcaaactccgagtcctctggttatttgggatggacctgaataaaatgacccacagtaggttggcagcgcttcgagtaacaaaaccttatttggacattggctgctgaatggtcctatctgctggctctcccctgagatctggacagaggaagatgggagggtgctcatcacccccccagcataatgatcagcctccttcctagagacagactcatgcagattgagatcaaaagtccctctgcttgggatcaaattaatgtttgacagagctggccaggcgtggtggctcatgtatgtaatcctagcacttcgagaggccgaggcaggtggatcacgaggtcaggagtttgagattagcctggccaagatggtgaaaccctgtctctactaaaaataaaaaaaaattagccagg

SEQ ID NO: 2240 - DNA, 3465 bp, Homo sapiens
  source 1..3465: mol_type = genomic DNA
ctctctcctccaaccactggctcagcctctccgcccgctgcctgtgaatgatgcaatggaaggtgtgctggggtcgccctgtgtcccgtgcataggagcatctcagcctccaggtcctctcctttggggctcacggcacccccatgctacgaaccgcaggcagggacggcctctgtcgcctgtccacctacttggaagaactcgaggctgtggaactgaagaagttcaagttatacctggggaccgcgacagagctgggagaaggcaagatcccctggggaagcatggagaaggccggtcccctggaaatggcccagctgctcatcacccacttcgggccagaggaggcctggaggttggctctcagcacctttgagcggataaacaggaaggacctgtgggagagaggacagagagaggacctggtgagggataccccacctggtggcccgtcctcacttgggaaccagtcaacatgccttctggaagtctctcttgtcactccaagaaaagatccccaggaaacctacagggactatgtccgcaggaaattccggctcatggaagaccgcaatgcgcgcctaggggaatgtgtcaacctcagccaccggtacacccggctcctgctggtgaaggagcactcaaaccccatgcaggtccagcagcagcttctggacacaggccggggacacgcgaggaccgtgggacaccaggctagccccatcaagatagagaccctctttgagccagacgaggagcgccccgagccaccgcgcaccgtggtcatgcaaggcgcggcagggataggcaagtccatgctggcacacaaggtgatgctggactgggcggacgggaagctcttccaaggcagatttgattatctcttctacatcaactgcagggagatgaaccagagtgccacggaatgcagcatgcaagacctcatcttcagctgctggcctgagcccagcgcgcctctccaggagctcatccgagttcccgagcgcctccttttcatcatcgacggcttcgatgagctcaagccttctttccacgatcctcagggaccctggtgcctctgctgggaggagaaacggcccacggagctgcttcttaacagcttaattcggaagaagctgctccctgagctatctttgctcatcaccacacggcccacggctttggagaagctccaccgtctgctggagcaccccaggcatgtggagatcctgggcttctctgaggcagaaaggaaggaatacttctacaagtatttccacaatgcagagcaggcgggccaagtcttcaattacgtgagggacaacgagcctctcttcaccatgtgcttcgtccccctggtgtgctgggtggtgtgtacctgcctccagcagcagctggagggtggggggctgttgagacagacgtccaggaccaccactgcagtgtacatgctctacctgctgagtctgatgcaacccaagccgggggccccgcgcctccagcccccacccaaccagagagggttgtgctccttggcggcagatgggctctggaatcagaaaatcctatttgaggagcaggacctccggaagcacggcctagacggggaagacgtctctgccttcctcaacatgaacatcttccagaaggacatcaactgtgagaggtactacagcttcatccacttgagtttccaggaattctttgcagctatgtactatatcctggacgagggggagggcggggcaggcccagaccaggacgtgaccaggctgttgaccgagtacgcgttttctgaaaggagcttcctggcactcaccagccgcttcctgtttggactcctgaacgaggagaccaggagccacctggagaagagtctctgctggaaggtctcgccgcacatcaagatggacctgttgcagtggatccaaagcaaagctcagagcgacggctccaccctgcagcagggctccttggagttcttcagctgcttgtacgagatccaggaggaggagtttatccagcaggccctgagccacttccaggtgatcgtggtcagcaacattgcctccaagatggagcacatggtctcctcgttctgtctgaagcgctgcaggagcgcccaggtgctgcacttgtatggcgccacctacagcgcggacggggaagaccgcgcgaggtgctccgcaggagcgcacacgctgttggtgcagctaccagagaggaccgttctgctggacgcctacagtgaacatctggcagcggccctgtgcaccaatccaaacctgatagagctgtctctgtaccgaaatgccctgggcagccggggggtgaagctgctctgtcaaggactcagacaccccaactgcaaacttcagaacctgaggctgaagaggtgccgcatctccagctcagcctgcgaggacctctctgcagctctcatagccaataagaatttgacaaggatggatctcagtggcaacggcgttggattcccaggcatgatgctgctttgcgagggcctgcggcatccccagtgcaggctgcagatgattcagttgaggaagtgtcagctggagtccggggcttgtcaggagatggcttctgtgctcggcaccaacccacatctggttgagttggacctgacaggaaatgcactggaggatttgggcctgaggttactatgccagggactgaggcacccagtctgcagactacggactttgtggctgaagatctgccgcctcactgctgctgcctgtgacgagctggcctcaactctcagtgtgaaccagagcctgagagagctggacctgagcctgaatgagctgggggacctcggggtgctgctgctgtgtgagggcctcaggcatcccacgtgcaagctccagaccctgcggctggatagctgtggcctcacagccaaggcttgtgagaatctttacttcaccctggggatcaaccagaccttgaccgacctttacctgaccaacaacgccctaggggacacaggtgtccgactgctttgcaagcggctgagccatcctggctgcaaactccgagtcctctggttatttgggatggacctgaataaaatgacccacagtaggttggcagcgcttcgagtaacaaaaccttatttggacattggctgctgaatggtcctatctgctggctctcccctgagatctggacagaggaagatgggagggtgctcatcacccccccagcataatgatcagcctccttcctagagacagactcatgcagattgagatcaaaagtccctctgcttgggatcaaattaatgtttgacagagctggccaggcgtggtggctcatgtatgtaatcctagcacttcgagaggccgaggcaggtggatcacgaggtcaggagtttgagattagcctggccaagatggtgaaaccctgtctctactaaaaataaaaaaaaattagccaggc

SEQ ID NO: 2241 - DNA, 623 bp, Homo sapiens
  source 1..623: mol_type = genomic DNA
aaaccacattcccaaaactttccgttgcaaatttccaaactttcccagtttctaccctcagcctttcaaagtcccgcccctcattccagttcccacacccagccttcttcaggtcccactgctgaccgccagaccaaactcctacagctgccgcctgcatcccagaccgcctgcatcccgctcggagcgggtccgagccctgctccctcccagcgcaccttttccacgacacggatgacaccagcgatgagagagtctcggtcctgatacttcttagcgctggtgtgcagggcgcggatggcgtcggggcgccccgaggagctgtgggaggccgtggtgggggccgctgagcgcttccgggcccggactggcacggagctggtgctgctgaccgcggccccgccgccaccaccccgcccgggcccctgtgcctatgctgcccatggtcgaggagccctggcggaggcagcgcgccgttgcctccacgacatcgcactggcccacagggctgccactgctgctcggcctcctgcgcccccaccagcaccacagccacccagtcccacacccagcccaccccggcctaccctggccagagaggacaacgaggaggacgaggatga

SEQ ID NO: 2242 - DNA, 2025 bp, Homo sapiens
  source 1..2025: mol_type = genomic DNA
atttcctgttttcttcctagaccagtgggtcctccctggaccccgggcgaggttgggaggtctcggggcagctgagcgtggccccaggcgctcaccccatggctaccgcgttcatgctcaggttcctcacatcttggggtgtggggtactaaaatttcgacaggaggggtggttccacccctctcctccttagctcttttccctcctccctgcatccaaagaggacagccacatcgtgctccccctcctgtggggaacacgtctcactttcctctaatctctccctgatcttacacgaaactcgtctatcggggcgggttcttcctccatctctcagctccttggaggaaacaggacctcctctagaagctgaaggggcgcggatggcgtcggggcgccccgaggagctgtgggaggccgtggtgggggccgctgagcgcttccgggcccggactggcacggagctggtgctgctgaccgcggccccgccgccaccaccccgcccgggcccctgtgcctatgctgcccatggtcgaggagccctggcggaggcagcgcgccgttgcctccacgacatcgcactggcccacagggctgccactgctgctcggcctcctgcgcccccaccagcaccacagccacccagtcccacacccagcccaccccggcctaccctggccagagaggacaacgaggaggacgaggatgagcccacagagacagagacctccggggagcagctgggcattagtgataatggagggctctttgtgatggatgaggacgccaccctccaggaccttccccccttctgtgagtcagaccccgagagtacagatgatggcagcctgagcgaggagacccccgccggcccccccacctgctcagtgcccccagcctcagccctacccacacagcagtacgccaagtccctgcctgtgtctgtgcccgtctggggcttcaaggagaagaggacagaggcgcggtcatcagatgaggagaatgggccgccctcttcgcccgacctggaccgcatcgcggcgagcatgcgcgcgctggtgctgcgagaggccgaggacacccaggtcttcggggacctgccacggccgcggcttaacaccagcgacttccagaagctgaagcggaaatattgaagtccagggagggagcgccccgggccgcgtccgccccgtcccacactacgcccccgccccactcccggggcctgctaatctgaggccgatccgggaccggcctccttgcgtctcccattcccaagattgtcccgcctctgccaatccccgccgtccttccagcccacgacctgccgcgccgaggagcggcatctgtcccgtttcccgattgggtctgtcgtctctctccgcctagcgacagattccttctattaagggattggctcgctgagttctaagctctaaatgggtcaactcctttgttttccgcctagcgacaagggatttgctcgcacggcattggctccatcccctagtcgctggacagctctttttttgattggctcaaatcctgtaaagggcttgaccagtctctacatagtcaccgtccgcttttcctgagttctccctcccaattggctccagcttcctgggggcgtggccaagccctcctcttcccagaattggcccggggccttcaatttacgttctttacactacggggactggggtcgtctttgcccacgtcccgacaacttgttccctgaccccctcagggatggccccaaactgtccctgcctctggcaccccctttcattggttccatccatccccacaacagcctgccaatcgaagcccgtccctgcatccaggatggtaccagctcccgcccctcgccccccacctccacaggtgccttaaagggccctcgtccacccaaggtggggggcaggggccctcactctccggccctggtgtgggggagagagtgaggggttgggggatcggcagttgggaggggcgctctgagattaaagagttttacctctg

SEQ ID NO: 2243 - DNA, 1911 bp, Homo sapiens
  source 1..1911: mol_type = genomic DNA
gggcgcgacagctggaagagccgaacggataagagaagaggaggtgagaggagctgtacaccacaagaggcactgagggactcaggataacgggatgaagccgtcagtgcccccagaaacgaagcggccccggacgaatttctgagtcaccgtcgcgagaaagcgggctgagccgccattttgaagcctggcaaaccgaagcaagaaatgctgccgtgttggatctttgccagccttcgtgccgaatgggagcagggcgcggatggcgtcggggcgccccgaggagctgtgggaggccgtggtgggggccgctgagcgcttccgggcccggactggcacggagctggtgctgctgaccgcggccccgccgccaccaccccgcccgggcccctgtgcctatgctgcccatggtcgaggagccctggcggaggcagcgcgccgttgcctccacgacatcgcactggcccacagggctgccactgctgctcggcctcctgcgcccccaccagcaccacagccacccagtcccacacccagcccaccccggcctaccctggccagagaggacaacgaggaggacgaggatgagcccacagagacagagacctccggggagcagctgggcattagtgataatggagggctctttgtgatggatgaggacgccaccctccaggaccttccccccttctgtgagtcagaccccgagagtacagatgatggcagcctgagcgaggagacccccgccggcccccccacctgctcagtgcccccagcctcagccctacccacacagcagtacgccaagtccctgcctgtgtctgtgcccgtctggggcttcaaggagaagaggacagaggcgcggtcatcagatgaggagaatgggccgccctcttcgcccgacctggaccgcatcgcggcgagcatgcgcgcgctggtgctgcgagaggccgaggacacccaggtcttcggggacctgccacggccgcggcttaacaccagcgacttccagaagctgaagcggaaatattgaagtccagggagggagcgccccgggccgcgtccgccccgtcccacactacgcccccgccccactcccggggcctgctaatctgaggccgatccgggaccggcctccttgcgtctcccattcccaagattgtcccgcctctgccaatccccgccgtccttccagcccacgacctgccgcgccgaggagcggcatctgtcccgtttcccgattgggtctgtcgtctctctccgcctagcgacagattccttctattaagggattggctcgctgagttctaagctctaaatgggtcaactcctttgttttccgcctagcgacaagggatttgctcgcacggcattggctccatcccctagtcgctggacagctctttttttgattggctcaaatcctgtaaagggcttgaccagtctctacatagtcaccgtccgcttttcctgagttctccctcccaattggctccagcttcctgggggcgtggccaagccctcctcttcccagaattggcccggggccttcaatttacgttctttacactacggggactggggtcgtctttgcccacgtcccgacaacttgttccctgaccccctcagggatggccccaaactgtccctgcctctggcaccccctttcattggttccatccatccccacaacagcctgccaatcgaagcccgtccctgcatccaggatggtaccagctcccgcccctcgccccccacctccacaggtgccttaaagggccctcgtccacccaaggtggggggcaggggccctcactctccggccctggtgtgggggagagagtgaggggttgggggatcggcagttgggaggggcgctctgagattaaagagttttacctctgagataaa

SEQ ID NO: 2244 - DNA, 3640 bp, Homo sapiens
  source 1..3640: mol_type = genomic DNA
ctggattagaatatctgccctcctaaaggcaggcaggatggcggtcaggatttagaacaggccccggatctagactttctgagtccaggtcccagccctgcctcttccagttgtggcccttcaagatgctgactgcccctgggcctgagtttgcaactgtaaaatggggtgaactgtaactaaagctcctgtctcatagtgtaggtgaaagggtgggatgagaaggttgatcccatcttgggtccttgcgtggcttctgggaggtggtggataaacctcttccttcccttggggctttgaactccctgagtgagtcagataggtgagatgccaggtgtggaatcccagcactgaataggtgctcagcaaacaccaacatcaatgatcgtgagtcataaaaggcctgcaaatttcattcagactccagactccctgctcccttcaccctggtgggctggaccacagctgtgcctgaatccgtgcagtggcggtgtgcttactgcctcccggaagagcgtcttccgcagcccagcagctctggctcaaccacgctggttaatggggaagaaaatgaggcacagagagggccagtgagccatctaaggtcacacagcaggtttgagacagagtcagggcaaggacccagcccccctgccctcgctcttctcacccagtaaggagacgcaccctgcattgtctgcttagggccgacctgtcctgcaaacacaaatccctgaccttgggggaattcacagtctgatgcaggaggcagccaggttacagctgtcacaagctcaggtgacatgaatgctcatggaggaagcccagggcatcggatgggctcctgaagtcatctgatgcaccctgggggatcagggacaacagaggacctgccagaacagtcttgtaggaaaagccgtgtggatttcccagcacagagagcagcgccagcaccatttcagccccgactctctgaggcctcagtcatagaaccagccagttccctctggaaggaagtgtgctgggaaggtggccactcagacagtgtgggaccccctatggagcagactggctggatctatgggcgagggaaagtttcttccaccctaggatgagtgaaaggttggtggggaatggagcacaagtcatcaaggtcagggaccacgttttctgaaggcctcgggcctcagaggctctggaaggccgtggaggcaggatggcccaggagctggggatggccagaacacctagagcctccagggcctgccctgaggactatggcgaggagtagcatcagctccgggtgctgaaggaaccccctgggccttgtgcaggacactcttgacgggatggctgggcgacggagcagggtggcatcatccatcaaattcaacacaagccccacgtggaattctaaattttctagacaccatgttaaaagagtaaaaaaagcagatgaaattcctttttttttttttttttgcccaggctggcttcgaactcttgggctcggtgatccgcctgcctcggcctcccaaagtgctggggttgcaggcctgagccaccacgcccggctcgttcggctttattgtactcagtcttcagaacccagtgcaggttttattgttagaggcctctctgctaggactctctgctaggactccctgcctttccagtactccctgttcacatgtggctggcggctcccacagaggccagggcagggccaaaggggaaggagtacagtgacttggggcaggaggaatgggttggggcagaggacgtcgccagggtctgggcctgcgaggactggatggtgagaatcctggggagtagcaggtttggggaggacacacagcaccgctgggacaaggtgggtggagggtggtgagtgccatccaggggacgggcgggcactctgagtgggtggcgatgatgtaggccgccaagcctcagccccctctgtcctgctctggcccgcagggcgcggatggcgtcggggcgccccgaggagctgtgggaggccgtggtgggggccgctgagcgcttccgggcccggactggcacggagctggtgctgctgaccgcggccccgccgccaccaccccgcccgggcccctgtgcctatgctgcccatggtcgaggagccctggcggaggcagcgcgccgttgcctccacgacatcgcactggcccacagggctgccactgctgctcggcctcctgcgcccccaccagcaccacagccacccagtcccacacccagcccaccccggcctaccctggccagagaggacaacgaggaggacgaggatgagcccacagagacagagacctccggggagcagctgggcattagtgataatggagggctctttgtgatggatgaggacgccaccctccaggaccttccccccttctgtgagtcagaccccgagagtacagatgatggcagcctgagcgaggagacccccgccggcccccccacctgctcagtgcccccagcctcagccctacccacacagcagtacgccaagtccctgcctgtgtctgtgcccgtctggggcttcaaggagaagaggacagaggcgcggtcatcagatgaggagaatgggccgccctcttcgcccgacctggaccgcatcgcggcgagcatgcgcgcgctggtgctgcgagaggccgaggacacccaggtcttcggggacctgccacggccgcggcttaacaccagcgacttccagaagctgaagcggaaatattgaagtccagggagggagcgccccgggccgcgtccgccccgtcccacactacgcccccgccccactcccggggcctgctaatctgaggccgatccgggaccggcctccttgcgtctcccattcccaagattgtcccgcctctgccaatccccgccgtccttccagcccacgacctgccgcgccgaggagcggcatctgtcccgtttcccgattgggtctgtcgtctctctccgcctagcgacagattccttctattaagggattggctcgctgagttctaagctctaaatgggtcaactcctttgttttccgcctagcgacaagggatttgctcgcacggcattggctccatcccctagtcgctggacagctctttttttgattggctcaaatcctgtaaagggcttgaccagtctctacatagtcaccgtccgcttttcctgagttctccctcccaattggctccagcttcctgggggcgtggccaagccctcctcttcccagaattggcccggggccttcaatttacgttctttacactacggggactggggtcgtctttgcccacgtcccgacaacttgttccctgaccccctcagggatggccccaaactgtccctgcctctggcaccccctttcattggttccatccatccccacaacagcctgccaatcgaagcccgtccctgcatccaggatggtaccagctcccgcccctcgccccccacctccacaggtgccttaaagggccctcgtccacccaaggtggggggcaggggccctcactctccggccctggtgtgggggagagagtgaggggttgggggatcggcagttgggaggggcgctctgagattaaagagttttacctctgagataaat

SEQ ID NO: 2245 - DNA, 2370 bp, Homo sapiens
  source 1..2370: mol_type = genomic DNA
agctaaggccatgttaatacggggctgtcccatctctctgcggggcgcgacagctggaagagccgaacggataagagaagaggaggtgagaggagctgtacaccacaagaggcactgagggactcaggataacgggatgaagccgtcagtgcccccagaaacgaagcggccccggacgaatttctgagtcaccgtcgcgagaaagcgggctgagccgccattttgaagcctggcaaaccgaagcaagaaatgctgccgtgttggatctttgccagccttcgtgccgaatgggagcaggttggagggagggagagccaatatacactatgggctgattaagcccggttggctgccatgttgttaacgagcaccgatttcctctacttttgtcgaagaagtttattgtgggtcagggacgtcaggtcgcttgccttcgtttactgtggtcatgattgagcatatgaggacggccattattgttgggggcaaatggaaatgctctaggcggggccatttttcttaggggcaagctgtcgtcacccttgtcaactggttcggatgaagcccctgtggccgccatcttgatctcgggcggccccgataagggaggcggagtgtgcggagaggaggcggggcaactgcgcggacgtgacgcaaggcgccgccatgtcttttgagggcggtgacggcgccgggccggccatgctggctacgggcacggcgcggatggcgtcggggcgccccgaggagctgtgggaggccgtggtgggggccgctgagcgcttccgggcccggactggcacggagctggtgctgctgaccgcggccccgccgccaccaccccgcccgggcccctgtgcctatgctgcccatggtcgaggagccctggcggaggcagcgcgccgttgcctccacgacatcgcactggcccacagggctgccactgctgctcggcctcctgcgcccccaccagcaccacagccacccagtcccacacccagcccaccccggcctaccctggccagagaggacaacgaggaggacgaggatgagcccacagagacagagacctccggggagcagctgggcattagtgataatggagggctctttgtgatggatgaggacgccaccctccaggaccttccccccttctgtgagtcagaccccgagagtacagatgatggcagcctgagcgaggagacccccgccggcccccccacctgctcagtgcccccagcctcagccctacccacacagcagtacgccaagtccctgcctgtgtctgtgcccgtctggggcttcaaggagaagaggacagaggcgcggtcatcagatgaggagaatgggccgccctcttcgcccgacctggaccgcatcgcggcgagcatgcgcgcgctggtgctgcgagaggccgaggacacccaggtcttcggggacctgccacggccgcggcttaacaccagcgacttccagaagctgaagcggaaatattgaagtccagggagggagcgccccgggccgcgtccgccccgtcccacactacgcccccgccccactcccggggcctgctaatctgaggccgatccgggaccggcctccttgcgtctcccattcccaagattgtcccgcctctgccaatccccgccgtccttccagcccacgacctgccgcgccgaggagcggcatctgtcccgtttcccgattgggtctgtcgtctctctccgcctagcgacagattccttctattaagggattggctcgctgagttctaagctctaaatgggtcaactcctttgttttccgcctagcgacaagggatttgctcgcacggcattggctccatcccctagtcgctggacagctctttttttgattggctcaaatcctgtaaagggcttgaccagtctctacatagtcaccgtccgcttttcctgagttctccctcccaattggctccagcttcctgggggcgtggccaagccctcctcttcccagaattggcccggggccttcaatttacgttctttacactacggggactggggtcgtctttgcccacgtcccgacaacttgttccctgaccccctcagggatggccccaaactgtccctgcctctggcaccccctttcattggttccatccatccccacaacagcctgccaatcgaagcccgtccctgcatccaggatggtaccagctcccgcccctcgccccccacctccacaggtgccttaaagggccctcgtccacccaaggtggggggcaggggccctcactctccggccctggtgtgggggagagagtgaggggttgggggatcggcagttgggaggggcgctctgagattaaagagttttacctctgag

SEQ ID NO: 2246 - DNA, 3075 bp, Homo sapiens
  source 1..3075: mol_type = genomic DNA
attgccccgggaccaaggcggggagaatggtccagcccgcgttcggatgctgacgtgcgttccacagggggcagggctcaaggagtcgcctgagccgggggggcggggccatgggaggttcttccctggggcggtggacgggagggtgacggcgcgtttataagagatcggtgtttgccaaggccgtgccggattctcgagagccaaggcctgagagaagagctgatcactagacggggcgtttcgcatacactgaagcgagggaatgcgtcctcagtgcttaccctgtagccggctccttccatagtcgccgccgaaggccccactgccccgcctcctccttttcctagtcagcgtgttgtcacttccggagaaaacagttcccctccgggccggacagtggtagcggcccgacccgttctagagaaggagcgggtgaaaccatttttcagaagggggttattccactggaacctcgagggtggatcggagtcacgtggcgcagacgctgaaggtggatccggctacggagagtgcgcaggcgcagtgttcgccctctcgccacgaagtaaacaagtgggagggtctgagagctgcaccacctggggcaagcacgccttgaaacgcccacttccttctccatattgtatactggaattgaagccaaggaggtaccattttgctcgagggcatggcctaagccggtcagctaaggccatgttaatacggggctgtcccatctctctgcggggcgcgacagctggaagagccgaacggataagagaagaggaggtgagaggagctgtacaccacaagaggcactgagggactcaggataacgggatgaagccgtcagtgcccccagaaacgaagcggccccggacgaatttctgagtcaccgtcgcgagaaagcgggctgagccgccattttgaagcctggcaaaccgaagcaagaaatgctgccgtgttggatctttgccagccttcgtgccgaatgggagcaggttggagggagggagagccaatatacactatgggctgattaagcccggttggctgccatgttgttaacgagcaccgatttcctctacttttgtcgaagaagtttattgtgggtcagggacgtcaggtcgcttgccttcgtttactgtggtcatgattgagcatatgaggacggccattattgttgggggcaaatggaaatgctctaggcggggccatttttcttaggggcaagctgtcgtcacccttgtcaactggttcggatgaagcccctgtggccgccatcttgatctcgggcggccccgataagggaggcggagtgtgcggagaggaggcggggcaactgcgcggacgtgacgcaaggcgccgccatgtcttttgagggcggtgacggcgccgggccggccatgctggctacgggcacggcgcggatggcgtcggggcgccccgaggagctgtgggaggccgtggtgggggccgctgagcgcttccgggcccggactggcacggagctggtgctgctgaccgcggccccgccgccaccaccccgcccgggcccctgtgcctatgctgcccatggtcgaggagccctggcggaggcagcgcgccgttgcctccacgacatcgcactggcccacagggctgccactgctgctcggcctcctgcgcccccaccagcaccacagccacccagtcccacacccagcccaccccggcctaccctggccagagaggacaacgaggaggacgaggatgagcccacagagacagagacctccggggagcagctgggcattagtgataatggagggctctttgtgatggatgaggacgccaccctccaggaccttccccccttctgtgagtcagaccccgagagtacagatgatggcagcctgagcgaggagacccccgccggcccccccacctgctcagtgcccccagcctcagccctacccacacagcagtacgccaagtccctgcctgtgtctgtgcccgtctggggcttcaaggagaagaggacagaggcgcggtcatcagatgaggagaatgggccgccctcttcgcccgacctggaccgcatcgcggcgagcatgcgcgcgctggtgctgcgagaggccgaggacacccaggtcttcggggacctgccacggccgcggcttaacaccagcgacttccagaagctgaagcggaaatattgaagtccagggagggagcgccccgggccgcgtccgccccgtcccacactacgcccccgccccactcccggggcctgctaatctgaggccgatccgggaccggcctccttgcgtctcccattcccaagattgtcccgcctctgccaatccccgccgtccttccagcccacgacctgccgcgccgaggagcggcatctgtcccgtttcccgattgggtctgtcgtctctctccgcctagcgacagattccttctattaagggattggctcgctgagttctaagctctaaatgggtcaactcctttgttttccgcctagcgacaagggatttgctcgcacggcattggctccatcccctagtcgctggacagctctttttttgattggctcaaatcctgtaaagggcttgaccagtctctacatagtcaccgtccgcttttcctgagttctccctcccaattggctccagcttcctgggggcgtggccaagccctcctcttcccagaattggcccggggccttcaatttacgttctttacactacggggactggggtcgtctttgcccacgtcccgacaacttgttccctgaccccctcagggatggccccaaactgtccctgcctctggcaccccctttcattggttccatccatccccacaacagcctgccaatcgaagcccgtccctgcatccaggatggtaccagctcccgcccctcgccccccacctccacaggtgccttaaagggccctcgtccacccaaggtggggggcaggggccctcactctccggccctggtgtgggggagagagtgaggggttgggggatcggcagttgggaggggcgctctgagattaaagagttttacctctg

SEQ ID NO: 2247 - DNA, 1096 bp, Homo sapiens
  source 1..1096: mol_type = genomic DNA
aagcgaccgagggactgggagtcgttagtgagagtttcactcttgttgcctaggctggagtgcaatggtgcgatcttggctcatcacgaccttcgcctcccaggttcaagtgattgtcccatttcagcctcccgagtagctgggattacaggatgacgcggcatggcaagaactgcaccgcaggggccgtctacacctaccacgagaagaagaaggacacagcggcctcgggctatgggacccagaacattcgactgagccgggatgccgtgaaggacttcgactgctgttgtctctccctgcagccttgccacgatcctgttgtcaccccagatggctacctgtatgagcgtgaggccatcctggagtacattctgcaccagaagaaggagattgcccggcagatgaaggcctacgagaagcagcggggcacccggcgcgaggagcagaaggagcttcagcgggcggcctcgcaggaccatgtgcggggcttcctggagaaggagtcggctatcgtgagccggcccctcaaccctttcacagccaaggccctctcgggcaccagcccagatgatgtccaacctgggcccagtgtgggtcctccaagtaaggacaaggacaaagtgctgcccagcttctggatcccgtcgctgacgcccgaagccaaggccaccaagctggagaagccgtcccgcacggtgacctgccccatgtcagggaagcccctgcgcatgtcggacctgacgcccgtgcacttcacaccgctagacagctccgtggaccgcgtggggctcatcacccgcagcgagcgctacgtgtgtgccgtgacccgcgacagcctgagcaacgccaccccctgcgctgtgctgcggccctctggggctgtggtcaccctcgaatgcgtggagaagctgattcggaaggacatggtggaccctgtgactggagacaaactcacagaccgcgacatcatcgtgctgcagcggggcggtaccggcttcgcgggctccggagtgaagctgcaagcggagaaatcacggccggtgatgcaggcctgagtgtgtgcgggagaccaaataaaccggcttgggtgcgc

SEQ ID NO: 2248 - DNA, 1181 bp, Homo sapiens
  source 1..1181: mol_type = genomic DNA
cacttctgccgcccctgtttcaagggataagaaaccctgcgacaaaacctcctccttttccaagcggctgccgaagatggcggaggtgcaggtcctggtgcttgatggtcgaggccatctcctgggccgcctggcggccatcgtggctaaacaggtactgctgggccggaaggtggtggtcgtacgctgtgaaggcatcaacatttctggcaatttctacagaaacaagttgaagtacctggctttcctccgcaagcggatgaacaccaacccttcccgaggcccctaccacttccgggcccccagccgcatcttctggcggaccgtgcgaggtatgctgccccacaaaaccaagcgaggccaggccgctctggaccgtctcaaggtgtttgacggcatcccaccgccctacgacaagaaaaagcggatggtggttcctgctgccctcaaggtcgtgcgtctgaagcctacaagaaagtttgcctatctggggcgcctggctcacgaggttggctggaagtaccaggcagtgacagccaccctggaggagaagaggaaagagaaagccaagatccactaccggaagaagaaacagctcatgaggctacggaaacaggccgagaagaacgtggagaagaaaattgacaaatacacagaggtcctcaagacccacggactcctggtctgagcccaataaagactgttaattcctcatgcgttgcctgcccttcctccattgttgccctggaatgtacgggacccaggggcagcagcagtccaggtgccacaggcagccctgggacataggaagctgggagcaaggaaagggtcttagtcactgcctcccgaagttgcttgaaagcactcggagaattgtgcaggtgtcatttatctatgaccaataggaagagcaaccagttactatgagtgaaagggagccagaagactgattggagggccctatcttgtgagtggggcatctgttggactttccacctggtcatatactctgcagctgttagaatgtgcaagcacttggggacagcatgagcttgctgttgtacacagggtatttctagaagcagaaatagactgggaagatgcacaaccaaggggttacaggcatcgcccatgctcctcacctgtattttgtaatcagaaataaattgcttttaaagaaa

SEQ ID NO: 2249 - DNA, 3725 bp, Homo sapiens
  source 1..3725: mol_type = genomic DNA
atgacctgctgctcacaggttcccccacgccgcagaccgagtctcgctctgtcgcccaggttggactgcaatggtttgaacggtgtccccgggagcatctgggactttgtttccggcagcttctcccccagcccctcccccatcctgagtgccggccccccatcctcttcgagtgcaagtccaaacggagctgagctggcccgggtcaggcggcagctggacgaggccaagaggaagatccggcagtgggaggagtcctggcagcaggtgaagcaggtctgcgatgcctggcagcgagaggcgcaggaggccaaggagcgtgcccgtgtggccgatagcgaccggcagctggcgctgcagaagaaggaggaggtggaggcacaggtgaagcagctgcaggaggagctggagggcctgggcgtagcctccacactgccggggctgcggggctgtggggacatcggcaccattcccctgccgaagctgcactcgctgcagagtcagctgcgcctggacctggaggcggtggacggcgtgatcttccagctccgcgccaagcagtgtgtggcctgccgggagcgggcccacggtgctgtcctgcggccctgtcagcaccacatcctctgtgagccgtgtgcggccaccgcacctgagtgcccctactgcaagggccagcccctgcagtggtgacctcagcggggacagccacctcctgctgggcaccctggctccagcgctcctcctgaccacggacatgtcgtcactcgcttctggtgccaccgacgtgaggaccgaggctgggagcccttcctgttacacgttatcatgaggctgggagccccgcctgcgcttggcctgacagcctttcctgtcacacgttgtcacctatctagtcctaccgacggtttcaaggtattttcctcaaaaaccttaaatgcaaacccacagaacccgcctgcctgtccctgaggggcctggtgcctccgggatccacgcggcgctgtgatcacagcagtttgtggtcctgacactactgtgactaggccactgggagctggggtctttcaaagcactttgtaaaccgaggaatttagttagaggttataaattgctctaagctgctttctgtttttttttaatatgcgataatatgaagctttatatgtgtactgtgaacttaaatatttcatatcagtttattgtcaattcatagtatgctaaatatattagatttcatattctgaaactagtacttatgaaatgagtgtttatctagtagtaagacctaggatttttacattttccaattaagtgcaaatagtatttataagcagagtgattatggattgagatgtttttaacttgatggaaggagctagttttcctgagcctgtgtgtgcaccaggcactggggctgatgttccagcctcgtggcgtgggagcaggagagctccgtcctgcatttctgtggtccgtggccgctgtttctgtgcgcctgcgcctcggagagcaagtgaaggagcatcatgggttttgttttctcccttaaccctctgaaagacagtttgatactaacaaaaaacgcagcagaggggatccgacgtcagagcttttagaattacttttttaagcagctgtcttctggctgggtgcggtggctcatgcctgtgatcccagcactttgggaggcgggtggatcacctaaggtcaggagttcaagaccagcctggccaacatggtgcaaccccgtcttagtaaaaatacaaaaattggcctggcgtgagagcgggcacctgtagtcccagctactcgggaggctgaggcaggagaatcgcttgaacctgggaggcagaggttgcagtgagccgagatcgcgccaccgcactccagcccgggtgacagagcgagactctggctcaaaaaaaaaaaaaaaaagctgttttctgattactcagagctgtcctaggcaatggtgctttgtagctccttggagatgtcgctgggcgtcctggcaggggtcaggcagtgaactgggagagtggttgcctccccagcacccgtgaccaccctggtcctgctcgtgtgggagatgctcgggccgtgtgtgcgccagggtccggggtgccgggtgtatgtggcagtcacctgacccgcgctgccagttatcatcggagctcatccatgtggccagtgaggtcacaggagaggacccggccacagcctctcagtggcctggagcacacgggggaagcgaccccccccaggtcccggctctgctgtggtcccctgtcccgtctgcccctggagcgacagtgtggtttcggccgcagcagaaacgtgactgagaacgcatccccgcgatgacctgacccttctgctcagggctgggactgtccctaggagttgagcaggaacaggcatctgtggtttacggcgacctggctctccgcgggccacgtgggtggtgagggcacacgagtgggaagcggcaccgacgtgtttctccccgaccgtggctttgccaaagacttttaatagcattttttaagtgcaaaacgtctaggtaaaaatctttatcatcagtgaccaaattagaatgtatttaatatagtaggtggtttaagaactgttttaacgtaagacaaactgatagcaacattctgttgttttaaaggaagtgggtccgtgacattctgcagctagtccactactccaaggtaactatcgacttggtttcagtgaatctattttgtttttaactacagtgatttattagctcagtatctagaaattacgtatattttgtgctactgtcatcgatgtgtaaactctgtttttatttgtatttatgcacttggttcccatttggagcctctggtcttttctgggataagtggtgtctgccgagacatctcccggttgtcagtggtcaggagcagctgagctctagtctgccagctgctctgctctttctgggaaggaggtggcgcccgcccctcagggtgtctccagggctcagcttccggggtggtagagctggggagccccaggggtggggggacagctgggagatggaggtggcacctgctcccctagatcagtactggctctgaggacaggtgagcagtgggaagaccaaagaatggctggcagcgctgccagggttggaaatgggggcaagatcctggggctgtgtgccctggggcctccctcacctgtcttggtggccatggcctcagggatggctcctaggtggctgaggcacagcagtggctggaaggtgccccgtggaggctgaggtggaggcgcgcccagcagctcccccctgtggccatggcgggcacggggcgtaggagctggctggcggccggctctgcatgttcttgttgcctgtcgtctgtaactctagtgttcgacattcgccgtgatacagtggtgtcacgacgtgtgtaactgtggtcagcagaccttgttccgcgtggacgcctcaagtggattaatttctggaagcctcaatctgtatgtttgagtatttacatgagaatgttatttgaatggaattttcttaacccagaaggtagtatttataatcatttacttgtagcgaactgtttaaagttaacacttgtttaaatttttttacactatagcatttatgcaatggtttacagaattcatggagttatttttatcagtatgggaattaattaaaaccttgaatcttt

SEQ ID NO: 2250 - DNA, 3208 bp, Homo sapiens
  source 1..3208: mol_type = genomic DNA
acagcgggcgcgcaggccggccccggggcctccatgatggaggagcgagcggccgccgcggtcgccgccgccgcctcctcctgccgtccgctcggctcaggcgcgggccctggccccactggggcggccccggtctccgcccctgcccccgggccgggcccggcaggtaagggaggcggcggcggaggcagccccgggcccacggcgggcccggagcccctgagcctgccggggatcctgcactttatccagcacgagtgggcgcgcttcgaagccgagaaagcccgctgggaggccgagcgcgccgagttacaggctcaggtggccttccttcagggagagaggaaagggcaggagaatctaaagacggacctggtgcggcggatcaagatgctagagtatgcgctgaagcaggaaagggccaaatatcataaactgaagtttgggacagacctgaaccagggggagaagaaagcagatgtgtcagaacaagtctccaatggccccgtggaatcggtcaccctggagaacagcccgttggtgtggaaggaggggcggcagcttctccgacagtacctggaagaggtgggctacacagacaccatcctcgacatgcggtccaagcgcgtccgttccctgctgggccgctcgctggagctcaacggggcagtggagccgagtgaaggggcccccagggctccaccaggccctgcagggctcagtggtggggagtcgctgctggtgaaacagatcgaggagcagataaagaggaacgcggcaggcaaagatggcaaagagcgcttgggcggctcagtgctggggcagatccccttcctgcagaactgcgaggacgaagacagcgacgaggacgatgagctggacagcgtgcagcacaagaagcagcgtgtgaagctcccatccaaggctctggtgcccgaaatggaagacgaggatgaggaagacgactctgaggatgctatcaatgagtttgatttcctgggctcaggagaggatggggaaggggctccagaccctcggcggtgcactgtggatgggagcccccatgagctggaaagccgtcgggtcaaactccaaggcattctggctgacctgcgggatgtggatgggctgcccccaaaagtgactggcccgcctcctggcacaccccagccccggccacatgaaggttcctttggcttctcctcagacgtcttcatcatggacactatcgggggcggggaggtgagcctgggggacttggcagatctcaccgtcaccaacgacaacgacctcagctgcgatctgtctgacagcaaagatgcttttaagaagacgtggaaccccaagttcaccctgcgctcgcactacgacggcattcgttccctggccttccaccacagccagtcggctctgctcaccgcctccgaggacggcacgctcaagctctggaacctgcagaaggcggtcacggccaagaagaatgcggcgctagatgtggaacctatacatgctttccgggctcacaggggcccagtgttggctgtggctatgggcagcaacagtgaatactgctacagtggcggggcagatgcctgcatccatagttggaagattccagacctcagcatggatccctatgatggctacgacccaagcgtgctgagccacgtcctggagggccacggggacgccgtgtggggcctggccttcagtcccacctcccagcgcctggcctcctgttctgctgatggcaccgtccgcatctgggaccccagcagcagcagcccggcctgcctctgcaccttccccacagccagcgagcacggggtccccacctcagtggccttcaccagcaccgagcctgcccacatcgtggcctccttccgctctggcgacaccgtcttgtatgacatggaggttggcagtgccctcctcacgctggagtcccggggcagcagcggtccaacccagatcaaccaagtggtgagtcatccaaaccagcctctcaccatcaccgcccacgacgacaggggcatccgcttcctggacaatcggacaggtaagccggtgcactccatggttgcacacctggacgcagtcacctgcctagccgtggaccccaacggcgcattcctgatgtcaggaagccatgactgctccctgcgtctctggagcctggacaacaaaacgtgcgtgcaggagatcacggcccaccgcaagaagcacgaggaggccatccacgctgttgcctgccaccccagcaaggccctcattgccagtgctggcgctgatgccctggccaaggtcttcgtatgatgcccacctggccctgccctggccgccacgctggctggggtgtagggccgggcaggtggggctgaggggactcccagcctcgctggaggtgcagaggcctggcctctgtctgtttgccatggagcctggtggtgctaacggccctttccccaggaatccctccccaacggctgccttccccaagcatccagcctggggatgggcccctttcaggaatcacccccgaggatggcctcggggtttccccctgtgccctgacagccgctcctggtatcagagctgctttccagagggcagcacagccagggccgggtgtctttagggatcagtttttccaagactccagaaggtgccaggttctccccttgagctcctgctcccccatcccccatcctcccagacctgggcaggagctgtgctgggagaaagggtggcagccgggagcctcagagctgagccccggcctggctgcccctcccctccggccctctccactgctttccagacactaaccaaggcttccaggccagggattgcccaacactcctagggcagccctcccagcgccccatggggtcgcccatgggtagagacggctttcttgtgcccctccctggggcatggagggtggagtgggcctcgggtccccctgaactccctgtatatctgtataaataacgggattttcatggcgccgccccacccgcattatcactgtgtgatggtctcagtcagtctcctccctgtctccactctttccctctatttatttcactctcttgtttggttctaccctgcaccctcggtccccttccaggttcctgtttataagccccaacccctctgtccccatcttgtatgtgaaaacttgtctcaataaaccctttggagt

SEQ ID NO: 2251 - DNA, 867 bp, Homo sapiens
  source 1..867: mol_type = genomic DNA
gtaccattcttcaagaaacggtttgaatcagactgcctttccttttgtcttcattgtcataaacatctgcccccgtgtggttctgactggccgcgaacccctacccgaagcttttattccatcattgtgcaccgttggtggggaatgctgtggcaacaggccacgcctccacttactggttggctttgcgcaggcgccaacggaagtgggtcgcaggaagaggaagtcccgcctctctctcctcaggcagcagcaacgcggaggaaacgggagtgaacggagagcgtagtgaccatcatgttttagcacaaccccctcagaccactctgtggagaacagactgtcagggaacgtgggtggaggcagagagaccagaaagattccaggacagagatgacagaggcttaggccatggagcctcctcaacaagcccaagagtgagatgaccccagaggagctgcagaagcgagaggaggaggaatttaacaccggtccactctctgtgctcacacagtcagtcaagaacaatacccaagtgctcatcaactgccgcaacaataagaaactcctgggccgcgtgaaggccttcgataggcactgcaacatggtgctggagaacgtgaaggagatgtggactgaggtacccaagagtggcaagggcaagaagaagtccaagccagtcaacaaagaccgctacatctccaagatgttcctgcgcggggactcagtcatcgtggtcctgcggaacccgctcatcgccggcaagtaggggccgcctgtctgttgacagaactcactcctctgtcctatgaagaccgctgccattggtgttgagaataataaagctctgtgtttttttctagtggt

SEQ ID NO: 2252 - DNA, 2570 bp, Homo sapiens
  source 1..2570: mol_type = genomic DNA
tatcacagaagaaattcgtgtctatagcttttaaggacttgattacatcattttcaagcctgatagttttggaatcaccattagagcttaagacacacctgccttcatttcaaccacctgtcttcataccctgacgaagtgcaccttttaacactcctttgtccttggattacttaagagttcccagaaatacatttgccaccaacagagtagccaaatttataaggaaaaatgattcccaatggatatttgatgtttgaggatgaaaattttattgagtcttctgttgccaaattaaatgccctgaggaaaagtggccagttctgtgatgttcgacttcaggtctgtggccatgaaatgttagcacacagagcagtgctagcttgctgcagtccctatttatttgaaatctttaatagtgatagtgatcctcatggaatttctcacgttaaatttgatgatctcaatccagaagctgttgaagtcttgttgaattatgcctacactgctcagttgaaagcagataaggaattggtaaaagatgtttattctgcagcaaaaaagctgaagatggatcgagtaaagcaggtttgtggtgattatttactgtctagaatggatgttaccagctgcatctcttaccgaaattttgcaagttgtatgggagactcccgtttgttgaataaggttgatgcttatattcaggagcatttgttacaaatttctgaagaggaggagtttcttaagcttccaaggctaaagttggaggtaatgcttgaagataatgtttgcttgcccagcaatggcaaattatatacaaaggtaatcaactgggtgcagcgtagcatctgggagaatggagacagtctggaagagctgatggaagaggtttattaacaaaactaggatacccaagactgaagaaacaagaagaaacctcaagtgtattgacacgtaaagaagcagcagtcctgccccagttctcctaagaaaaatccgctgtgggcagagaacgatgatgatttaatggttcaaaccttgtactactcagctgatcacaagctgcttgatgggaacctactagatggacaggctgaggtgtttggcagtgatgatgaccacattcagtttgtgcagaaaaagccaccacgtgagaatggccataagcagataagtagcagttcaactggatgtctctcttctccaaatgctacagtacaaagccctaagcatgagtggaaaatcgttgcttcagaaaagacttcaaataacacttacttgtgcctggctgtgctggatggtatattctgtgtcatttttcttcatgggagaaacagcccacagagctcaccaacaagtactccaaaactaagtaagagtttaagctttgagatgcaacaagatgagctaatcgaaaagcccatgtctcctatgcagtacgcacgatctggtctgggaacagcagagatgaatggcaaactcatagctgcaggtggctataacagagaggaatgtcttcgaacagtcgaatgctataatccacatacagatcactggtcctttcttgctcccatgagaacaccaagagcccgatttcaaatggctgtactcatgggccagctctatgtggtaggtggatcaaatggccactcagatgacctgagttgtggagagatgtatgattcaaacatagatgactggattcctgttccagaattgagaactaaccgttgtaatgcaggagtgtgtgctctgaatggaaagttatacatcgttggtggctctgatccatatggtcaaaaaggactgaaaaattgtgatgtatttgatcctgtaacaaagttgtggacaagctgtgcccctcttaacattcggagacaccagtctgcagtctgtgagcttggtggttatttgtacataatcggaggtgcagaatcttggaattgtctgaacacagtagaacgatacaatcctgaaaataatacctggactttaattgcacccatgaatgtggctaggcgaggagctggagtggctgttcttaatggaaaactgtttgtatgtggtggctttgatggttctcatgccatcagttgtgtggaaatgtatgatccaactagaaatgaatggaagatgatgggaaatatgacttcaccaaggagcaatgctgggattgcaactgtagggaacaccatttatgcagtgggaggattcgatggcaatgaatttctgaatacggtggaagtctataaccttgagtcaaatgaatggagcccctatacaaagattttccagttttaacaaatttaagaccctctcaaactaacaggcttagtgatgtaattatggttagtagaggtacacttgtgaataaagagggtgggtgggtatagatgttgctaacagcaacacaaagcttttgcatattgcatactattaaacatgctgtacatactttttgggtttatttggaaaggaatgcaaagatgaaggtctgttttgtgtacttttaagactttggttattttactttttggaaaagaataaaccaagaattgattgggcacatc

SEQ ID NO: 2253 - DNA, 1654 bp, Homo sapiens
  source 1..1654: mol_type = genomic DNA
aaacgtcatcgcgggcgcgacgcctgagggacagtctggggtttggctgtccggacggtgcagcggcgaggccggccgcgaagatgccagtggcggtgatggcggaaagcgcctttagtttcaaaaagttgctggatcagtgcgagaaccaggagctcgaggacgcttgatgtaatgggcagaatcagaatgcttcaggaatctgtcgaatttgtttcttataatagcccctggaggaattgctacacccccagtgtatggtcagcttctagctttatatttgctccataatgacatgaataatgcaagatatctttggaaaagaataccacctgctataaaatctgcaaattctgaacttgggggaatttggtcagtaggacaaagaatctggcagagagatttccctgggatctatacaaccatcaacgctcaccagtggtctgagacggtccagccaattatggaagcacttagagatgcaacaaggagacgcgcctttgccctggtctctcaagcgtatacttcaatcatcgccgatgattttgcagcctttgttggacttcctgtagaagaggctgtgaaaggcatattagaacaaggatggcaagctgattccaccacaagaatggttctgcccagaaagccagttgcaggggccctggatgtttcctttaacaagtttattcccttatcagagcctgctccagttcccccaatacccaatgaacagcagttagccagactgacggattatgtggctttccttgaaaactgatttatcactctgagttcaagattcatcttcagaatcctgtatactgacaaacgtagaaatgtaaagtttgtattttcaatttattggatggcttaagcacctcagcattccttactatgtgataaaatacatatagaatataagatatactatatacattttgtccataaacgttatgctgaatagttgttgaaacagttctcattttgtagtatttaataatctggatggagcctgtcagtattacagttagttttctagtgactcataaaataagatttcctgtttcatgtagaatagtgtttgtcaactgtcttttctctgtcccagcacatgccgtactcttatatgtaccattggttgataattataatgattcatttggacttgaagaaagattgtccccaggcacagtatctgaatcactggggattatgattcaccctctttggagaacatgctctcttttcaccccccacctcctgagagccactaatgtaagatacagaaacatagctgaggaacaaatagaccatttccatactaaaccagtttgttaactttagattttttccaatagtgtgagtatatccattgctggcagtggagggcttgccatgaaaatgcaacttatttaagacatttatgagacatattaacttgtgctgtcgccttttagaaggagaaacttaagtgtggaatgcattatatgggcaaagaagctatgaagatacatgatacactttgtacaactatcctgcagcccattggttgcttatatttatcgcttggctcaagttctgccctttggagaaatactgagcaagtctttcattctctgtgtgacagccctctgaatatttgaagttgtttgtt

SEQ ID NO: 2254 - DNA, 6282 bp, Homo sapiens
  source 1..6282: mol_type = genomic DNA
agtctggtctggagctgggacagcagctgctgctgtggaaaggccagctggcaagatgatggaagaaatctccattatggtagcctatgacgcccatgttttcagccagctgcacgatgaagacttcctcactagtctggtggccatcagcaagcccaggtctatggtaccaaccaagaagctgaagaaatatgagaaagaatatcagacaatgcgagagagtcagctgcaacaggaagacccaatggatagatacaagagggagaaccgaagattacaggaggccagcatgaggttggaacaagagaatgatgaccttgcccatgaactagtaacaagcaaaattgctctacggaatgacttggatcaggcagaagacaaggcagatgtgttgaataaagagctccttttgaccaaacagaggctggtggagactgaagaggagaagaggaagcaagaggaagagactgcccagctaaaagaagtcttcaggaaacagctagagaaggcagaatatgaaataaagaagactacagctatcattgctgagtataaacagatctgttcgcagttgagtaccaggctggagaaacagcaagcagccagcaaggaggagctggaagtggtaaagggtaagatgatggcatgcaaacactgcagtgacattttcagcaaggagggtgctttgaaactagcagccacaggcagagaggaccagggaattgaaacagatgatgagaaggactcacttaagaagcagctgagagagatggaactggaactggcacaaaccaaactgcagttggtggaggccaagtgtaaaattcaggaacttgaacatcagagaggagcccttatgaatgaaatccaagctgcgaaaaactcttggtttagcaaaaccctgaactctatcaaaacggccacgggcacccagccattgcagccagcaccggtcacccagccacccaaggagagcacatagttccagccttacccaagcacaagagcacaatgttcaaaccaatggaaatctgggaggattcttcctggtgtccctttgaaggaaagtcaaggaggccagaaaacaagccagaatttttcagtagctctcactctttcttgtatgacacttttcaaagggatgctatttaaactgacctgttctatgttgaatacctattttccagcttctggaaggccatgttcagatccatcatagtattacacattattttgtttgcctgatgtttagttggaaataagtaattcagaactaaatgcttttttatttagaattattcataattatttttatcttacataaaaatggagacatctgttattccaaggttgaagtgataagaagatctttgtcacaggaaaaaaaaaattgaaacctaaacatcttaagttttcaggatttattcagataaagcacactgtggggccaggcatgaccactctcaggtttcctcctgagcctgattcccagggaagtgttaatcctgtccaaaggaaagaaccaatcagcgatcattggtttactttcattttctgttcggtacatctggaaatgaagtgccaggaatagacgggctgttcagattatacgctaggtaaaaggaactgaaattttaataagtgtaggtcaggatcatttgggctgtggtattctaacagatccttttaagaatgccacataggacttgtgagttcctaagtacaccaaagtatggacacagatgtgacttctggcaattataaagttaaaggtggatattgcaccttacagacttagggagcctttaccagagacgcctaaaaagccccaggttcagccattgtgctgaatagagtggaatatagaaccagggacagagtatttcatttaacgttgatatatacttgctaaggaaacactaacaatactgtaactttgttaaaggacatagtattgaaatgggaaatagaggtcaggctcacatcatcttagtttaatgctgggcaactttttctgatttctgtagttccctgaaaatgtgtccttcgtacccataaagagatacaaatgcatttgtaacatttttgattgaatataaaacctttacagaaatacttatctcatggaaaggtaaagctattgtttaaaaattagtggaaatattttttcaattatatttaacatgcctataaaaatagtccttgcaggaaattatttgataagagcaaaactatttttattttataaactattttggaggcctctgatcctttcaaaccaaccaaactactattagatatgtacaataacatttgttgatattaatcattggcctcattgttgaacatattatttgcaaagaatcttaaactctgtagtgccagaatgattctcatctgtgccatattttgcaattaaaagtaacacacccttagaagaatcaaataagagccatctacatcccaggaggatgcaccaagttgctcacagtggatcttttcctctaaaatgatcttttatgttctaaaaagtgaaatcccctttatctgtgtttatattctctacagcccataaaactgatgtgattgttatgttatactcatcagataatacttttcttacataaatctttcattgttgttctgacatctttcattacaaaatttattttcttaacaaaaaggaacataacccagcattccaagtgtctgtgttggctttaacattctctacatggtggtctagataagctaatttttttttttttttttttgtaaaatgtaatagctagaaaatgttatcttggcgcttgtttttgtaaatcatttagtataggctgttagctttactggtactttacgctttgattccaagaagccttgtgcagttgccttatcaaatggccagctaaattaaagatgctcttttgtgttgtgaatttcatagttctgtacagagcttgtttcaatttacaaaaataagtacattccacagaatgcctaaagtgtgtaattttctttaaataatagtaggtgagggagaaacataatggctctaggtcaatcccttatctaaagaccttgttcaacttcatagtccctttccttttaaagaggagaagagaaaaatcccccctggccaggcatggtggctcacatctgtaatcccagcactttgggaggctgaggtgggtggatcacctaaggtcaggagtttgagaccagcctggccaacatggtgaaaccctatctctactgcaaaatacaaaaattagccgggcttggtggcgggtgcctgtaatcccagctactcgggaggttgaggcaggagaatcacttgaacccaggaggcagaggttgcagtgggccaagattacggcattacattccatccagcctgggcgacaagagcaaaattccgtctcgaaaaatcaccaggtacatacctctcaagtttgataagtccatcttttgagttttcttttagctctttcaaaagattacgagggcaatacatattttttttttttttattctccagccccatatcatacttgggtatgcctgttggtaccataagcctaaactctccttcactgcaatgcctttgagtcagtagcaatagtaaagactagaaacaaagaaaattcagaatttggtatgtgatatgattgttcatacaatatgttataatagcaatattccaaacaatatgtccttcactgtctattgttggaaaactcatgcatcccagcatgaagtaactcctagttttaattttagttattttgagatatatttgagaattgcatctcttctcttgaatttcacttagaagagattaaccagccaaatatccaggaaagtttcaaaacattctagtgtttttcatcctttgctaggatgcactctgtacaaaacattcctctgaaaatctaatatttgcagtatctaagaattgatcatttctattttcattaaattctgtggaaaaaattaaatgaatgaaattcaacttcataattcagttcatcagcttttgtatcttgagaatctaaacacgtctttaaatctgaaagaaaccaagctggattttgcagtgcatatgtttgctagcttcccacatcctgaaccatgtcaaaatttggttttatttagttacatataatttaatgcaaagaaattctgttacttaatgttctgtttatttatgagtgcctatcaggaacactaataggaatgccattcaaccagtgtcttctgcccctctcccagctgttaaattagtacttcttcattggctttctgaaatgtcctgagtaaagtagaaaagcaacctttgtatggatgtggggatatttaatagtatgtatcttgtttcatttttttcctatgatgtattaatatttatttttctccaacccctgctccattttcttaaaatattttccagttaataactagttgctttatttcctagctgaagtgagaaaaccaacggaaaacaatacagatttgggcagaggagatagagttacatctttaaaggagtgagccagtcacccaggagaatcacatgtgtaactgatgtaggggtttaagtcttcatactttcactaaaatctgtctactaactctcccaccaacctttgcatcaaacacttaggtacctgcctgattaggggggcccctttaagggaaaaaacttttaaaaaattaaatgccttggttttgttttatcttctgggaaagaacacttttacttgattagcaagatgattatattatataacttgcccttaaaaacactccaaaatactgactccttttctccaattacaaatgagtgtgaagaaattctgttgtatgatttgaacactattaggtttgtatgtgtgtttaattggaagaattttatatagagtatctctgctgcttttgtttacctgggtaccacacaaccaaatacacattgagatttcaagaaatgatgatgaaagccagaaggccagaccacagctctgcagcctgtttcctacaaccagatataaaactctttctcgtcgccatgctgatagtcacactgaactagaactgtcccaacacattcttcctctctcataatggcttccatttaatacaggcaaagccctttaccttagcaaattctttatctttcaaaagtgaccaaaatgaggacttcaaccttggctgcacctcaataggagatgctgatcttgagttgtaatgagaaaagtgggcatataggagattttagtgactgcagtcagctgtctggcattcctttctcagtttgcatctaaaagactacatatgtcaagcttatctccacctgaatttgctgcctgctataaaaacatttcattaatatatcccattcttcctacctccatctctggtttgtcattagtggtattctgaaaagcttaagaaaaaagaatcattgagtagaaagtgaacattttaagttattttcctttttcattggcaattagttaacatgtaaaatcttttccattaaactgtataacttttaataactatatattatatatgggataaaatatatggactgaattgtgagaatataaatgcatcgaaagactctggtgtcatgaaagcacaagaataaggctggagatggtcccagatccaagatgtcccaaaagccttttgtatcagtttctctatttttggtattttgcataatgcatggatccttagttcaaatgagggacaaagtttctcagtcagccccacttcctttctttctaactcctacctttcccttgcagaggaggtagtagagattctggaattgtctatttttatgaattccattattttgtccatggcatctctaatgaaaacaggttctagaataaaggagttgattagtctgaacagtactaattaactacaaaataaacgttagtgatcagcctcttcctctataaacaatgaccaattagacgtttccgtaattccatgtattatgtatagtacactctataaatgtaaatgtaatgcttgtctaaaaagtgcaatttattgtacattgtcccaacaaatgtttacttttataatcgttatgaacttgaattggattagtatcttgtttttatgtgtgaatgaagccttgtgaaataaacaaatgcaactgagaaggtaacaaggtgactgtttttgtgagccagtgatgttttcaatgctttgtgttgcccctttggccccattaagcagtaataaacatttgttctg

SEQ ID NO: 2255 - DNA, 4967 bp, Homo sapiens
  source 1..4967: mol_type = genomic DNA
gcggtgtgtggcaggcggcagcggcgctggcggccgagtgcgcttgtcacgcgtggcggtgcgtggttgctaggggcgcctgaggctgccgggtagcccagcaggccgagggaggaagtagcgtggagccggtgccgagccggggcgaagctggatcccctagatagactgtcttcaagctcactgatattttcctctgcttgatccattgtgctgttgagagcctctagtaaatttttcagactgacagacttcaaggatgcagctgctactaccggaggtgtgtggcaccttacctcagcaaggccatgagaccgtgtggccatgatgtgggcccctcatggcctcagcaggaacacagcactatagtattggcctccgccagaaaaacagcttcaagcagagtggtccctcaggcacagtacctgccacgccacctgagaaaccctcggagggcagagtctggcctcaggcccatcagcaagtgaagccaatctggaagctggaaaagaagcaagtggagacactgtcagcagggttgggcccaggcctcttgggcgtcccaccccagccagcatatttcttttgccccagcactttatgtagctctgggaccacggctgtcattgcaggccacagcagttcctgttacctacactctctcccggacttgttcaacagcaccctgctataccgccgctccagctataggcaaaaaccgtaccagcaactggagtctttctgcttgcgttcgagcccgtcagaaaaaagccctttttctctccctcaaaagagcctccctgtcagtctcactgccaacaaggccacttcttccatggtcttctccatggcccagcccatggcctcctcatccacagaaccatacctctgcttggcagcggctggggaaaacccttcagggaagagcctggcctctgccatctcagggaagatcccatctccactctcttcctcctataagcccatgctgaataataattccttcatgtggccaaatagcacgccagtgcctttattgcagaccacacagggcctgaagccagtatcgccacccaagatccagcctgtctcctggcatcattcagggggtactggagactgtgcaccgcagcctgttgaccataaggtgcccaaaagcattggcactgtcccagctgatgccagtgcccatatcgccttgtctaccgctagctcccacgacacatccaccaccagtgttgcctcttcctggtataaccggaataacttagccatgagggcagagccactttcctgtgctctggatgacagctctgattcccaggatccaactaaggagattcggttcactgaggccgtgaggaaattgaccgcaagaggctttgagaagatgccgaggcaaggctgccagcttgaacagtctagtttcctgaaccccagcttccagtggaatgtcctcaacaggagcaggcggtggaaacctcctgcggtaaatcagcagtttcctcaggaggatgctggatcggtcaggcgggtcctccctggtgcctcagataccttggggttggacaatacagtcttctgtaccaagcgtatcagcattcacctccttgcctcacatgccagtgggctcaatcacaaccctgcctgtgaatctgtaattgactcctcagcatttggagaaggcaaagctccaggtcccccttttcctcaaactcttggcatagccaacgtggccacccgcctctcttccatccagctgggccagtctgagaaggagagacctgaggaggccagggagctggactcatctgatagggatattagttcagctactgacctccagccagatcaggctgagactgaagatacagaagaagaactagtagatggtttggaagactgttgtagccgtgatgagaatgaagaggaggagggagactcagagtgctcctcattaagtgctgtctcccccagcgaatcggtggccatgatctctagaagctgtatggaaattctgaccaaacccctttccaatcatgagaaagttgtccgaccagccctcatctacagtctctttcccaacgttccccctaccatctattttggcactcgggatgagagagtggagaaacttccctgggaacagaggaagttgctccgatggaagatgagcacagtgacccccaacattgtcaagcagaccattggacggtcccacttcaaaatcagcaaaagaaacgatgactggctgggctgctggggtcaccacatgaagtctcctagtttccgatccattcgagagcatcagaagctaaaccatttcccaggctcattccagattgggaggaaggaccggctatggcggaacctgtcacgtatgcagagccgctttggcaagaaggagttcagtttcttcccccagtcctttatcctgccccaggacgccaagctcctgcgcaaagcgtgggagagcagcagccgccaaaagtggattgtgaagccaccagcatcagctcgaggcattggcatccaggttattcacaagtggagtcagctccccaagcgaaggcccctcctggtacagaggtatctacacaaaccctacctcatcagcggcagcaagtttgacctgcggatctatgtttatgtcacttcctacgatcctctgcggatttacctcttttcagatggactggtccgctttgccagttgcaagtattcgccttccatgaagagccttggcaataagttcatgcacctgaccaactacagtgtcaataaaaagaatgccgagtaccaggccaatgcagatgaaatggcttgccagggccacaaatgggcactgaaggctttgtggaactacctgagccagaagggagtcaatagcgacgccatctgggagaagataaaggatgttgttgtcaaaactatcatctcgtcagagccctatgtgaccagcctgctcaagatgtatgtgcgacggccctatagctgccatgaactctttggttttgacatcatgctagacgaaaacctcaagccctgggtcctggaagtcaacatttccccaagcctccactccagctctccactggatatcagcatcaaaggccagatgattcgtgaccttctgaatctggcaggttttgtcctgcccaatgcagaggatatcatttccagccccagcagctgcagcagctccaccaccagcctgcccacctcccctggggacaaatgtcgaatggctccagagcatgtcactgcacagaagatgaagaaagcctattatctgacccagaaaattcctgatcaggacttctatgcatctgtgctggatgtcctgacaccagatgatgttcggattctggttgagatggaagatgagttttctcgccgtggtcagtttgaacgaatttttccttctcatatctcctctcgctatctccgcttttttgagcagccacgatatttcaacattctcaccacccaatgggaacagaaataccatggcaacaagcttaaaggagtagatctgctccggagttggtgctacaaagggttccacatgggagttgtctctgattctgctccagtgtggtctctcccgacatcacttctgactatctcaaaggatgacgtgatactcaatgccttcagcaaatcagagactagcaagctgggaaaacaaagctcctgtgaggttagcctactactctctgaagacgggaccacgcccaaatccaagaagactcaagctggcctttccccttatccccagaaacccagttcctcaaaggacagtgaggacaccagcaaagagcccagcctttctacccagacgttacctgtgatcaagtgctctgggcagacttcaagactttctgcttcctccactttccagtcaatcagtgactccctcctggctgtgagcccataactggcctctctccaaaagcctctgcccaggagcatgggcatcagctacctcacgggaaccagcctgctgttcagaccagtctgaccccctacccctttcaccctgtccctcctcagagtattttttgaagtggttgcattatagagatgggtatttgtagggccggagggatggtagtgatggggagaaggtgaggaagggtcaccctctgtcacctgtctgcctggctggcacctcatatctcagcagagaagccagtggtggccacgcagccttataaagcaggttttggtttctaccttaagtgagccatgtgtggtttgtctgggggccctggtgtggttgctgagttgtagctcaagaggagaaaacatacagaacatatttggaccggaaatcctttgttctgaatttgagggggtcttctgaggtccttacttccttaggtctttcctcacccctctcccaccgctgtcctgaggagaaacccttgaacttcctcagtagacaggcggagaggccacaacatgccgaacccatttcctgtcatcctagtcttgggtcttcaccgcctccttccaaatacccaccctgccagcagccctaggtcttcctgttctgaccccccatcactgctcgttcagccttctagatgtctctctcgtggacatctgttctttagctgttggctttctctgaggtgtgagagggtctatgaactttgtgaatttcccatggccccagtgaaggagcccagataatcccagtagctgttacctgtctccatgtatcaaaggacacagtccagggggagggtggaaggagatgtggtttctctatagtgcaacaaacatggtttctcaatgttctgctgtgcagcaagcagggtctggcggcttggtaggtgggtttcaggagcagtcactattgtaggatgggcttccaatcaaacctcagactaaactcttgtactgaactgattctacctccctcctctagactcagtaaacagtgactattcaataaa

SEQ ID NO: 2256 - DNA, 8073 bp, Homo sapiens
  source 1..8073: mol_type = genomic DNA
agaattcaagagcagttagaaagttcttttacaggtttgacagatgaaaaagtgaaggcatatctttctcttcacccccaggtattagatgaatttgtatctgaaagtgttagtgcagagacagtagagaaatggctgaagaggaagaacaacaaatcagaagatgaatcagctcctaaggaagtcagcaggtaccaagatacgaatatgcagggagttgtatatgaactaaacagctatatagaacaacggttggacacaggaggagacaaccagctactcctctatgaactgagcagcatcattaaaatagccacaaaagccgatggatttgcactgtatttccttggagagtgcaataatagcctgtgtatattcacgccacctgggataaaggaaggaaaaccccgcctcatccctgctgggcccatcactcagggcaccaccgtctctgcttatgtggccaagtccaggaaaacactgctagtagaagacatccttggagatgaacgatttccaagaggtactggactggaatcagggactcgtatccagtctgttctttgcttaccaattgtcactgcaattggtgacttgattggtattctcgagctgtatcggcactggggcaaagaagccttctgtcttagtcaccaggaggttgcaacagcaaatcttgcctgggcttcagtagcaatacatcaggtgcaggtatgcagaggccttgccaaacagacagaattgaatgacttcctactcgacgtatcaaaaacatattttgataacatagttgcaatagattctctacttgaacacataatgatatatgcaaaaaacctggtgaatgccgatcgttgtgcgcttttccaggtggaccataagaacaaggagttatattcagacctttttgatattggagaggaaaaggaaggaaaacctgtcttcaagaagaccaaagagataagattttcaattgagaaaggaattgctggccaagtagcaagaacaggggaagtcctgaacattccagatgcctatgcagacccacgctttaacagagaagtagacttgtacacaggctacaccacgcggaacatcctgtgcatgcccatcgtcagccgaggcagcgtgataggtgtggtgcagatggtcaacaaaatcagtggcagtgccttctctaaaacagatgaaaacaacttcaaaatgtttgccgtcttttgtgctttagccttacactgtgctaatatgtatcatagaattcgccactcagagtgcatttaccgggtaacgatggaaaagctgtcctaccatagcatttgtacttcagaagagtggcaaggtctcatgcaattcacccttcccgtgcgtctctgcaaagaaattgaattattccactttgacattggtccttttgaaaacatgtggcctggaatttttgtctacatggttcatcggtcctgtgggacatcctgctttgagcttgaaaagttgtgtcgttttattatgtctgtgaagaagaactatcggcgggttccttatcacaactggaagcatgcggtcactgtagcacactgcatgtatgccatacttcagaacaatcacacgcttttcacagaccttgagcgcaaaggactgctgattgcgtgtctgtgtcatgacctggaccacaggggcttcagtaacagctacctgcagaagttcgaccaccctctggccgctctctactccacttccaccatggagcagcaccacttctcccagactgtgtccatcctccagttggaagggcacaatatcttctccactctgagctccagtgaatatgagcaggtgcttgagatcatccgcaaagccatcattgccacagaccttgctttatactttggaaacaggaagcagttggaagagatgtaccagaccggatcactaaaccttaataatcaatcacatagagaccgtgtaattggtttgatgatgactgcctgtgacctttgttctgtgacaaaactgtggcccgttacaaaattgacggcaaatgatatatatgcagaattctgggctgagggtgatgaaatgaagaaattgggaatacagcctattcctatgatggacagagacaagaaggatgaagtcccccaaggccagcttgggttctacaatgccgtggccattccctgctatacaacccttacccagatcctccctcccacggagcctcttctgaaagcatgcagggataatctcagtcagtgggagaaggtgattcgaggggaggagactgcaacctggatttcatccccatccgtggctcagaaggcagctgcatctgaagattgagcactggtcaccctgacacgctgtcccacctacagatcctcatcttgcttctttgacattcttttcctttttttggggggggtggggggaacctgcacctggtaactggggtgcaaacctcttcaagaaggtaacatcaaataaataagtcaagcagaggacttcctgccaatctcttctgtgaggcatcatagacactgagcaaccaggaccacccccacgttcagaaatcagctggccaagtgactccatttgacttgcaaaccagccttttctaataggctaatattgctgaggccttaaaggaaatggacaaaaattatccagaaggggtacttttccattgtatctttctaataagggtttaaaatggtactattatggtattgtacttgggctttaacatcaatgttgctttgatgttgttggatataaataggaatttttacacattactattgtgaatggtgaatgttcatgtatgacctacttgtaattaacttgagttgtagtccacagcctcaggacaaatgtcgttgaggttacagagtaagaaatgatggcaaaacgtcaaactcttatttcagagcttcatgaatttagttagactaaacataattctttaagttcaacctaaagggctgagatcaataaatttaacactagacgaagtagacttcctgtctttttgagaagagatgaggtatatgttacaataaatctcagaacttcaagtagcagttcaaaagatgtcagtttttaaaattgtttttgttgttgtcttggcagttttactgaaccctttgcataaagaacaaaataaaagctcggcattgtaatttttttaatggacaagtcttatggatacgaagggtacatttttcataatgattcctttatattttcactttgtgtcattgcagaattttagactctcattcacaatgaaaagtttattttaaacattgtttaattaaaataccatacagttctcttttaaacatcaaaccataaaaagtgtattttgtaattttactctgacctgccgcagtcacctctcacttatctcttccacgtactgcacggtcgtatttcatgagctttctgtccatagcacagaaacagagcagaaagtagtacaatcatgttggaccttctttctgttctctttactcttctcacagatcagatcactccatagaagcctgtgggtttcgatggtttcttctatacacctttttggttgaccagtattactatacaatgtaagtgttttaaaaaatacgaaagtaatactctgcaccccttcctacaaagatgataaagcagtcacttctggcgcattttaataatttaaagatttttagtgcaatggcacggtaacctccaaacctgaattagacagagactcactcaggaagtgacaggcccatcatatcaaataacttattcacttttcatgtggcaggaaactggaatatcgcttttaataaaatggaaaaatatgcttctacatatttaccaccataggcgttttgttcatatgagcctggtttgtgcaaaattaaatcagaggcttctacaacatggtttatttatgttgtagcaaagttggctctacataaacattgttcttattttaaaattaacactatgtgttcagttttcttgtgggcttctgaaagttgccatcttccctccgtggagctccatttgctattttcattatacactatgaggtaaaatgtaataacaaaagagagagaagtaccactgtggctagatatatacacacacatatatatatggatggatgtaatatatgtagaacacacacatagatgtatataggatacacactcatgtatgtaaacgtatacatatgtgtatatatgatacatacacatacacacacacgagagacagaaggaaagagaggaagagagaagcaaacatgtaggaaaaaatataaatcagccccattctcccattctttaagaacaatgatttttcttgatggaaaatgcatatcacttgacagttgacaagaaagtgtcatttttgtgttagtgtatcatataattgaatttgaacaagatacatatttttctgcatacaaatttatgaagctggagtctaccaaacacagctttagtcacaaaagttagtttagttatctcatttcgcttggagatggaatttcaggaagggatatattatttaagattattgtttaattacaagaattttaaaagaatgtatgaattctgttttttaatatagaaaataattatggagttaggaatctcatggctacatttacatttttaggttattacagaaaattctcttaatttattatagtcaagtgtattatgtaatctctatttagaacagtttcccaaaggaatgtgattggatttactggttggttaatttcttgtgaaatattgtcataatagaagcacagcttgaacaaaagactgaattctgatataaactgtcaatattgcttttaccatgtgtaagatttacttagtaatcacagatttacctaaaataaaaggacccgggttgcagtgatatttagttaatgatttgttttggaaaacatgcagttaggagtatttttgtattttgtcagatgtttaggagacagactttcgggtcatgtttcttgtcttgttcccagatcttttcttaaaagaacagtgtgacaccagaagccaagagatggtttttactaacaacagctttgatgagttcctattaaggtcgtattgtgtattgtgccaaattttccacccagtataaatttagtaacccgctatgagcatatgtaggatattcaatttgcagatacttttgttggttatgttggtttataatagacaagttttatggtcatatgcaattattccattatctttttggacacagtgaatatgttttttagctaaaaatgtccttggaaacataaatgcctgccaataacatggaatattgaattcgggcaatgtgaattgattaattagaaaagggtcaaaagaaatacaatggatgtggaaactaattctaaaaaatagccctattaatagggcagagactctggtccatttcccagctgtacttctctctaagaggtgtatgaaaaacccatcttgcaaaagagaccaaaatattagacacaatcgttcccattcctgactcttcaatggaaaaggaaggtacagatgtttacagtggtgccccaggtgactcgttctcaccacaacaaaagcaactaattggaaactagatgtgttcaataatagatttcctcttttttggcatgctttttagattttttttcattttgtaaaatctcagttaatttttctttattggtatatttgtgtatgcgagacaaatcctgtattgtacaggatataaatagatgcataaatccttagatacctgggttttttaataggtttaggtttgggtattgtgtttctggtcttttaactcaaaattaaggtttgagctttaataggactaaattattcacctgccttggcctgtgcctttattttaaatactgcaattttacttcttcattcatgtatttattattttgcttttcttgcttaagtataattgaaaatatttgcaggaacgcacaattcattttatcaagttgaatgaataggaccattctctcctcatcagatttctgttctttatttgacttcattgacatataccctggtgactataaccagtgaactgttcagagtcagtcttttcggcaagaacttcagagaactgtgacactggttatgatgtgattttggggggtttcaggtacctaagcatgatttttaaaatcacttctctctttacatatttcgaacatatgtttgctttctacactttgcagattttatttaggatttaattctttaaagactatattcatttagtcactatagtggatctcttctactgcaagtattcatctgatttttaaattatgtaaaatgtaaatcagccaagtatgtcatccgttatagtttccccatgctttcagcgcatggccatgagatttttacatgtgcataagtatttagccaatacacattttgctgacttctttaaccatttatattgtttaaattagtaatatccaatgcagtgcacacttttttgtcttttttccaacggaatattttggttgtctgtagcgttggaagcattttatatgataaaaatagcaagaaaaaattaaaaagtgtcaacggtgtgctggttctaaattaagaagatagaacaaagagaaagacattaatgttacctaagaaacacatttaacatccgaagaagcaatgctgtcctcacttgatgtttctcttctcaacccagcaatggagagcagggcttgcaaagccgtacagagcctacgtgctctttcctgcaagtgggagaaaactaatcaatggcacacagggccaggtgtggccctgtgaggcaaaggataatgtcacctcaggaccaaggtggaaacttacagctgaatccagggcttactaagtagggaagtcagtttacatatttcagttttcctctgatgtttttgaggtactgtgtatttgcagaagtttaagcagaagggttttgtttctattgtaagttaggttctaaaagtgtataatctgatactctagcccaactgaaatattatatcttgggcgttacagcctttgtctttttctttagtcaccttaatacccagtcctatgctgtatctctgatagcctatataaatgacatataggaatattattttccatatgatctgttgtatggtgtatatgctatgtgttcatttcgtgtgcaagttcagagtgtaatagatttacccagagaaggtgtttctatacaatgcccctacctatttgaaattacatgcttgcccaacacactgtgaaatagttaccaaaatttgtacaaatgcagcatcttcattctttctgagaagacaagatggttttctttacatgaacaaatgaacaaaagagatcctagatccataacgtagctaaggcatctaagagtttgctgttgataatcttgctgaccaaaaactactggagagtaacacaggttatatgccatcacaaatacaatgctcatgaagaactgatttgtagagtcaatgaacctgtgtccagaattttaataggctctctattggaaggagaaagaatttcaagttaacagtatctaactttatcatagttgatgttagtaaattttaaaaaatgattttatatgtatgacaaaaatctttgtaaaatgcgcaagtgcaataatttaaagaggtcttaactttgcatttataaattataaatattgtacatgtgtgtaattttttcatgtattcatttgcagtctttgtatttaaaaaacatttactgttatgtttgtataatagaacagtaatcatttattataatctaggcaagttgtaaataaattcataattcaaacagccagtatatatgcatatatgagtgttatattgcaaaatctttgttttacttacatggttaaagcagcaagaattcttttgttgatatgtaattatacacataaaatatatatatgtatgatacatgaaatatatttagaaatgttcataattttaatggatatcctttggtgtgaataattgaatacagagtttttaaaata

SEQ ID NO: 2257 - DNA, 1767 bp, Homo sapiens
  source 1..1767: mol_type = genomic DNA
tccatcatgtggccactgacagcccttctgctcctggttccaagcagtgggcaagctgctactctggagaagcccatattgtctctacatccaccttggaccaccatcttcaaaggggagcgggtaactttgaagtgtgatggataccacccactgctcctggagctccagcccatcagcactctctggtatttgggccacctacttctgccctctcacaagaagagcattgaggtgcagacaccaggggtgtatcgatgccagacacggggagcacccgtcagtgaccccatccacctctctgtatccaatgattggctgattctgcaagtgccctatgcgccagtgttcgagggtgagccgctagtcctgcgctgccgcggctggtacgacaaggtggtctacaagcttcactactaccacgacggccaggccgtgcgctacttccactccagcgccaactacactgtgttacaggcgcgtgccagcgacagcgggcgctaccagtgctcgggcaccatgcgcatcccggtggagagcgcgcccatgttctccgctaaggtggctgtgacagtgcaagagctgttccgggcgccggtgctgagggtgatgggtccgcgggaggcccgcggcgcggcgctgggtggggtggtgctgcgctgcgacacgcgcctgcacccgcagaagcgcgacacgccgctgcagttcgcgttttacaagtacagccgcgcggtgcgccgcttcgactggggcgccgagtacacagtcccggagcccgaggtcgaggagctcgaatcgtactggtgcgaggcggctaccgccacccgcagtgtccggaaacgcagtccgtggctgcagctcccggggccgggttctcccctggacccggcctccaccaccgccccagctccatgggccgcagccttggctcctggtaataggccgctttccttcagaaagcccccggtgtccagatcggtcccgttggtcacctccgtccggaacaccacctccaccgggctgcagttcccggcgagcggcgccccgactgcggggccacccgcctgcgctccgccgacgcccttggaacaatcggctggagccctgaaacccgacgtggaccttctgctccgagaaatgcagctgctcaaaggccttctgagccgggtggtcctggaattaaaggagccacaggccctccgggagctcaggggaacgcccgagacccccacctctcactttgctgtgagcccgggaaccccagagaccactcctgtggagagctgagggggcggctaccgtcccctctgcaggctcattcctccttggtctcctgcttcccctcacgcgaatttctttcaaagccatctgtttgcatccttgtgttttgctgtggtttttaaaggagcgcccacgaagtgtagtggctgacgatttcaacctcacacagcagtttgtaaccgcaagcattctctttgaattctcacagaattcagcaagaagtagaaacctgttatttactacattgtgatttaactttggatgtgaatttagtcacccttagcccttcagataagcctagccagtacatatttcagcacaggcagtttttttggtatttaagtacattgaggtaactgagcacttgagaatattttagggtcaaagtgtaattattcataatgaatttactctgttgatattaaaaagacgttcagtcctattactgatgagtttacatcttcaaataaatcctgggttctattt

SEQ ID NO: 2258 - DNA, 2005 bp, Homo sapiens
  source 1..2005: mol_type = genomic DNA
acagttccatccattctagggatcagtgtctttcaatgatgtgactgtggacttcactcaggaggagtggcagcacctggatcatgctcagaagactctatatatggatgtgatgttggaaaactattgccacctcatctctgtggggtgtcacatgaccaaacctgatgtgatcctcaagttggaacgaggagaagagccatggacatcatttgcaggtcatacctgcttggaagaaaactggaaagctgaagactttttagtgaaattcaaggaacaccaagagaagtattctagatcagttgtaagcatcaaccacaaaaaactggtgaaggagaagagtaaaatatatgaaaagacatttactctaggcaaaaaccctgtgaattcaaaaaatctacctcctgaatatgatactcatggaaggattttgaaaaatgtttcagaattaatcatcagtaatctaaatcctgcaagaaagagacttagtgagtataatggatatgggaaatcactcctgagtactaaacaagagactactcatcctgaagtcaaatcccataatcaaagtgccagagctttcagtcataatgaagttcttatgcagtatcagaaaacggaaactccagcacagtcatttggatataatgactgtgagaaatcattccttcaaaggggaggcctgattacacatagtagaccttacaaaggagaaaacccatctgtatataataaaaaaagaagagcaaccaatattgaaaaaaaacatacatgcaatgaatgtgggaaatctttctgcaggaaatcagtattgattctgcatcagggaattcactcagaagaaaaaccctatcaatgtcatcaatgtggaaatgcatttagaaggaaatcatatctcattgatcatcagagaactcacacaggagagaaaccctttgtttgcaatgaatgtggtaagtccttccgcctcaagacagccctcactgatcatcagagaacacacacaggggagaaatcgtatgaatgtctgcaatgtaggaatgccttcagattgaagtcacacctcattcgtcatcagagaactcacacgggagagaaaccatatgagtgtaatgactgtgggaagtccttccgccagaagacaacactctctctacatcagagaatccatacaggtgagaaaccctacatttgtaaagaatgtgggaagtcctttcaccagaaggcaaatcttactgtacatcagagaactcatacaggggaaaagccctatatttgtaatgaatgtgggaaatccttctcccagaagacaacccttgctcttcatgagaaaactcataatgaggagaaaccctatatttgtagtgaatgtggaaagtccttccgccagaagacaacccttgtagcacatcagagaacacatacaggggagaaatcttatgaatgtcctcactgtgggaaggcctttagaatgaagtcatacctcattgatcatcaccgaactcacacaggagagaaaccatatgaatgtaatgaatgtggtaaatcattcagtcaaaagacaaatctcaatctacatcagagaattcatacaggggagaaaccctatgtttgtaatgaatgtgggaagtcctttcgccagaaagcaaccctcactgtacatcagaaaatacataccggccagaaatcctatgaatgtcctcagtgtgggaaagcctttagcaggaagtcatatctcattcatcatcaaagaactcatacgggagagaaaccatataaatgtagtgaatgtggaaagtgcttccgccagaagacaaatcttattgtacatcagagaactcacacaggtggagaggatggcctaactggatgtttatcctagcgtcaacccaccaaagatttggggaacatgtgagtcacattctctgggacattctactcccctttgattttgcatttccagacatttcagtggctaccacaaaaaataaaaagtatctgtggc

SEQ ID NO: 2259 - DNA, 725 bp, Homo sapiens
  source 1..725: mol_type = genomic DNA
ggcgcggcaagatggaggtgacgggggtgtcggcacccacggtgaccgttttcatcagcagctccctcaacaccttccgctccgagaagcgatacagccgcagcctcaccatcgctgagttcaagtgtaaactggagttgctggtgggcagccctgcttcctgcatggaactggagctgtatggagttgacgacaagttctacagcaagctggatcaagaggatgcgctcctgggctcctaccctgtagatgacggctgccgcatccacgtcattgaccacagtggcgcccgccttggtgagtatgaggacgtgtcccgggtggagaagtacacgatctcacaagaagcctacgaccagaggcaagacacggtccgctctttcctgaagcgcagcaagctcggccggtacaacgaggaggagcgggctcagcaggaggccgaggccgcccagcgcctggccgaggagaaggcccaggccagctccatccccgtgggcagccgctgtgaggtgcgggcggcgggacaatcccctcgccggggcaccgtcatgtatgtaggtgcgtggctcgcgggcccggtcccgggctccagggctccaaggccgggaggaaatgttgggggcacagtggagcctcggagaccacgctctgcctaggggcgcggggttgggggggactcgaaacgatctcagtccctggaggtgacggaaccatctgccgacact

SEQ ID NO: 2260 - DNA, 588 bp, Homo sapiens
  source 1..588: mol_type = genomic DNA
cagaatttggctgaggaggctggtctgaacatcactcacatttgcctccctccagatagcagtgaagccgagattatagatgaaatcttaaagatcaatgaagataccagagtacatggccttgcccttcagatctctgagaacttgtttagcaacaaagtcctcaatgccttgaaaccagaaaaagatgtggatggagtaacagacataaacctggggaagctggtgcgaggggatgcccatgaatgttttgtttcacctgttgccaaagctgtaattgaacttcttgaaaaatcagtaggtgtcaacctagatggaaagaagattttggtagtgggggcccatgggtctttggaagctgctctacaatgcctgttccagagaaaagggtccatgacaatgagcatccagtggaaaacacgccagcttcaaagcaagcttcacgaggctgacattgtggtcctaggctcacctaagccagaagagattccccttacttggatacaaccaggaactactgttctcaactgctcccatgacttcctgtcagaaagtttgattatcattagaagaatggccatcttttaa

SEQ ID NO: 2261 - DNA, 1943 bp, Homo sapiens
  source 1..1943: mol_type = genomic DNA
ctttggcctgccatctcccaagggcaaacctcacaactcaggcccaagtcacaggaatctgaatggtggggtgaccttctcctctagtttaatttcattgcaatactgagaaacttcaactgttttgtctttagaagggaaattcatgtttgtgccaggccagcctttgtaaaagcctttgattggattcactagaagtctgtcttcccgcagtacatatactgtgaattttctccttcggcatttcaaccacttggaatggccactaaagtggcttttgatctaaagtaaactctgattctgtgttgatggggaaccatttctctctaacatggtggtttctttaagatgtttgacttgggccacatgagaataacagatctttgggcagtccaagcaagagcctcctgatctagcagccaagactccccctgacctttggccatgtaccccaaccctctcatctactgcacctgctgggacccctggaacttgggaccacggaagctaatcaagacccctcaactaccacgcaagaactccacagggagttccaagctaactcctcttgtaccagctccaaaaaatcacaattacctccaaccaacaaaacctgttgtttccccaaaaatgaaaatccattcagcaaggcaagaagagactaataaatcattttatgaagtgatcaacgtgtcacctggctatcaacttgttcggaatcgggaacagatttctgtcaccttaggggatgagatgtttgataggaaaaagcggtgggaatcggagatcccggacaaaggcagattttccaggaccaacatcatttctgacctagaagagcaaatctcagagctgacagcaataattgaacaaatgaacagagaccaccagtctgcccagaaattgctctccagtgaaatggatctccgctgtgctgagatgaaacagaactttgaaaacaagaacagggagctcaaagaggcccatgaagcagaactcagtgagttggagaacaactacaaagcagccttgaaggcagagaagttggctgcccaagagaagctagaggagatgggaaaagaatacaagtatttgaagaatatgtttcgtacgtatcaggacagtatttatgatgaaatggaagagaagtggtcaaaacagaaggcgaaatggaagaaggatgagaagttcgagcgagaaaatatcctgctacagcaaaaaaaaaagatgaccaaaaaattcgaaatggagtcaggagaagaagataagaaaataaatgaatcctgcagtgctgtctttgagaacttcattcaagagaaggaggagctcttgaaacaacatcaaagtgacaccttgcaattagaagagctgagaaaaaccaaagaggtcatgcaggaagaattgcatgcacaagcccttatcctagagtcactgaacacaaacctctactatacccagttggaactccagaaagagaaagctatagtgggaaatctggagaaaatgcttcaaaccaagtttgctgaaactgaagaaaagtataagcacaccatacagatcctgacggaagagaacattcatctgaagcaaaagataatttctaagaatgaagaaatttgtgaaggatgttctgggagattggcctctattactgtttctaaggatgattctgacactgtgcaagatggtagcaagaaaggacaagaatcataaacaaaaagttgctctgcattgttgaagatggttggcacaccatttctgtaggcccaggaaactcctgggagggttttcttgagaaaatgcatataatgagtttagttcttgggttgctctgactctctgaatgtctgaaaatgtttgaattcgcatctgaatttcacagcttatcacggactcttcactgaaaaatgatgctctccatactgggagctgagctttctctg

SEQ ID NO: 2262 - DNA, 2540 bp, Homo sapiens
  source 1..2540: mol_type = genomic DNA
gcggccgccacgcgacgcctggctgggcccgcaccggagaggcgtctcggtacctggcaggcggcctgctactcggagcccgctgcggggcggcggcggcggggacatgcacgtgtgagatgcggcagcgggcggcgcggacgcgaacagcagcggcggcggcgggcgcggcctcctgggcgcggggcgcgcggtgcctgagggcgggcgcgcgggcgctgggcaactgccggccgcgccgcctgcgcaggcgctggttcaggactcacacgccgcgctgaggcccgcgggcccgtcatggaggcgcccaccgtggagacgccccccgacccctcgcccccttcggccccggcccctgccctggttccgttgcgcgccccggatgtggcgcggctgcgcgaggagcaggaaaaggtggtcactaactgccaagagagaatccagcattggaagaaggtagataatgactataatgcccttcgagaaagactcagcaccttgcctgataaattgtcttataatataatggtaccatttggcccttttgccttcatgccaggaaaacttgtccatactaatgaagtcactgttttactgggggacaactggtttgcaaagtgctcagcaaagcaggctgtaggtttagttgagcaccggaaagaacatgtaagaaaaacaatagatgacttaaaaaaagtgatgaaaaattttgaatccagagttgaattcacagaagatttgcagaaaatgagcgatgctgcaggtgatattgttgacatacgagaagaaattaaatgtgacttcgaatttaaagcaaaacaccgaattgctcataaaccgcattccaaaccaaaaacttcagatatttttgaagcagatattgcaaatgatgtgaaatccaaggatttgctagctgataaagaactgtgggctcgacttgaagaactagagagacaggaagaattgctgggtgaacttgatagtaagcctgatactgtgattgcaaatggagaagatacgacatcttctgaagaggaaaaggaagatcgtaacacaaatgtgaatgcgatgcatcaagtaacagactctcatactccttgtcataaggatgttgcaagttcagaaccattcagtggtcaagtgaatagtcagttgaactgttcagtgaatggttccagttcttaccacagtgatgatgatgatgatgatgatgatgacgacgacgacgacaacattgacgacgatgatggtgataacgaccatgaggctttaggggttggagataattctataccaacaatatatttttcacatactgttgagcctaagagggtccgaataaatactggaaagaataccactttaaaattcagtgaaaagaaagaagaagccaaacgtaaacgaaagaacagcactggcagtggccactctgcccaggagctgccgaccatcaggacgcctgcagacatttacagagcctttgttgatgttgtgaatggagaatatgtccctcgcaaatccatcctgaagtctcgaagtagagagaatagtgtgtgtagcgacactagtgaaagcagtgctgctgaatttgatgataggcggggagttttgaggagtatcagctgcgaagaagccacttgcagtgacaccagtgagagcattttggaagaggaaccacaagaaaatcaaaagaaacttttgcccttatcagtaacacctgaggctttttctggaactgttatagaaaaagaatttgtatcaccttccttaacaccacccccagccattgctcatcccgcactacccactattccagaacgaaaggaagttctgttggaagcatctgaagaaactggaaagagggtttcaaagtttaaagctgccagattgcaacagaaagactaggccctgtctaggaaatgggaatttacatcctaaaacctagttgttcatttgtttagagtatctatagcaaaataggttacatgtagtttgaaataaggtatcctgagttactttggcaacaagttcttttacccttacccgtggtatttgaaaaaaatcaaggtaactgtctgaatactttaatatcagcttgttttgtgaattctctgaatactgtcaacactcttatctaagtttgcctttatgatgcagtggcagcattttgaattacttttcaaagaatactgttcatatgcattgtttttgtgtttcaaactaaatacaggcagttttgtgccagctgtgatattgtgcataccatatggaccattttaaagaaaattttaaaatttcaaatagattcaacaattacattacttgctttcacattttaaaggcactttaaaaaaatctacttctcttgtaggttttgcggctagttggctattcaagaaacctcgcccctctgaatgtcatactgtaatctttaaggaagaaagctacatgaattaattgtactctatgggaaaatttctttggaaagatattttgtaaaacttttttttccaagtaaaaactttatgaaacttggtctc

SEQ ID NO: 2263 - DNA, 1180 bp, Homo sapiens
  source 1..1180: mol_type = genomic DNA
gtataaaagaccgagctgggggggcggcggcaggtctctgcgcagcccagcccgccggtccacgccgcgcaccgctccgagggccagcgccacccgctccgcagccggcaccatgcgcgagatcgtgcacatccaggcgggccagtgcggcaaccagatcggcgccaagttttgggaggtcatcagcgatgagcatgggatcgaccccacaggcagttaccatggagacagtgacttgcagctgctgacccactctctggggggcggcacggggtccgggatgggcaccctgctcatcagcaagatccgggaagagtacccagaccgcatcatgaacaccttcagcgtcatgccctcacccaaggtgtcagacacggtggtggagccctacaacgccaccctctctgtccaccagctggtggaaaacacagatgaaacctactccattgataacgaggccctgtatgacatctgcttccgcaccctgaagctgaccacccccacctacggggacctcaaccacctggtgtcggccaccatgagcggggtcaccacctgcctgcgcttcccgggccagctgaacgcagacctgcgcaagctggcggtgaacatggtgcccttccctcgcctgcacttcttcatgcccggcttcgcgcccctgaccagccggggcagccagcagtaccgggcgctcacggtgcccgagctcacccagcagatgttcgactccaagaacatgatggccgcctgcgacccgcgccacggccgctacctgacggtggctgccatcttccggggccgcatgtccatgaaggaggtggacgagcagatgctcaacgtgcagaacaagaacagcagctacttcgtggagtggatccccaacaacgtgaagacggccgtgtgcgacatcccgccccgcggcctgaagatgtcggccaccttcatcggcaacagcacggccatccaggagctgttcaagcgcatctccgagcagttcacggccatgttccggcgcaaggccttcctgcactggtacacgggcgagggcatggacgagatggagttcaccgaggccgagagcaacatgaacgacctggtgtccgagtaccagcagtaccaggacgccacggccgacgaacaaggggagttcgaggaggaggagggcgaggacgaggcttaa

SEQ ID NO: 2264 - DNA, 916 bp, Homo sapiens
  source 1..916: mol_type = genomic DNA
gatcggccagggctgggggcgctgggggcgctacgggcgcggcgggtgcctgggagctgctgggagtccttgtttccgctcccgcccaggactgtgcgctcggctcgcggtggggtccggcgggcgcggcttcggcgggcggcagccgctgcagacgagctgcggagacggagtttcgtcatgttggccaggcccatttgagatctttgaagatatcctcaacgtgaggctctgctgccatgaaggtgaagattaagtgctggaacggcgtggccacttggctctgggtggccaacgatgagaactgtggcatctgcaggatggcatttaacggatgctgccctgactgcaaggtgcccggcgacgactgcccgctggtgtggggccagtgctcccactgcttccacatgcattgcatcctcaagtggctgcacgcacagcaggtgcagcagcactgccccatgtgccgccaggaatggaagttcaaggagtgaggcccgacctggctctcgctggaggggcatcctgagactccttcctcatgctggcgccgatggctgctggggacagcgcccctgagctgcaacaaggtggaaacaagggctggagctgcgtttgttttgccatcactatgttgacacttttatccaataagtgaaaactcattaaactactcaaatcttgctggaggcctctgggtgcctgtgttctcggcatatagatgtggtctcggtgtgttttgatatgaaaactctcatgaataaacatctccgtgaaacgccaaggccctcgtcaaaccctgagtcatgactgggaggagaaggagcaggatcagacggtagagcctggggcatgctcttcaggcatgctcttgcctgctggattgccggcggcggccctgggaccctccctcagg

SEQ ID NO: 2265 - DNA, 3528 bp, Homo sapiens
  source 1..3528: mol_type = genomic DNA
gatgtgatagctctatggaagtccaaactggagactgccatcgcatcccaccagcaggcgatggaagaactgaaggtatctttcagcaaagggcttggaacagagacggcagaatttgctgaactaaaaacacaaatagagaaaatgagactagattaccaacacgaaatagaaaatttgcagaatcaacaagactctgaacgggctgcccatgctaaagagatggaagccttgagggctaaactgatgaaagttattaaagaaaaggaaaacagtctggaagccatcaggtcgaaactggacaaagcagaagaccagcatctcgtagaaatggaagacacgttaaacaaattacaggaagctgaaataaagaaagaaaagtttgctgaagcttcagaggaggcagtctctgttcagagaagtatgcaagaaactgtaaataagttacaccaaaaggaggaacagtttaacatgctgtcttctgacttggagaagctgagagaaaacttagcagatatggaggcaaaatttagagagaaagatgagagagaagagcagctgataaaggcaaaggaaaaactggaaaatgacattgcagaaataatgaagatgtcaggagataactcttctcagctgacaaaaatgaacgatgaattacgtctgaaagaaagagatgtagaagaattacagctaaaacttacaaaggctaatgaaaatgcaagttttctgcaaaagtattgaggacatgactgtcaaagctgaacagagccagcaagaagcagctaaaaagcatgaggaagaaaagaaagaattggagaggaaattgtcggacctggaaaagaaaatggaaacaagccacaaccagtgtcaggagctgaaagccaggtatgagagagccacttctgagacaaaaaccaagcatgaagaaatcctacagaacctccagaagacgctgctggacacagaggacaagctgaagggcgcacgggaggagaacagtggcttgctgcaggagctggaggagctgagaaagcaagccgacaaagccaaagctgctcaaacagcggaagatgccatgcagataatggaacagatgaccaaagagaagactgagactctggcctccttggaggacaccaagcaaacaaatgcaaaactacagaatgaattggacacacttaaagaaaacaacttgaaaaatgtggaagagctgaacaaatcaaaagaactcctgactgtagagaatcaaaaaatggaagaatttaggaaagaaatagaaaccctaaagcaggcagcagctcagaagtcccagcagctttcagcgttgcaagaagagaacgttaaacttgctgaggagctggggagaagcagggacgaagtcacaagtcatcaaaagctggaagaagaaagatctgtgctcaataatcagttgttagaaatgaaaaaaagagaatccaagttcataaaagacgcagatgaagagaaagcttccttgcagaaatccatcagtataactagtgccttactcacagaaaaggatgccgagctggagaaactgagaaatgaggtcacagtgctcaggggagaaaacgcctctgccaagtccttgcattcagttgttcagactctagagtctgataaggtgaagctcgagctcaaggtaaagaacttggagcttcaactcaaagaaaacaagaggcagctcagcagctcctcaggtaatacagacactcaggcagacgaggatgaaagagcccaggagagtcaggtaatgattgatttcctaaattcagtaatagtggaccttcaaaggaagaatcaagacctcaagatgaaggtggagatgatgtcagaagcagccctgaatgggaacggggatgacctaaacaattatgacagtgatgatcaggagaaacagtccaagaagaaacctcgcctcttctgtgacatttgtgactgctttgatctccacgacacagaggattgtcctacccaggcacagatgtcagaggaccctccccattccacacaccatggcagtcggggtgaggaacgcccatactgtgaaatctgtgagatgtttggacactgggccaccaactgcaatgacgacgaaaccttctgatgaagcctccagtggagaactgggcttgctcagacgcactcgcattgacacaacgtaacaccagcattgtgtgtgcagacttcaggagaactcatgttattttttaaccccgtcaacaaatctaggaaaatattttgatcttcaacaaattgccctttagtctccccgtatgagttagaataataaatatttagtaggtgagttttcacctcgaattttgttttcttgatttttacgtttgaagacattgcaccagatgccattacatttattggccccccgaccttgtagaaaaacccctaccctcacaataccttatttaagtaactttaaattatgccgttacttttcatatttgcactaagatatttccaggctgcatttgtatatttagattttttggttaagctttgacactggaatgagttgaaaaaatgtgccattttgcattttcatctactcatttaaagtattttattcttattcaaagaaatatctgagctctttgcactacctgttatcagtagtgcctttacttcaggcttgataatacttaggtgtgattataaaatcatgaagcaggtaaagggaggggcaagcccccaaactgctgtggggacattttataatctatatgctgcacccacttaatctactgtggtgttttgtttattagttttgcataatttcagcttctatatattgtatgtatatattttttaaaaatctatattttgggaaaaaaacatacacaatgtgtctttctttttggacatttacctttttgaaaaagaaaacacttaaaatgatcattaggacataacagactaggccagacatagcatcttgtggctttgcaaccattttcatttgtttgttttccttttatttcttcaccagatttaaataactggaggaattttctccaatttttttttccttctctggcaggtatccccagcagtcaattaacaataagccagtataaaacacctaaataaccaatctacaatctcccttcacaagtttttttactgtttttagatgaatgtacgatgagaaattcaacgttaataattctggattttcttatcacaaaaaagaaaatgaaggacctcaaagcacctgaacagtttatcgaccagtttgaatctatttatcttcatttgaatgtcttctagaatatgtaaaaagtcataaaatgtatcttccatgctacatgtacaataagaacttctataattgtatatatgcctttgatgtattttcccctcaagattatcaactgtgtgttcgacagtgaatattcaatctggtaccagttgaaatttttggttataaatgtaatacgaattgtttcacaaacagaaaacatgtaaagcagtattaaaatttggccaaac

SEQ ID NO: 2266 - DNA, 2967 bp, Homo sapiens
  source 1..2967: mol_type = genomic DNA
gagcctggggaggtcgagggtgcagcgagccgtgatcgtgctactgcactccagcctgggcaacacagagagaccctgtctcaaaacaaacaaacaaacaaacaaacaaacaaacaaaaaaaacaaagaaaaaaaaatgggagtgggccgggcgcggtgactcacacctgtaatcccagcactttcggaggccaaggcgggtggatcacgaggtcaggaattcaagattagcctggacaacatggtgaaaccccatctctacgaaaaatacaaaaattagccaagtatggtggccggcgcctgtaatcccagctactcgggagactgaggcagagaactgcttgaacctgggaggcagaggttgcagtgatccgagatcgcgtcactgcactccagcgtgggcgacagagcgagactccgtttcagaaaagaaaaaaaaaaaaaaaaaaaagggagtcggggtggagctctcattggctcgttgcatgtgagtgtccctacggcctagaaatacaagagaagcacatcggaacgggctggaaatccacccagttaactagagggctttgaaccttttattaacttggaggttgactctcctgtcaactcgattcccttttggctgtttggcagggtcagtgagacatcccctgggtcgctcgaccccgtaggacggttcagggagccctccaggtcttcgtttctcctcttccccgcacagtgctgttatccagctgggggatccaacgcacacttaaggctccagcaaagtggctccgctgccggatgggagtgccccagtgtgctggatgaagctggcgcatgcaccatgtcatcatgtgtctctagccagcccagcagcaaccgggccgccccccaggatgagctggggggcaggggcagcagcagcagcgaaagccagaagccctgtgaggccctgcggggcctctcatccttgagcatccacctgggcatggagtccttcattgtggtcaccgagtgtgagccgggctgtgctgtggacctcggcttggcgcgggaccggcccctggaggccgatggccaagaggtcccccttgacacctccgggtcccaggcccggccccacctctccggtcgcaagctgtctctgcaagagcggtcccagggtgggctggcagccggtggcagcctggacatgaacggacgctgcatctgcccgtccctgccctactcacccgtcagctccccgcagtcctcgcctcggctgccccggcggccgacagtggagtctcaccacgtctccatcacgggtatgcaggactgtgtgcagctgaatcagtataccctgaaggatgaaattggaaagggctcctatggtgtcgtcaagttggcctacaatgaaaatgacaatacctactatgcaatgaaggtgctgtccaaaaagaagctgatccggcaggccggctttccacgtcgccctccaccccgaggcacccggccagctcctggaggctgcatccagcccaggggccccattgagcaggtgtaccaggaaattgccatcctcaagaagctggaccaccccaatgtggtgaagctggtggaggtcctggatgaccccaatgaggaccatctgtacatggtgttcgaactggtcaaccaagggcccgtgatggaagtgcccaccctcaaaccactctctgaagaccaggcccgtttctacttccaggatctgatcaaaggcatcgagtacttacactaccagaagatcatccaccgtgacatcaaaccttccaacctcctggtcggagaagatgggcacatcaagatcgctgactttggtgtgagcaatgaattcaagggcagtgacgcgctcctctccaacaccgtgggcacgcccgccttcatggcacccgagtcgctctctgagacccgcaagatcttctctgggaaggccttggatgtttgggccatgggtgtgacactatactgctttgtctttggccagtgcccattcatggacgagcggatcatgtgtttacacagtaagatcaagagtcaggccctggaatttccagaccagcccgacatagctgaggacttgaaggacctgatcacccgtatgctggacaagaaccccgagtcgaggatcgtggtgccggaaatcaagctgcacccctgggtcacgaggcatggggcggagccgttgccgtcggaggatgagaactgcacgctggtcgaagtgactgaagaggaggtcgagaactcagtcaaacacattcccagcttggcaaccgtgatcctggtgaagaccatgatacgtaaacgctcctttgggaacccattcgagggcagccggcgggaggaacgctcactgtcagcgcctggaaacttgctcaccaaaaaaccaaccagggaatgtgagtccctgtctgagctcaagacctagaaaataagtccccttcctgcctgttgcaaagtaacgtaagagttccctcacccgagtggatgcagaccttcttgctgtcagccacccttccttcatacacatagccagcccaggtgaccagaacctcccaggacagatgaggctttgtgtccttatgagactgggagaacctgctgggcacccctgctgcaggtgctgtggtgggtggggaccccactgcccttcccactgagcacatcatggctacctgacttggtgggagctccaggcagtcacttctgtttcttaaacatagctttactgaggtacaattcacataccatgtaattcacccacgggaagtgtatgattcagtggtttctaatacagacttctgcagccattaccaccgtcaactttacgacattttcatcagcccaagaagacaccctacactccttagctgtccccatccaactcccccaccccagtaaccactcagaataggtatggatttgcctattctggacgtttcgtataaatggcgtcatacacta

SEQ ID NO: 2267 - DNA, 4450 bp, Homo sapiens
  source 1..4450: mol_type = genomic DNA
gcaccatgtcatcatgtgtctctagccagcccagcagcaaccgggccgccccccaggatgagctggggggcaggggcagcagcagcagcgaaagccagaagccctgtgaggccctgcggggcctctcatccttgagcatccacctgggcatggagtccttcattgtggtcaccgagtgtgagccgggctgtgctgtggacctcggcttggcgcgggaccggcccctggaggccgatggccaagaggtcccccttgacacctccgggtcccaggcccggccccacctctccggtcgcaagctgtctctgcaagagcggtcccagggtgggctggcagccggtggcagcctggacatgaacggacgctgcatctgcccgtccctgccctactcacccgtcagctccccgcagtcctcgcctcggctgccccggcggccgacagtggagtctcaccacgtctccatcacgggtatgcaggactgtgtgcagctgaatcagtataccctgaaggatgaaattggaaagggctcctatggtgtcgtcaagttggcctacaatgaaaatgacaatacctactatgcaatgaaggtgctgtccaaaaagaagctgatccggcaggccggctttccacgtcgccctccaccccgaggcacccggccagctcctggaggctgcatccagcccaggggccccattgagcaggtgtaccaggaaattgccatcctcaagaagctggaccaccccaatgtggtgaagctggtggaggtcctggatgaccccaatgaggaccatctgtacatggtgttcgaactggtcaaccaagggcccgtgatggaagtgcccaccctcaaaccactctctgaagaccaggcccgtttctacttccaggatctgatcaaaggcatcgagtacttacactaccagaagatcatccaccgtgacatcaaaccttccaacctcctggtcggagaagatgggcacatcaagatcgctgactttggtgtgagcaatgaattcaagggcagtgacgcgctcctctccaacaccgtgggcacgcccgccttcatggcacccgagtcgctctctgagacccgcaagatcttctctgggaaggccttggatgtttgggccatgggtgtgacactatactgctttgtctttggccagtgcccattcatggacgagcggatcatgtgtttacacagtaagatcaagagtcaggccctggaatttccagaccagcccgacatagctgaggacttgaaggacctgatcacccgtatgctggacaagaaccccgagtcgaggatcgtggtgccggaaatcaagctgcacccctgggtcacgaggcatggggcggagccgttgccgtcggaggatgagaactgcacgctggtcgaagtgactgaagaggaggtcgagaactcagtcaaacacattcccagcttggcaaccgtgatcctggtgaagaccatgatacgtaaacgctcctttgggaacccattcgagggcagccggcgggaggaacgctcactgtcagcgcctggaaacttgctcaccaaaaaaccaaccagggaatgtgagtccctgtctgagctcaaggggacaaaaaaaaaaaaaggacttgactccatgacgtcgaccgtggccgctggctggctggacaggcgggtgtgaggagttgcagacccaaacccacgtgcattttgggacaattgctttttaaaacgtttttatgccaaaaatccttcattgtgattttcagaaccacgtcagatataccaagtgactgtgtgtggggtttgacaactgtggaaaggcgagcagaaaactccggcggtctgaggccatggaggtggttgctgcatttgagagggagtagggggctagatgtggctcctagtgcaaaccggaaaccatggcaccttccagagccgtggtctcaaggagtcagagcagggctggccctcagtagctgcagggagctttgatgcaacttatttgtaagaaggatttttaaattttttatgggtagaattgtagtcaggaaaacagaaagggcttgaaatttaataagtgctgctggaaggggattttccaagcctggaagggtattcagcagctgtggtggggaaacatttctcctgaaagactgaacgtgtttcttcatgacagctgctcaaagcaggtttctgagatagctgaccgagctctggtaaatctctttgtcaaattacgaaaacttcagggtgaaatcctatgcttccatgtacattacatggcttaagattaaacaaaaacatttttcaagtctctaactagagtgaactctagagcacagtagttcagaaactatttagagcttccaggatatatttcacagcttcaggcatgtgatcagttagagccgatgaaacctatgcccgcctgtatatatattagcagcttagctagttcataacctgtatattctaaagactgctaaggttttgttttcattttaaatcctagctgattgttgtggtcaatgaaatacccagtttctggagggccaggtgggaaatgctttcactggaccaacacacaaatgatcatcctgaggatctgagcttccctagactccacacaataaccttggggcacccttttagagaagactgttgaaacccacagcactcgttggggtatgaggaaaccagggcttggcacaggaagttcccctttgtagctaaaagtccagaaagaaagggttcatctttttgacttccaactgatattgggaagtttggttgaggttcaagtgtgactccttccagagccacaggtaggggagtgtgaagttgagggggaggaaagctggaaggactctgccttgggagattcccagctctgctttccagcgcttggtggaatctgggctggggaaagacggcaccgggaaactctgcttccccattgtttccatctgatcagctgtggtgtgaggacttctcagacaaaggcaaggcctcgtgcccctgcccagcccattcatggagccctgggccttcttggcttccatagatcctaagctcttgactgtagtttagccagacttgttttgctatcttataagcagttcagaattagggaatgctggttttgaagagcaaaggacaggtagtctagagagggtcgtctggcctgcttgctgggtctttgtaacccagcacttcctcttgccctcctggctttatgtttatggggagaggactcaatagctccaccccttctggcaccagatggggcttggttagtttgcaataagcaccttgcagaggttaaagccagcgggtccctagtcttaggcccagcctgcttgtgtgggctctggcctggcctggtggctggcccagggggcagcagtgcttagagcttctgcagggcttctcttgtttacacagctgcatcagacaatgccatttctccccaccacggaaccttccatctaagatttcttccagggaatgccagcaatcaggcagcacccagctgtgggggcagtggggtgggggagacccacattgatgactttttttttttcttttaatgaagaaacaccaaagaaagctgtggaaaggacctgccccacatgaaaaggataagccaagatggctgtaaacacagagcatttgagctgccactcttggagcacattgatttttcaaaagccagctctgtcaggaaaggaggtgctgttatgagcagctcttccagtgggcaaagaggacgcccataatttcttccattgctagctcatctgtgggaccaatttggtgtaagcaacctgtggcctgcacttgtggcctcgaaggaagcacaaaccctccatccacttcccatttcctctgcccttttccacctcccccttccatcccaccagctgccagtggctcccagaaagccttattgagccccttgttgacacttggggctgcggaggcctctccctactggtctggcctttcctgagaggcaggtcttccgtcctcagagcctttctggaacaaggagaatgcctgtgcaggtggacacacaggcctggcctgtcgctctcacttgtcttccagcggggagcttcacgttgccgagtggaagaaccatgacctccacttgcttccaaggtgctagggaagtttcagggtacgctggttcccctctccagctggaggccgagtttctggggactgcagatttttctactctgtgatcgattcaatgcccgatgcttctgtttcattcccgaccctttctactatgcattttccttttatcaggtgtataaagttaaatactgtgtatttatcactaaaaagtacatgaacttaagagacaactaagcctttcgtgtttttccacaggtgtttaagcttctctgtacagttgaaataaacagacagcaaaatggtgcc

SEQ ID NO: 2268 - DNA, 1165 bp, Homo sapiens
  source 1..1165: mol_type = genomic DNA
ccttggtgtgtgcataaggccacatgacctcaggtcaggaataaaagcttagggctgagcagctcactctttggttgagaatccagttggctcccctggagtgaagttctacacagaccctggaggaaccaccccatctgtttgttggagactgaaccgttgcaaggaacagacgaagatgcagtagccagtgctgacttctctagcatgctctctgaggaggaaaaggaagagttaaaagcagagttagttcagctagaagacgaaattacaacactacgacaagttttgtcagcgaaagaaaggcatctagttgagataaaacaaaaactcggcatgaacctgatgaatgaattaaaacagaacttcagcaaaagctggcatgacatgcagactaccactgcctacaagaaaacacatgaaaccctgagtcacgcagggcaaaaggcaactgcagctttcagcaacgttggaacggccatcagcaagaagttcggagacatgagacgaaagtaggcggtacgaaccctaatggaggcagttttgaggaggtcctcagctccacggcccatgccagtgcccagagcttggcaggaggctcccggcggaccaaggaggaggagctgcagtgctaagtccagccagcgtgcagctgcatccagaaaccggccactacccagcccatctctgcctgtgcttatccagataagaagaccaaaatcccgctgggaaaaacccaggccttgacattgttattcaaatggcccctccagaaagtttaatgatttccatttgtatttgtgttgatgatggaccacttgaccatcacatttcagtattcatagatgactgtcacattttaaaatgttcccacttgagcaggtacacaactggtcataattcctgtctgtgtaattcgatgtatatttttccaaacatgtagctattgtttgctttgatttttgcttggcctcctttatgatgtgcatgtccttgaaggctgaatgaacagtccctttcagttcagcagatcaacaggatggagctcttcatgactgtctccagcaataggatgatttactataaatttcatccaactacttgtgatctctctcacctacatcaattatgtatgttaatttcagcaattaaaagaattgatttt

SEQ ID NO: 2269 - DNA, 1149 bp, Homo sapiens
  source 1..1149: mol_type = genomic DNA
atggaagcagaacctaaaggtttgttggagactgaaccgttgcaaggaacagacgaagatgcagtagccagtgctgacttctctagcatgctctctgaggaggaaaaggaagagttaaaagcagagttagttcagctagaagacgaaattacaacactacgacaagttttgtcagcgaaagaaaggcatctagttgagataaaacaaaaactcggcatgaacctgatgaatgaattaaaacagaacttcagcaaaagctggcatgacatgcagactaccactgcctacaagaaaacacatgaaaccctgagtcacgcagggcaaaaggcaactgcagctttcagcaacgttggaacggccatcagcaagaagttcggagacatgagttactccattcgccattccataagtatgcctgctatgaggaattctcctactttcaaatcatttgaggagagggttgagacaactgtcacaagcctcaagacgaaagtaggcggtacgaaccctaatggaggcagttttgaggaggtcctcagctccacggcccatgccagtgcccagagcttggcaggaggctcccggcggaccaaggaggaggagctgcagtgctaagtccagccagcgtgcagctgcatccagaaaccggccactacccagcccatctctgcctgtgcttatccagataagaagaccaaaatcccgctgggaaaaacccaggccttgacattgttattcaaatggcccctccagaaagtttaatgatttccatttgtatttgtgttgatgatggaccacttgaccatcacatttcagtattcatagatgactgtcacattttaaaatgttcccacttgagcaggtacacaactggtcataattcctgtctgtgtaattcgatgtatatttttccaaacatgtagctattgtttgctttgatttttgcttggcctcctttatgatgtgcatgtccttgaaggctgaatgaacagtccctttcagttcagcagatcaacaggatggagctcttcatgactgtctccagcaataggatgatttactataaatttcatccaactacttgtgatctctctcacctacatcaattatgtatgttaatttcagcaattaaaagaattgattttaatg

SEQ ID NO: 2270 - DNA, 773 bp, Homo sapiens
  source 1..773: mol_type = genomic DNA
gtatttggtagctttaggctgcattaaaccactttgtgatcttttgactgttatggactccaaaatagtccaagtggctttaaatggacttgaaaatattttacgtcttggagaacaagaatctaagcagaatggaataggcattaatccatactgtgctctcattgaagaagcatatggtctggataaaattgagtttttgcaaagccatgaaaatcaggaaatttaccagaaggcatttgatctgattgaacattactttggtgtagaagaagatgaccccagcattgtacctcaggtggatgaaaaccaacaacagtttatatttcagcagcaggaagcaccaatggatggatttcaactttaacttactggaggaaaaaaaatttatggctaaaaagggtagcttcagaaatgacagactttttcattgaatgatgaggacacagcagccatattatgccaagaggaaaaatatcatgatcatattgaaagatcaagcatgagcttccatggtgaagtcttctgtaccaatgcaccagagaatgcctaccatccaaaaaagcagtcagctgatggaaaagaagattattaaacctttgttctgggatttactgttaaaaaacaaacaaaaaacaacaaaaaagcggtgacaggaaacagttaaggaaatgatttaactgaagggaagcaagatttttttaaagcattgttcttaatccccatgactgtccttcagtcacaattccagaataaaagaatctactttgtgt

SEQ ID NO: 2271 - DNA, 2067 bp, Homo sapiens
  source 1..2067: mol_type = genomic DNA
cccctgaaagctggcgaggcgcgcgcgctcccgcggcacgccgcgcctccgccctccgcccgccaacccgctggtccagtccctcttcgcgcccgcttggctccgcccccttcccaattcgctcctcccccaacagactggcggcgcgcggaaaacgcgtcacgtgacgactggccccgcctcttcctctcggtcccatattgaactcgagttggaagaggcgagtccggtctcaaaatggaggtaaaaccgccgcccggtcgcccccagcccgactccggccgtcgccgtcgccgccggggggaggagggccatgatccaaaggaaccagagcagttgagaaaactgtttattggtggtctgagctttgaaactacagatgatagtttacgagaacattttgagaaatggggcacactcacagattgtgtggtaatgagagacccccaaacaaaacgttccaggggctttggttttgtgacttattcttgtgttgaagaggtggatgcagcaatgtgtgctcgaccacacaaggttgatgggcgtgtagtggaaccaaagagagctgtttctagagaggattctgtaaagcctggtgcccatctaacagtgaagaaaatttttgttggtggtattaaagaagatacagaagaatataatttgagagactactttgaaaagtatggcaagattgaaaccatagaagttatggaagacaggcagagtggaaaaaagagaggatttgcttttgtaacttttgatgatcatgatacagttgataaaattgttgttcagaaataccacactattaatgggcataattgtgaagtgaaaaaggccctttctaaacaagagatgcagtctgctggatcacagagaggtcgtggaggtggatctggcaattttatgggtcgcggagggaactttggaggtggtggaggtaattttggccgtggtggaaactttggtggaagaggaggctatggtggtggaggtggtggcagcagaggtagttatggaggaggtgatggtggatataatggatttggaggtgatggtggcaactatggcggtggtcctggttatagtagtagagggggctatggtggtggtggaccaggatatggaaaccaaggtggtggatatggtggaggtggaggatatgatggttacaatgaaggaggaaattttggcggtggtaactatggtggtggtgggaactataatgattttggaaattatagtggacaacagcaatcaaattatggacccatgaaagggggcagttttggtggaagaagctcgggcagtccctatggtggtggttatggatctggtggtggaagtggtggatatggtagcagaaggttctaaaaacagcagaaaagggctacagttcttagcaggagagagagcgaggagttgtcaggaaagctgcaggttactttgagacagtcgtcccaaatgcattagaggaactgtaaaaatctgccacagaaggaacgatgatccatagtcagaaaagttactgcagcttaaacaggaaacccttcttgttcaggactgtcatagccacagtttgcaaaaagtgcagctattgattaatgcaatgtagtgtcaattagatgtacattcctgaggtcttttatctgttgtagctttgtctttttctttttcttttcattacatcaggtatattgccctgtaaattgtggtagtggtaccaggaataaaaaattaaggaatttttaacttttcaatatttgtgtagttcagtttttctacattttagtacagaaactttaacaaaatgcagtttcgaaggtgtttccttgtgagttaacaagtaaagaagatcattgttaattactattttgtatgaattttgctaaagttaactgtaaagaaacacctgctgacttgcagtttaaggggaatctattctccccatttccaaaccatgatatgaatgggcgctgacatgtggagagaatagataatttgtgtgtttgcaatgtgtgttttagataaataggattgggtatttaaattagcatttgtgaattt

SEQ ID NO: 2272 - DNA, 3547 bp, Homo sapiens
  source 1..3547: mol_type = genomic DNA
ggaggtgagcaggaaggagacggccgcccagcagcccgtgggcaggcgcggcggagcgagcggggccggcggcgggcgccgagggacgccgaggcctcgggcgggggctggcccggggttccaggtctccagtgggggctgcagactaagcaaaatgaggcggttcctgaggccagggcatgaccctgtgcgggagaggctcaagcgggacctgttccagtttaacaagacggtggagcatggcttcccgcaccagcccagcgccctcggctacagcccgtccctgcgcatcctggccatcggcacccgttctggagccatcaagctctacggagccccaggcgtggagttcatggggctgcaccaggagaacaacgctgtgacgcagatccacctcctgcccggccagtgccagctggtcaccctgctggatgacaacagcctgcacctttggagcctgaaggtcaagggcggggcatcggagctgcaggaggatgagagcttcacactgcgtggacccccaggggctgcccccagtgccacacagatcaccgtggtcctgccacattcctcctgcgagctgctctacctgggcaccgagagtggcaacgtgtttgtggtgcagctgccagcttttcgtgcgctggaggaccggaccatcagctcggacgcggtgctgcagcggttgccagaggaggcccgccaccggcgtgtgttcgagatggtggaggcactgcaggagcaccctcgagaccccaaccagatcctgatcggctacagccgaggcctcgttgtcatctgggacctacagggcagccgcgtgctctaccacttcctcagcagccagcaactggagaacatctggtggcagcgggacggccgcctgctcgtcagctgtcactctgacggcagctactgccagtggcccgtgtccagcgaagcccagcaaccagagcccctccgcagcctcgtgccttacggtccctttccttgcaaagcgattaccagaatcctctggctgaccactaggcaggggttgcccttcaccatcttccagggtggcatgccacgggccagctacggggaccgccactgcatctcagtgatccacgatggccagcagacggccttcgacttcacctcccgtgtcatcggcttcactgtcctcacagaggcagaccctgcagccacctttgacgacccctatgccctggtggtgctggctgaggaggagctggtggtgattgacctgcagacagcaggctggccaccggtccagctgccctacctggcttctctgcactgttccgccatcacctgctctcaccacgtctccaacatcccgctgaagctgtgggagcggatcattgccgccggcagccggcagaacgcacacttctccaccatggagtggccaattgatggtggcaccagcctgaccccagccccaccccagagggacctgctgctcacagggcacgaggacggcacggtgcggttctgggatgcctcgggtgtctgcctgcggctgctctacaaactcagcactgtgcgcgtgttcctcaccgacacggaccccaacgagaacttcagtgcccagggcgaggacgagtggcccccactccgcaaggtgggctcctttgacccctacagtgatgacccccggctgggcatccagaagatcttcctctgcaagtacagcggctacctggctgtggcaggcacggcagggcaggtgctggtactggaactgaatgacgaggcagcggagcaggctgtggagcaggtggaggccgacctgctgcaggaccaagagggctaccgctggaaggggcacgagcgcctggcagcccgctcagggcccgtgcgctttgagcctggctttcagcccttcgtgttggtgcagtgtcagcccccggctgtggtcacctccttggccctgcactctgagtggcggctcgtggccttcggcaccagccatggctttggcctctttgaccaccagcagcggcggcaggtctttgttaagtgcacactgcaccccagtgaccagctggccttggagggcccactctcccgcgtcaagtccctcaagaagtccttgcgtcagtcattccgccggatgcgtcggagccgggtgtccagccggaagcggcacccggctggccccccaggagaggcacaggaggggagtgccaaggctgagcggccaggcctccagaacatggagctggcgcctgtgcagcgcaagatcgaggctcgctcggcagaggactccttcacaggcttcgtccggaccctgtactttgctgacacctacctgaaggacagctcccggcactgcccctcgctgtgggctggcaccaatgggggcaccatctatgccttctccctgcgtgtgcctcccgccgagcggagaatggatgagcctgtgcgggcagagcaggccaaggagatccagctgatgcaccgggcgccggtggtgggcatcctggtgctcgacggacacagcgtaccccttcccgagcccctcgaagtggcccatgatctgtcgaagagccctgacatgcagggaagccaccagctgctcgtcgtatcagaggagcagttcaaggtgttcacgctgcccaaggtgagtgccaagctgaagttgaagctgacggccctggagggctcaagagtgcggcgggtcagcgtggcccacttcggcagtcgtcgagccgaggactacggggagcaccacctggcagtccttaccaacctgggcgacatccaggtggtctcgctgcccctgctcaagccccaggtgcgctacagctgcatccgccgggaggacgtcagtggcatcgcctcctgcgtcttcaccaaatatggccaaggcttctacctgatctcaccctcggagtttgagcgcttctctctctccaccaagtggctggtggagccccggtgtctggtggattcagcagaaaccaagaaccaccgccctggtaacggtgcgggccccaagaaggccccgagccgagccaggaactcagggactcagagtgatggcgaggagaagcagcccggcctggtgatggagcgcgctctgctcagtgatgagagagtcctgaaggaaatccagagcacactggagggagaccgcgggagcggcaactggcgttcacatcgagccgccgtggggtgcagcctcagcaatggcggagcagagtgagtggctgagcgtccaggctgcgcgatgagcacacactactactgatggcctttcgggggtccctgccccaaccggagaggccggtgcacagggccccgccaggggctgggggcatcccggcttccacaatgcagctgctctgggcctcgggagaggagagaccccagtcccctgggctgcccttcccgggcctcgtctgtctgggtcctttggtcaatgttgcacagtttttattgctcccatccctttttgtagtgggctgggttttaagttataaatgttaactgcctctgggtgaaaaagtttttaataaacacctattacctcttg

SEQ ID NO: 2273 - DNA, 2176 bp, Homo sapiens
  source 1..2176: mol_type = genomic DNA
cgggcgggcgggcgggacggcgccccccgcggccgggcctggccgggctgcgctaggctgggctcgggcagggtcgcaggggcgggggtggcaggggagcgggtggcagccccgcgggtcacagcgccgccgccgcccatgctgctgcccctagcctgcctgcacggccgcgtcgctcagtgcctgacctccttgcttttgcttgcagagccgctcccgaggccccggcgcggcgcgagggcgcggggcgcggcgtccacaggcgccgaggctgcccccgccgccccgcccgcgaagatggcggcggaactctacgctcccgccagcgccgcggccgcggacctagccaacagcaacgccggcgccgccgtgggcaggaaggccgggccgcgcagcccgcccagcgcccccgcgccagcgccgccgccgcccgcgcccgcgccgcccacactcggcaacaaccaccaggagagccccggctggcggtgctgccgccccacgctgcgcgagaggaacgcgctcatgttcaacaacgagctcatggccgacgtgcacttcgtcgtggggcccccgggggcgaccaggacggtgcccgcccacaagtacgtcttggctgtcggcagctccgtcttctatgccatgttctacggagacctggcggaagtcaaatctgaaattcacattccagacgtggagcccgcagcctttctgatcctcttaaagtacatgtacagtgatgagatcgatctggaagccgacacggtgctggccactctgtacgctgctaagaagtacatcgtcccagcattggcaaaagcctgtgtcaactttctggagacaagtttggaagccaagaacgcctgcgtcctgctgtcccagagccggctgtttgaggagcccgagctgacgcagcgctgctgggaggtcattgacgcacaggccgagatggccctacggtccgaaggcttctgtgagatagaccggcagacgctggagatcattgtcactcgggaggccctcaacaccaaagaggcggtggtcttcgaggccgtcctgaactgggccgaggcggagtgcaagaggcaggggctgccaatcaccccacgaaacaagaggcatgttctggggcgagccctctatctggtccgaattccaaccatgaccctagaggagtttgccaacggcgctgcccagtcagacatcctgactctggaggagacccacagcatcttcctgtggtacacggccaccaacaagccccgcctggactttcccctgaccaagaggaagggcctcgccccgcagaggtgccaccgattccagtcttctgcctaccgcagcaaccagtggcggtaccgcgggcgctgcgacagcatccagtttgcagtggacagaagggtatttattgcagggctgggcctgtatggctccagctctgggaaggctgagtacagcgtgaagattgagctcaagcggctcggggtggttctggctcagaacttgaccaagttcatgtcagacggatccagtaacaccttcccggtctggtttgaacacccggtccaggttgaacaagacaccttctacacggccagtgccgtcctggacggcagcgaactcagctactttgggcaggaggggatgacggaagtgcagtgtggaaaggtggccttccagttccagtgctcctcggacagcaccaacgggactggggtccagggtgggcagatccctgagctcattttctatgcctgaggtgcccggggaggctgcagcaggtcagcgagtgagtggaggggaagtcaagatgctaactgcttcttgacaccatgaaaggctgctcttaactttgtctctctttgacatgtagtcagctgaagcttgactgtgtagagacattttccacacagccagaacccagggattggagtcttaggcatctctggtacagtggggtgcacgtctcaggtggaggaagatttacggctcaagacaggccccagatcccctcccagtggcacccatgccacctgctttgaggggttggatcttcctgctaccctcttggattctaagtggttccaagcttaacttgagaccttcccttcaaatctaaaattggcaaaaagtcacttaaaatagtggacttctgtaataaaggttgcctaaaataaca

SEQ ID NO: 2274 - DNA, 3571 bp, Homo sapiens
  source 1..3571: mol_type = genomic DNA
gcggcgcccagggcggtagcgtgaaacttggtggaagacgctgaccagtcgtgttggaatcaaaacagcggggaccctgcgccatgtcgcgactgatcgtgaagaatctcccgaatgggatgaaggaggagcgtttcaggcagctgtttgccgccttcggcacgctgacagactgcagcctgaagttcaccaaagatggcaagttccgcaagtttggttttattggcttcaagtccgaggaagaggcccagaaggcacagaagcatttcaacaagagcttcatcgacacatcccggatcacagtggagttctgcaagtcattcggggacccggccaaacccagagcctggagcaaacatgcccagaaaccaagccagcccaagcagcctccaaaagactctactactccagaaattaagaaagatgagaagaagaaaaaggtggcaggtcaactggagaagctgaaggaggatacagagttccaggagtttctgtcagttcatcagaggcgggcgcaggcagccacttgggcgaatgatggcctggatgctgagccctcgaaagggaagagcaagccggccagtgactacctgaacttcgactccgattctgggcaggagagtgaggaggagggagccggggaggacctggaagaagaggcaagcctcgaaccaaaggcagctgtgcagaaggagctgtcggacatggattacctgaaatccaagatggtgaaggctgggtcgtcctcttcctcggaggaagaggaaagtgaagatgaagccgtgcactgtgatgaagggagtgaggccgaggaagaggattcctccgccaccccagtcctgcaggaaagagacagcaagggtgcaggccaagagcaagggatgccagctgggaaaaagagaccaccggaggccagagccgagacagagaaaccagcaaaccagaaggaacccaccacctgccacaccgtgaagctgcggggagccccgttcaatgtcacagagaaaaatgttatggaattcctggcacccctgaaaccagtggccattcgaattgtgagaaacgctcatgggaataaaacaggatacatctttgtggatttcagcaatgaagaggaagtgaagcaagctctgaaatgcaaccgggagtacatgggtgggcgctacatcgaggtgttcagggaaaagaacgtccccaccaccaagggtgcaccaaagaataccaccaaatcctggcaaggccggatactcggggagaacgaagaggaggaggacctggccgaatccggaaggctctttgtacggaacctgccctacaccagcaccgaggaggatctggagaagctcttctccaaatatggtcccctgtctgagctccactaccccatcgacagcctgaccaagaaacccaagggttttgcattcatcaccttcatgttccctgagcacgctgtgaaggcctactcggaggtggacgggcaggtattccagggcaggatgctccacgtgttaccatctaccatcaagaaggaagccagcgaggatgccagtgccctgggatcgtcgtcctacaagaagaagaaggaggcccaggacaaagccaacagtgccagctctcacaactggaacacactattcatggggccgaatgccgtggccgatgccatcgcacagaagtacaacgccaccaagagtcaagtgtttgaccacgagaccaagggcagcgtggccgtgcgcgtggctctgggggaaacccagctcgtccaggaagtgcggcgttttctcatagacaacggggtcagcctggattccttcagccaggctgcagcagagcgaagcaagactgtgattctggtcaagaacctcccggcaggcaccctggcggcccagctgcaggagaccttcggccattttggcagcctgggccgcgtgctgctgccagagggcggaatcactgccatcgtggagttcctggagcccctggaggcccgcaaggccttcaggcatctggcctattccaagttccatcatgtccccctctatctggagtgggctccagttggcgtcttctccagcacagccccacagaagaaaaagctccaagacacaccttcagaacccatggaaaaggacccagcagagccagaaacagtgcctgatggcgaaaccccagaagatgaaaatccaacagaggaaggagcagacaactcttcagcaaagatggaagaggaggaggaggaagaggaagaagaagaagagagcctcccaggatgtactctgtttattaagaatctcaattttgacacaacagaagagaagctgaaggaagtgttttcaaaagtggggacagtgaagagctgctccatctccaagaagaagaacaaagcaggagtgctcctttccatggggtttggatttgtggaatacaggaagccggagcaagcccagaaagctctcaagcagctccagggtcacgtcgtggacggccacaagctggaagtgaggatctcggaacgagccactaagccagccgtgacattggctcggaagaaacaagttcccagaaagcagaccacctccaagatcctggtgcggaacatccccttccaggcccacagccgggagatccgagagctcttcagcacctttggggagttgaagacggtccgcctgccaaagaagatgactgggacaggcacacacagaggcttcggctttgtggacttcctcaccaagcaggatgcgaagagagccttcaacgccctgtgtcacagcacccacttgtacgggcggaggctggtgctggagtgggccgactccgaggtgaccctgcaggccctgcggcggaagacggccgctcactttcacgagcccccgaagaaaaagcggtctgtggtgttggacgagatcctggagcagctggaaggcagtgacagcgacagcgaggagcagacccttcagctgtgagctggcaccgagaggggctgctgagctagaattcccacctatgtctttccaagggactgttcacggcttgggacttggtctctgtcctgccccatcctcgtcacttgggaccacgagccctggttcagtcacccagggaagcctcccagcggctcatgaagcatcgagctccaagcccagatgccaagctccctggctgagctgaatgatgtcactcatggtggacgcgttctgctcacgggcccagagccctgtgaaatgcatcaaggtcctctccgctggccagcagcatccccaggcttctctcaggcgcccgtgttcacattttctccagcctgagacgcagcctcccgcctggaagggcctgtgccagcaccaggcagagggcaagacggagagggcagagcaagaactgcactgcatctcactgcagtctgaatctagacatcgccattccccgaggtgcgacctcagactaatgacatcctggctgagcctctgtttttctctctaggaaatgggggtgataattgtgcctacctcagatagacagtgccagaattaagtgagtcaagccaagtaaagcccagagaagattctcatca

SEQ ID NO: 2275 - DNA, 845 bp, Homo sapiens
  source 1..845: mol_type = genomic DNA
gtcacgcgcccgcccgaaggctcctgtcgggacagggcgccgccccgtgtcggcccccgcagagctcgcggcccccgcctgtccgggcgccgccatggagcgcatcgagggggcgtccgtgggccgctgcgccgcctcaccctacctgcggccgctcacgctgcattaccgccagaatggtgcccagaagtcctgggacttcatgaagacgcatgacagcgtgaccgttctcttattcaactcttctcggaggagcctggtgttggtgaagcagttccggccagctgtgtatgcgggtgaggtggagcgccgcttcccagggtccctagcagctgtagaccaggacgggcctcgggagctacagccagccctgcccggctcagcgggggtgacagttgagctgtgtgccggcctcgtggaccagcctgggctctcgctggaggaagtggcttgcaaggaggcttgggaggagtgtggctaccacttggccccctctgatctgcgccgggtcgccacatactggtctggagtgggactgactggctccagacagaccatgttctacacagaggtgacagatgcccagcgtagcggtccaggtgggggcctggtggaggagggtgagctcattgaggtggtgcacctgcccctggaaggcgcccaggcctttgcagacgacccggacatccccaagaccctcggcgtcatctttggtgtctcatggttcctcagccaggtggcccccaacctggatctccagtgagactccagggttctagacagaggccagtcttggccactcaccccacaccccgcggaccccaataaaggcttgcatagctcca

SEQ ID NO: 2276 - DNA, 1697 bp, Homo sapiens
  source 1..1697: mol_type = genomic DNA
agctgggcagagccctgggggcgcggtgctgccgcctccaggtctccgccccgtgtgtgcgccctgcacttagggatccctccctcactgccccggtactcacaagcttctcggccccgaccttcgccctgggaggttctggccaggtgccgggaggggcgctgtgtcgagggcgatccccccaaagcagcgtcccgtgctaaagaaacagagcctcactctgtcacctaggctggagtgcagtggtgcaattatggctcactgcagtttcaacctcccagattccagtcatcctcctgcctcagccacccaagaagctgggaccacaggtactgcttaggatgaatatgatttggagaaattccatttcttgtctaaggctaggaaaggtgccacacagataccaaagtggttaccacccagtggcccctctgggatcaaggattttaactgacccagccaaagtttttgaacacaacatgtgggatcacatgcagtggtctaaggaagaagaagcagcagccagaaaaaaagtaaaagaaaactcagctgtgcgagtccttctggaagagcaagttaagtatgagagagaagctagtaaatactgggacacattttacaagattcataagaataagtttttcaaggatcgtaattggctgttgagggaatttcctgaaattcttccagttgatcaaaaacctgaagagaaggcgagagaatcatcatgggatcatgtaaaaactagtgctacaaatcgtttctcaagaatgcactgtcctactgtgcctgatgaaaaaaatcattatgagaaaagttctggttcttcagaaggtcaaagcaaaacagaatctgatttttccaacctagactctgaaaaacacaaaaaaggacctatggagactggattgtttcctggtagcaatgccactttcaggatactagaggttggttgtggagctggaaatagtgtgtttccaattttgaacactttggagaactctccggagtcctttctgtattgttgtgattttgcttctggagctgtggagctcgtaaagtcacactcgtcctacagagcaacccagtgttttgcctttgttcatgatgtatgtgatgatggcttaccttacccttttccagatgggatcctggatgtcattctccttgtctttgtgctctcttctattcatcctgacaggacattgtttatctgaaaatttttatgttcgaggagatggtaccagagcatatttctttacaaaaggggaagtccacagtatgttctgcaaagccagtttagatgaaaagcaaaatctggttgatcgccgcttacaagttaataggaaaaaacaagtgaaaatgcactgagtgtggattcaaggcaaattccagaaaccattgcaccagactcagaatagctccaatatggtatctacactcctttcacaagactgaactttgtaacatgttaaggtacaaagccagaggactgtgctattcaaggactactgtaagtctattgtttctcaaaagacaatgagaaaaaaagaagagaatttgtatttcctgccgttttgtcataggtgagctcctttgtgcattttaagcacatgtaagtggttcagcacagtatgcctttttctgtgctttgaaaacttgatatgctcaagcttgtttgaatttattacatctaa

SEQ ID NO: 2277 - DNA, 800 bp, Homo sapiens
  source 1..800: mol_type = genomic DNA
gaacgcgtgcgcgcgtgcggcctggcgcttccggcaccggccgaggtgcgggtcgcctccagagatcctgtgccttcaaaccctacgagtccatactttaaaacaaaatgaagaaagtaaggcttaaggaactagagagtcgcctgcaacaagtggatggatttgaaaagcccaagctacttctggaacagtatcctaccaggccgcacattgcagcatgtatgctctatacaatccataacacttatgatgacattgaaaataaagtcgttgcagatctaggatgtggttgtggagtacttagcatcggaactgcaatgttaggagcagggttgtgtgttggatttgacatagatgaagacgcattggaaatatttaataggaatgcagaagagtttgagttaacaaatattgacatggttcaatgtgatgtgtgcttattatctaacagaatgtccaagtcattcgatacagtaattatgaatcctccctttgggaccaaaaataataaagggacagatatggcttttctaaagactgctttggaaatggcaagaacagcagtatattccttacacaaatcctcaactagagaacatgttcaaaagaaagctgcagaatggaaaatcaagatagatattatagcagaacttcgatatgacctgccagcatcatacaagtttcacaaaaagaaatcagtggacattgaagtggacctaattcggttttccttttaaaagccccgcaaacaaaagtcgtttaaaacctatttaaaatgaataaaaaattggtttactaaa

SEQ ID NO: 2278 - DNA, 615 bp, Homo sapiens
  source 1..615: mol_type = genomic DNA
acctcgcccaggctgccagaccggaagcgctccgctgtacctggatcctgctcctctgggttgaaacccgggcgccgccaagatgccggcttaccactcttctctcatggatcctgataccaaactcatcggaaacatggcactgttgcctatcagaagtcaattcaaaggacctgcccccagagagacaaaagatacagatattgtggatgaagccatctattacttcaaggccaatgtcttcttcaaaaactatgaaattaagaatgaagctgataggaccttgatatatataactctctacatttctgaatgtctgaagaaactgcaaaagtgcaattccaaaagccaaggtgagaaagaaatgtatacgctgggaatcactaattttcccattcctggagagcctggttttccacttaacgcaatttatgccaaacctgcaaacaaacaggaagatgaagtgatgagagcctatttacaacagctaaggcaagagactggactgagactttgtgagaaagttatcaagggtgatttgaaattttctgcagcattaaagctggcgcttaataagaataagtaataataaagaaatttctaacattccatgtc

SEQ ID NO: 2279 - DNA, 6152 bp, Homo sapiens
  source 1..6152: mol_type = genomic DNA
atggcggacaccgacctgttcatggaatgtgaggaggaggagttggagccatggcagaaaatcagtgatgtcattgaggactctgtagttgaagattataattcagtggataaaactaccacagctggcaatcctttggtccagcaaggtggacagccactcatcctgacccagaatccagccccaggtctgggcacaatggttactcaaccagtattgaggcctgttcaggtcatgcagaatgccaatcatgtgactagttcccctgtggcctcacaaccaatatttatcactacgcagggatttcctgtaaggaatgtccggcctgtacaaaatgcaatgaatcaggttgggattgtgctgaacgtacagcaaggccaaacggttagaccaattacactagttccagccccaggtacccagtttgttaagccgacagttggagttccacaagtgttctcccagatgacccctgtgaggccaggctccacaatgcctgtgaggcccaccaccaacaccttcaccaccgtcatcccggccactcttaccattcgaagcaccgtcccacagtcccagtcccagcagaccaagtccactcccagcacttctaccactcccactgccacacagccaacctcactggggcaactagctgttcagtctccaggccagtcaaaccagaccacgaatcccaagctagctccctccttcccctctccacctgcagtgagcattgccagctttgtcactgtgaagcgacctggtgttacaggcgaaaatagcaatgaagtggccaaattggtgaatacccttaacaccatcccttccctgggccagagtcctgggccagtggtggtgtccaacaacagctctgctcatggctctcaaagaaccagcggacctgagtcttcaatgaaagtgacctcttccatcccagtatttgacctccaggatggtggacggaaaatatgtccacgatgtaatgctcaatttcgtgttactgaagctttgagaggtcacatgtgttactgttgcccagaaatggttgaataccagaagaaaggaaagtccctggattcagaacccagtgtcccatcagcagcaaagcccccatcccctgagaaaacagctcctgttgcttccacaccctcttctacacctattcctgctctgtcaccgcctaccaaagtaccagaaccaaatgagaacgtgggcgatgccgtccagaccaaactcattatgcttgtagatgacttctactatggacgggatggtggcaaagtagcccagctcacaaatttccctaaggtcgccacatctttccgatgcccacattgtaccaaaaggctaaaaaacaatattcgattcatgaaccatatgaaacaccacgtagaactcgatcagcagaacggtgaggtagatggtcacactatctgccagcactgttaccgccagttttccactcccttccagcttcagtgccacttggaaaatgttcatagtccctatgaatctactaccaagtgcaagatctgtgaatgggcgtttgaaagtgagccactatttctccagcatatgaaggatactcataagcctggagagatgccttatgtttgccaggtgtgtcaatatcgctcctcactctactctgaggtagatgtccattttcggatgatccatgaggatacccggcatctgctctgcccttattgcctgaaggtcttcaaaaatggcaatgcattccaacagcattacatgaggcaccagaagagaaatgtttatcactgcaacaaatgccggctgcagtttctctttgccaaggacaaaattgaacacaagcttcaacaccataaaaccttccgtaaacccaagcagctggagggcttgaaaccaggcaccaaggtgacaatccgggcttcccgagggcagccacgaactgttcctgtatcctctaatgatacacctcccagcgccttgcaggaggcagcaccgctgacctcctcaatggaccctctgcctgtcttcctttatccccctgtccagcgcagcatccagaagagagctgttaggaaaatgagtgtcatgggccggcagacatgcctggagtgcagcttcgagatcccagacttccctaatcatttccctacttacgtacactgctctctgtgtcgctatagcacctgctgttctcgagcttatgccaaccacatgatcaacaatcatgttccacggaagagccccaagtatttggctttgtttaaaaattctgtgagtggaatcaagctggcctgcacttcatgtacctttgttacctctgtgggcgatgctatggccaagcatttggtattcaacccctctcacagatccagcagcatcctgccacggggactcacttggatagctcactcaaggcatggccagactcgtgaccgagtgcatgaccggaacgtgaagaatatgtaccctcctccttccttccccactaacaaagctgccactgtgaaatctgcgggggccaccccagctgagcctgaagagctactaactcccttagccccagcactcccatcaccagcctcaactgcaaccccaccaccaacccccactcacccgcaggctttagcccttccaccgctggctacagagggagccgaatgtctgaatgttgatgatcaggatgaagggagcccagtcacccaagaacctgagctagcatcaggtggtggtggtagtggtggagttggcaaaaaggagcagctgtctgtgaagaagcttcgagtagtactgtttgctctatgctgcaatacagaacaggcagctgaacacttccgaaatccccagcgacgtattcgccgttggcttcgacgtttccaggcctcccagggggagaatctagagggcaaatatctgagctttgaggcagaagagaaactggctgagtgggtgctaacccagcgcgaacaacagctacctgtaaatgaggagaccttgttccagaaggccaccaaaataggacgttctttggaaggggggtttaagatctcctatgagtgggctgtgcgtttcatgctgcggcaccacctgactccccatgcccggcgagctgtggcccacaccctacctaaggatgtagcagagaatgcaggactcttcattgattttgtacaacggcagattcacaaccaggacttacccttgtctatgattgtggctattgatgagatctctttgttcctggatacagaggtgctgagcagtgatgatcgaaaggagaatgccctgcagacagtgggcacaggggaaccttggtgtgatgtagtcctagccattctggcagatggcactgtccttcccaccctggttttctacagagggcagatggatcagcctgctaacatgccagactccatattgctagaggcaaaggagagtggctacagtgatgacgagatcatggagctgtggtcaactcgagtgtggcagaagcacacagcttgccagcgcagcaaaggcatgcttgtgatggactgtcatcgcactcacttgtcagaagaggtactggctatgcttagtgcctctagcactttgcctgcagtggtcccagcaggctgtagctccaaaattcagccattagatgtatgcatcaaaagaactgtcaagaacttcctgcataaaaaatggaaggaacaggctcgggaaatggcagatactgcatgtgattctgatgtcctgcttcagctggtgcttgtctggctgggtgaagtgctaggtgtcattggggactgtccagagctagttcagcgctccttcctggtggctagtgttctgcctggccccgatggcaacattaactcacctacaagaaatgctgacatgcaggaggagctaattgcctccctagaggagcaactgaagctgagtggggaacattctgagtcttccactccacgacccagatcatctcctgaagagacaattgagcctgaaagtcttcaccagctctttgagggtgaaagtgagaccgagtctttctatggctttgaagaagctgacctagatctgatggagatttgagtgttggggtcatgagggggtgtggagtgagggtgggaacatgtgagggagggtaaaggggcttagggaaaagggggcataccaggtggggtatttggtttctattttttaattttataccaccactcccccctgaagttgacttacacttccctgtggatttgtggattaattaggaaaaccaatagtaatcacgtctgagccaaggagctggcccattggtcattcacttctgctaaaaacaggtttttgtgactttttttttttttaaatttaaatcactgtgtttggtatttttctgacaaaattaagaaaaagaaaaaaaattatttgtgggcaaatgttaaatttttttgtttccccttttacctcaattgtatcatagtactgggtttttttgtttgttttattgtgtggccaatgtctttgggcatgatgctatctaatcattgttaatgtgagaacatttctgaagatgggaaagacaaattatgtagctcacaaactggtttattatatatatggataaaaaacttttttcattgtggtcttaacacttttatataaaaatgaaaatggaaaaaaagtcccactgaactctctcttccttctccttttctttccttccctctccagagatgttggtttctacagcaaccctagatataaaattgtggctttaaaaatgcatgaaaccacctttaattatccagaatgaatagatttgtcttttcctcaccaccttccctccaaaacatgacataaacaatattttttgcacttgtgatccttggcccctttccccattctcaacaccatccatccctctggacaaaggatcatacaggtgttattagcaagcaagagatactgaagcgatcaaacagttttagggtggaagccattcccagtttgagtcttcatcctgtaagcccccaggggcagtccctgctttactgaacttcatcctgttagatggagagcatgcctgtttaagggattactggtcctacagccaggagctaattgttcaagaagtgttgaactttaaaaagacaagaccacttgttgaaatccagcgtgctctgtggctttcccctatttctcttaatacttagggaagaatctgacaggaagaagcgcacaggggtgtgcacaaagaaaatgacatgaatctttatttttcactgccagcttcaaggaaagaaaattttttctacaatttgcatgagggatttttttaattgtatgtactcatggttgtaaaccaaaacgtactgtaccgtacagagaaaaggagcaaaaaaccaagtcttctgtttatcctgaggctttccacaatgttcccctcctgtgagccaaggaggcaaactgcacaagcttgtaaatggttcgtctttaaaatgtacataagtggaacatttaataaaatgaggggaaatggatttataaacttgttttttttctaggtgaccctgtttaataggctttcacagactggggaatgctcaagatgtgatgggcctggtggtacaggtgtgacatttgttaccacccatttctcccaccccaccctgcttttttgtttgtttgttttttcatcccccagcacactataatatagtgaactggaaaagtcccttccagaaacagcttggccagctttgtgaacctttgacatctgaaaacaaccaaggatccatctgggcttctcttccccagctttttgcctgatgccattttattgacagacaatggactttgaagtcagcctttgcctttgagaaagttcaagaactatggttggtcacgtctatctacaacctaatcctactctttggtagtctctgcagcagccacagccttagcagagctggggttcctgtcttctgcacacgattgactttcttgatgggtaattttttttaagattataccaacagtggatcagctgggttttggccaggaagttgtctttgtggactctgcctgcatggcttagtagtagaaggaaatttttttttggttttgttttttataattcagtttaatcaataaacatgtatttattgactgtt

SEQ ID NO: 2280 - DNA, 365 bp, Homo sapiens
  source 1..365: mol_type = genomic DNA
cagaagaatagaaggaaggtgataggatgtgatgatagaatttgtgatagccaagcaacaacttttcctaattcggcatgttaaaaaataagggtcactcatctaagaaagataacttggcagtcaatgcagttgctttacaagatcacattttacatgatcttcaacttcgaaatctttcagttgcagatcattctaagacacaagtacaaaagaaagagaacaaatctctaaaaagagatacaaaggcaataatagatactggacttaaaaaaactacacagtgccccaaactagaagactcagaaaaagaatatgttcttgatcccaaaccgccgccgttgactttgggataccattcatag

SEQ ID NO: 2281 - DNA, 2260 bp, Homo sapiens
  source 1..2260: mol_type = genomic DNA
cgtctttgcagcagaagaatagaaggaaggtgataggatgtgatgatagaatttgtgatagccaagcaacaacttttcctaattcggcatgttaaaaaataagggtcactcatctaagaaagataacttggcagtcaatgcagttgctttacaagatcacattttacatgatcttcaacttcgaaatctttcagttgcagatcattctaagacacaagtacaaaagaaagagaacaaatctctaaaaagagatacaaaggcaataatagatactggacttaaaaaaactacacagtgccccaaactagaagactcagaaaaagaatatgttcttgatcccaaaccgccgccgttgactttggcacagaagttgggcctcattgggcctccaccacctccactgtcatcagatgaatgggagaaggtgaaacagcgctctctcctgcaaggggactccgtgcaaccatgccccatctgtaaagaagaattcgagcttcgtcctcaggtgctgctttcatgctcccatgtgttccacaaagcatgtcttcaggcttttgaaaagttcacaaataagaaaacctgtcctctctgtagaaagaaccagtatcaaacccgagtgatacacgatggggcccgcctgttcagaatcaagtgtgtgaccagaatccaagcctactggagaggatgtgttgttagaaagtggtacagaaacctgaggaaaacagtacctcccacagatgccaagttaagaaaaaaattctttgaaaaaaagacacaagactggaaaccagcttaatttttcccatctcctgggctatatgtaaatgaagacatctgctgcacatctcatagtaatgaaaatagaagctgcctataaaaataaagcccccacatgctaccattgtattgagtacctcgtggggtcatcacaatgagctttagagctaacttccatgtctacccttcctcttaaccactatttatgctttagttttacttttgggggacttatttaacaatttcccattccttgtccccatatgaaaaggacagtcctaccccatcagcctgtggcttcaggcaaacagcagcagctccgaggctgtcatatgaaagccatcacttcttcctggcagtgttggcctgagaagagctgtagcatttataatggcccagcacacagtaggtgctggaaattctgtatttattatcactattaactcctttcctagaatatggagatgagttactgtgtgttctgttcctgagagcagtgtctctgatcttcagagatcattcgtctcgggtgttcattctcaatttggtaaaggaccgccatgcacgattgcgtcatccttcctttacattctttccagttttttatcttcagtcgttgacagtcagttgtgttctctgggctactcttagtaatttctaatatgtcatagtaggttgtctcttaaatcagaagtgattttttgtcacctcttatacaattttaattacagatttgatagtcattttaccttatatatataaatatttttcatgtgcacacatcattttataagaactcttgaagataaaggcccactgaaagtgttggtggtctcagcccattgaactggacgagaactggcccaggttgctggaaacaagtgaagcaaccattacaatgtgccttgtgttatcttgtaaagtagccagtgaaggttaagtttcagcgttcagtgctcaggtgttcaaatgctgcagccttcagcttcatggaaaaaggaaacgaaaaataacaaaaagcaagtgaccaagagcagtcggggcagggagacctgatcaaacaagttcctcagtttctaattcagtgtctcccacagagagatggaactttacaaggcagattcatagctctgtcccactggacgttgggtccgctgccctgtggccatcccacctccccacaaatactgttttttgttttatccttggttcatcccaactgctgcctcctcgtcctgagccctcatcgctcggaacgccccgctctgatccccgtgtctgcttttctgagcacactcttgcccgcccccgcatgtcctgcccgttcctactggttccctctgccttgcttaaaatgtgccagtttttcaaagcctagctgaagctttcttccaatttctttggtcttctctaaacctctattgtatgtttaaacaacaccatctaagagatcaagaagaacagaagtatgaatgctattcta

SEQ ID NO: 2282 - DNA, 1746 bp, Homo sapiens
  source 1..1746: mol_type = genomic DNA
tatattttgaatacatctgtcttcataaaatacaccatgtccaaaatctaaaagggccaattccaaattattccaccagctttgaagggaattgaagcaagaataacaagacagaagaatagaaggaaggtgataggatgtgatgatagaatttgtgatagccaagcaacaacttttcctaattcggcatgttaaaaaataagggtcactcatctaagaaagataacttggcagtcaatgcagttgctttacaagatcacattttacatgatcttcaacttcgaaatctttcagttgcagatcattctaagacacaagtacaaaagaaagagaacaaatctctaaaaagagatacaaaggcaataatagatactggacttaaaaaaactacacagtgccccaaactagaagactcagaaaaagaatatgttcttgatcccaaaccgccgccgttgactttggcacagaagttgggcctcattgggcctccaccacctccactgtcatcagatgaatgggagaaggtgaaacagcgctctctcctgcaaggggactccgtgcaaccatgccccatctgtaaagaagaattcgagcttcgtcctcaggtgctgctttcatgctcccatgtgttccacaaagcatgtcttcaggcttttgaaaagttcacaaataagaaaacctgtcctctctgtagaaagaaccagtatcaaacccgagtgatacacgatggggcccgcctgttcagaatcaagtgtgtgaccagaatccaagcctactggagaggatgtgttgttagaaagtggtacagaaacctgaggaaaacagtacctcccacagatgccaagttaagaaaaaaattctttgaaaaaaagttcacagaaatcagccaccgcatcctgtgctcatacaacaccaacattgaagagctctttgcagaaatcgatcagtgcttggccataaatcgaagtgttcttcagcagttggaagaaaaatgtggccatgagatcacagaagaggaatgggagaaaatccaagtgcaggctctgcgccgggagacccacgagtgctccatctgcctggcccctctctccgctgctggcggtcagcgcgtgggtgcaggcaggcgttccagagagatggccctcctgtcctgctcacatgtgttccaccatgcgtgtctgctggcactagaggagttctccgtgggagacaggcctcctttccatgcctgtcctctctgccgctcctgctaccagaagaagattcttgaatgttgaattcatagtcaaggaaagttaggtaattctgaggaaaaaagtttaccatcattttggatgaactgcatgagttctgggttaagtactacaatgtaatctgtttcccagggaaataagctattggtagttgtaggaaatcttagtatattttaaaagctgacatcccacctaattttaatctttggtctctaaaaagtaaatttcaaatttatgagtttaatcacttcaaatatgaatagcaaaaaatgagagcttgcttacttctaaaaattgaggttaagatatagctagtgtctgaacgacactccttaaagtaagttccaaatgtaaaacactccttaagttccaaatgttttccgctaatagtctgtcctaaagcctttgccattcctaatactcgttttgtaataattgctgtatttctgtgtaataaaatataaaaataaaatattcagtggtattcaacatc

SEQ ID NO: 2283 - DNA, 2171 bp, Homo sapiens
  source 1..2171: mol_type = genomic DNA
agaagagccctgggctgggtggggcagggcggaagggccctggccttgttgggtggaggtgaagagttaatggctccgcgcgcaggcactgccctctgaactggaacaaaatgcaacttccggttggagtcactcggccaggcgccggcgacctgaggggagagggaacgcagctgaaagcgtgaactgtacctgtcatttactccatcctttatagtgatgctacaggacgaagaggaatggataaaaacattggcgagcaactcaataaagcgtatgaagccttccggcaggcatgcatggatagagattctgcagtaaaagaattacagcaaaagactgagaactatgagcagagaatacgtgaacaacaggaacagctgtcacttcaacagactattattgacaagctaaaatctcagttacttcttgtgaattccactcaagataacaattatggctgtgttcctctgcttgaagacagtgaaacaagaaagaataatttgactcttgatcagccacaagataaagtgatttcaggaatagcaagagaaaaactaccaaaggtaagaagacaagaggtttcttctcctagaaaagaaacttcagcaaggagtcttggcagtcctttgctccatgaaaggggtaatatagagaagactttctgggatctgaaagaagaatttcataaaatatgcatgctagcaaaagcacagaaagaccacttaagcaaacttaatataccagacactgcaactgaaacacagtgctctgtgcctatacagtgtacggataaaacagataaacaagaagcgctgtttaagcctcaggctaaagatgatataaatagaggtgcaccatccatcacatctgtcacaccaagaggactgtgcagagatgaggaagacacctcttttgaatcactttctaaattcaatgtcaagtttccacctatggacaatgactcaactttcttacatagcactccagagagacccggcatccttagtcctgccacgtctgaggcagtgtgccaagagaaatttaatatggagttcagagacaacccagggaactttgttaaaacagaagaaactttatttgaaattcagggaattgaccccatagcttcagctatacaaaaccttaaaacaactgacaaaacaaagccctcaaatctcgtaaacacttgtatcaggacaactctggatagagctgcgtgtttgccacctggagaccataatgcattatatgtaaatagcttcccacttctggacccatctgatgcaccttttccctcactcgattccccgggaaaagcaatccgaggaccacagcagcccatttggaagccctttcctaatcaagacagtgactcggtggtactaagtggcacagactcagaactgcatatacctcgagtatgtgaattctgtcaagcagttttcccaccatccattacatccaggggggatttccttcggcatcttaattcacacttcaatggagagacttaagacacatttgaaaacagacatatcaagttctatgtgatgattttgggtttttaatactataaatacttgattgtaaactaaattcaagatcatttataggaaaatctagtttcacagctatttgaatttttttctggatttactatataactcttattttttaaaagatcattctgttctttcaaggagaaataagcctaaaagaagaaaaacaaaaaaaattctgtataaaactgtaatcctttgtattcatgtttacagtgctattactataattcaaaattatgtatgtgacttagagttatataatcataatttatgtttatttcaaatatctaagtttattgcttggatttctagtgagagctgttgaatttggtgatgtcaaatgtttctagggtttttttagtttgtttttattgaaaaatttaattatttatgctataggtgatattctctttgaataaacctataatagaaaatagcagacaacataaacatctttgtaaatatcaaacctaatacatttcttgtccagtgataaaacaactggtagaattatttaaacactttagatttttaaataatatacatggctttaatttttactgtgtgtatagctacatgatgaaattaattaaatattaagaggta

SEQ ID NO: 2284 - DNA, 840 bp, Homo sapiens
  source 1..840: mol_type = genomic DNA
cgcggagctgaggagcagggccgggcgccatggcaccgtggggcaagcggctggctggcgtgcgcggggtgctgcttgacatctcgggcgtgctgtacgacagcggcgcgggcggcggcacggccatcgccggctcggtggaggcggtggccagactgaagcgttcccggctgaaggtgaggttctgcaccaacgagtcgcagaagtcccgggcagagctggtggggcagcttcagaggctgggatttgacatctctgagcaggaggtgaccgccccggcaccagctgcctgccagatcctgaaggagcaaggcctgcgaccatacctgctcatccatgacggagtccgctcagaatttgatcagatcgacacatccaacccaaactgtgtggtaattgcagacgcaggagaaagcttttcttatcaaaacatgaataacgccttccaggtgctcatggagctggaaaaacctgtgctcatatcactgggaaaagggcgttactacaaggagacctctggcctgatgctggacgttggtccctacatgaaggcgcttgagtatgcctgtggcatcaaagccgaggtggtggggaagccttctcctgagtttttcaagtctgccctgcaagcgataggagtggaagcccaccagttactttcagtatgaaagcaagaagcagaaatgcctgcggcttttcctgagtttttgctgcttctctgaaaggataagaattgacaagtcctatcagtgtgttaatatatctcactggcaagacagtgtaacagcaagattacaacaatatggaggaaataataaagtcactcattttgcgaccttt

SEQ ID NO: 2285 - DNA, 3517 bp, Homo sapiens
  source 1..3517: mol_type = genomic DNA
gggcccgttctccgggcctggggggcgcgcgcccctggggtcccggcgctgcccgctgtggtgtccccggcaggcagagcgcgatccaggccgggacgacttgggaaagttctaagtaaagtttgatcagccggtttgatcggtctgacgtggtccaagagtctgacccaagggtttgcgactgggagaggaaatctgtgtcctggacaagattggattatggaagtgggaagtgaagaagaaaaatgggagaagctggatgcagaatttgatcactttgtggttgatatgaagccctttgttctaaaattacctcataggacagaacggcagaggtgtgctctttggattagaaagctgtgcgaaccttcaggaacaggtgcaggaataatggggaggaagaatcggaacctgtatgcaaaattgttattgcatatgcttaaacgaggtgcgcttgaaggcccttttacacaccgacctgaacccgggacactaaaaattctaccttcatacatgtccatctattttgatgaaccaaatccagcacgagcaaaaggttcaagcccagagggattaccagcctgggtactgggtgagctggagacaagtgaacacaaattaaatgaatcatggaaactctcttctggagaagataacactttagtacagtcgccaactgatgtctacagcagggaacagtacactgggaagctccgagtgagatcacactccttgagtccaactcacagagaagatggacaaaatattaccccaaagatttgtgaagtttattcgaaaaaatctcctgtttctttggatgatagtgacattgaagctcgccttaatagttggaatcttgggatagaaaatcctcgatacctgagacagaagcctatcccagtttctctgatgacaccgaaattcagcctgagaaaatccagcagtttccatgatgatcattttctctctcgaatacgtgagaaagagctggacatgaaaacaaaaatgatggaagctaaatttcatgaagaaaagcttaaactgcaacagaaacatgatgctgatgttcagaagattttagaaagaaagaataatgaaatagaagaactgaaaactttatacaggagtaaacaacatgaaactgaagagactattagaaagcttgaaaagaaagttcagacactgatacgtgactgtcaagttatcagagagactaaagaagaccagattgcagagctgaaaaagatatgtgaacaaagtacggaatctctaaataatgactgggaaaaaaagcttcacaatgctgtagcagaaatggaacaggaaaagtttgatcttcaaaagcaacacactgaaaacattcaagaattgcttgaggatacaaatgtgcgtctgaataaaatggagagtgaatacatggcgcaaacacagtccacaaaccacatgatcaaagaactggaggcccgtgtccagcagctgactggagaagcagagaacagtaatttacagaggcagaaattaattcaagaaaaagcagaacttgaaagatgttaccagataacgtgtagtgaattacaagaagtaaaggcaaggcgtaacacactgcataaagagaaggaccatcttgtaaatgattatgagcaaaacatgaaactgttacaaaccaaatatgatgctgatataaaccttctaaaacaagaacatgctctttcagcttctaaggcatctagtatgattgaagaattagagcagaatgtctgtcaattaaaacagcagttacaggaatcagaacttcaaagaaagcaacaactaagggatcaagaaaataagtttcagatggagaaaagtcatttaaaacacatctatgaaaaaaaggctcatgacttgcagagtgaacttgataaaggaaaagaagatactcaaaagaaaattcataaatttgaggaagctttgaaggaaaaagaggagcagctaactcgtgtgactgaagttcagaggttgcaggcccagcaggcagatgccgctctggaagagtttaagcggcaggtggaactgaactcagagaaagtctatgctgaaatgaaagagcagatggaaaaagtggaggcagatctaactagatccaaatctcttcgtgagaaacaatcaaaggagtttttatggcaactggaggacatcagacagcggtatgaacaacagatagtagagctgaagctggagcatgaacaggagaagacgcacctattacagcagcataacgcagagaaggatagcctagtccgagaccatgaacgggaaattgaaaacctggaaaaacagcttcgcgctgccaatatggagcacgaaaatcaaattcaggagttcaagaaacgagatgcacaggttattgccgacatggaggcccaggttcacaagttgagagaagaattgatcaatgtgaactcacagcggaaacagcagctggtagagcttggtcttcttcgtgaagaggaaaagcaaagggctacaagggaacatgagattgtcgtcaataaactgaaggctgaatcagaaaagatgaaaatagagctgaaaaagactcatgctgctgagacagagatgacactggaaaaggccaacagcaagctgaagcagattgagaaggaatacactcagaagcttgccaaatcttcacagatcatagcagaacttcagacaaccatttcctctctgaaagaagagaacagccagcagcagcttgctgcagaaaggcggctccaggatgttagacaaaagtttgaagatgagaagaagcagctgattagagataatgaccaagcaatcaaggttttacaagatgaattagaaaaccgttctaatcaggtgcgatgtgcagagaaaaaattacaacacaaagaattggagtcacaggaacagataacttacatacgacaagaatatgaaacaaaattgaaaggattgatgccagcatccctaagacaagaacttgaagacaccatttcctccctaaaatcacaggttaattttctgcaaaagagagcttccatccttcaggaagaactgactacatatcaaggcagaaggtaactgcacgagagaatgcaacggatgcaatttccaggctgtgctgtggacttcttccagcaggtttgaagatttggatattgtaaactgtgagatcagtggcattttttaaatccttaaatgtaattaagatcataaaaacatgcatcattcatacactagtggggtggttttatttgtgtctgcctaagttatttttttaacattcctttatttccgattttcatgtttgtgtgcatttgagtatgtgctgagaactgcttatattgggcaaagtgatttcctatgatatgccttgttaatccttttgcatagaattttaccagttgcgtacgatcaaaatcacgtttgtagtatcatatcaaaaattctaacctgtttacattgttttcatgttcatgttcctatgttattaaaatattattttgtactt

SEQ ID NO: 2286 - DNA, 1379 bp, Homo sapiens
  source 1..1379: mol_type = genomic DNA
taggcgccattttcgagtgaaggacccggagccgaaacaccggtaggagcggggaggtgggtactacacaaccgtctccagccttggtctgagtggactgtcctgcagcgaccatgccccgtaaaggcacccagccctccactgcccggcgcagagaggaagggccgccgccgccgtcccctgacggcgccagcagcgacgcggagcctgagccgccgtccggccgcacggagagcccagccaccgccgcagagactgcaagtgaggaacttgataatagaagtttagaagagattttgaacagcattcctcctcccccgcctccagcaatgaccaatgaagctggagctcctcggcttatgataactcatattgtaaaccagaacttcaaatcctatgctggggagaaaattctgggacctttccataagcgcttttcctgtattatcgggccaaatggcagtggcaaatccaatgttattgattctatgctttttgtgtttggctatcgagcacaaaaaataagatctaaaaaactctcagtattaatacataattctgatgaacacaaggacattcagagttgtacagtagaagttcattttcaaaagataattgataaggaaggggatgattatgaagtcattcctaacagtaatttctatgtatccagaacggcctgcagagataatacttctgtctatcacataagtggaaagaaaaagacatttaaggatgttggaaatcttcttcgaagccatggaattgacttggaccataatagatttttaattttacagggtgaagttgaacaaattgctatgatgaaaccaaaaggccagactgaacacgatgagggtatgcttgaatatttagaagatataattggttgtggacggctaaatgaacctattaaagtcttgtgtcggagagttgaaatattaaatgaacacagaggagagaagttaaacagggtaaagatggtggaaaaggaaaaggatgccttagaaggagagaaaaacatagctatcgaatttcttaccttggaaaatgaaatatttagaaaaaagaatcatgtttgtcaatattatatttatgagttgcagaaacgaattgctgaaatggaaactcaaaaggaaaaaattcatgaagataccaaagaaattaatgagaagagcaatatactatcaaatgaaatgaaagctaagaataaagatgtaaaagatacagaaaagaaactgaataaaattacaaaatttattgaggagaataaagaaaaatttacacagctagatttggaagatgttcaagttagagaaaagttaaaacatgccacgagtaaagccaaaactggagaaacaacttcaaaaagaaaaaaa

SEQ ID NO: 2287 - DNA, 508 bp, Homo sapiens
  source 1..508: mol_type = genomic DNA
gcataggtgataaaatcatggtggggagagagaacctatatattgagtcctggcttgatgcctttggtgtatatgtctgccgccttttaatctcttcccctctagattgcttcctgaggaggctggcacttctgaagatcctgaagaccctaaaggagattcacaggcaggtacccccagcactttagccctgtgtggccagcgccccatgcgcaagcgtctttctgccccagagttgcggctgagtctgactaaggggcctggaaatgatggagcttcacccacccagtctgcaccttcctctcctgatggcagttctgacctggagatagacgaattggagacaccttcagactcggagcagctggacagtggacatgaatttgaatgggaagatgaactaccccgggcagagggtctgggcaccagtgagacagctgaaaggctgggccgaggttgtatgtgggatgtgactggagaagatggacatcactggagggtgttccga

SEQ ID NO: 2288 - DNA, 2678 bp, Homo sapiens
  source 1..2678: mol_type = genomic DNA
atgggtaaagttgaaaattctaagagtgcccagggtctggctggtcttcgaaaccttgggaacacgtgcttcatgaactcaattctgcagtgcctgagcaacactcgggagttgagagattactgcctccagaggctctacatgcgggacctgcaccacggcagcaatgcacacacagccctcgtggaagagtttgcaaaactaattcagaccatatggacttcatcccccaatgatgtggtgagcccatctgagttcaagacccagatccagagatacgcaccgcgctttgttggctataatcagcaggatgctcaggagttccttcgctttcttctggatgggctccataacgaggtgaaccgagtgacactgagacctaagtccaaccctgagaacctcgatcatcttcctgatgacgagaaaggccgacagatgtggagaaaatatctagaacgggaagacagtaggatcggggatctctttgttgggcagctaaagagctcgctgacgtgtacagattgtggttactgttctacggtcttcgaccccttctgggacctctcactgcccattgctaagcgaggttatcctgaggtgacattaatggactgcatgaggctcttcaccaaagaggatgtgcttgatggagatgaaaagccaacatgctgtcgctgccgaggcagaaaacggtgtataaagaagttctccatccagaggttcccaaagatcttggtgctccatctgaagcggttctcagaatccaggatccgaaccagcaagctcacaacatttgtgaacttccccctaagagacctggacttaagagaatttgcctcagaaaacaccaaccatgctgtttacaacctgtacgctgtgtccaatcactccggaaccaccatgggtggccactatacagcctactgtcgcagtccagggacaggagaatggcacactttcaacgactccagcgtcactcccatgtcctccagccaagtgcgcaccagcgacgcctacctgctcttctacgaactggccagcccgccctcccgaatgtagcgccaggagccacgtcccttctcccttccccgtggtggccccgctccctaaattttttaaaaagacaaaaacaaaacaacaacaacaacacacaaacctgacaagagaaaaacaaacctgaagctgccgagcaggagtggatgcagcctgatcagggtctggagcaaggagccgggctttcctgagctgtggcccggcagggaagatcgcctggacgtggagccagcatcgccccgtgccctcggcgtttgcatttgtaaacttgtggtcttcctatgtgtcagaaacaactgtgtcttgggggggaagaccctcgctgcgccgcttcccgccgcagcgcccgcgcctccgaggggacagcgccctctggagctcgctgggagcatcaccgcctggacgcccgcgccgcggaggagccggcgcccatctccacccgcacggctcgccggtccagagccatgagccaagagccctcttcacgctgctaactccaggggacagacgaagggacatctttggaaaacgctggttttggtttttaaaaagcccaactttttttttttaatttccataactaaagtgttcagactggagtgctctccttcaggcctcttcatagctgggacgttgcactggtccttttattgcttttccaagtacaactttctaatgctagccctccgtggtgctaggtgggcgttggccaggccccaagcacagccacagtagacctgggatctaaaacaagtttctgttttgggggtttgggttttttttttttttttttaatgttttgaatggaatttagttgcctccaagaattgtgccttatagcatttggggaccagggggtaactgcccctcctgaaatatccctcagcctcttcccttttccccagtgctctgttcaaacccgcctgggaaagggatcctgcccttagccctggctcgttgtgcattgcagtgaggcaaagaagaaagcaggtagattccttccgacagggcatcaagttcttcccgcccacgtcctctagcccacccctggtctgctccccagctgtttgaaggatagcacaagcccctcgtccctagagcttctctcccttttatttattctcttaacatccctttccccctggccttcctgcccccgcccccttctcagagcctcctagacaataggccctttggaccgagtttctcagggatgcccaggccacccctcagctcttcttagcgctggtctccagtcctgccctgggagctggagcctgggtatttggggacatcttgcctcagttgtatggttctttcctgtgggctcaattttgccctacatagttggataaaactctgtgctgtcctggagagtaaagctgttcacccacacagctgggcccggcttgtgccccgtggagcctggcacattccaggctcctaggaggaggcatcagagaaagacaccctgagttttactggcctgacacccttctccagagaagacctgtgaacctgagcccaagggcaagtgtacacttgtttactgtgtaagcaagagtagaagaatgtctaatgtacagtggaaccttgtacagaataaataatagctttgagaaatc

SEQ ID NO: 2289 - DNA, 2190 bp, Homo sapiens
  source 1..2190: mol_type = genomic DNA
gcgtgctaggaggcgaggcgaggggcatgcgtgctaggaggcgaggcgaggggcatgcgtgctaggaggcgaggcgaggggcatgcgtgctaggaggcgaggcgaggggcatgcgtgctaggaggcgaggcgagggccaggtgctagggctagaaaggaggcagggctggcgctctagggactcctggagctctcctcctgtgagcctggacccggcacctcacgcagcccatctcccacagcttccgtcgacggaggccggggcctcaccaggaaagtggtttgccctccaatcagtggtctgccttcattttccagattgatgaagtctgcctcagagaaggggcaataggcgaatatgaagaccttagagcagagaaccagaaaacaaaggagaagtgtgacaaaattaggcaagaacgagatgaagccgttaaaaaactggaagaatttcagaaaatttctcacatggtcatagaggaagttaatttcatgcagaaccatcttgaaatagagaagacttgtcgagaaagtgctgaagctttggcaacaaagctaaataaagaaaataaaacgttgaaaagaatcagcatgttgtacatggccaagctgggaccagatgtaataactgaagagataaacattgatgatgaagattcgactacagacacagacggtgccgccgagacttgtgtctcagtacagtgtcagaagcaaattaaagaacttcgagatcaaattgtatctgttcaggaggaaaagaagattttagccattgagctggaaaatctcaagagcaaactcgtagaagtaattgaagaagtaaataaagttaaacaagaaaagactgttttaaattcagaagttcttgaacagagaaaagtcttagaaaaatgcaatagagtgtccatgttagctgtagaagagtatgaggagatgcaagtaaacctggagctggagaaggaccttcgaaagaaagcagagtcatttgcacaagagatgttcattgagcaaaacaagctaaagagacaaagccaccttctgctgcagagctccatccctgatcagcagcttttgaaagctttagacgaaaatgcaaaactcacccagcaacttgaagaagagagaattcagcatcaacaaaaggtcaaagaattagaagagcaactagaaaatgaaacactccacaaagaaatacacaacctcaaacagcaactggagcttctagaggaagataaaaaggaattggaattgaaatatcagaattctgaagagaaagccagaaatttaaagcactctgttgatgaactccagaaacgagtgaaccagtctgagaattcagtacctccaccacctcctcctccaccaccacttccccctccacctcccaatcctatccgatccctcatgtccatgatccggaaacgatcccaccccagtggcagtggtgctaagaaagaaaaggcaactcaaccagaaacaactgaagaagtcacagatctaaagaggcaagcagttgaagagatgatggatagaattaaaaagggagttcatcttagacccgttaatcagacagccagaccgaagacaaagccagaatcttcgaaaggctgcgaaagtgcagtggatgaactaaaaggaatactggggacacttaacaaatccactagttcaagaagcttaaaatcccttgaccctgaaaacagtgaaactgagttagaaaggattttgcgtcgcagaaaggtgacagcagaagcagatagcagtagtccaactgggatattagccacctcagagtccaaatccatgccagtgttgggttctgtatccagtgtaacaaaaacagccttgaacaagaaaactctggaggcagaattcaacagcccgtcccccccaacacctgagccaggtgaagggccccgtaaattggaaggatgcacaagttccaaggttacgtttcaataatctgaatcagaaaatactgcaactccttcctccttttgtctgccttttgttctccaaaagtaagtggaaattacatttccaagaaaggaaatgaaataattgcaggcccaaggtctgcaaaatatgtgttgaattgacagtgaaaaggatccatgtgttgacagacacagttgttagatgccataaaggcagatgtgaagctcaatttatttctcatcttgcttg

SEQ ID NO: 2290 - DNA, 2448 bp, Homo sapiens
  source 1..2448: mol_type = genomic DNA
attgcgtcccgctctacctctgtggttctttgggagcgacccccgggaagcgtccaaagtggagttcccacacacgctgcgaacccacagccggttttctctgaactcgcgtccctgagtccgggaggtggaggcggagaaaagggtgcggagcgaccccacgcagggccgccccccctcccaccagcgcgtcctgccgcgccggcagccacaggctggcatagcggctgccgacccgccctcgttcctccaccccctgaacgggactgctgggcccgccccgccccgcctgcaggtgaagcggccgcagccgccgagtaggtgcgtggggatgatctcactcgcgcgctccgcgccaggaggaggaggagcgggagcggatccaacttccgggtagtggagccgcaagccaccggcatcttgctttttcttccccctcctcctgtgtgccccgcgccgctccctctttcccttttattcccggccccacccgccaaaatgaacagctcggacgaagagaagcagctgcagctcattaccagtctgaaggagcaagcaataggcgaatatgaagaccttagagcagagaaccagaaaacaaaggagaagtgtgacaaaattaggcaagaacgagatgaagccgttaaaaaactggaagaatttcagaaaatttctcacatggtcatagaggaagttaatttcatgcagaaccatcttgaaatagagaagacttgtcgagaaagtgctgaagctttggcaacaaagctaaataaagaaaataaaacgttgaaaagaatcagcatgttgtacatggccaagctgggaccagatgtaataactgaagagataaacattgatgatgaagattcgactacagacacagacggtgccgccgagacttgtgtctcagtacagtgtcagaagcaaattaaagaacttcgagatcaaattgtatctgttcaggaggaaaagaagattttagccattgagctggaaaatctcaagagcaaactcgtagaagtaattgaagaagtaaataaagttaaacaagaaaagactgttttaaattcagaagttcttgaacagagaaaagtcttagaaaaatgcaatagagtgtccatgttagctgtagaagagtatgaggagatgcaagtaaacctggagctggagaaggaccttcgaaagaaagcagagtcatttgcacaagagatgttcattgagcaaaacaagctaaagagacaaagccaccttctgctgcagagctccatccctgatcagcagcttttgaaagctttagacgaaaatgcaaaactcacccagcaacttgaagaagagagaattcagcatcaacaaaaggtcaaagaattagaagagcaactagaaaatgaaacactccacaaagaaatacacaacctcaaacagcaactggagcttctagaggaagataaaaaggaattggaattgaaatatcagaattctgaagagaaagccagaaatttaaagcactctgttgatgaactccagaaacgagtgaaccagtctgagaattcagtacctccaccacctcctcctccaccaccacttccccctccacctcccaatcctatccgatccctcatgtccatgatccggaaacgatcccaccccagtggcagtggtgctaagaaagaaaaggcaactcaaccagaaacaactgaagaagtcacagatctaaagaggcaagcagttgaagagatgatggatagaattaaaaagggagttcatcttagacccgttaatcagacagccagaccgaagacaaagccagaatcttcgaaaggctgcgaaagtgcagtggatgaactaaaaggaatactggggacacttaacaaatccactagttcaagaagcttaaaatcccttgaccctgaaaacagtgaaactgagttagaaaggattttgcgtcgcagaaaggtgacagcagaagcagatagcagtagtccaactgggatattagccacctcagagtccaaatccatgccagtgttgggttctgtatccagtgtaacaaaaacagccttgaacaagaaaactctggaggcagaattcaacagcccgtcccccccaacacctgagccaggtgaagggccccgtaaattggaaggatgcacaagttccaaggttacgtttcagcctcccagtagcattggatgcaggaaaaaatacattgacggtgaaaaacaagccgaaccagttgtagttttagatcctgtttctacacatgaaccccaaaccaaagaccaggttgctgaaaaagatccaactcaacacaaggaggatgaaggcgaaattcaaccagaaaacaaagaagacagcattgaaaactttttcccttttcactttggttttgagggggttttgcccctggctggggtgacactgtcaaccaaagcaagggatcccaaatag

SEQ ID NO: 2291 - DNA, 1307 bp, Homo sapiens
  source 1..1307: mol_type = genomic DNA
agttttcacaaaggtctcttgatatcaaaacttctttccttgcatgcttctctgatcctgtggagatgaaaattgacatccatagtcatattctaccaaaagaatggccagatctaaaaaagaccctgagacaaggattcagatgcaagtagtttgctttggaggtgatcccaggaaacaccagtagagtgaggaagtgagacagggaaaacagggcagccagtgaaagaggtttggctacggaggctgggtgcagctccaacaccacagcaagggagaagcaaagttgttgaaagatgggaaagtcttcagagtggtgcgagagaattgctgggatccagaagttcgtattagagaaatggaccaaaaaggccaaacctgaggacactttaaacctgtgccagcttttaaacaacgaccttgccagcaccgttgtgagctaccccaggaggttcgtgggtctggggacgttgcccatgcaggcccctgagctggcggtcaaggagatggagcgctgtgtgaaagagctgggctttcccggggtccaaattggcacccacgtcaacgagtgggacctgaacgcgcaggagctctttcctgtctatgcggcagccgaaaggctgaagtgttccctgttcgtgcatccctgggacatgcagatggatggacgaatggccaaatactggctcccttggcttgtaggaatgccagcagagaccaccatagccatttgctccatgatcatgggtggagtatttgagaagtttcccaaactgaaagtgtgtttcgcacatggtggtggtgccttccccttcacagtgggaagaatctcccatggattcagcatgcgcccagatctgtgtgcccaggacaaccccatgaacccgaagaaataccttggttccttttacacagatgctttggttcatgatcctctgtccctcaagctgttaacagatgtcataggaaaggataaagtcattttgggaaccgattacccctttccactaggtgagctggaacctgggaaactaatagagtccatggaagaatttgatgaagaaacaaagaataaactcaaagccggcaatgccctggcatttttgggtcttgagagaaaacaatttgaatgactgaatttactacaaaggcaaactttcaaaaggatatctcatttttgtttctaaatatgtatcaacaggtatcaacaaaatcctattttgaactattttactcagaaatgaatgtcccaaatatcctaaattattcataataaaaatgatttgtaagtgttttcattctgaaaa

SEQ ID NO: 2292 - DNA, 6841 bp, Homo sapiens
  source 1..6841: mol_type = genomic DNA
aaagcgaggagaggaggcgtgagagagcgtgcctgcccgccgcacacggggctggtttccggagtgcgtctctagagggatgcacgttgccttagccgagcttcggagagaagcctgatatgtaacccaggcaggtgggagcctcagtctgtcgggctgaggtctggcatctacaaagcctcttggccgtgttctgaacttgaagcctggaggagttctctgctcagcacagccaaggaacagaattagaagaaaaggaaccctggcctgaggcaggtgacaaacattaccaccccagctgtgcacgatgcagcagatgcaaccagatgttcacagaaggagaggaaatgtatcttcaaggctccaccgtttggcatcccgactgtaagcaatctacgaagaccgaggaaaagctgcggctgccaaacattcggcgttcttcatccgatttcttttattccaaaagtctgattcgacgcacaggacggtctccgtctctgcagcctaccaggacatcctcggaaagtatttattctaggccaggctccagtattcctggctcaccaggtcatactatctatgcaaaagtagacaatgagatcctggattacaaggatttagcagccattccgaaggtcaaggcaatttatgacattgaacgtccagatcttattacctatgagcctttctacacttcgggctatgatgacaaacaggagagacagagccttggagagtctccgaggactttgtctcctactccatcagcagaagggtaccaggatgttcgggatcggatgatccatcggtccacgagccagggctccatcaactcccctgtgtacagccgccacagctacactccaaccacgtcccgctctccccagcatttccacagacctgatcaaggaatcaacatttaccgaaagccacccatctacaaacagcatgctgccttggcagcccagagcaagtcctcagaagatatcatcaagttttccaagttcccagcagcccaggcaccagaccccagcgagacaccaaagattgagacggaccactggcctggtcccccctcatttgctgtcgtaggacctgacatgaaacgcagatctagtggcagagaggaagatgatgaggaacttctgagacgtcggcagcttcaagaagagcaattaatgaagcttaactcaggcctgggacagttgatcttgaaagaagagatggagaaagagagccgggaaaggtcatctctgttagccagtcgctacgattctcccatcaactcagcttcacatattccatcatctaaaactgcatctctccctggctatggaagaaatgggcttcaccggcctgtttctaccgacttcgctcagtataacagctatggggatgtcagcgggggagtgcgagattaccagacactcccagatggccacatgcctgcaatgagaatggaccgaggagtgtctatgcccaacatgttggaaccaaagatatttccatatgaaatgctcatggtgaccaacagagggcgaaacaaaatcctcagagaggtggacagaaccaggctggagcgccacttagcccctgaagtgtttcgggaaatctttggaatgtccatacaggagtttgacaggttacctctttggagacgcaacgacatgaagaaaaaagcaaaactcttctaagtcccactcgtgaatggcaattagagaaaggactgacagtggcggtgccccataggatgtcatattgaggcccaaacttgattggagaatttgcaaactaccgtcgctcagcaacaccaaaaagagaaagtctggttaaaacaccatgagtcaaatgtcgggccagccaacagtaacacttgccaagaagcatggcgtagaaatttctatgttccgaaacacagagtagtgtccacatgtgagcttttcacattaccttatgtatacaacaggagctgcgttgttttcttctttttcttttcctttatctgttgtccaacaacagtgctgactgtccggataagagctggcaagtgcccttaggatgccgcatgggaaaaatcggttatcataatttcaaagtataaatatatttattaagtagcgctgcggctaagaaggaagagtgaggggtctgtccatggggtggcagtgatttcacacccgcctttcttgaatggcttcgtgttactcagccgtgccctggcaggaatggaactccatcagggaacagggcagctctgtttgaatggggtgaaaaacagcaaaattaattcttagcaagctccttgttctctactgttcaccgggacctggctggcaaatgacttagctattagtatatttaaaaactgttcaaaagcaaaagagaaggaacaggaatgaaaggaaaccttcccttaactctttctgcttcccatagcaggtctggttcctgctccccgcctaggacaggagctgtctggagctccacctttgcaaagaaaggaaaaacacaaattgcccccagattggcccagtggcatgccattaggtgattttgcataggggccatatcattcatggccaaaaaaaaccaaaaagcaaaaaacaaaaacaagtcccatgtcctactgactctagttcttccagtcgttatcctctgctgtctctctggcatcctatgaatcagatcaagcccatgctgttgttggtttttaaggtttctttcaataataggctaaggaaagacatgtttttctcttttaaatctctgcaactccaaagtagactccttcgaacgtatttaatttggccttttcagctttcttcttgcccagctctgtcgaattcatgggtgtgtgtgcacatgttggtttcactcacccagagtaattttgtgagcatgcatgtgctttttaatttctgcttgaatgtttgtcctgctgtgttgcagcttctaaagacattgtcaccgagtgtgtgtgactcaaagatcaagagtgaggctaaactgcgaccccaacatcacttccttcatggaaaggtgttggcgctgatgtagctcatggaaggatcagactgggaaccacagaggaaggatgaggtgggatgtggaggtcagagcatctcacgagagtccctcaggctctgcaacactagattcgaatatgagcctagggtttccccaacacgtgcgtgcatatgaaaccacatcatgattcccgacgtgagttagatgagggagagtttgtgtaactccacacccaggagggtaagccactttattatcatgctttggggctgtgcttaagaatttaagctctgttttaaagccgaagaagaaaacatttgaatttaccttcatatgccactaagaacaaaagctctgaagttcttcctgctggcaccaaatattaggattacaagctgtctctctgacaccagtggtaaaaaagcaagtagaatagtttctgagtctgtgttgcagcctctgacacgtggctcaccgctgtcatttgggggatggaatgaacagtcactgttctatagcatcctcctgtgctcttacctaaggaatctaaattgtcctagccttccattgctatgcactgaatgaggactactctcgtgtgtgtgtgtgtgtgtgtgtgtgtgtgtgtgtgtgtgtgtgtgtgtgttggatctactaacatgtttagcaaatggctctgacagggtggccatgagcagatgagaccagctcttgcttggttggaagccacactgcagtttgcagtttagcctttggtgtctcagtggcttcttgcttattccatgctttttctatcccatcctctctctgtgccctcctgcaatggcagccttggcacaatgcctgggtgtcctcatccttgctttactctggaaagtgtggggatggagaggatggtgcatttccagtgcttccttacctgtcaataacaatggtggccacctgggtcccagcacttggctggtggagagatttttttcattatggagctaataaagggtccctacgttttacattgattaatgaattatcacccagacatgtgcagatgaaatgtcaatataagaaaaatcaaggtatttgggaaacatgggcataatcaggtagttttgctaaaattcctcttccttggtctacataaagaagacatgggtctgtcatagaatggggacattagactgaaaactgggacaacccccttccttattttatagagactaggagttaaggggcctgcctaagattgcagtgataaagaactgaaccctaaatcagctcccactaatgaaaccctgctttccttgtatcttttaaactcagttctgcatccaacttgagaagaaaaaaagcttctttccatatcaagtaccatatgagttcatttaaactgcaccttgcagaaatgcattgccagaaagcaccagtagcctcctatctgcaagcagagtagtgctctgctctggggaggggtcattggaaaccataatgcagagtgggccccctactccatttcccagcaaaaggctccagctggagggatgggttgtggggcaacctggttcctgctaactgccagattgaatgtgtgggctagaatgcctgcacatttagttaaactgggctcagcatgcttgtcctcaaaatgtccatcctggtcacagcacacaagatggctattggtctgcttttaccctaccctgtactatacatgaaaattccagttattaacacactcaaactggtggagcttgttcaccctaggaaggggattgtatatatggcaggcttccctggtgccgatgtaaagggctacatttgggaacatttgacttccttgggactcttaagtgcataatgatggcatgaagtaaaaggggcctcaatgatgataggaaaatcagttcttttaaaatttcttcaagaaaatccaggctatcacatagtctttctgtgtgacttattaggagataggaagagcattgggaaacttgcacagctagctatgcatctacattttggtttggggttagttatgaaatgttcttaatatgacgtgttcaataacttcacataaacttcctgttctccaaaacctcaaagagatagagttaatgagttgttgtttttttttaaatgggggtagttttctatctgtcatgggctctagcatctactccgctacccaattctgtcatctccaagctgagtttcctcttctgaggcagaggctggagcagttctttttcagttctcatcctctccatcccaatccagtatatcaatcaactctaactcggagacgtctagctggcaatgtttctaaaactttcactggatttctttagacattgaagcaaacatttttttctaagaattgcttctcagatgatgatatcaaatgtatatgcttttgcaagtttgaaaagttcaaattaaccacttttgactaggtaagtctttctaaaaaccatttaaagctaactgggtcttagcatcctcctgtgtatggaagagacaggtgaccgctccaggttgggtgctcacagaacccttttcctgactctcatggaagatggtggaaggaaaatagactgtctcatcaaccctcctgtgtcctctgaagcaatctcagtttttattaaccacctcttctgtgtttctggtagctatttaacctgtatttaatctgtacttcctatgccagcctcaattttatttgatttttacaattattctcttctaaccaatgaagtgtttgtcagtatgccccaaagcttgctcttttgtgctcccttttgaataactttctatccagaaaaagagattatttgggacttgagatttgcagtgataccaacttatagcaatgatgtactttaagggaactacccaactatgttgtgatagaagaaagagaaaccttcactttggcatttttttttaatcactgtttatttttctgtttgcggcccaggaagcagtgggaggtggtggcagatatgctttgcatatggattgttatgtttttatttgggcaagtttaatcatggaaaactcaaaaagaaggggggaaatggtcagtttaagccaaaagaaactttctaaacaatgtataggtacacagcaaaattaaacaaatccaacaatttctgaagcttagtgtaattgagtggtggttgttattcaataaaattattcccaaaagtgtttctcctaagagtgcagttcccatgagtcacttcctgaacccattgaccaaaggtggacagagacaatcctgtagaccttgacattcagaaagatgtgagctgcttactgatcatatatgcatacgtttctttacagcagaggaaaccattgtccacaaaactgatgttcttttggggttttatgtacagacttgtccaatcatgtgtgtggttcctgcgagttgctgatgactccgcattgaagctctctgagttctttgattttaagttgggtttatggaattttttcaaatgttggaaggtgtgtggttcttcctgccctccctccccttttggaaatatgaaagcaaatgtttagaagaattccttttgaaaagctgtgtcgtgttccctgtgaaactgagcaggtgtgtgttggcgcgctaagtgccacatgcttgtgtgtagaggaggaggtggccctgccggctccgcgctgctgtgcctgtgatccctacctgctccccgctcctgttgccagcagcactcactgcactcctttgtcatatactctgcatcactgtcatactcacaacttcgtgaataaagttgtgtgctttattcgt

SEQ ID NO: 2293 - DNA, 7105 bp, Homo sapiens
  source 1..7105: mol_type = genomic DNA
ggtctcatgctttcatctcccagtgggtgtgcagacactggagagacccagtggcccaccctcaggaccctcaccacccatcagagaagcctgtcattcactgccataaatgtggggagccttgcaagggtgaagtgcttcgggtccagaccaaacatttccacatcaagtgtttcacctgcaaagtgtgtggctgtgacctggcacaagggggcttcttcataaagaacggagagtatctctgcaccctggactaccatcccaattgctttgcttgtactatctgcaagcgcccgtttccacccggagaccgagtcacattcaatgggagagactgcctttgtcaactctgtgcacagccgatgtcgtccagtccgaaagaaaccaccttctccagcaattgtgccggctgcggaagagatatcaagaatgggcaggcgctgctggcgctggataagcagtggcacttggggtgctttaaatgcaagtcctgcgggaaggtcctcaccggggagtacatcagcaaggatggtgctccgtactgtgaaaaggactaccagggactctttggggtgaaatgtgaggcgtgtcaccagtttatcacagggaaagtcctggaggcaggtgacaaacattaccaccccagctgtgcacgatgcagcagatgcaaccagatgttcacagaaggagaggaaatgtatcttcaaggctccaccgtttggcatcccgactgtaagcaatctacgaagaccgaggaaaagctgcggcctaccaggacatcctcggaaagtatttattctaggccaggctccagtattcctggctcaccaggtcatactatctatgcaaaagtagacaatgagatcctggattacaaggatttagcagccattccgaaggtcaaggcaatttatgacattgaacgtccagatcttattacctatgagcctttctacacttcgggctatgatgacaaacaggagagacagagccttggagagtctccgaggactttgtctcctactccatcagcagaagggtaccaggatgttcgggatcggatgatccatcggtccacgagccagggctccatcaactcccctgtgtacagccgccacagctacactccaaccacgtcccgctctccccagcatttccacagacctgatcaaggaatcaacatttaccgaaagccacccatctacaaacagcatgctgccttggcagcccagagcaagtcctcagaagatatcatcaagttttccaagttcccagcagcccaggcaccagaccccagcgagacaccaaagattgagacggaccactggcctggtcccccctcatttgctgtcgtaggacctgacatgaaacgcagatctagtggcagagaggaagatgatgaggaacttctgagacgtcggcagcttcaagaagagcaattaatgaagcttaactcaggcctgggacagttgatcttgaaagaagagatggagaaagagagccgggaaaggtcatctctgttagccagtcgctacgattctcccatcaactcagcttcacatattccatcatctaaaactgcatctctccctggctatggaagaaatgggcttcaccggcctgtttctaccgacttcgctcagtataacagctatggggatgtcagcgggggagtgcgagattaccagacactcccagatggccacatgcctgcaatgagaatggaccgaggagtgtctatgcccaacatgttggaaccaaagatatttccatatgaaatgctcatggtgaccaacagagggcgaaacaaaatcctcagagaggtggacagaaccaggctggagcgccacttagcccctgaagtgtttcgggaaatctttggaatgtccatacaggagtttgacaggttacctctttggagacgcaacgacatgaagaaaaaagcaaaactcttctaagtcccactcgtgaatggcaattagagaaaggactgacagtggcggtgccccataggatgtcatattgaggcccaaacttgattggagaatttgcaaactaccgtcgctcagcaacaccaaaaagagaaagtctggttaaaacaccatgagtcaaatgtcgggccagccaacagtaacacttgccaagaagcatggcgtagaaatttctatgttccgaaacacagagtagtgtccacatgtgagcttttcacattaccttatgtatacaacaggagctgcgttgttttcttctttttcttttcctttatctgttgtccaacaacagtgctgactgtccggataagagctggcaagtgcccttaggatgccgcatgggaaaaatcggttatcataatttcaaagtataaatatatttattaagtagcgctgcggctaagaaggaagagtgaggggtctgtccatggggtggcagtgatttcacacccgcctttcttgaatggcttcgtgttactcagccgtgccctggcaggaatggaactccatcagggaacagggcagctctgtttgaatggggtgaaaaacagcaaaattaattcttagcaagctccttgttctctactgttcaccgggacctggctggcaaatgacttagctattagtatatttaaaaactgttcaaaagcaaaagagaaggaacaggaatgaaaggaaaccttcccttaactctttctgcttcccatagcaggtctggttcctgctccccgcctaggacaggagctgtctggagctccacctttgcaaagaaaggaaaaacacaaattgcccccagattggcccagtggcatgccattaggtgattttgcataggggccatatcattcatggccaaaaaaaaccaaaaagcaaaaaacaaaaacaagtcccatgtcctactgactctagttcttccagtcgttatcctctgctgtctctctggcatcctatgaatcagatcaagcccatgctgttgttggtttttaaggtttctttcaataataggctaaggaaagacatgtttttctcttttaaatctctgcaactccaaagtagactccttcgaacgtatttaatttggccttttcagctttcttcttgcccagctctgtcgaattcatgggtgtgtgtgcacatgttggtttcactcacccagagtaattttgtgagcatgcatgtgctttttaatttctgcttgaatgtttgtcctgctgtgttgcagcttctaaagacattgtcaccgagtgtgtgtgactcaaagatcaagagtgaggctaaactgcgaccccaacatcacttccttcatggaaaggtgttggcgctgatgtagctcatggaaggatcagactgggaaccacagaggaaggatgaggtgggatgtggaggtcagagcatctcacgagagtccctcaggctctgcaacactagattcgaatatgagcctagggtttccccaacacgtgcgtgcatatgaaaccacatcatgattcccgacgtgagttagatgagggagagtttgtgtaactccacacccaggagggtaagccactttattatcatgctttggggctgtgcttaagaatttaagctctgttttaaagccgaagaagaaaacatttgaatttaccttcatatgccactaagaacaaaagctctgaagttcttcctgctggcaccaaatattaggattacaagctgtctctctgacaccagtggtaaaaaagcaagtagaatagtttctgagtctgtgttgcagcctctgacacgtggctcaccgctgtcatttgggggatggaatgaacagtcactgttctatagcatcctcctgtgctcttacctaaggaatctaaattgtcctagccttccattgctatgcactgaatgaggactactctcgtgtgtgtgtgtgtgtgtgtgtgtgtgtgtgtgtgtgtgtgtgtgtgtgttggatctactaacatgtttagcaaatggctctgacagggtggccatgagcagatgagaccagctcttgcttggttggaagccacactgcagtttgcagtttagcctttggtgtctcagtggcttcttgcttattccatgctttttctatcccatcctctctctgtgccctcctgcaatggcagccttggcacaatgcctgggtgtcctcatccttgctttactctggaaagtgtggggatggagaggatggtgcatttccagtgcttccttacctgtcaataacaatggtggccacctgggtcccagcacttggctggtggagagatttttttcattatggagctaataaagggtccctacgttttacattgattaatgaattatcacccagacatgtgcagatgaaatgtcaatataagaaaaatcaaggtatttgggaaacatgggcataatcaggtagttttgctaaaattcctcttccttggtctacataaagaagacatgggtctgtcatagaatggggacattagactgaaaactgggacaacccccttccttattttatagagactaggagttaaggggcctgcctaagattgcagtgataaagaactgaaccctaaatcagctcccactaatgaaaccctgctttccttgtatcttttaaactcagttctgcatccaacttgagaagaaaaaaagcttctttccatatcaagtaccatatgagttcatttaaactgcaccttgcagaaatgcattgccagaaagcaccagtagcctcctatctgcaagcagagtagtgctctgctctggggaggggtcattggaaaccataatgcagagtgggccccctactccatttcccagcaaaaggctccagctggagggatgggttgtggggcaacctggttcctgctaactgccagattgaatgtgtgggctagaatgcctgcacatttagttaaactgggctcagcatgcttgtcctcaaaatgtccatcctggtcacagcacacaagatggctattggtctgcttttaccctaccctgtactatacatgaaaattccagttattaacacactcaaactggtggagcttgttcaccctaggaaggggattgtatatatggcaggcttccctggtgccgatgtaaagggctacatttgggaacatttgacttccttgggactcttaagtgcataatgatggcatgaagtaaaaggggcctcaatgatgataggaaaatcagttcttttaaaatttcttcaagaaaatccaggctatcacatagtctttctgtgtgacttattaggagataggaagagcattgggaaacttgcacagctagctatgcatctacattttggtttggggttagttatgaaatgttcttaatatgacgtgttcaataacttcacataaacttcctgttctccaaaacctcaaagagatagagttaatgagttgttgtttttttttaaatgggggtagttttctatctgtcatgggctctagcatctactccgctacccaattctgtcatctccaagctgagtttcctcttctgaggcagaggctggagcagttctttttcagttctcatcctctccatcccaatccagtatatcaatcaactctaactcggagacgtctagctggcaatgtttctaaaactttcactggatttctttagacattgaagcaaacatttttttctaagaattgcttctcagatgatgatatcaaatgtatatgcttttgcaagtttgaaaagttcaaattaaccacttttgactaggtaagtctttctaaaaaccatttaaagctaactgggtcttagcatcctcctgtgtatggaagagacaggtgaccgctccaggttgggtgctcacagaacccttttcctgactctcatggaagatggtggaaggaaaatagactgtctcatcaaccctcctgtgtcctctgaagcaatctcagtttttattaaccacctcttctgtgtttctggtagctatttaacctgtatttaatctgtacttcctatgccagcctcaattttatttgatttttacaattattctcttctaaccaatgaagtgtttgtcagtatgccccaaagcttgctcttttgtgctcccttttgaataactttctatccagaaaaagagattatttgggacttgagatttgcagtgataccaacttatagcaatgatgtactttaagggaactacccaactatgttgtgatagaagaaagagaaaccttcactttggcatttttttttaatcactgtttatttttctgtttgcggcccaggaagcagtgggaggtggtggcagatatgctttgcatatggattgttatgtttttatttgggcaagtttaatcatggaaaactcaaaaagaaggggggaaatggtcagtttaagccaaaagaaactttctaaacaatgtataggtacacagcaaaattaaacaaatccaacaatttctgaagcttagtgtaattgagtggtggttgttattcaataaaattattcccaaaagtgtttctcctaagagtgcagttcccatgagtcacttcctgaacccattgaccaaaggtggacagagacaatcctgtagaccttgacattcagaaagatgtgagctgcttactgatcatatatgcatacgtttctttacagcagaggaaaccattgtccacaaaactgatgttcttttggggttttatgtacagacttgtccaatcatgtgtgtggttcctgcgagttgctgatgactccgcattgaagctctctgagttctttgattttaagttgggtttatggaattttttcaaatgttggaaggtgtgtggttcttcctgccctccctccccttttggaaatatgaaagcaaatgtttagaagaattccttttgaaaagctgtgtcgtgttccctgtgaaactgagcaggtgtgtgttggcgcgctaagtgccacatgcttgtgtgtagaggaggaggtggccctgccggctccgcgctgctgtgcctgtgatccctacctgctccccgctcctgttgccagcagcactcactgcactcctttgtcatatactctgcatcactgtcatactcacaacttcgtgaataaagttgtgtgctttattcgt

SEQ ID NO: 2294 - DNA, 2299 bp, Homo sapiens
  source 1..2299: mol_type = genomic DNA
atgacccagcagtggagggaagtgaatgaggacagagaagcagtggcccaggccaggagctggcaatcgctgaatctgggcgatagggacatgggggtcagtttcatcgaaactgccttggcgctctctgcagcccgggcccgccgccctctccttacctcccatcccccatcccgccccttccagcctcccaagcacacgccctcgcccccacccgccccccgcgttaattcgcgccatccagggcgctctgtgagtctgtcattacccagcgcgagtcaggcccctcctgtgcccctcgccagccccgaggggcgcccgcacacagtcggcgccccacacgcaagtacctggaagagaacaagaggacgccagcgggcgcggccgccaaagatcgttaaggaggctgaggtgccgcaggctgcgctgggcgtcccagcccaggggacaggggacaatggccacacgcctgtggaggaggaggtcgggggcatcccagtaccagcaccggggctcctgcaggtcacggagaggaggcagcctctgagcagcgtctcctctctggaggtccacttcgacctcctggacctcactgagctcaccgacatgtcggaccaggagctggccgaggtctttgctgactcggacgacgagaacctcaacaccgagtccccagcaggtctgcacccgctgccccgggccggctacctgcgctccccttcctggacgaggacaagggctgagcagagccacgagaagcagcccctaggcgaccccgagcggcaggccacagtcctggacacgtttctcactgtggagaggccccaggaggactagaccatctccacctgccccagctcctgcagggatggggtccgaacacgatggcagatctgggcagtgctgacccagcagacacacttcacccgcccacgaggctccagccgtcacctcctgacacacaccctgggggcagctctctgccagccccgagaccggccttgtctgctgggcacgggtcttcgcctcacttggagaccagccggctttcctgggggacacacggggcccccggatgcctctgggagccccagcacaagcacagcccagtggccttacgtccagctcgttcctgggccccgagtcaggaagacagcgtcacggagtcactgccaggaacgtgctgaggaatggagtggcccacggcggccttggggtgaaggggacccaggcctgtgacagccactccaggaactcctgggggtgctccaacctccgcgttttcctgtgctgccaagctcagaagccagaggcgggtttggtagtggctaatgggacaatgtgctgtccagcaaagcacacatggagaagcggccccaaaattcccaccttgatttccatcctgccccttcttctactccacggaggcgctgtctcactagggtcccctccccaaggctcagctctaagacctgcacctgcttctcttggcccctgcgtgacagacaagtccattccctccttagctcagaacaccaaatatcaccagactgcctaagagacttgatgacacctcccggaatgctctcggggtggggttcacctctccttgtcctgcacccactgctaggccacattctcgtttctgctcacatcccattgcccggctacaaggcctgcccacggcccttaaacttgctgggcaggtttggagcccatgggaccccgtgggtctctgtccaggagcagcagaggaggctgacaggccctgctccctctgctctgggggtgtctgggagccccagctcacaccctcccaatgcttatatgctgaagctcacagaatgggcttcttgcctgacagcaagtcaaagaatgagtttaatatcaaagtgtaagcttactttccatccccaagccagcctgccccctgccccatttcccatgagcacacttctggggaaggaaaacaggctcctggccttcactctcagcagagctttggagatgccccaggcatgccctgagctccttctgtgtacctgctcccacttctgagccacccgctgcccctccgcactgctggcaaacccagttcctgcctcagccaggtctccttccctggtttccagtcacacagagcccagcagctttctctttcagtcccataagggcagccttgtgtccctggccacacttccacccgccagggtcttcctccccatctttccatccttcctgctgagcttccacagagctcgtttgcaaacagggggattaaagcatcactgcgcattcg

SEQ ID NO: 2295 - DNA, 927 bp, Homo sapiens
  source 1..927: mol_type = genomic DNA
gcggcggccatctctgggcggcggcggcgggcggtgtttgcgcggtcggtgagacccgcgcgggtgagacgctggccctccttacagcctagaaaaaatgacagatctcgtagctgtttgggatgttgctttaagtgacggagtccacaagatcgaatttgaacatgggactacatcaggcaaacgagtagtatatgtagatggaaaggaagagataagaaaagagtggatgttcaaattagtgggcaaagaaacattctatgttggagctgcaaagacaaaagcgaccataaatatagacgctatcagtggttttgcttatgaatatactctggaaattaatgggaaaagtctcaagaagtatatggaggacagatcaaaaaccaccaatacttgggtattacacatggatggtgagaactttagaattgttttggaaaaagatgctatggacgtatggtgcaatggtaaaaaattggagacagcgggtgagtttgtagatgatgggactgaaactcacttcagtatcgggaaccatgactgttacataaaggctgtcagtagtgggaagcggaaagaagggattattcatactctcattgtggataatagagaaatcccagagattgcaagttaatgaattttcatcttaagaagtaaagatcaggactttttaattactgtggtaattaaatgtgttcagtatgtacttatcagtacatttagtctgcaatgttttaattttttaaaaagttacatgaaactaacattccaagggtcaggaaaaaaaccaattatgtatagtcataaaaattacaatttatgatgcaaataatgtaaaatgttttaaagacaaatggcaaataagatatggaccaaagtcactaatgttttacaacagtaacctttactataataaatactttt

SEQ ID NO: 2296 - DNA, 946 bp, Homo sapiens
  source 1..946: mol_type = genomic DNA
ggccacgcggcctacgcagccgagtcggaaccaaccggttgtttggtgaaacctaccccagagcctcccgcggcccacagagcacagccctccttacagcctagaaaaaatgacagatctcgtagctgtttgggatgttgctttaagtgacggagtccacaagatcgaatttgaacatgggactacatcaggcaaacgagtagtatatgtagatggaaaggaagagataagaaaagagtggatgttcaaattagtgggcaaagaaacattctatgttggagctgcaaagacaaaagcgaccataaatatagacgctatcagtggttttgcttatgaatatactctggaaattaatgggaaaagtctcaagaagtatatggaggacagatcaaaaaccaccaatacttgggtattacacatggatggtgagaactttagaattgttttggaaaaagatgctatggacgtatggtgcaatggtaaaaaattggagacagcgggtgagtttgtagatgatgggactgaaactcacttcagtatcgggaaccatgactgttacataaaggctgtcagtagtgggaagcggaaagaagggattattcatactctcattgtggataatagagaaatcccagagattgcaagttaatgaattttcatcttaagaagtaaagatcaggactttttaattactgtggtaattaaatgtgttcagtatgtacttatcagtacatttagtctgcaatgttttaattttttaaaaagttacatgaaactaacattccaagggtcaggaaaaaaaccaattatgtatagtcataaaaattacaatttatgatgcaaataatgtaaaatgttttaaagacaaatggcaaataagatatggaccaaagtcactaatgttttacaacagtaacctttactataataaatacttttaaaaaaa

SEQ ID NO: 2297 - DNA, 1412 bp, Homo sapiens
  source 1..1412: mol_type = genomic DNA
agttgcaacttgtctttgagtgcagggacaggagaagtgtgggctacccggccactgccctggagctgtggtgactgctgcgtttttctcccatgcacttgcacgtccaggactcctgggagaacttgggccacactccttccttgccctcttgagctcattcgtcaccctgttgggtgagcacagccctagctcaggccactgggcaagccacaccatccaaagaggaggtcctctgccccaggacccccacaccaccccagctccctgtttcgctgaggcctggagcccccatggcctcactgagccgagccctacgtgtggctgctgcccaccctcgccagagccctacccggggcatggggccatgcaacctgtccagcgcagctggccccacagccgagaagagtgtgccatatcagcggaccctgaaggagggacagggcacctcggtggtggcccaaggcccaagccggcccctgcccagcacggccaacgtggtggtcattggtggaggcagcttgggctgccagaccctgtaccacctggccaagctgggcatgagtggggcggtgctgctggagcgggagcggctgacctccgggaccacctggcacacggcaggcctgctgtggcagctgcggcccagtgacgtggaggtggagcttctggcccacactcggcgggtggtgagccgggagctggaggaggagacgggactacacacgggctggatccagaatgggggcctcttcatcgcgtccaaccggcagcgcctggacgagtacaagaggctcatgtcgctgggcaaggcgtatggtgtggaatcccatgtgctgagcccggcagagaccaagactctgtacccgctgatgaatgtggacgacctctacgggaccctgtatgtgccgcacgacggtaccatggaccccgctggcacctgtaccaccctcgccagggcagcttctgcccgaggagcacaggtcattgagaactgcccagtgaccggcattcgtgtgtggacggatgattttggggtgcggcgggtcgcgggtgtggagactcagcatggttccatccagacaccctgcgtggtcaactgtgcaggagtgtgggcaagtgctgtgggccggatggctggagtcaaggtcccgctggtggccatgcaccatgcctatgtcgtcaccgagcgcatcgaggggattcagaacatgcccaatgtccgtgatcatgatgcctctgtctacctccgcctccaaggggatgccttgtctgtgggtggctatgaggccaaccccatcttttgggaggaggcagtcaaatacagacccagggcagctggagggctttgcctcaaaacatccacagagaaggtctgcgcagtgtggagtgatgacctcagaagggcatga

SEQ ID NO: 2298 - DNA, 3100 bp, Homo sapiens
  source 1..3100: mol_type = genomic DNA
cgcggctgcatggacgcgggtccggcgcgcgggaggcgatgacggccccgccatggcccgggcgggcagctgcggcggcgccgcggcgggcgcagggcggccggagccctgggagctgtccctggaggaggtgctgaaggcctacgagcagccgctcaacgaggagcaggcgtgggccgtgtgcttccagggctgccgcgggctgcggggctcgccgggccggcgcctgcgggataccggggacctcctgctgcgcggggacggctcggtcggggcgcgggagcccgaggccgcggaacctgcaaccatggtcgtgccactagccagctcggaagcccagaccgtgcagtccctcggcttcgccatctaccgcgcgctggactgggggctggacgagagcgaggagcgcgaactcagccctcagctggagcggctcatcgacctcatggccaacaacgacagcgaggacagcggctgcggtgccgccgatgagggctacgggggtcccgaggaggaggaggaggccgagggcgtcccccgcagcgtgcgcacctttgcccaggccatgcggctgtgcgcggcgcggctgaccgacccccggggcgcacaggcgcattaccaggccgtgtgccgcgcgctcttcgtggagacgctggagctgcgggccttcctggccagggtccgggaggccaaggagatgctgcagaagcttcgggaggacgagccgcatctggagacgcctcgggcagagctggacagcctgggtcacacagactgggcccgactgtgggttcagctcatgcgggagctccgccgcggagtgaagctgaagaaggtgcaagagcaggagttcaaccccctccccaccgagttccagctcacgcccttcgagatgctgatgcaggacatccgggcccggaactacaagctgcgcaaggtcatggtggatggggacatcccgccccgggtgaagaaggacgctcacgagctcatcctggactttatccgctcacggcctccactgaagcaggtctctgagaggcggctgcgcccgttgccaccaaagcaaaggtccctgcatgagaagatcctggaggagatcaagcaggagcggaggctgcgcccggtgcggggcgagggctgggctgcccgcgggtttggctctctgccctgcatcctcaacgcctgctccggagatgccaagtccacctcctgcatcaacctgtcagtcacagatgctgggggcagcgcccagcgcccgcggccccgcgtgctgctcaaggcgcctaccttggctgaaatggaagagatgaatacatctgaggaagaagagtctccgtgtggggaggtgacgctgaaacgggaccgctccttctcagagcatgacctggcccagctccgaagtgaggtggcctctggcctgcagtcggccacccaccccccaggagggacggagccaccacggccccgagctggcagtgcgcatgtgtggaggcccggctcccgagaccagggtacctgtcccgcgagtgtctctgaccccagccaccccctactcagcaaccggggctcctcgggggacagacccgaggcctccatgacccccgatgccaaacacctgtggctggagttcagccaccccgtggagagcctggcgctgactgtggaagaggtgatggacgtgcgccgtgtgctggtgaaggccgagatggaaaagtttttgcagaacaaggagctcttcagcagtctgaagaaggggaagatttgctgctgctgccgggccaagttcccgctgttctcgtggccgcccagctgtctcttctgcaagaggtctctgcaagggccacagtggcagagcgtggaggaggcgttcccccacatctactcccacggctgtgtcctgaaggatgtctgcagtgagtgcaccagctttgtggcagacgtggtgcgttccagccgcaagagcgtggacgtcctcaacactacgccacgacgcagtcgccagacccaatccctctacatccctaacaccaggactcttgacttcaagtgacagccccaggtggccaggcctccaggaggcaccaggcaggccctgtatcaggctaggacgctctgagctgtgcatgtacatatatacatatatagatacatttataatatatacacacagtctatatatttatatacactgtttcctggccccagagctcatttgggttcaggcgcacttcaaaaccctccctgggggaggctgtttcttctcaggattccttgccagggaggaaggggagggaacagggtgggttttctcactgaagagagaaagcagaaggttctagatcctggcacagactgcatcccatgttcccatgctcttctccgtccccaggaatgcgaacggcagtttcccttccccagtggacgtctaggtggggacagggtatcttggctcccagctggaccagagtgccctgcttgcctctgctctccctttgtggggactcaggcagcagaggcatctgggaagtctctgagtaggcagggtcctcctgggaggcacccccacctgtttgaaaggtctggccaggcgtggtggttcaggcctgtaattccagcactttgggaggccgaggagggaggatcacctgaggtcaggagtttgagaccagcctggccaacatgatgaaatgttgtctctactgaaaatgcaaaaattagccaggtatagtggcaggaacctgtaatcccagctacaggggaggctgaggcaggagaatcgcttgaacccgggaggtgtaggttgcagtgagccgagattgcaccactgcactccagcctgggcgacagagcgagactctgtctcgaaaaaaaaaaaggtccgtgccaagctgctccctgcccttgccctttccctttccctggggtccaaaccacatgtgtcctgcctctcctggccctaccacattctggtgctgtcctcactcgcccctggcccagaggctcctgaagatgctgggcggtcctggcacagggaggagcagctctgtaaatctgtgcacatggccactcttggcctaataaaggaggtctcacagtc

SEQ ID NO: 2299 - DNA, 1482 bp, Homo sapiens
  source 1..1482: mol_type = genomic DNA
cagagtttgggcgccaggcgagacggcagggcttaaagttccgggaatcaaagatcaactcccactgaggacaaatggacctgtaattccgggtgtgacgagagaacgagatttaccttcctgaattaaaaaacaggtcattaagcttgggccctgactcttctttgtgagaaggtacagagatggaaaccttacaatccgagactaaaacgagggtccttccctcatggctgacagcccaggtggctacaaagaatgtggcaccaatgaaggcccccaagaggatgagaatggcagcagtgccagtggcagcagcaagactccctgcgacaaggactgtgtactgcatgaatgaggctgagatagttgatgttgctctgggaatcctgattgagagccgcaaacaggaaaaggcctgcgagcagccggccctggcgggggctgataacccagagcactcccctccctgctccgtgtcgcctcacacaagttctgggagcagcagtgaggaagaggacagtgggaaacaggcactggctccaggcctcagcccttcccagaggccggggggttccagctctgcctgtagcaggagccctgaggaggaggaggaagaggatgtgctgaaatacgtccgggagatctttttcagctagggcataaactgtgcactgaactgtctgccgagagcagctggaggacagctgagcttccactggtgctgctgggccgcccgcctgtgggaatggggctctctgtgctcctacctttgtgccttcttgggcctggcagattcacctcaggccagaagcccctggacactccgggccttggggctgccgttctgagtgtgcggaaggcaggactcaaaatgagatcccatttgactccctctgtatgtactgtgccctctcctggctcttgaggctctggagtcccaattgtctgtgttagtcagtgaccaggttccagggaaaatgatgtcatgtggtggtccaacttactggaaccaaagagacagtactttgcaaagaaaaggatcactgccaggtgcactggaattgctacagtttagtccgcatgatctctcctgaaggaggaagcctgtttcaaaaatagtttccatcatgagtctatcaatgagctcccacctctccagccagcctagaaagcaaacgagctgcccacagttctctgccctgtctgggaggttgaggccacagtgtatagactggtaagccagacaggcctcctcccgcaagctgctaccttgctttcacctgtaccttggtccccgggcagctagctataaagcaagagggacaggagcccagaagagacactgaggacaagagatcacaccagagtacatgtctctgcctctgttttcagtgtggctttggacaggaatatatgaataaatcactgccatacaggttttccaatacacaagtgctagaaaatacacacaattccccaatg

SEQ ID NO: 2300 - DNA, 1021 bp, Homo sapiens
  source 1..1021: mol_type = genomic DNA
aaccacgtgggtcccgggcgcgtttcgggtgctggcggctgcagccggagttcaaacctaagcagctggaaggaaccatggccaactgtgagcgtaccttcattgcgatcaaaccagatggggtccagcggggtcttgtgggagagattatcaagcgttttgagcagaaaggattccgccttgttggtctgaaattcatgcaagcttccgaagatcttctcaaggaacactacgttgacctgaaggaccgtccattctttgccggcctggtgaaatacatgcactcagggccggtagttgccatggtctgggaggggctgaatgtggtgaagacgggccgagtcatgctcggggagaccaaccctgcagactccaagcctgggaccatccgtggagacttctgcatacaagttggcaggaccatggccaacctggagcgcaccttcatcgccatcaagccggacggcgtgcagcgcggcctggtgggcgagatcatcaagcgcttcgagcagaagggattccgcctcgtggccatgaagttcctccgggcctctgaagaacacctgaagcagcactacattgacctgaaagaccgaccattcttccctgggctggtgaagtacatgaactcagggccggttgtggccatggtctgggaggggctgaacgtggtgaagacaggccgagtgatgcttggggagaccaatccagcagattcaaagccaggcaccattcgtggggacttctgcattcaggttggcaggaacatcattcatggcagtgattcagtaaaaagtgctgaaaaagaaatcagcctatggtttaagcctgaagaactggttgactacaagtcttgtgctcatgactgggtctatgaataagaggtggacacaacagcagtctccttcagcacggcgtggtgtgtccctggacacagctcttcattccattgacttagaggcaacaggattgatcattcttttatagagcatatttgccaataaagcttttggaagccgga

SEQ ID NO: 2301 - DNA, 1193 bp, Homo sapiens
  source 1..1193: mol_type = genomic DNA
ggagttcaaacctaagcagctggaagggccctgtggctaggtaccatagagtctctacacaggactaagtcagcctggtgtgcaggggaggcagacacacaaacagaaaattggactacagtgctaagatgctgtaagaagaggttaactaaaggacaggaagatggggccaagagatggtgctactgtctactttagggatcgtctttcaaggcgaggggcctcctatctcaagctgtgatacaggaaccatggccaactgtgagcgtaccttcattgcgatcaaaccagatggggtccagcggggtcttgtgggagagattatcaagcgttttgagcagaaaggattccgccttgttggtctgaaattcatgcaagcttccgaagatcttctcaaggaacactacgttgacctgaaggaccgtccattctttgccggcctggtgaaatacatgcactcagggccggtagttgccatggtctgggaggggctgaatgtggtgaagacgggccgagtcatgctcggggagaccaaccctgcagactccaagcctgggaccatccgtggagacttctgcatacaagttggcaggaccatggccaacctggagcgcaccttcatcgccatcaagccggacggcgtgcagcgcggcctggtgggcgagatcatcaagcgcttcgagcagaagggattccgcctcgtggccatgaagttcctccgggcctctgaagaacacctgaagcagcactacattgacctgaaagaccgaccattcttccctgggctggtgaagtacatgaactcagggccggttgtggccatggtctgggaggggctgaacgtggtgaagacaggccgagtgatgcttggggagaccaatccagcagattcaaagccaggcaccattcgtggggacttctgcattcaggttggcaggaacatcattcatggcagtgattcagtaaaaagtgctgaaaaagaaatcagcctatggtttaagcctgaagaactggttgactacaagtcttgtgctcatgactgggtctatgaataagaggtggacacaacagcagtctccttcagcacggcgtggtgtgtccctggacacagctcttcattccattgacttagaggcaacaggattgatcattcttttatagagcatatttgccaataaagcttttggaagccg

SEQ ID NO: 2302 - DNA, 1084 bp, Homo sapiens
  source 1..1084: mol_type = genomic DNA
cctttctgagcagctgtgtttgaagaaagctagtgggaaaagttccaggattacatgtcaggaaactacaagaggtagaaacatttgttgatttaccagtgtttttaacttcctgctgggctgaaaactgcttgtttcgtggaaaagcaaaacttgacagcaaacatctaaaatgaagagctcccaaacttttgaggaacaaacggaatgcattgtgaacactctactcatggacttcttgagcccaacattgcaggttgccagccggaacctatgctgtgtagatgaagtagattcaggagagccttgttcttttgatgtggctatcattgctggtcgccttcggatgttgggtgaccagttcaacggagaattggaagcttctgccaaaaacgtcattgcagaaaccattaagggacagacaggagctatactccaggacactgtggaatctctcagcaagacctggtgtgctcaggattccagcttagcttatgagagagcttttctggcagtgtcagtgaaacttcttgagtacatggctcacattgctcctgaagtagtgggacaggtggctatccccatgacgggtatgatcaatgggaaccaagccatccgggagttcatccagggccagggaggttgggaaaatctggagagctgaagagttggagctattcacgagactgaacatcacttccttgttgactgattgggtgattgattcctgggaattcaaacaaacaaataaaaaagcacttttttcattttatcagaactgaacttagctgaataagttattttttactgattgttaaagttgggagcagctgccagaggcctgcagagttggtttttgttttgttttgttttgtcaacttaatgcaaaccacagagattttctactttctgttttcacatgagttttaatgaggttctgttgaagcaaagacccctagacacaaagtaatgacttgttagtagtggaattataagcaacagggcaggcctttgctggaggtattttgagagaaagggagaacaatggaaactatttcttcagatgtagccctgtcttttggta

SEQ ID NO: 2303 - DNA, 2422 bp, Homo sapiens
  source 1..2422: mol_type = genomic DNA
gtgagggaacgcgctttcgaggcggaggttaggagcggggagcgcgcccgggtccagcgtcctgcttctccgcttcccgcgctgagctcttcgcctgtcgctgaggcgtcggtgccagctgcgtgaaggatggagagggcggggcgcgaatcctgagccagagactgagtgcttgggggtgggccgagcacttgggggccgctcttcggggcccgggtggtctggaacaatgttgcttggctgggcggctgcgggatagggcggaaggggacaggcttgaggcttggataggcgtgaggaggcgcatacgaccgcacaacccgaggtttgtaactgtattcggaagacgccgggtccggctgggactgccagaggaacctggctttgcaggactacggaggagtaacgtcgagtgaattggaagagggcccagggccgcacaagcagcgtcaccctttacaccagaaagctggcgggcactatggggaaaaaacaaaacaagaagaaagtggaggaggtgctagaagaggaggaagaggaatatgtggtggaaaaagttctcgaccgtcgagtggtaaagggcaaagtggagtacctcctaaagtggaagggattctcagatgaggacaacacatgggagccagaagagaacctggattgccccgacctcattgctgagtttctgcagtcacagaaaacagcacatgagacagataaatcagagggaggcaagcgcaaagctgattctgattctgaagataagggagaggagagcaaaccaaagaagaagaaagaagagtcagaaaagccacgaggctttgctcgaggtttggagccggagcggattattggagctacagactccagtggagagctcatgttcctgatgaaatggaaaaactctgatgaggctgacctggtccctgccaaggaagccaatgtcaagtgcccacaggttgtcatatccttctatgaggaaaggctgacgtggcattcctacccctcggaggatgatgacaaaaaagatgacaagaactaacgctcctgagtaccagcccctgtcacatctgactgtgggtttcaagtgggaagggaaggagttctacttgtcttgacaccatagaggtggcttgagaagatgtcctttgaagagccagtatagtttctgtgccctgcagcagcccaagtgctttaaagccgtttcaagctgtatagtttgcacacccatcccagtggaggggaaaggggataagtgtttcaaggcaaccttttctgcactttgctgcgaaaagcaaagggccttctatgaaggacaaaacttgcagaattgggtgtgtgggagagcaaaaaaatactgtagatcttcaaagagcatctccacaacccacagccttcttcccaatagtgttaactctgcatttttacagcgtagcatgtgtgtagtttttggctattactggtgtattatttgggggagggagggatggggaggggagaaagggagatgggtagcatcattttgattaacatttggggcctgataggggaaatggtgaagcaatggaaaagaacagacaactaatgatttgcttctatgtccagaatattttacctttaaaaaaatgtcattggcaccataaataaggactgtgagagactgtttaaaagctgtgaaagtctgaaacctataagccaaggtgttccctgcctaaacttattgctgttcccacaaaggactaagcctgttcataagttaccaaagttgccattttggagatggaaattgacgaggagggaaggtcttttattggagagtatacagtacaagcagatcattctgccttagaggtgctaattcccgaaattagaagaccctttcttttccagtaacgaagttataaatatcagcttgttcatccaagccactggctgaggtgttaggaagaggaagagggtggtagaggaggtaagacagtagggaaagacaagggcccatgctcttagtggggaaaactcttggagccgtttactttgagctttgaacactgaaaccattgttggcagggttcagtcactgacagcacaagtttcactgaattgatccaagagtttagtgatttcaaaagccttggtctcaggagaagattaaactttcatattgggcagtggttcactttaaaacacacacatacacacacaaaacaattttttaagaaatcctaataagtaacatacccaaaatgctctgtcttgagtcatgagaaccatcagttcttgatattgtctagacttgcatctagagctacgttgtaaaattcttttaggcatgtgttagatttctgtgtaaactttgtttaaatgtaaacttcatactacattgtcagtttttgtcttaataaaactatagatttataatccctga

SEQ ID NO: 2304 - DNA, 2279 bp, Homo sapiens
  source 1..2279: mol_type = genomic DNA
acaagggaccttatttaggttgcgcaggcgcccgctggccatttcgtcttagccacgcagaagtcgcgtgtctaggtgagtcgcggtgggtcctcgcttgcagttcagcgaccacgtttgtttcgacgccggaccgcgtaagagacgatgatgttgggcacggaaggtggagagggattcgtggtgaaggtccggggcttgccctggtcttgctcggccgatgaagtgcagaggtttttttctgactgcaaaattcaaaatggggctcaaggtattcgtttcatctacaccagagaaggcagaccaagtggcgaggcttttgttgaacttgaatcagaagatgaagtcaaattggccctgaaaaaagacagagaaactatgggacacagatatgttgaagtattcaagtcaaacaacgttgaaatggattgggtgttgaagcatactggtccaaatagtcctgacacggccaatgatggctttgtacggcttagaggacttccctttggatgtagcaaggaagaaattgttcagttcttctcagggttggaaatcgtgccaaatgggataacattgccggtggacttccaggggaggagtacgggggaggccttcgtgcagtttgcttcacaggaaatagctgaaaaggctctaaagaaacacaaggaaagaatagggcacaggtatattgaaatctttaagagcagtagagctgaagttagaactcattatgatccaccacgaaagcttatggccatgcagcggccaggtccttatgacagacctggggctggtagagggtataacagcattggcagaggagctggctttgagaggatgaggcgtggtgcttatggtggaggctatggaggctatgatgattacaatggctataatgatggctatggatttgggtcagatagatttggaagagacctcaattactgtttttcaggaatgtctgatcacagatacggggatggtggctctactttccagagcacaacaggacactgtgtacacatgcggggattaccttacagagctactgagaatgacatttataattttttttcaccgctcaaccctgtgagagtacacattgaaattggtcctgatggcagagtaactggtgaagcagatgtcgagttcgcaactcatgaagatgctgtggcagctatgtcaaaagacaaagcaaatatgcaacacagatatgtagaactcttcttgaattctacagcaggagcaagcggtggtgcttacgaacacagatatgtagaactcttcttgaattctacagcaggagcaagcggtggtgcttatggtagccaaatgatgggaggcatgggcttgtcaaaccagtccagctacgggggcccagccagccagcagctgagtgggggttacggaggcggctacggtggccagagcagcatgagtggatacgaccaagttttacaggaaaactccagtgattttcaatcaaacattgcataggtaaccaaggagcagtgaacagcagctactacagtagtggaagccgtgcatctatgggcgtgaacggaatgggagggttgtctagcatgtccagtatgagtggtggatggggaatgtaattgatcgatcctgatcactgactcttggtcaaccttttttttttttttttttttttctttaagaaaacttcagtttaacagtttctgcaatacaagcttgtgatttatgcttactctaagtggaaatcaggattgttatgaagacttaaggcccagtatttttgaatacaatactcatctaggatgtaacagtgaagctgagtaaactataactgttaaacttaagttccagcttttctcaagttagttataggatgtacttaagcagtaagcgtatttaggtaaaagcagttgaattatgttaaatgttgccctttgccacgttaaattgaacactgttttggatgcatgttgaaagacatgcttttatttttttgtaaaacaatataggagctgtgtctactattaaaagtgaaacattttggcatgtttgttaattctagtttcatttaataacctgtaaggcacgtaagtttaagctttttttttttttaagttaatgggaaaaatttgagacgcaataccaatacttaggattttggtcttggtgtttgtatgaaattctgaggccttgatttaaatctttcattgtattgtgatttccttttaggtatattgcgctaagtgaaacttgtcaaataaatcctccttttaaaaactgca

SEQ ID NO: 2305 - DNA, 4598 bp, Homo sapiens; identical to SEQ ID NO: 337
  source 1..4598: mol_type = genomic DNA

SEQ ID NO: 2306 - DNA, 842 bp, Homo sapiens
  source 1..842: mol_type = genomic DNA
ggaaaacagtgtggcatattctgctgagcttcgccctggaagaagcctcttttatacatctcttcagggaagagagaagcaatgggcatgttagtatacaatgatcacagccacgcaggcctgcaagctgccttttggacaggctgttgactgccgttccaattagctgattggagaatgtggaatgcagagtgataatgctgcatatctgctatcaggcagcagcaaaggtttttgtcttgggaaggcaagctttccctgcaatattatctcagcagctccctagctgcttaccctgaaaacgagggatccaaacggagggtgttgcactctgctaacgctggtcctgtgcgtggctgtggcatatgagcggcaggtctgaaaaagcaggtgtgtgctgggacgggcactggactggaacgcaggcggacgctctcgggtttacctgcttcctgttaacagattgtgggctcccagggcatatgtctgcacgctgaggccgaggcggagaaggggcttcctgagcgtcccagtacactgacagagacacttggattggacttaatcttaaacctctggagttcaagaccttttaaaaagggctaaataaacaatctctacatgtaaaaggccactgactcctacttcctctgtatagagcaactgttgaactcagctgcctgtagggcgtgattctcagtcaccagactcagcaaaaggttttagaagcgttcgaccaaacctacaagataaaagatcaccaactcagagccagataacagtgaatggaaactcaggaggtgccgtgagtcccatgagttactatcagaggccgttttccc

SEQ ID NO: 2307 - DNA, 3043 bp, Homo sapiens
  source 1..3043: mol_type = genomic DNA
cattttacttatggaaaacagtgtggcatattctgctgagcttcgccctggaagaagcctcttttatacatctcttcagggaagagagaagcaatgggcatgttagtatacaatgatcacagccacgcaggcctgcaagctgccttttggacaggctgttgactgccgttccaattagctgattggagaatgtggaatgcagagtgataatgctgcatatctgctatcaggcagcagcaaaggtttttgtcttgggaaggcaagctttccctgcaatattatctcagcagctccctagctgcttaccctgaaaacgagggatccaaacggagggtgttgcactctgctaacgctggtcctgtgcgtggctgtggcatatgagcggcaggtctgaaaaagcaggtgtgtgctgggacgggcactggactggaacgcaggcggacgctctcgggtttacctgcttcctgttaacagattgtgggctcccagggcatatgtctgcacgctgaggccgaggcggagaaggggcttcctgagcgtcccagtacactgacagagacacttggattggacttaatcttaaacctctggagttcaagaccttttaaaaagggctaaataaacaatctctacatgtaaaaggccactgactcctacttcctctgtatagagcaactgttgaactcagctgcctgtaggaaaactgaagactttaataacaaactctccaaggtgaaaatgaacacagggcgtgattctcagtcaccagactcagcaaaaggttttagaagcgttcgaccaaacctacaagataaaagatcaccaactcagagccagataacagtgaatggaaactcaggaggtgccgtgagtcccatgagttactatcagaggccgttttccccctcggcatattctctcccagcctcactcaactccagcattgtcatgcagcacggcacatccctcgattccacagacacatatccccagcatgcgcagtctctggatggcaccaccagcagctctatccccctgtaccgatcctcagaggaagagaagagagtgacagtcatcaaagccccgcattacccagggatcgggcccgtggatgaatccggaatccccacagcaattagaacgacagtcgaccggcccaaggactggtacaagacgatgtttaagcaaattcacatggtgcacaagccggatgatgacacagacatgtataatactccttatacatacaatgcaggtctgtacaacccaccctacagtgctcagtcacaccctgctgcaaagacccaaacctacagacctctttccaaaagccactccgacaacagccccaatgcctttaaggatgcgtcctccccagtgcctcccccacatgttccacctccagtcccgccgcttcgaccaagagatcggtcttcaacagaaaagcatgactgggatcctccagacagaaaagtggacacaagaaaatttcggtctgagccaaggagtatttttgaatatgaacctggcaagtcatcaattcttcagcatgaaagaccaactgatcgcataaatccagatgacatagatttagaaaatgagccctggtataaattcttttcagaactggagtttggacgcccgcctcctaaaaagcctctggactatgttcaagatcattcttctggtgttttcaatgaggcctccttgtatcagtcctctatagacagaagcctggaaagacccatgagttctgcaagcatggccagtgacttcaggaagcggaggaagagcgagcctgcagtgggtccaccacggggcttgggagatcaaagtgcgagcaggactagcccaggccgagtggacctcccaggatcaagcaccactcttacaaagtctttcactagctcttctccttcttccccatcaagagcaaaagaccgtgagtcccctagaagttactcatccactttgactgacatggggagaagtgcaccaagggaaagaagaggaactccagaaaaagagaaattgcctgcaaaagctgtttatgattttaaggctcagacatctaaggagttgtcatttaagaaaggagatactgtctacatcctcaggaaaattgatcaaaattggtatgagggagaacaccacgggagagtgggcatcttcccgatctcatacgtagagaaactcacacctcctgagaaagcacagcctgcaagaccacctccgccagcccagcccggagaaatcggagaagctatagccaaatacaacttcaacgcagacacaaatgtggagctgtcactgagaaagggagatagagttattcttcttaaaagagttgatcaaaactggtatgaaggtaaaatcccaggaaccaacagacaaggcatcttccctgtttcctatgtggaggtcgtcaagaagaacacaaaaggtgctgaggactaccctgaccctccaataccccacagctattctagtgataggattcacagcttgagctcaaataagccacagcgtcctgtgtttactcatgaaaatattcaaggtgggggggaaccgtttcaggctctgtataactatactcccaggaatgaagatgagctggagctcagagaaagtgatgtcattgatgtcatggaaaagtgtgatgacggctggtttgtggggacctcaagaagaaccaaattctttggtactttccccggaaactacgtcaagaggctgtgaattgcgctccctccttctgtagaggccgcctgccagccatgcacctgcgtcaacgcgcctgaaacaccccgcgggcctcccgttgtcatgccttacggtttccaatgcgccgtcaccatctccacctgccaccaaaccaccagcagagtagccgccgctgctgtgagcctggggacgacatggcaggctggtccccctccgtgaaagtgtggattcctacttcctgctctaagctttgacacgtcaaaatgtgggatcagaaagaaaaaaatcatgatatttaaaaatggtcaaatatttgagg

SEQ ID NO: 2308 - DNA, 6400 bp, Homo sapiens
  source 1..6400: mol_type = genomic DNA
aggggcggaggtgacagcgggctggggactggcggctgcaactgcctgccgcgccgagggaccgccgggcggcggaaagcaggttataaaacatggaggctggctcagtggttcgagccatttttgacttctgccctagcgtatcagaagaactgccgctctttgtgggagatattattgaggtgctggcagtggtggatgaattttggcttctaggaaagaaggaggatgttacaggacaattccccagcagttttgtggaaattgtgaccattcccagtctaaaagagggagagaggctgtttgtgtgcatttgtgaattcacatcccaagagttggataatcttcccctccatcgaggtgacctggtgattctcgatggcattcccactgcaggctggctgcagggccgaagctgctggggcgcacggggcttcttcccatcttcatgtgtccgcgagctctgcctctcctcacagagccggcagtggcactcccagagcgccctgtttcagattccggaatattccatgggacaagcccgggccctaatggggctttctgctcagctggatgaagagctggacttcagggaaggggatgtgatcaccattattggagttcctgaaccaggctggtttgaaggggagttagagggccgaagaggcatttttccagaaggttttgtagagctgttggggcccctgaggactgtggatgagtcagtaagttctggaaatcaagatgactgcattgttaatggtgaagtagatacccctgtaggagaagaagagatagggccggatgaggatgaggaggagccagggacctatggggtcgccctgtacagattccaagccctggagccaaatgagctggatttcgaggtcggggataaaatccgaattctggcgaccttggaagatggctggctggaaggatccctgaagggcaggacaggcatctttccttaccggtttgtgaaattatgtcctgacacacgggtggaggaaaccatggctctgccccaggaaggcagccttgccaggatcccggaaacttctttggattgtttggagaacaccttaggagtagaggaacaaagacatgaaaccagtgaccatgaggccgaggagcctgactgcattatttctgaagcacccacttctcccctcggtcatctgacttcagagtatgacacagacagaaactcttatcaggacgaggacaccgcaggagggcccccgagaagcccaggcgtggagtgggaaatgcctcttgccacagactctcccacatctgaccctacagaagtagtcaatggtatttcctcccaacctcaggtcccttttcatcccaacttgcagaaaagccagtattattctacagtgggagggagccacccgcactcagaacagtaccccgaccttcttcccctagaagcaaggactagagactatgccagcctacctcccaaaagaatgtattcccagctaaaaactcttcagaagccagtgctccctctttacaggggctcttctgtttcagcttcaagggtagtcaaacccagacaatcaagtcctcagctccacaacctagcaagttatactaaaaagcaccacacgtccagtgtttactccatctcagagagattggagatgaagcctggtccgcaagcccaagggcttgttatggaagcagcaacacattcacagggagacggcagcactgacctggactcgaagctgacacaacagctgatcgagtttgagaagagcttggcagggcccggcacagagccagataaaattttacgccacttttcaatcatggactttaactctgagaaggatattgtccgaggttcctcaaagttaatcaccgagcaggagctgccggaaaggagaaaggccctaaggccaccgccacctcgtccctgtactccggtatccacttctccccatttgctggttgaccagaacctaaaacctgcaccacccttggtggtgcgaccctctcgcccagctcccctgcctccctcagcacagcagagaacgaatgcggtatcccccaagctcctatctcgacaccgtcctacctgtgagaccttagaaaaggagggccctggtcatatgggaaggagtctggaccagacctccccatgccccttagtgctggtgaggattgaggaaatggagcgggacttggatatgtacagtagagctcaagaagagctaaacctcatgctggaggagaagcaggatgaatcatcaagagcagagaccctcgaggatctcaagttctgtgaaagtaacattgaaagtttgaatatggaactccagcaactaagagaaatgacgctcctctcctcccagtcttcatcactggtggccccttctgggtctgtgtctgccgaaaatccagagcagaggatgctggagaagagagccaaggtcatagaagaacttcttcagacagaaagagactacattcgggatctggaaatgtgtattgagcggatcatggtacccatgcagcaggcacaggtaccaaacattgattttgagggactttttggaaatatgcagatggtgattaaggtctcgaagcaattattggctgctctggaaatcagcgatgctgtaggacctgtgtttcttggtcaccgggatgagcttgagggaacatacaagatttactgccagaatcatgatgaggccattgcgctgcttgaaatctacgagaaggatgagaagatccagaagcatcttcaggactccttggcagatctgaactctttagttctaaaaaagggatgcacaaattatattaacctgggctccttcctcatcaaaccagtacagagagtaatgcgttacccgctgttgctaatggagttgctgaattccaccccagaatcccacccagataaagtgcctttaaccaatgcagtccttgcggtcaaggaaatcaacgttaacattaatgaatataaacggcgaaaggacctggtcctcaagtaccgtaagggtgatgaagatagccttatggagaaaatttccaaactgaacatccactccatcatcaagaaatccaaccgagttagcagtcacctgaagcatctcactggctttgctcctcagataaaagatgaagtatttgaagaaacagaaaaaaacttccgaatgcaagaaagattgattaagtcttttatccgagacctgtctctctacctccagcacatccgggagtccgcatgtgtgaaagtggtggctgctgtgagcatgtgggatgtgtgcatggagagaggacaccgggacctggagcagtttgagagggtgcatcgctacatcagtgaccagctcttcacaaactttaaggagaggacagagcggcttgtcatctcccccttaaatcagttactgagcatgtttacagggccccataagctggtacagaaacgctttgacaagctcctggacttctataactgtacagaacgggcagaaaagctaaaggacaagaagaccctggaggagctgcagtcggcccggaacaactatgaggccctgaatgcacagctgctggatgagctgcccaagttccaccagtacgcccagggcctcttcaccaactgtgtccacggctatgctgaagcccactgtgactttgtgcaccaggctctggagcaattaaagccactgctttcgttactcaaagtggctggcagagagggaaaccttattgccatcttccacgaagagcacagcagagttctgcagcaactccaggtttttaccttcttcccggagtctcttccagctaccaagaagccatttgagaggaaaaccattgaccgccagtctgctcgaaagccactcctgggcctgccaagttacatgctacagtcagaagaactccgggcctccctcctggccaggtatccccctgaaaaactcttccaggcagaacggaacttcaatgctgctcaagacttggatgtctcacttttggaaggtgacctggtgggtgtgattaagaaaaaagaccccatgggcagccagaaccgctggctgattgacaatggagtcaccaaaggcttcgtgtacagctctttcctaaagccctacaatcctcgccgcagccactccgatgcctccgtgggtagccactcctccacagagtctgagcacggcagctcctcccccaggttcccacgccagaacagcggcagcaccctgaccttcaaccccagcagcatggctgtatcctttacctcggggtcttgccagaagcagcctcaagatgcatctcctccgccaaaagaatgtgaccaaggaactctcagtgcatccctaaatccgagtaattcagagagtagtccttccagatgcccttcagacccagactccacctcccagccaaggtcaggggactctgcagatgtagctagagatgtaaagcaacccactgccacgccgaggagctaccggaacttcaggcatccagaaatagttggctactccgtaccaggacgaaatgggcaaagtcaagacctcgtcaaaggatgtgcaagaacagcccaggctccggaagacagaagtacagagccagatggcagtgaggcagaaggcaaccaggtctattttgctgtctacaccttcaaggcacgaaacccaaatgagctgagcgtgtcagccaatcagaaactcaagatcctcgagtttaaagatgttacaggaaatacagagtggtggttagctgaggttaacgggaagaagggctacgttccctccaattatatccgcaaaaccgagtacacctgagcccacgttgcctgccacccagccttgctgcctttgctttcagtccgccgagggttctggcggcccaccgagagggcgcctgctcctgagacacaggccctgtctgcgttgcttaaccatggcatggtggagcacaccacagatcttgttctcctcgattgggttgtaaaccttgatgctcactagaatctctagaatttgaaatggaccctggggctttgcaaatgacttagtgactatgagaagagagacaagtcttagagctggcttttggaaaggagaaacttgcagtcagaagcccagtgtcctatgtatgcaggaagctgtgctctagcaatagacagtgttggtaatggttgtgctgtacggcgtttggggtggccccatgttccatgctcagctgaccggatgccaactcagatgaaaagaattcatggctctgggcaccccgtgaggcagtgcttgcacatggctgggagtttgtcgggattgaaccaaacctagtgcttcaaagctcctgggacacctccagtgtccagcacacattctcatacatactgcccctaatttctaaagtccctaaagcactacattctgtaaccttgtttcttttactccattcccagattagttatgcaaaattcaactgcgttctacttttagaagtgtttagggtctttattttctgttgacccttcatctgaaagattctcttcccttgttaggtacaatcactgcccccccgcttttttttttgagatggggtcttgctatgttgcccaggctggtcttaaacgcctgggctcaagcaaccctcccgcctccctgctgagattacaggtgtaagccaccataccgcaacctcaatgacacctttctgatggtctttacacagtctgtgatgtctggtggcccccctgccctggactcaataattgatagattttcctagagtaacagtatgagagctccagccattccattaaaagtattagttctgctttgagctgaaaccagttgagcctaatggaagactggatgtctttcttcttcatccaagcaccctaatgactgtttagttacatccatagatgcagacaacataacacctgtgacttacttgaattgggataagccattccagaagtagcttatcctagacttggaaataagatttttttcaccactaacttccatgcttcagagatgacattcaaagccagattcccaagtgcctgatcatacctcccagtctcaggaagatatttgcttaccccttagaccaagaatcttaagatcttccccagctatgaagcctatcttggaatgggaaaccatgaaatttgtcttttaaaagaaagggaagaaatagccttacagcccctgttcctccaagtgcacatttagccttaaaatcctgggagtcgggagacaccgtggagtcctaacatccacagtgtctgctggtcgtggtcagaaggcagtaatgcaagagtccttttgtgaagagtgtttctatgtagagatgtttatatttaagtagttcttttataaataaaagcatttctaatggc

SEQ ID NO: 2309 - DNA, 3132 bp, Homo sapiens
  source 1..3132: mol_type = genomic DNA
gtggtttggggaaagtgtaggggcaaccaaagatcatcggcttgactaggccctttgccctgaacctcatgaagaaatgataggaggcagacatatgtgcctaaaaagagcgttgagctcagagaagagcaactcggagttttgggggtgtgctttgatttgtgtacatcaatggcagaatcatccagcgaatcagatcacttccgctgtcgtgaccgattgagtccatgggctgccagatcaacgcacaggggaactcgaagtcttcctacagtagaagttaccgagaaggtcaacactataacaagtactttacaggataccagtcggaacctgcgacaagtggaccagatgcttggacgataccgagaatacagtaatggacaggcgggtgcgatagaacatttaaaagaaagcttggaacaatcaatcgaccaactccggagtcaacgtttattgagaaactcaggagggagaagtatttctgttacaagtttgagtgcaagtgaccttgatggtggcactgggtcagagctccatcattttccacctacctcacctctcaaggactatggggatccacagggtattaaacgaatgagatcaagaactggtgtccggtttgttcaagagactgatgatatgactcagcttcatggttttcatcagtctcttcgagacctcagcagtgaacaaattcgccttggagatgatttcaacagggagctttccagaaggagccggtcagatgccgaaacaaaaagggctttggaagaattgactgaaaaacttaatgaagcccagaaacaagaagtggtttcagatcgggtggagcggcggcttcaggaactggagagagagatgcgcacagaaagggagctggtggaaagacgccaggatcaactgggactcatgtccctgcagctacaggaggcactaaagaaacaagaagctaaagcagatgagcatgagggggcaataaaaaataagctaagacaaactgaaactgagaagaatcaacttgaacaggaattggagctatctcgaaggttattgaatcaatcagaaggcagccgagaaacacttttgcatcaggtagaagaactgcgtacacaacttacgaaagcagaaggtgatcgaaagggtttacagcatcaagtatctcagatttccaagcaacagtcaaactatcaggatgaacaaggggaggactggagatttaggagaggggttgagcgggaaaaacaggacctggagaagcaaatgtcagatttgagagtgcagctgaacttcagcgcaatggcatctgagttagaggaagtgaaacggtgcatggagagaaaagacaaggagaaagcacatttggcatcacaagtagagaatttaacacgtgaactggagaatggggaaaaacagcaactgcagatgttggatcgacttaaggagatccagaatcactttgacacatgtgaggccgagcgtaagcatgctgaccttcagatctcagagctgactcgccatgcggaggatgcaaccaagcaggctgagcggtacctcagtgagctccagcagtcagaggctctgaaagaggaggcggagaagaggagggaagacctgaaactgaaagctcaagaatccattaggcagtggaagcttaagcataagaagttagaacgagcgttggagaaacaatctgaaactgttgatgaactgacaggcaagaataatcagattttaaaagaaaaggatgaattgaaaacccagctgtatgcagcattacaacaaatagagaatcttcgaaaggaattgaatgatgtcctaacaaagcgtgcccttcaggaggaggagcttcactccaaggaggagaaattacgtgatattaagtctcatcaagctgaccttgaattggaagttaagaattccctggataccatccatagactggagagcgaattgaaaaagcagagtaagatccaaagccagatgaaagttgagaaagctcacttggaggaagaaattgcagagctcaagaagagccaggcccaggacaaagctaaacttcttgagatgcaagagtccatcaaggacctgagtgccatccgagcagatcttgctaataaattggctgaggaagagagagccaagaaagcagtgcttaaggacctttctgacctcactgcacaggcaaaatccagggatgaagaaacagctacaatcatcacacagttaaagctggaacgagatgtgcaccagagggagctgaaagatctcacatcatcattgcagagtgtgaaaacaaaacacgaacagaatatccaggagcttatgaagcactttaagaaagaaaagagtgaggctgagaatcatatcaggactctgaaggctgaaagtttagaagagaagaatatggctaaaattcatcgtggtcagctggagaagttgaaatcacagtgtgacagactgacagaggaattaacccagaatgaaaatgagaacaaaaaactgaagctaaaatatcaatgtttgaaggatcaactagaagaaagggaaaaacatataagcattgaagaggagcacttaaggaggatggaagaggccagattgcagctcaaggatcaacttctttgcttggagactgaacaggaatccattcttggtgtgataggaaaggaaattgatgcagcttgtaaaacattctccaaggactcagtggagaaattaaaagttttttcatctggtcctgatatacattatgacccacatcgctggttagcagaaagcaagactaaacttcagtggctctgtgaggaactgaaagagagagaaaacagagagaaaaatctgcgacaccagctgatgctctgcagacaacaactcaggaatttgactgaaaacaaggaatctgagttgcagtgtctctttcaacagatagaaaggcaggagcagcttctggatgaaatacatcgtgagaagagagatctactggaagagacccaaagaaaagatgaagaaatgggatctctgcaggaccgtgtaattgcattagaaacgagtacccaagtggccttggaccatctggagtctgtgcctgagaaactgagcctactagaagatttcaaagacttcagaaga

SEQ ID NO: 2310 - DNA, 10382 bp, Homo sapiens
  source 1..10382: mol_type = genomic DNA
attgtgggcgactcggctaatggcgtcggcgagtcttaggggcctggggagctggcgctgaagcttcttgccaggttggctggtgacacccggtgtggctgggccccgcggcagcggagggacctgcccgccttgtgggtttctcggccagagtcggcggagcctagcgggacggtgcgactgcggggggcgcctccgagaaaagccagaggtgttgcggggaagctgctgggggacgctcgagcaggctccgggttcgcagcccagggcccaagaagcgggctgctgaaggaccagagacaccgggagggagctgcctgtggccctaaggagctgaccgtgccagagcttgtttgtacctctcggaaattggctgggaccttggaggatcatgtccggcaccagcagccccgaggcggtgaagaagctgctggagaatatgcagagcgacttgcgcgccttgtcactggagtgcaagaagaaattcccacctgtcaaagaggctgctgaatcaggaataataaaagttaaaacaattgctgcacgaaacactgaaattttggcagcactgaaagagaacagctcagaggttgtacagccttttttaatgggttgtggaaccaaggaaccgaagatcactcagctatgtttggctgctattcagagactcatgtcacatgaagtcgtgtctgagactgcagctggaaatataattaacatgctttggcagctaatggagaatagtcttgaagaacttaagctacttcaaacagttcttgttcttttaacaaccaatacagtagttcatgatgaggcactttctaaggcaatcgttctttgttttcgactacacttcacaaaagataatattacaaataatacagctgctgctacagtgcgacaagttgttactgttgtttttgagaggatggttgctgaagatgaacgacacagagatattatagaacaaccagtactggtacaaggaaatagtaacagaagatctgtcagtaccctcaaaccttgtgctaaagatgcatatatgcttttccaggatctttgtcagttggttaatgctgatgctccttattggctagtgggcatgacagaaatgactcggacgtttggcctcgaattacttgagtcagtcctcaatgattttccgcaggtctttttacaacaccaagaatttagtttcctcctcaaagaaagggtatgtcctcttgtgataaagctcttttctccaaatataaagttcagacaaggttccagcacctcatcttctccagcaccagttgaaaaaccatattttcctatctgcatgcgtttgctgagagtagtatctgttctgattaagcagttttacagtcttttggtaactgaatgtgagatatttctgtcacttctggtgaaatttctggatgcagataaaccacagtggctacgagctgttgcggtggaatcaatacacagattctgtgtgcagcctcaactattaaggtcattttgtcagtcctatgatatgaaacagcattctaccaaggtttttcgtgatattgtaaatgcactgggatcttttatacagtccttgtttcttgtcccccctactggaaatcctgcaacaagcaaccaagctggaaacaataatttaggtggctcagtctcagcaccagctaactcaggaatggtggggattggtggaggtgttactttgctaccagcatttgaatataggggaacctggatacctattctgacaatcacagttcaaggcagtgctaaagccacctacttagaaatgttggacaaagttgagcctccaactatacctgaaggttacgccatgtctgtggcattccattgtttgctagaccttgttcgtggaatcacaagtatgattgaaggagagctaggagagcttgaaacagaatgtcaaaccaccactgaagaaggttcttcaccaacacagtcgacagaacagcaggatttacagtcaacatcagaccaaatggataaggaaattgttagtagggctgtttgggaagaaatggtgaatgcctgctggtgtggtcttcttgctgcactctcactccttcttgatgccagcacagatgaagctgccactgagaatattttaaaagctgaactgactatggctgctctttgtggaagactgggccttgtaacttcaagagatgcctttataactgcaatatgcaaaggttccctgcctccccattatgctcttactgtattgaataccaccactgcagctacactttccaacaaatcatattccgttcagggccaaagtgttatgatgataagtccatcaagtgaatctcaccaacaagttgtggcagtgggtcaacctttagcagtccagcctcaagggacagtaatgctgacttccaaaaatatccagtgtatgaggactttacttaacttggcgcattgccatggggctgttcttggaacatcatggcaacttgtcttggcaactcttcagcatcttgtgtggattctgggattaaagcctagtagtggcggtgccttgaaacctgggagagctgtagaaggacccagtacagttctaacaacagcagtgatgacagatttaccagtgatttccaatatactttcaagattgtttgaaagctcacagtatcttgatgatgtatcactgcatcatttaataaatgcactttgctccttgtctctagaagcaatggatatggcctatggaaataataaggaaccatctctttttgctgttgccaaattgttagaaactggtttagttaatatgcaccgaatagaaattctgtggagacctctgactggccatctacttgagaaggtctgccagcatccaaactctcgaatgagagaatggggagcagaagctttaacttctcttattaaagcaggattaacatttaaccatgatcctccactctcacaaaaccagaggctgcagttgcttttattgaacccgttaaaggagatgtccaatattaatcatccagatattcgactcaagcagttagaatgcgtgttgcagattctgcagagtcagggagacagtcttgggcctggatggccattagtgcttggagtcatgggagcaatcagaaatgatcaaggagaatccttgatacgaactgcattccagtgtcttcagttggttgtgacagattttctaccaacaatgccttgtacttgcctgcaaatagttgtagatgttgcaggtagctttggcctccataaccaagaactcaatattagtttaacttcaataggtttattgtggaatatttcagattattttttccaaagaggggaaactattgaaaaagaactaaataaggaagaggcagcacagcaaaagcaggcagaagagaaaggagttgttttaaatcggccattccaccctgcaccgccatttgattgcttgtggttatgtctttatgcaaaattgggtgaactatgtgtggatccccgtcctgctgtcaggaagagtgcagggcaaactctgttttctacaattggtgcgcatggaactttattacagcattcaacctggcacactgttatctggaaggtactctttcatctactggacagagttcgagagtcctctaccactgcagacaaagaaaagattgagtctggaggtggcaatattctcattcatcattcaagggacaccgccgagaagcaatgggctgagacgtgggtattaacattggctggagtagcaaggatcttcaacactagaagatatttgctgcagcctttaggagatttttcaagagcttgggatgttcttcttgaccatatacagtcagcagcactcagcaaaaacaatgaagtatctctggctgctctgaaaagcttccaggaaattttacagattgtgtcccctgtcagagactcagataagcctgagacaccacctgtagttaatgtacctgtgcctgttcttatagggcccatatcaggcatgagcaggccatttgtaagaacagattccattggagaaaaactaggaagatatagtagctctgagccacccattgttactgatgagcttgaagatttgaatctatggtgggctgcgtggaatacctggtatagaattggatctgaaagtactaagcctcctattacttttgataaactaacttttattcctagccagccttttcttacagctttaattcagatatttccagctctctaccaacacataaaaactggtttcaatatggatgacttgcaaaagttgggagtcatattgcacagtgctatttcagtcccaataagttcagatgcatccccttttattcttccatcttataccgaagcagttttgacaagtttacaggaagctgtacttacagctttagatgttctccaaaaggccatttgtgtaggaccagaaaacatgcagataatgtatccagctatatttgaccagttgttggcatttgtagaattttcctgtaaacctccacagtatggacagctggaaacaaagcacattgcaaatgcaaaatataatcagatccaactatttgcaccggcggaatgggtagccttgaattatgtgccgtttgctgaaaggtctttagaagtagttgtggatttataccaaaaaacagcgtgtcacaaagcagtggtgaatgagaaagtgctccagaatattattaagactcttagggttcctctcagtttgaagtattcctgcccttctgaaagcacatggaaactagcagtatcctctctcctcagagttctttctattgggctacctgttgcccggcagcatgcttcttctggaaaatttgacagtatgtggccagaactagccaatacttttgaagattttctctttactaaaagcatacctccagataatctctctattcaagagtttcaaagaaatgaaaatattgatgtcgaggtagttcaacttatcagcaatgagatactaccttatgccaattttattcctaaggaatttgttggtcaaataatgacaatgcttaacaagggctcaatacattctcagtcatcttcatttacagaagcagagattgatattcgtttgagagaggaattttctaaaatgtgttttgaaacattactccagttttccttcagtaataaagtcacaacacctcaagaaggctacatctcacgaatggcactctcagtgcttttaaagaggtcccaagatgtactacatcgctatatagaggatgaaagattaagtggtaaatgccctcttccaaggcaacaagtaacagaaattatatttgttttaaaagcagtcagtactcttattgattcacttaagaaaactcagcctgagaatgttgatggaaatacctgggcacaagtaattgccttatacccaactttagtagaatgcatcacctgttcttcttcagaagtctgttctgcacttaaagaggcactagttccttttaaggatttcatgcagccaccagcatccagagttcaaaatggagaatcttgaccggctacaatatatttgaaagcaggaagatagtctaaaaaatgtttgctcctaattgagtcttctgtgagaaggacatttcttactgcagataattcttggcagctgttgttggcctcctttaaattctacttacctgagttcagtaattcatattacaggcttgcacatcaacaaaggctcctgaatgaacagcagtgtaaggctttaataaattaaactgatgggagggataattaacactacagtatacatgctaccatatctccagttggtgatttaaagtgagcttatgtacagtttgtggtgtatgtgttaatgatgtactttttaaaaagaaagaagagatatttcaattcagtcagatttattagtctggtgtttttgcaccctttttcaagtacaaaatcgtactagaattttatgcaagatggtactgtaacattccatattatctataaccagcctttgttaacaaagggaactgatatacttgtgtgtataataaatggtacagttctgtataaaatagtgcatttatttaaattttaaaagtattgataatgttaaatgcttaaagctctatttattattaatacaaaattgtttgcttacatttttacttataatttgccttcatatgtggcggataagctcaccatatgatcatgcagttagcttcatgcttattttaaatgtattattagtgaccattaaacatctgaccagtaaggtcatgtgaacacagcagcaaatagtttatgatttgctgattttggagctttgaaatataggttcttaatacattgatacatattgtagcactatgacttcatcatacctcatttctttaaacagctctccaagctttcactgaagtctgtctgttttttatattggctgtctggattttaaagacttttcatattttatatttctactgattttgtttcccctaacaacatttgtcactgtctttgaattatgacccaggcaagatgatttcagattttctaaaatcttgcctgtgaggttttgttcatatcagtgcttcattttgtaatgtcttctcaagaaaaatacctatgttaactcacaagtataaaatatgtgtgtattataaaacaatgaaaagtgtatttttggagatagtcaagcatttagaagtgcagtgaacttgctgtcacggagtaaaatgctaattatgtttcactttcctagcctagtgaaaaagaaaagtgctcttgagtacaataccttaattatttcttaaaatactgactttgacctagctcactgtattttttatttaatggattatggattacagtatttttcttctgagttaaattttcataatttatgtgaagacacaaagatgtttaaaacaatgattattcataagaaatcatgatggtctcagtattattttagtgtattggaaggtctttgatcttaatagaatttataaatttcagcttctccagaataatcataaaactgcaaaaagatattataattgagtcatgattgagatacagttttgaggctattataattgtataattatttaatttgcattatctgtaaaatgtagtaaggtctttgaggggatattttttatttacatgaattactgaatttctattttattatttcacctaaaattaaggtaaaatatggcatttcataagttctgctttcagcattttccttaaagttgtaaaaaatcaagctatgtacttattttctatatttgggtgtgttaaattgaggattagaaaaatccacataatcactgataaagcattgaaacagaataacccaagggtagtgtaccgattcagtaacatgttaaaaatattgctatgcatttattcaaaggaaaatggtctgttcttgagaaataaaagatcagttgcaattaggataattaaatagttaaatatgagtcaagtgtatgcaatatacatttatatgaaccaaagcttgctttatcaggaccatgccctacagttcaaaacataaacatagtgaatgtgttaatatcatataataaggtaataaatgccagtcttagtgtgaagcaagtgggtggcccccttggtagtataattggacaggattttcctccagaatatttcctgtcaccctccaagagtcactacagtaattgattgctggcatggaacacattgcccttgtcttgttagtatgaattgggttctccagtgactagaagaactggggtgtgtgaaagtattcgatgccaggagattcaaaaaggaagctctcaaagataagatcattttatggcacaattgagtctataaccagccctttaagcagtagtaaaaatgtcctttgtcatacttactagaaatactatgagttttttttttttttttcatttgagacggagtctcgctctgtcacccaggctggaatgcagtggcacgatcttggctcactgcaacctctgcttcccgggttcaagcagtttcctgcttcagacttccaagtagctgggattacagacatgccaccatgccaggctaatttttttaatatttttagtagagatggggtttcaccattttggccattctagtcttgaactcctgacctcaggtgatctgcccgccttggcctcccaaagtgctgacattacaggcctgagccactgcgcccagccaataccatgagttttaagcctcacatcgtcacttgctgtcactgccagtgcctgttttattcatattgctggacaacagacatatgccaccaattgtatgattaataaagtctttttctggccattttgtccattataaaggaaataaactaattgttaacttgcatagattacttcttagtttcctatgctaccaccactgccaagggagaaaaaaatacatcattttgtaatgtctttagtatttctttataactagtgttaaggttttgttaattttattgtatacatttgtaacatttattaggagccttttaggttccaaaacaaacaaaaggcataaaaaagtctagcttagaaccacttttcacttgctttcatttttaattttattcacttaacagctaacatctttcttgtttcttgttttttccattatatggttatcgattcaactcttgctatattccttaaatttgtatgtatcatcagaagaaagagatgaacaatttagtgtagatattttattctggagaataatattcaattaaattatttctacagcaggccagtaacaactagattatttgtcctttctcagtataattttaaagagcattttgttttattgtcacaatttggtaccactagtcccaggtaaccattgggccaaaggatcagttgagaaacagttaaggatgaattagcataagttatggaacagtgttagaaaacaactcaaaagtatattctttattaatgaggtggtcattattacatttgtgtcaatgaagggcagtgtagttattttaaaatgactaatattttctccccaaatacagaataattcagatgggcaaccaagttttcaagagactgctgtaggtgaagtctgtctagccaaggcagaacacttacaggagtccctaactgtgccacccttggaatgggttagtgtacaggctcagaatattgtggattacagtttttcagagaaaactaccacagatgtagacaaaaatgatctctgaaagcattgccagcagccaggtatgttccttagatttccacttaggtttggcattttggcagataagctaatcttgtataaagcatcacattttactatgcttagtgttcctgggttgtatttatctacattattagagggaatttttattttaaaaaaattgtcattcatgagaagaatgggagttcatgccacatagtattttaccaatttatataaagtgggaaaagtctttaatacttcatgatcacttgaattaaagtttttgtatctctggaaagtagaatagtgctttcatttgaatgaaaagtgtttatagattcagaaagagagatgatatctttgtatcttgatttatatacagaccatttcagaggaagttaaatgtcttacaaatccaatactttctaatgctctaacagtgttggctatttaaaagaacatgtggcaagttctatatgaatattcttggtcatctcgactaattctgaggcaatgatggacagagatgctacttcttatttaactctaggcatgttgacttttcaaagcggtttccttatttctaaacagagatgatgatcaatgagttactaattctttagaggaaaaaatgcataatttgagtgtggagttgattttaatgacagggtaattcaagttgtttgataaatttattactatattgtaagagagatctttgaccatttttcttcctttttcttggacatcactttcttccctccccttctctcttttatgtttttatccttgttaaattttatgtttacgttaccatctttcttatactttcccctgatttttctcttttaattcctctttcattctctgcctcttctctttcagctctttctctaattgtgcctattccttgttcataagaagtggagctgttagtggtagaaccactgctcatggttctaccactacaaagtggaaagtagaaatactttgcactttggccactgttgcgtttttgccaaggtaaagttcccctgccattttgaaatagctgaacaagttaaagtaatatgttccaaaaactggaagtgccataaaaaactaaaaataaaaaaaaattgtgacta

SEQ ID NO: 2311 - DNA, 3650 bp, Homo sapiens
  source 1..3650: mol_type = genomic DNA
ggcggagcgagtggaggctgcagcccagctcgtctcggcgcccgcgtcgccgtcgcgaagccccccgccccgcttccgccgcgtcggaatgagctcccggaaagtgctggccattcaggcccgaaagcggaggccgaaaagagagaaacatccgaaaaagccggagcctcaacagaaagctcctttagttcctcctcctccaccgccaccaccaccaccaccgccacctttgccagaccccacacccccggagccagaggaggagatcctgggatcagatgatgaggagcaagaggaccctgcggactactgcaaaggtggatatcatccagtgaaaattggagacctcttcaatggccggtatcatgttattagaaagcttggatgggggcacttctctactgtctggctgtgctgggatatgcaggggaaaagatttgttgcaatgaaagttgtaaaaagtgcccagcattatacggagacagccttggatgaaataaaattgctcaaatgtgttcgagaaagtgatcccagtgacccaaacaaagacatggtggtccagctcattgacgacttcaagatttcaggcatgaatgggatacatgtctgcatggtcttcgaagtacttggccaccatctcctcaagtggatcatcaaatccaactatcaaggcctcccagtacgttgtgtgaagagtatcattcgacaggtccttcaagggttagattacttacacagtaagtgcaagatcattcatactgacataaagccggaaaatatcttgatgtgtgtggatgatgcatatgtgagaagaatggcagctgaggccactgagtggcagaaagcaggtgctcctcctccttcagggtctgcagtgagtacggctccacagcagaaacctataggaaaaatatctaaaaacaaaaagaaaaaactgaaaaagaaacagaagaggcaggctgagttattggagaagcgcctgcaggagatagaagaattggagcgagaagctgaaaggaaaataatagaagaaaacatcacctcagctgcaccttccaatgaccaggatggcgaatactgcccagaggtgaaactaaaaacaacaggattagaggaggcggctgaggcagagactgcaaaggacaatggtgaagctgaggaccaggaagagaaagaagatgctgagaaagaaaacattgaaaaagatgaagatgatgtagatcaggaacttgcgaacatagaccctacgtggatagaatcacctaaaaccaatggccatattgagaatggcccattctcactggagcagcaactggacgatgaagatgatgatgaagaagactgcccaaatcctgaggaatataatcttgatgagccaaatgcagaaagtgattacacatatagcagctcctatgaacaattcaatggtgaattgccaaatggacgacataaaattcccgagtcacagttcccagagttttccacctcgttgttctctggatccttagaacctgtggcctgcggctctgtgctttctgagggatcaccacttactgagcaagaggagagcagtccatcccatgacagaagcagaacggtttcagcctccagtactggggatttgccaaaagcaaaaacccgggcagctgacttgttggtgaatcccctggatccgcggaatgcagataaaattagagtaaaaattgctgacctgggaaatgcttgttgggtgcataaacacttcacggaagacatccagacgcgtcagtaccgctccatagaggttttaataggagcggggtacagcacccctgcggacatctggagcacggcgtgtatggcatttgagctggcaacgggagattatttgtttgaaccacattctggggaagactattccagagacgaagaccacatagcccacatcatagagctgctaggcagtattccaaggcactttgctctatctggaaaatattctcgggaattcttcaatcgcagaggagaactgcgacacatcaccaagctgaagccctggagcctctttgatgtacttgtggaaaagtatggctggccccatgaagatgctgcacagtttacagatttcctgatcccgatgttagaaatggttccagaaaaacgagcctcagctggcgaatgccttcggcatccttggttgaattcttagcaaattctaccaatattgcattctgagctagcaaatgttcccagtacattggacctaaacggtgactctcattctttaacaggattacaagtgagctggcttcatcctcagacctttattttgctttgaggtactgttgtttgacattttgctttttgtgcactgtgatcctggggaagggtagtcttttgtcttcagctaagtagtttactgaccattttcttctggaaacaataacatgtctctaagcattgtttcttgtgttgtgtgacattcaaatgtcatttttttgaatgaaaaatactttcccctttgtgttttggcaggttttgtaactatttatgaagaaatattttagctgagtactatataatttacaatcttaagaaattatcaagttggaaccaagaaatagcaaggaaatgtacaattttatcttctggcaaagggacatcattcctgtattatagtgtatgtaaatgcaccctgtaaatgttactttccattaaatatgggagggggactcaaatttcagaaaagctaccaagtcttgagtgctttgtagcctatgttgcatgtagcggactttaactgctccaaggagttgtgcaaacttttcattccataacagtcttttcacattggattttaaacaaagtggctctgggttataagatgtcattctctatatggcactttaaaggaagaaaagatatgtttctcattctaaaatatgcattataatttagcagtcccatttgtgattttgcatatttttaaaagtacttttaaagaagagcaatttccctttaaaaatgtgatggctcagtaccatgtcatgttgcctcctctgggcgctgtaagttaagctctacatagattaaattggagaaacgtgttaattgtgtggaatgaaaaaatacatatatttttggaaaagcatgatcatgcttgtctagaacacaaggtatggtatatacaatttgcagtgcagtgggcagaatacttctcacagctcaaagataacagtgatcacattcattccataggtagctttacgtgtggctacaacaaattttactagctttttcattgtctttccatgaaacgaagttgagaaaatgattttccctttgcaggttgcacacagttttgtttatgcatttccttaaaattaattgtagactccaggatacaaaccatagtaggcaatacaattttagaatgtaatatatagaggtatatttagcctcttttagaagtcagtggattgaatgtctttttattttaaattttacattcattaaggtgcctcgtttttgactttgtccattaacatttatccatatgcctttgcaataactagattgtgaaaagctaacaagtgttgtaacaataatccattgtttgaggtgcttgcagttgtcttaaaaattaaagtgttttggtttttttttttcca

SEQ ID NO: 2312 - DNA, 1710 bp, Homo sapiens
  source 1..1710: mol_type = genomic DNA
cgcgccgcttccggtctgcagccttgtagtggggctggagcagagcctgccgcgaacccccggagcccacgatccctcgtgccatccctcgaatccaccagcacgagcgtcccacccgcgcctgggaccatggccactgactcatgggccctggcggtggacgagcaggaagctgcggctgagtcgaggacagagctgcccagtccttactcaacaagctgatcagaagcaaccttgttgataacacaaaccaagtggaagtcctgcagcgggatccaaactcccctctgtactcggtgaagtcttttgaagagcttcggctgaaaccacagcttctccaaggagtctatgccatgggtttcaatcgtccatccaagatacaagagaacgcattgccactgatgcttgctgagcccccacagaacttaattgcccaatctcagtctggtactggtaaaacagctgccttcgtgctggccatgcttagccaagtagaacctgcaaacaaatacccccagtgtctatgtctctccccaacgtatgagctcgccctccaaacaggaaaagtgattgaacaaatgggcaaattttaccctgaactgaagctagcttatgctgttcgaggcaataaattggaaagaggccagaagatcagtgagcagattgtcattggcacccctgggactgtgctggactggtgctccaagctcaagttcattgatcccaagaaaatcaaggtgtttgttctggatgaggctgatgtcatgatagccactcagggccaccaagatcagagcatccgcatccagaggatgctgcccaggaactgccagatgctgcttttctccgccacctttgaagactctgtgtggaagtttgcccagaaagtggtcccagacccaaacgttatcaaactgaagcgtgaggaagagaccctggacaccatcaagcagtactatgtcctgtgcagcagcagagacgagaagttccaggccttgtgtaacctctacggggccatcaccattgctcaagccatgatcttctgccatactcgcaaaacagctagttggctggcagcagagctctcaaaagaaggccaccaggtggctctgctgagtggggagatgatggtggaacagagggctgcagtgattgagcgcttccgagagggcaaagagaaggttttggtgaccaccaacgtgtgtgcccgcggcattgatgttgaacaagtgtctgtcgtcatcaactttgatcttcccgtggacaaggacgggaatcctgacaatgagacctacctgcaccggatcgggcgcacgggccgctttggcaagaggggcctggcagtgaacatggtggacagcaagcacagcatgaacatcctgaacagaatccaggagcattttaataagaagatagaaagattggacacagatgatttggacgagattgagaaaatagccaactgagaagctccaccagccactgatgccagccctggcactgcccctgcacaggagacaagtgcgttcagggcacaggccccgacatcaccccaaggacaacggcacaagtagagagaaactacctacctcacttcaaattatgtttggacttgacaaaaatgtatgcaaatgatgggggatggtagaaaaaaattatttacacaaccttggaagattaggcatgaatacacagagatttaccttttgg

SEQ ID NO: 2313 - DNA, 5119 bp, Homo sapiens
  source 1..5119: mol_type = genomic DNA
gaactcaaggcctgcttgatacgtccgccattttgggcgcttcgctgatggtgtcggtgagcgcgtttcccgcctgagcgcaactagcggcgggtcgtgggcacctccaggagagcttgtttcatatccatatcccactgtattcctgctaatctgctaatgcagtaaattggaggaaaactgttaccaggataacctgtaatgggcaaggagccacaaagaagaaaacatttcttttaatttttaaacttggtttgaaagaccagcatgttttggaaatttgatcttcactcatcatcccacatagacacacttctagaaagagaagatgtaacactgaaggagttaatggatgaggaagatgttttacaggaatgtaaagctcagaaccgcaaacttatagagtttctgttaaaagcagaatgtctcgaagatttagtctcattcattatagaagaaccacctcaagacatggatgaaaagatcagatacaagtatccaaatatatcttgtgagttgctcacttctgatgtctcccagatgaatgatagactgggagaagatgaatccttgctaatgaaattatatagcttcctcctaaacgattcccctttgaatccactacttgccagtttcttcagcaaggtgctaagtattcttatcagcagaaaaccagaacagattgtggatttcttaaagaagaagcatgattttgtagaccttattataaagcacataggaacttctgctatcatggatttgttgctcaggctcctgacgtgtatcgaacctccacagcccaggcaagatgtgctgaattggttaaatgaggagaaaattatccagaggcttgtggaaatagttcatccatcgcaagaagaagatcgacattcaaatgcatcacaatcactttgtgaaattgttcgcctgagcagagaccagatgttacaaattcagaacagtacagagcccgaccccctgcttgccactctagaaaagcaagaaattatagagcagcttctatcaaatattttccacaaggagaaaaatgagtcagccatagtcagtgcaatccagatattgctgactttacttgagacacgacgaccaacatttgaaggccatatagagatctgcccaccaggcatgagccattcagcttgttcagtaaacaagagtgttctagaagccatcagaggaagacttggatcttttcatgaactcctgctggagccacccaagaaaagtgtgatgaagaccacatggggtgtgctggatcctcctgtggggaatacccggttgaatgtcattaggttgatatccagcctgcttcaaaccaataccagcagtataaatggggaccttatggagctgaatagcattggagtcatattgaacatgttcttcaagtatacatggaataactttttgcatacacaagtggaaatttgtattgcactgattcttgcaagtccttttgaaaacacagaaaatgccacaattaccgatcaagactccactggtgataatttgttattaaaacatcttttccaaaaatgtcaattaatagaacgaatacttgaagcctgggaaatgaatgagaagaaacaggctgagggaggaagacggcatggttacatgggacacctaacgaggatagctaactgtatcgtgcacagcactgacaagggccccaacagtgcattagtgcagcagcttatcaaagatcttcccgacgaagtcagggaacgatgggagacgttctgcacaagctccttaggagaaactaacaagaggaacacggtagatctagttacaacctgccatattcattcatccagtgatgatgaaattgactttaaagaaacgggtttctcacaggattcttctttgcagcaagccttttctgattatcagatgcaacaaatgacgtccaattttattgaccagtttggcttcaacgatgagaagtttgcagatcaagatgacattggcaatgtttcttttgatcgagtatcagacatcaactttactctcaatacaaatgaaagtggaaatattgccttgtttgaagcatgttgtaaggaaagaatacaacagtttgatgatggtggctctgatgaggaagatatatgggaggaaaagcacatcgcattcacaccagaatcccaaagacgatccagctcggggagtacagacagtgaggaaagtacagactctgaagaagaagatggagcaaagcaagacttgtttgaacccagcagtgccaacacggaggataaaatggaggtggacctgagtgaaccacccaactggtcagctaactttgatgtcccaatggaaacaacccacggtgctccattggattctgtgggatctgatgtctggagcacagaggagccgatgccaactaaagagacgggctgggcttctttttcagagttcacgtcttccctgagcacaaaagattctttaaggagtaattctccagtggaaatggaaaccagcactgaacccatggaccctctgactcccagtgcggctgccctggcagtgcagccagaagcggcaggcagtgtggccatggaagccagctctgacggagaggaggatgcagaaagtacagacaaggtaactgagacagtgatgaatggcggcatgaaggaaacgctcagcctcactgtagatgccaagacagagactgcggtcttcaaaaggttattgggaggatgcagtgaggaagggaaactgtctacctctcaagatgctgcttgtaaagacgcagaggagtgtcccgagactgcagaggcgaagtgcgcggcgcccaggcctcccagcagcagtcccgagcagaggactggccaaccaagcgcaccaggtgacacttcagtgaatggccctgtatgacgggtgacgtctgctgctgctgactgaggactgcagaccgccaccactcaggggctctggaggggtcagctggagcccaccaagctgtcactgctgcactcactctgcaagggatcaggaccagcaacctttatattctagattctaagacattgtacagagaaattcagaagtgtaaaaatattgcacattgacaaataccaagaatttttgcgtatgtttatattgtattgttctaaataatgggtagcctgtgaaataagatcttgccacccatgtaataatagtagtaatactatagttaaaatggctgtaagaatagttttataaaagtgaatacacagatctattgtatttgaaacataactttgacaattattagtgtgaccaaagtattaggcggttttcatacatttttcaccttgtacaaaattatgaattcatttttcctccaggccgacaaggagttgtagaatgaaaatgccctctaagtgttattttggttgttctaacttacaaaagtgattttgaataagaaatatttggtgttctttttataaccagtttttgattggtaattgttttctgtattgtttaaaacggatcaaaaatgtaagtctattggtagagattaagtaaagtatttattgctacatcatagttgataaattgatgttatcgtaaagccatatgttctgttcaagtcttgtttgcttgaaatgattattcctacaagtgaaacactagactatttggagtgtatatggcttgtgttttgggattttttttttttttttttggcttttgtttttgtttgtttttttgtttcatttggtagttcatctgccttttaacccattcaccaaaatttaccttgttaacaagcatcaccaatgaacatttcagagcaatctgcatatttaacagacctaaaataaatcctattaggcaagtcagttgaaaatgctcgtgctgctaatggaattagagtgcgttcattttacaggctagtattttaaaagtagaaatcaaaatctggcaccgaagcatgctaattgtttactgtaccttgtgaggttttcactcataaatttaaaccagtgtatttttttagaactggtttgtgtatatatatagtgattatggatactaattcaatgtaatttataattttctatgtcaatacaaaaatacatcacagccttctcaaacagctcaagcaatatattgtatattgccatatcgtctggtgaaagggttaaattacttcacctcttgcacttttagatgcaaatcagtttttcatttctgtaatagaaaattattcacgtatttttacatcatttgtttttcctgaccagtatttaaaaccaaaaggatattctgaaaaatggccaacaatttttttagaagtagcatcccaagcagcgtgcctaaacattacattgcatatggaaataaaagaatcaaacgtctaatgccttattatttctgatttcctttttcattttaagtggtgtggagattccagcactcccaggacagtggagtcagcagtaagccctgggacaggtggcaagggtgggtcccttgacctttgcacgcctcctcaggaaccccctttcccgggtgagcccctctctgaagagactgtccttgggcctcctctggaagcagcacccccagaggacagggctcctcctgcttgcctcagggctgcctgacttgaatggcgttggacctcggggattactggtagataatatgctctggtctcgcctggtggtgagttttgccagccatggccagggtttggctccactggtggcacacgtggcctccgtggtatggacctggtggcttctccatcccactgtggcctctgtggtatggacctggtggcttctccatcctacccaaggtaacagtgtcttgcttcatcccactgactgctgggagagagcctctgggacttttctttggggcatcattttgttttgtctttcgtagcagggaaaggatatgacaatggggaggacagttcttttggaggttggaggggccaagccaaggacaggagcaagtgtgccctcattttgtttctacttttaatttctgtgtgttggccatactgaattatgagactaacagatgtctacaatacaatacctgtattcaaaataacaaaaataaagcctgattctttgtttct

SEQ ID NO: 2314 - DNA, 5093 bp, Homo sapiens
  source 1..5093: mol_type = genomic DNA
gcttgatacgtccgccattttgggcgcttcgctgatggtgtcggtgagcgcgtttcccgcctgagcgcaactagcggcgggtcgtgggcacctccaggagagcttgtttcatatccatatcccactgtattcctgctaatctgctaatgcagtaaattggaggaaaactgttaccaggataacctgtaatgggcaaggagccacaaagaagaaaacatttcttttaatttttaaacttggtttgaaagaccagcatgttttggaaatttgatcttcactcatcatcccacatagacacacttctagaaagagaagatgtaacactgaaggagttaatggatgaggaagatgttttacaggaatgtaaagctcagaaccgcaaacttatagagtttctgttaaaagcagaatgtctcgaagatttagtctcattcattatagaagaaccacctcaagacatggatgaaaagatcagatacaagtatccaaatatatcttgtgagttgctcacttctgatgtctcccagatgaatgatagactgggagaagatgaatccttgctaatgaaattatatagcttcctcctaaacgattcccctttgaatccactacttgccagtttcttcagcaaggtgctaagtattcttatcagcagaaaaccagaacagattgtggatttcttaaagaagaagcatgattttgtagaccttattataaagcacataggaacttctgctatcatggatttgttgctcaggctcctgacgtgtatcgaacctccacagcccaggcaagatgtgctgaattggttaaatgaggagaaaattatccagaggcttgtggaaatagttcatccatcgcaagaagaagatcgacattcaaatgcatcacaatcactttgtgaaattgttcgcctgagcagagaccagatgttacaaattcagaacagtacagagcccgaccccctgcttgccactctagaaaagcaagaaattatagagcagcttctatcaaatattttccacaaggagaaaaatgagtcagccatagtcagtgcaatccagatattgctgactttacttgagacacgacgaccaacatttgaaggccatatagagatctgcccaccaggcatgagccattcagcttgttcagtaaacaagagtgttctagaagccatcagaggaagacttggatcttttcatgaactcctgctggagccacccaagaaaagtgtgatgaagaccacatggggtgtgctggatcctcctgtggggaatacccggttgaatgtcattaggttgatatccagcctgcttcaaaccaataccagcagtataaatggggaccttatggagctgaatagcattggagtcatattgaacatgttcttcaagtatacatggaataactttttgcatacacaagtggaaatttgtattgcactgattcttgcaagtccttttgaaaacacagaaaatgccacaattaccgatcaagactccactggtgataatttgttattaaaacatcttttccaaaaatgtcaattaatagaacgaatacttgaagcctgggaaatgaatgagaagaaacaggctgagggaggaagacggcatggttacatgggacacctaacgaggatagctaactgtatcgtgcacagcactgacaagggccccaacagtgcattagtgcagcagcttatcaaagatcttcccgacgaagtcagggaacgatgggagacgttctgcacaagctccttaggagaaactaacaagaggaacacggtagatctagttacaacctgccatattcattcatccagtgatgatgaaattgactttaaagaaacgggtttctcacaggattcttctttgcagcaagccttttctgattatcagatgcaacaaatgacgtccaattttattgaccagtttggcttcaacgatgagaagtttgcagatcaagatgacattggcaatgtttcttttgatcgagtatcagacatcaactttactctcaatacaaatgaaagtggaaatattgccttgtttgaagcatgttgtaaggaaagaatacaacagtttgatgatggtggctctgatgaggaagatatatgggaggaaaagcacatcgcattcacaccagaatcccaaagacgatccagctcggggagtacagacagtgaggaaagtacagactctgaagaagaagatggagcaaagcaagacttgtttgaacccagcagtgccaacacggaggataaaatggaggtggacctgagtgaaccacccaactggtcagctaactttgatgtcccaatggaaacaacccacggtgctccattggattctgtgggatctgatgtctggagcacagaggagccgatgccaactaaagagacgggctgggcttctttttcagagttcacgtcttccctgagcacaaaagattctttaaggagtaattctccagtggaaatggaaaccagcactgaacccatggaccctctgactcccagtgcggctgccctggcagtgcagccagaagcggcaggcagtgtggccatggaagccagctctgacggagaggaggatgcagaaagtacagacaaggtaactgagacagtgatgaatggcggcatgaaggaaacgctcagcctcactgtagatgccaagacagagactgcggtcttcaaaagtgaggaagggaaactgtctacctctcaagatgctgcttgtaaagacgcagaggagtgtcccgagactgcagaggcgaagtgcgcggcgcccaggcctcccagcagcagtcccgagcagaggactggccaaccaagcgcaccaggtgacacttcagtgaatggccctgtatgacgggtgacgtctgctgctgctgactgaggactgcagaccgccaccactcaggggctctggaggggtcagctggagcccaccaagctgtcactgctgcactcactctgcaagggatcaggaccagcaacctttatattctagattctaagacattgtacagagaaattcagaagtgtaaaaatattgcacattgacaaataccaagaatttttgcgtatgtttatattgtattgttctaaataatgggtagcctgtgaaataagatcttgccacccatgtaataatagtagtaatactatagttaaaatggctgtaagaatagttttataaaagtgaatacacagatctattgtatttgaaacataactttgacaattattagtgtgaccaaagtattaggcggttttcatacatttttcaccttgtacaaaattatgaattcatttttcctccaggccgacaaggagttgtagaatgaaaatgccctctaagtgttattttggttgttctaacttacaaaagtgattttgaataagaaatatttggtgttctttttataaccagtttttgattggtaattgttttctgtattgtttaaaacggatcaaaaatgtaagtctattggtagagattaagtaaagtatttattgctacatcatagttgataaattgatgttatcgtaaagccatatgttctgttcaagtcttgtttgcttgaaatgattattcctacaagtgaaacactagactatttggagtgtatatggcttgtgttttgggattttttttttttttttttggcttttgtttttgtttgtttttttgtttcatttggtagttcatctgccttttaacccattcaccaaaatttaccttgttaacaagcatcaccaatgaacatttcagagcaatctgcatatttaacagacctaaaataaatcctattaggcaagtcagttgaaaatgctcgtgctgctaatggaattagagtgcgttcattttacaggctagtattttaaaagtagaaatcaaaatctggcaccgaagcatgctaattgtttactgtaccttgtgaggttttcactcataaatttaaaccagtgtatttttttagaactggtttgtgtatatatatagtgattatggatactaattcaatgtaatttataattttctatgtcaatacaaaaatacatcacagccttctcaaacagctcaagcaatatattgtatattgccatatcgtctggtgaaagggttaaattacttcacctcttgcacttttagatgcaaatcagtttttcatttctgtaatagaaaattattcacgtatttttacatcatttgtttttcctgaccagtatttaaaaccaaaaggatattctgaaaaatggccaacaatttttttagaagtagcatcccaagcagcgtgcctaaacattacattgcatatggaaataaaagaatcaaacgtctaatgccttattatttctgatttcctttttcattttaagtggtgtggagattccagcactcccaggacagtggagtcagcagtaagccctgggacaggtggcaagggtgggtcccttgacctttgcacgcctcctcaggaaccccctttcccgggtgagcccctctctgaagagactgtccttgggcctcctctggaagcagcacccccagaggacagggctcctcctgcttgcctcagggctgcctgacttgaatggcgttggacctcggggattactggtagataatatgctctggtctcgcctggtggtgagttttgccagccatggccagggtttggctccactggtggcacacgtggcctccgtggtatggacctggtggcttctccatcccactgtggcctctgtggtatggacctggtggcttctccatcctacccaaggtaacagtgtcttgcttcatcccactgactgctgggagagagcctctgggacttttctttggggcatcattttgttttgtctttcgtagcagggaaaggatatgacaatggggaggacagttcttttggaggttggaggggccaagccaaggacaggagcaagtgtgccctcattttgtttctacttttaatttctgtgtgttggccatactgaattatgagactaacagatgtctacaatacaatacctgtattcaaaataacaaaaataaagcctgattctttgtttctagaaa

SEQ ID NO: 2315 - DNA, 5069 bp, Homo sapiens
  source 1..5069: mol_type = genomic DNA
gtcggtgagcgcgtttcccgcctgagcgcaactagcggcgggtcgtgggcacctccaggagagcttgtttcatatccatatcccactgtattcctgctaatctgctaatgcagtaaattggaggaaaactgttaccaggataacctgtaatgggcaaggagccacaaagaagaaaacatttcttttaatttttaaacttggtttgaaagaccagcatgttttggaaatttgatcttcactcatcatcccacatagacacacttctagaaagagaagatgtaacactgaaggagttaatggatgaggaagatgttttacaggaatgtaaagctcagaaccgcaaacttatagagtttctgttaaaagcagaatgtctcgaagatttagtctcattcattatagaagaaccacctcaagacatggatgaaaagatcagatacaagtatccaaatatatcttgtgagttgctcacttctgatgtctcccagatgaatgatagactgggagaagatgaatccttgctaatgaaattatatagcttcctcctaaacgattcccctttgaatccactacttgccagtttcttcagcaaggtgctaagtattcttatcagcagaaaaccagaacagattgtggatttcttaaagaagaagcatgattttgtagaccttattataaagcacataggaacttctgctatcatggatttgttgctcaggctcctgacgtgtatcgaacctccacagcccaggcaagatgtgctgaattggttaaatgaggagaaaattatccagaggcttgtggaaatagttcatccatcgcaagaagaagatcgacattcaaatgcatcacaatcactttgtgaaattgttcgcctgagcagagaccagatgttacaaattcagaacagtacagagcccgaccccctgcttgccactctagaaaagcaagaaattatagagcagcttctatcaaatattttccacaaggagaaaaatgagtcagccatagtcagtgcaatccagatattgctgactttacttgagacacgacgaccaacatttgaaggccatatagagatctgcccaccaggcatgagccattcagcttgttcagtaaacaagagtgttctagaagccatcagaggaagacttggatcttttcatgaactcctgctggagccacccaagaaaagtgtgatgaagaccacatggggtgtgctggatcctcctgtggggaatacccggttgaatgtcattaggttgatatccagcctgcttcaaaccaataccagcagtataaatggggaccttatggagctgaatagcattggagtcatattgaacatgttcttcaagtatacatggaataactttttgcatacacaagtggaaatttgtattgcactgattcttgcaagtccttttgaaaacacagaaaatgccacaattaccgatcaagactccactggtgataatttgttattaaaacatcttttccaaaaatgtcaattaatagaacgaatacttgaagcctgggaaatgaatgagaagaaacaggctgagggaggaagacggcatggttacatgggacacctaacgaggatagctaactgtatcgtgcacagcactgacaagggccccaacagtgcattagtgcagcagcttatcaaagatcttcccgacgaagtcagggaacgatgggagacgttctgcacaagctccttaggagaaactaacaagaggaacacggtagatctagttacaacctgccatattcattcatccagtgatgatgaaattgactttaaagaaacgggtttctcacaggattcttctttgcagcaagccttttctgattatcagatgcaacaaatgacgtccaattttattgaccagtttggcttcaacgatgagaagtttgcagatcaagatgacattggcaatgtttcttttgatcgagtatcagacatcaactttactctcaatacaaatgaaagtggaaatattgccttgtttgaagcatgttgtaaggaaagaatacaacagtttgatgatggtggctctgatgaggaagatatatgggaggaaaagcacatcgcattcacaccagaatcccaaagacgatccagctcggggagtacagacagtgaggaaagtacagactctgaagaagaagatggagcaaagcaagacttgtttgaacccagcagtgccaacacggaggataaaatggaggtggacctgagtgaaccacccaactggtcagctaactttgatgtcccaatggaaacaacccacggtgctccattggattctgtgggatctgatgtctggagcacagaggagccgatgccaactaaagagacgggctgggcttctttttcagagttcacgtcttccctgagcacaaaagattctttaaggagtaattctccagtggaaatggaaaccagcactgaacccatggaccctctgactcccagtgcggctgccctggcagtgcagccagaagcggcaggcagtgtggccatggaagccagctctgacggagaggaggatgcagaaagtacagacaaggtaactgagacagtgatgaatggcggcatgaaggaaacgctcagcctcactgtagatgccaagacagagactgcggtcttcaaaagagtgttgaaatcctatcgtgaggaagggaaactgtctacctctcaagatgctgcttgtaaagacgcagaggagtgtcccgagactgcagaggcgaagtgcgcggcgcccaggcctcccagcagcagtcccgagcagaggactggccaaccaagcgcaccaggtgacacttcagtgaatggccctgtatgacgggtgacgtctgctgctgctgactgaggactgcagaccgccaccactcaggggctctggaggggtcagctggagcccaccaagctgtcactgctgcactcactctgcaagggatcaggaccagcaacctttatattctagattctaagacattgtacagagaaattcagaagtgtaaaaatattgcacattgacaaataccaagaatttttgcgtatgtttatattgtattgttctaaataatgggtagcctgtgaaataagatcttgccacccatgtaataatagtagtaatactatagttaaaatggctgtaagaatagttttataaaagtgaatacacagatctattgtatttgaaacataactttgacaattattagtgtgaccaaagtattaggcggttttcatacatttttcaccttgtacaaaattatgaattcatttttcctccaggccgacaaggagttgtagaatgaaaatgccctctaagtgttattttggttgttctaacttacaaaagtgattttgaataagaaatatttggtgttctttttataaccagtttttgattggtaattgttttctgtattgtttaaaacggatcaaaaatgtaagtctattggtagagattaagtaaagtatttattgctacatcatagttgataaattgatgttatcgtaaagccatatgttctgttcaagtcttgtttgcttgaaatgattattcctacaagtgaaacactagactatttggagtgtatatggcttgtgttttgggattttttttttttttttttggcttttgtttttgtttgtttttttgtttcatttggtagttcatctgccttttaacccattcaccaaaatttaccttgttaacaagcatcaccaatgaacatttcagagcaatctgcatatttaacagacctaaaataaatcctattaggcaagtcagttgaaaatgctcgtgctgctaatggaattagagtgcgttcattttacaggctagtattttaaaagtagaaatcaaaatctggcaccgaagcatgctaattgtttactgtaccttgtgaggttttcactcataaatttaaaccagtgtatttttttagaactggtttgtgtatatatatagtgattatggatactaattcaatgtaatttataattttctatgtcaatacaaaaatacatcacagccttctcaaacagctcaagcaatatattgtatattgccatatcgtctggtgaaagggttaaattacttcacctcttgcacttttagatgcaaatcagtttttcatttctgtaatagaaaattattcacgtatttttacatcatttgtttttcctgaccagtatttaaaaccaaaaggatattctgaaaaatggccaacaatttttttagaagtagcatcccaagcagcgtgcctaaacattacattgcatatggaaataaaagaatcaaacgtctaatgccttattatttctgatttcctttttcattttaagtggtgtggagattccagcactcccaggacagtggagtcagcagtaagccctgggacaggtggcaagggtgggtcccttgacctttgcacgcctcctcaggaaccccctttcccgggtgagcccctctctgaagagactgtccttgggcctcctctggaagcagcacccccagaggacagggctcctcctgcttgcctcagggctgcctgacttgaatggcgttggacctcggggattactggtagataatatgctctggtctcgcctggtggtgagttttgccagccatggccagggtttggctccactggtggcacacgtggcctccgtggtatggacctggtggcttctccatcccactgtggcctctgtggtatggacctggtggcttctccatcctacccaaggtaacagtgtcttgcttcatcccactgactgctgggagagagcctctgggacttttctttggggcatcattttgttttgtctttcgtagcagggaaaggatatgacaatggggaggacagttcttttggaggttggaggggccaagccaaggacaggagcaagtgtgccctcattttgtttctacttttaatttctgtgtgttggccatactgaattatgagactaacagatgtctacaatacaatacctgtattcaaaataacaaaaataaagcctgattctttgtttctag

SEQ ID NO: 2316 - DNA, 1395 bp, Homo sapiens
  source 1..1395: mol_type = genomic DNA
acttccttcgtctgggtggttgccccagcgacacgttgggccgaagagcggtgttgggtacccgagagacccggcggtggggaagtcacttcctcccgaagacgctgtttcctagcaaccgccctccgcctctgttattagcccctcctcctcgctcggtccaggaccggctctgcgggcgccgccaggcccagaccaagctactatcagaagttgaattctaataattagctattttataaaggtaacgagaaaaaatacactatgtctgatgaagtttttagcaccactttggcatatacaaagagtccaaaagttaccaaaagaactactttccaggatgagctaataagagcaattacagctcgctcagccagacaaaggagttctgaatactcagatgactttgacagtgatgagattgtttctttaggtgatttttctgacacttcagcagatgaaaattcagttaataaaaaaatgaatgactttcatatatcagatgatgaagaaaagaatccttcaaaactattgtttttgaaaaccaataaatcaaacggtaacataaccaaagatgagccagtgtgtgccatcaaaaatgaagaggaaatggcacctgatgggtgtgaagacattgttgtaaaatctttctctgaatctcaaaataaggatgaggaatttgaaaaagacaaaataaaaatgaaacctaaacccagaattctttcaattaaaagcacatcttcagcagaaaacaacagccttgacacagatgatcactttaaaccatcacctcggccaaggagtatgttgaaaaagaaaagtcacatggaggagaaggatggactagaagataaagaaactgccctcagtgaagaattggagttacattctgcaccttcttcccttccaacgccgaatggcatacaattagaagctgagaaaaaagcattctctgaaaaccttgatcctgaggattcatgcttaacaagtctagcatcatcatcacttaaacaaattcttggagattctttttcaccaggatctgagggaaacgcatctggaaaagatccaaatgaagaaatcactgaaaaccataattccttgaaatcagatgaaaataaagagaattcattttcagcagaccatgtgactactgcagttgagaaatccaaggaaagtcaagtgactgctgatgaccttgaagaagaaaaggcaaaagcggaactgattatggatgatgacagaacagttgatccactactatctaaatctcagagtatcttaatatctaccagtgcaacagcatcttcaaagaaaacaattgaagatagaaatataaagaataaaaagtcaacaaataatagagcatccagtgcatctgccagcaaagctagt

SEQ ID NO: 2317 - DNA, 1644 bp, Homo sapiens
  source 1..1644: mol_type = genomic DNA
agcctacaccgactctggaggaagactggagcctttgcggcggcgctgcccctcccctggtccccgcgagctcggagggcccggctggtgctgcgggggccccgggaggtacggacctgggaggcgaggctcgtccggcgctaggatcggcctccgcctccgggccgctttaggttgaaaactaagcatggggaagagctgcaaggtggtcgtgtgtggccaggcgtctgtgggcaaaacttcaatcctggagcagcttctgtatgggaaccatgtagtgggttcggagatgatcgagacgcaggaggacatctacgtgggctccattgagacagaccggggggtgcgagagcaggtgcgtttctatgacacccgggggctccgagatggggccgaactgccccgacactgcttctcttgcactgatggctacgtcctggtctatagcacagatagcagagagtcttttcagcgtgtggagctgctcaagaaggagattgacaaatccaaggacaagaaggaggtcaccatcgtggtccttggcaacaagtgtgacttacaggagcagcggcgtgtagacccagatgtggctcagcactgggccaagtcagagaaggtgaagctgtgggaggtgtcagtggcggaccggcgctccctcctggagccctttgtctacttggccagcaagatgacgcaaccccagagcaagtctgccttccccctcagccggaagaacaagggcagcggctccttggatggctgaagagctgccgttcctctttcacgatcccagccccatttcagtgtctggggctctggtagatgtgttgagggcaaagtagaggacaagctgtctttcccagtcagccagggagctccccgccaggccacgccccagccactttgctccctctcacctctgggaagtgcaaatactcttggttgacatccccttcctcagccctcccagcctactccccatcccagcttttagaggatctgctccactgtctcctggggcagttgtgggtcactgtcccttccagctgccccagacaggaagcagagtcaccacgcagcagtgtcccttcttgggtctgagttcctattataggtaggggccccaccctctgggcttcccatcagcgacacacacacacttatggcaccagcctggactccagaaaaagggtgtccaggtattgtgtgtatgcatttagttgtgcacacacaaatatgctcctatactggcattaggcgtctcctcatccctcaccctgacctttctcctgtccttttcttggctggaagaagttggcctcctgggagtgtagttttctgttttaaatcccccacccctggctgggctcagtggctcacccctgtaatcccagcactttgggaggccaaggcgggtcgattacttgaggtcaggagttcacgaccagcctggccaacattgtgaaaccccatctctgccaaaaatacaaaagttagccgggcgtagtggcacatgcctgtaatcccagctacccggggaggctgaggcaggagaattgcttgaactcagaaggcggaggctgcagtgagccgagatcgtgccactgcactccagcctggtcaacagagcaagactccatctcg

SEQ ID NO: 2318 - DNA, 1598 bp, Homo sapiens
  source 1..1598: mol_type = genomic DNA
agcctacaccgactctggaggaagactggagcctttgcggcggcgctgcccctcccctggtccccgcgagctcggagggcccggctggtgctgcgggggccccgggagcgtgcttctgttcttcaaggttgaaaactaagcatggggaagagctgcaaggtggtcgtgtgtggccaggcgtctgtgggcaaaacttcaatcctggagcagcttctgtatgggaaccatgtagtgggttcggagatgatcgagacgcaggaggacatctacgtgggctccattgagacagaccggggggtgcgagagcaggtgcgtttctatgacacccgggggctccgagatggggccgaactgccccgacactgcttctcttgcactgatggctacgtcctggtctatagcacagatagcagagagtcttttcagcgtgtggagctgctcaagaaggagattgacaaatccaaggacaagaaggaggtcaccatcgtggtccttggcaacaagtgtgacttacaggagcagcggcgtgtagacccagatgtggctcagcactgggccaagtcagagaaggtgaagctgtgggaggtgtcagtggcggaccggcgctccctcctggagccctttgtctacttggccagcaagatgacgcaaccccagagcaagtctgccttccccctcagccggaagaacaagggcagcggctccttggatggctgaagagctgccgttcctctttcacgatcccagccccatttcagtgtctggggctctggtagatgtgttgagggcaaagtagaggacaagctgtctttcccagtcagccagggagctccccgccaggccacgccccagccactttgctccctctcacctctgggaagtgcaaatactcttggttgacatccccttcctcagccctcccagcctactccccatcccagcttttagaggatctgctccactgtctcctggggcagttgtgggtcactgtcccttccagctgccccagacaggaagcagagtcaccacgcagcagtgtcccttcttgggtctgagttcctattataggtaggggccccaccctctgggcttcccatcagcgacacacacacacttatggcaccagcctggactccagaaaaagggtgtccaggtattgtgtgtatgcatttagttgtgcacacacaaatatgctcctatactggcattaggcgtctcctcatccctcaccctgacctttctcctgtccttttcttggctggaagaagttggcctcctgggagtgtagttttctgttttaaatcccccacccctggctgggctcagtggctcacccctgtaatcccagcactttgggaggccaaggcgggtcgattacttgaggtcaggagttcacgaccagcctggccaacattgtgaaaccccatctctgccaaaaatacaaaagttagccgggcgtagtggcacatgcctgtaatcccagctacccggggaggctgaggcaggagaattgcttgaactcagaaggcggaggctgcagtgagccgagatcgtgccactgcactccagcctggtcaacagagcaagactccatctcg

SEQ ID NO: 2319 - DNA, 2463 bp, Homo sapiens
  source 1..2463: mol_type = genomic DNA
ggcaggcggcgggggcggggcctggaggagcctacaccgactctggaggaagactggagcctttgcggcggcgctgcccctcccctggtccccgcgagctcggagggcccggctggtgctgcgggggccccgggaggttgaaaactaagcatggggaagagctgcaaggtggtcgtgtgtggccaggcgtctgtgggcaaaacttcaatcctggagcagcttctgtatgggaaccatgtagtggctatgatcgagacgcaggaggacatctacgtgggctccattgagacagaccggggggtgcgagagcaggtgcgtttctatgacacccgggggctccgagatggggccgaactgccccgacactgcttctcttgcactgatggctacgtcctggtctatagcacagatagcagagagtcttttcagcgtgtggagctgctcaagaaggagattgacaaatccaaggacaagaaggaggtcaccatcgtggtccttggcaacaagtgtgacttacaggagcagcggcgtgtagacccagatgtggctcagcactgggccaagtcagagaaggtgaagctgtgggaggtgtcagtggcggaccggcgctccctcctggagccctttgtctacttggccagcaagatgacgcaaccccagagcaagtctgccttccccctcagccggaagaacaagggcagcggctccttggatggctgaagagctgccgttcctctttcacgatcccagccccatttcagtgtctggggctctggtagatgtgttgagggcaaagtagaggacaagctgtctttcccagtcagccagggagctccccgccaggccacgccccagccactttgctccctctcacctctgggaagtgcaaatactcttggttgacatccccttcctcagccctcccagcctactccccatcccagcttttagaggatctgctccactgtctcctggggcagttgtgggtcactgtcccttccagctgccccagacaggaagcagagtcaccacgcagcagtgtcccttcttgggtctgagttcctattataggtaggggccccaccctctgggcttcccatcagcgacacacacacacttatggcaccagcctggactccagaaaaagggtgtccaggtattgtgtgtatgcatttagttgtgcacacacaaatatgctcctatactggcattaggcgtctcctcatccctcaccctgacctttctcctgtccttttcttggctggaagaagttggcctcctgggagtgtagttttctgttttaaatcccccacccctggctgggctcagtggctcacccctgtaatcccagcactttgggaggccaaggcgggtcgattacttgaggtcaggagttcacgaccagcctggccaacattgtgaaaccccatctctgccaaaaatacaaaagttagccgggcgtagtggcacatgcctgtaatcccagctacccggggaggctgaggcaggagaattgcttgaactcagaaggcggaggctgcagtgagccgagatcgtgccactgcactccagcctggtcaacagagcaagactccatctcgaagaaaaaaaaaaaaaattccccacccctaccaattgttttacttcctcttcctgctcagggagcagatgggcctcactggttgagatggaatagaataactgggctatgagtcaccagcccactttgtgacccagcaagacctttcccctctctgggcatcagtttctcatctgtaagatgaccagagttgcttagatgatctcctagatcctttccagttctcttgatttcgtaaagccaatggcttctccctctttaaggtgctatgccaaccagccctggaggctgggatctgccgctccctccagccaccagggggcaggagtgcactacctgctgtcagtcaccagagtggccgctcagtgcccagcccgccagcctcgctcttggaggctgctctttatcctgcctgtggttttcagctcagagctggacttctatttataagttacctgtatttatatttatatgcccgctctcatggtgaaggctggacaaggtgctcctctggcccctccttcttacctcagatgcctgaacagaacaaggcaaacccgtagcagcctctcaggagctgacaggtcctctttcggggctcaggagggtgggcacacacccagcggcctgcagagtaagcttattacccacaactgtgcccgctttgtgcttctaaggtgcacacctagcctaggtgagacactgcagccaggcaaccaccgacacacgccccttctcaaagccagaggtgagtggggcaggtgcccggggctgggtgagtggaattaggacacacacaggcttgggcttcaagttcatttattgatgcattggttggacacaataaaaccacaattgttatc

SEQ ID NO: 2320 - DNA, 1863 bp, Homo sapiens
  source 1..1863: mol_type = genomic DNA
agcctacaccgactctggaggaagactggagcctttgcggcggcgctgcccctcccctggtccccgcgagctcggagggcccggctggtgctgcgggggccccgggaggttgaaaactaagcatggggaagagctgcaaggtggtcgtgtgtggccaggcgtctgtgggcaaaacttcaatcctggagcagcttctgtatgggaaccatgtagtgggttcggagatgatcgagacgcaggaggacatctacgtgggctccattgagacagaccggggggtgcgagagcaggtgcgtttctatgacacccgggggctccgagatggggccgaactgccccgacactgcttctcttgcactgatggctacgtcctggtctatagcacagatagcagagagtcttttcagcgtgtggagctgctcaagaaggagattgacaaatccaaggacaagaaggaggtcaccatcgtggtccttggcaacaagtgtgacttacaggagcagcggcgtgtagacccagatgtggctcagcactgggccaagtcagagaaggtgaagctgtgggaggtgtcagtggcggaccggcgctccctcctggagccctttgtctacttggccagcaagatgacgcaaccccagagcaagtctgccttccccctcagccggaagaacaagggcagcggctccttggatggctgaagagctgccgttcctctttcacgatcccagccccatttcagtgtctggggctctggtagatgtgttgagggcaaagtagaggacaagctgtctttcccagtcagccagggagctccccgccaggccacgccccagccactttgctccctctcacctctgggaagtgcaaatactcttggttgacatccccttcctcagccctcccagcctactccccatcccagcttttagaggatctgctccactgtctcctggggcagttgtgggtcactgtcccttccagctgccccagacaggaagcagagtcaccacgcagcagtgtcccttcttgggtctgagttcctattataggtaggggccccaccctctgggcttcccatcagcgacacacacacacttatggcaccagcctggactccagaaaaagggtgtccaggtattgtgtgtatgcatttagttgtgcacacacaaatatgctcctatactggcattaggcgtctcctcatccctcaccctgacctttctcctgtccttttcttggctggaagaagttggcctcctgggagtgtagttttctgttttaaatcccccacccctggctgggctcagtggctcacccctgtaatcccagcactttgggaggccaaggcgggtcgattacttgaggtcaggagttcacgaccagcctggccaacattgtgaaaccccatctctgccaaaaatacaaaagttagccgggcgtagtggcacatgcctgtaatcccagctacccggggaggctgaggcaggagaattgcttgaactcagaaggcggaggctgcagtgagccgagatcgtgccactgcactccagcctggtcaacagagcaagactccatctcgaagaaaaaaaaaaaaaattccccacccctaccaattgttttacttcctcttcctgctcagggagcagatgggcctcactggttgagatggaatagaataactgggctatgagtcaccagcccactttgtgacccagcaagacctttcccctctctgggcatcagtttctcatctgtaagatgaccagagttgcttagatgatctcctagatcctttccagttctcttgatttcgtaaagccaatggcttctccctctttaaggtgctatgccaaccagccctgg

SEQ ID NO: 2321 - DNA, 1302 bp, Homo sapiens
  source 1..1302: mol_type = genomic DNA
tcgaacgggatggcagaggaggtgaggagggaggaagcgtccggagtggggcgggcccggactccgacccccggggcgcttcgagccccccagctggtcaccgaggcaccgccgcttcacccaggccacaccctgatgaaggccacggtcctgatgcggcagcctgggcgggtgcaggagatcgtgggcgccctccgcaagggcggcggagaccggttacaggtgatttctgattttgacatgaccttgagcaggtttgcatataatggaaagcgatgcccttcttcttacaatattctggataatagcaagatcatcagtgaggagtgtcggaaagagctcacagcgctccttcaccactattacccaattgagatcgacccacaccggaccgtcaaggagaagctacctcatatggtggaatggtggaccaaagcacacaatctcctatgtcagcagaagattcagaagtttcagatagcccaggtggttagagagtccaatgcaatgctcagggagggatataagaccttcttcaacacactctaccataacaacattccccttttcatcttttctgcgggcattggtgatatcctggaagaaattatccgacagatgaaagtgttccaccccaacatccacatcgtgtctaactacatggattttaatgaagatggttttctccagggatttaagggccagctcatacacacatacaacaagaacagctctgcgtgtgagaactctggttacttccagcaacttgagggcaaaaccaatgtcatcctgctgggagactctatcggggacctcaccatggccgatggggttcctggtgtgcagaacattctcaaaattggcttcctgaatgacaaggtggaggagcggcgggagcgctacatggactcctatgacatcgtgctggagaaggacgagactctggatgtggtcaacgggctactgcagcacatcctgtgccagggggtccagctggagatgcaaggcccctgaaggcgcaggctccagcccggcctgcaggccgtggtgaggaggggcgcctccccagagtctgctcccccgtgaacacagagcagaggccagggtggccagcagtggctgggtccttccgcgcccctccgtcctcctttccctgagcaccttcatcaccagaggcttgaaggaaccccgccatgtggcagggcacaggcactgttcctggtgaaccttggaccacagcatgtcagtgctctagggattgtctactccagggattttcttcaaaatttttaaacatgggaa

SEQ ID NO: 2322 - DNA, 1058 bp, Homo sapiens
  source 1..1058: mol_type = genomic DNA
gaaacaggggataatacggcggagccgcctgggctgcagtcccacccgggagccggcagggagcggagctgcggagccgcctggtctcccgcgtccatcggtccattcctgcgtcgttctgtccttccgaacgcacacttcaggagcagccgcgagggtggcatggcagcgagcacagacatggctgggctggaggagagcttccgcaagtttgccatccatggtgaccccaaggccagtgggcaagagatgaatggcaagaactgggccaagctgtgcaaggactgcaaggtggctgacggaaagtccgtgacagggaccgatgtggacatcgtcttctccaaagtcaaggggaagtctgctcgggtcatcaactatgaggagttcaagaaggccctggaagagctggcgaccaagagattcaaggggaagagcaaggaggaggccttcgatgccatctgccagctggtggcaggcaaagagccagccaatgtgggcgtcactaaagcaaaaacagggggtgctgtagaccggctgacggacaccagcagatacacgggctcccacaaggagcgcttcgatgagagcggcaagggcaagggcattgcgggacggcaggacatcctggacgacagtggctacgtgagcgcctacaagaatgcaggcacctacgatgccaaggtgaagaagtgaggcttgggaagaccgccctgccaagtgcggctgcccctgccagaggctcaggcctgggtctaaggggcacgtggagcaagagatcctggtcccctccctgctggacctgccacccagagcttcctgcctagtcccactgggctggcccaccaggcctctgacccaggctgctctgcggccccttcctcctcctcttcctgctccaacttctgtccacctggggacagtctgtgcctgtagcctcatgaccccaacccagccccaggcatggctaacccctgactgcttgcctcatatttaagctgctgctctggccaagtgcctaattttaacccagacctcaataaagacaccttttgtaccaa

SEQ ID NO: 2323 - DNA, 1331 bp, Homo sapiens
  source 1..1331: mol_type = genomic DNA
ggatccggtcgggctccggaagtccctaggcaccctaggggaccgttctcggtgacggccggggtgggccaggggtcgaggtgatttgtgggtccaggacgggggttgggagctgcccccgctaacccaccctcgtctgagaggccgcgaggtttcggcctgagatcccgtgaaggcgagaaatctcgcgatttctcgggagaggaatcggttaggagaagggggattcctcactcagctgtgcgctctgatttcgtgcgcttcctcgtccttcatgttggatggccagtttttcgtttgtgcgtcatcctctacctgagaaatggtcgcttgcccctagtctagacacgcattaaagggcagtatttaaagtcagttggcaagcagtggaataagatttttgtaaagaaaccttgtgcagcatggattctctaccagatgaattttttgtgaggcatcctgctgtggaggatcagaggaaggaagaaactgagaataagctagaaaaatcatctggtcaactgaacaaacaggaaaatgacatacctactgatcttgtccctgttaacctactattagaagtgaagaagttattaaatgcaattaatactctaccaaaaggtgtggttcctcacattaagaagttcttacaagaagatttttccttccaaactatgcagagagaagttgcagctaacagccagaatggtgaggaaattgttcctgctttgactttacgtttcttgattacacagctagaagcagcacttaggaacattcaagctggcaattataccgcacaccagattaatattggttattatttgacattactgtttttatatggagtagcactcactgaaagaggaaagaaagaggattatacagaagctgagaataaatttctggtgatgaagatgatgatccaagaaaatgaaatttgtgaaaactttatgtctttagtttattttggacgtggtttactgcgatgtgctcaaaagagatataatggaggactgctagaatttcataaaagcttacaagaaattggagacaaaaatgaccattggtttgacatagatcctacagaagatgaagatttacctacaacttttaaagatcttcttaataattttatcaagacaactgaaagcaatataatgaagcagacgatttgtagttacctagattgtgaacgatcttgtgaagctgacattttgaagaacaccagttataagggattttttcagttaatgtgcagtaaaagttgctgtgtttatttccataaaatttgctggaaaaagttcaagaatttaaagtatccaggattt

SEQ ID NO: 2324 - DNA, 2301 bp, Homo sapiens
  source 1..2301: mol_type = genomic DNA
gtgggcagctccccgctctgccgctgccgccgccgtcgcccaaggaggatcggggccgggccgggccgggatgatccgggtcggaaggccgccgccgccggagggagcgggtcacccaacgccgcactgagccgcccccgccccgccccggccccgggggatgcgccgccccgagctgctgcctccgccgccgccgcagccgcagccgcagcgggcacagagcaggtagatggccccctcagggcaggcccggcggacacccctccctctggctggcggatgcagtgcctagcggccgcccttaaggacgaaaccaacatgagtgggggaggggagcaggccgacatcctgccggccaactacgtggtcaaggatcgctggaaggtgctgaaaaagatcgggggcgggggctttggtgagatctacgaggccatggacctgctgaccagggagaatgtggccctcaaggtggagtcagcccagcagcccaagcaggtcctcaagatggaggtggccgtgctcaagaagttgcaagggaaggaccatgtgtgcaggttcattggctgtggcaggaacgagaagtttaactatgtagtgatgcagctccagggccggaacctggccgacctgcgccgtagccagccgcgaggcaccttcacgctgagcaccacattgcggctgggcaagcagatcttggagtccatcgaggccatccactctgtgggcttcctgcaccgtgacatcaagccttcaaactttgccatgggcaggctgccctccacctacaggaagtgctatatgctggacttcgggctggcccggcagtacaccaacaccacgggggatgtgcggccccctcggaatgtggccgggtttcgaggaacggttcgctatgcctcagtcaatgcccacaagaaccgggagatgggccgccacgacgacctgtggtccctcttctacatgctggtggagtttgcagtgggccagctgccctggaggaagatcaaggacaaggaacaggtagggatgatcaaggagaagtatgagcaccggatgctgctgaagcacatgccgtcagagttccacctcttcctggaccacattgccagcctcgactacttcaccaagcccgactaccagttgatcatgtcagtgtttgagaacagcatgaaggagaggggcattgccgagaatgaggcctttgactgggagaaggcaggcaccgatgccctcctgtccacgagcacctctaccccgccccagcagaacacccggcagacggcagccatgtttggggtggtcaatgtgacgccagtgcctggggacctgctccgggagaacaccgaggatgtgctacagggagagcacctgagtgaccaggagaatgcacccccaattctgcccgggaggccctctgaggggctgggccccagtccccaccttgtcccccaccccgggggtcctgaggctgaagtctgggaggagacagatgtcaaccggaacaaactccggatcaacatcggcaaaagcccctgtgtggaggaggaacagagccgaggcatgggggtccccagctccccagtgcgtgcccccccagactcccccacaaccccagtccgttctctgcgctaccggagggtgaacagccctgagtcagaaaggctgtccacggcggacgggcgagtggagctacctgagaggaggtcacggatggatctgcctggctcgccctcgcgccaggcctgctcctctcagccagcccagatgctgtcagtggacacaggccacgctgaccgacaggccagtggccgcatggacgtgtcagcctctgtggagcaggaggccctgagcaacgccttccgctcggtgccgctggctgaggaggaggatttcgacagcaaagagtgggtcatcatcgacaaggagacggagctcaaggacttccctccaggggctgagcccagcacatcgggcaccacggatgaggagcccgaggagctgcggccactgcccgaggagggcgaagagcggcggcggctgggggcagagccccccttcccactcacccctgcactcgggaccccgccctcgacggagagagtcggaccccacaggcccacagagacagttggaggaggacagactctcggggcactccctcccgcggtacagccccctgcgacgactggcgtcctccgtgttctcctcctccacgctggagacggagcattaccctcaccccggcggcggcggctcctcgggctcctccggttccctcattcagcgcagccgctcggctga

SEQ ID NO: 2325 - DNA, 796 bp, Homo sapiens
  source 1..796: mol_type = genomic DNA
ggagagcgcgggcggctggggaatggctgctgccatggtgccggggcgcagcgagagctgggagcgcggggagcctggccgcccggccctgtacttctgcgggagcattcgcggcggacgcgaggacaggacgctgtacgagcggatcgtgtctcggctgcggcgattcgggacagtgctcaccgagcacgtggcggccgccgagctgggcgcgcgcggggaagaggctgctgggggtgacaggctcatccatgagcaggacctggagtggctgcagcaggcggacgtggtcgtggcagaagtgacacagccatccttgggtgtaggctatgagctgggccgggccgtggcctttaacaagcggatcctgtgcctgttccgcccgcagtctggccgcggtgagcaccccaagcctccctcctggctttctatggacccagccctcagctccttccctggtgggctctgagcaccgcgcctctcccaaggggtaagggagctgtgagggtgtggatgggaggcagcttcacctttccctgccctttccagtgctttcggccatgatccggggagcagcagatggctctcggttccaggtgtgggactatgaggagggagaggtggaggccctgctggatcgatacttcgaggctgatcctccagggcaggtggctgcctcccctgacccaaccacttgacttaatctcactttcttaaattcttctattctcagacactgctctagtaccattccttcctcttagccccaggagcaaattaaaaggtacagttaaaa

SEQ ID NO: 2326 - DNA, 1077 bp, Homo sapiens
  source 1..1077: mol_type = genomic DNA
ctcactctcctggaaacccaccgagaacctccaccctctgacaccatggtcaactcctgttgtggctctgtgtgctctgaccagggctgtggcctggagaactgctgccgccccagctgctgccagaccacctgctgcaggaccacctgctgccgccccagctgctgtgtgtccagctgctgcaggccccagtgctgccagtctgtgtgctgtcagcccacctgctgccgccccagctgctgtcagaccacctgctgtaggaccacctgctgccgccccagctgctgtgtgtccagctgctgcagaccccagtgctgccagtctgtgtgctgccagcccacctgctgccgccccagctgctgtcagaccacctgctgcaggaccacttgctgccgccccagctgctgtgtgtccagctgctgcagaccccagtgctgccagtctgtgtgctgccagcccacctgctgccgccccagctgctgcatctccagcagctgctgcccctcttgctgtgaatccagctgctgccgcccctgctgctgcctgcgtccagtctgtggccgagtctcctgccacaccacttgctatcgcccaacctgtgtcatctccacctgcccccgccccttgtgctgtgcctcctcttgctgctaaatctctgctgtgaacacaccacttccttattacgtcctttcctacagatgaaggctctcattgcaaacatgcggactgttcaagagaattgatctgggtcccataagcaaacctcatccttagaaattctgtatttgcattctaccttttgtccaaactcccttccttccaaaggaattcattgacaatctcctaataaattgacaaattgtcctccaacatcctcccacctctttgacttcaggacatttattcatcatgcctaaggaatttgaagattgcctccatcatttgtagggccacagatcttaaagcctccaaccttgaagtccagtgaagtctctctcttaaagtcttttgcaaacatttttgtaccttgttatttccatgtaccaaaataaacctctattctattggcactgaaaa

SEQ ID NO: 2327 - DNA, 763 bp, Homo sapiens
  source 1..763: mol_type = genomic DNA
aatagcccaacccacaccagcctcagacaccaccatgaccggctcctgctgcggctccaccttgtcctccctgagctacgggggaggctgctgccagccctgctgctgccgcgacccctgctgctgccgccccgtgacctgccagaccaccgtgtgccgccccgtgacctgcgtgccccgctgcacgcgccccatctgcgagccctgccgccgcccggtgtgctgcgacccctgctccctgcaggaaggctgctgccgccccatcacctgctgcccctcgtcgtgcacggctgtggtgtgcaggccctgctgctgggccaccacctgctgccagcctgtgtctgtgcagtccccctgctgccggcccccctgcggccagccgaccccttgcagcaccacctgcaggacctcctcctgctgagaccccaatgcccccacagagcaatacactgaagcctaaacatctatctggtgtttttaaaaagttaaaagaaaaatagattttttttcacaaggtgacaatagtgatttttaccatctggatacagcctggtgtaagcagacgtccattaccaccctcacccacattttcaggtgtctacatcagccttagtcattatggatagtaaatcgacctttaagaattcctggggtggactttgcaaacacattctacaacctgatggtttttactgctcaaactgtcaccatcatcttttgcaatgtgttgctcactgttgtcaataaactaatttttcctggc

SEQ ID NO: 2328 - DNA, 1458 bp, Homo sapiens
  source 1..1458: mol_type = genomic DNA
aagaaggcactccattctggctttcacaaatacagctctgcaacgcgtttgccctgataccatgtctcttcgactttccagtgcatccaggaggtcctgtcctcgtcccaccactggatcactcagactctatggtgggggaaccagctttggtactggaaattcttgtggcatttcagggattggaagtggcttctctagtgccttcggaggcagctcatcgggaggaaacacagggggaggtaatccctgtgctggcttcactgtgaatgagcgggggctcctttctggcaatgagaaggtgaccatgcagaacctcaatgaccgcctggcatcctacctggacagtgtgcatgctctggaggaggccaacgctgacctggagcagaagatcaagggctggtatgagaaatttgggcctggctcttgccgtggtcttgatcatgactatagcagatatttcccaataattgatgaccttaaaaatcagatcatcgcatccaccaccagcaatgctaatgctgttctgcagatcgataatgccaggcttacagctgatgatttcagactcaagtatgaaaatgagctggctcttcaccagagtgtagaggctgatgtcaatgggttacgaagagttttggatgaaataaccctgtgcagaacagatctggagattcagtatgaaaccctgagtgaggagatgacttacctcaaaaagaaccataaagaggaaatgcaagttctgcagtgcgcagctggaggcaacgtgaacgtggaaattgaacttcagtctctcctagccacgaaacactccctggagtgctccttgacagagaccgagagcaactactgtgcgcagctggcgcagatccaggctcagatcggggccctggaggagcagctgcaccaggtcagaaccgagaccgagggccagaagctggagtatgagcagctcctggacatcaagctccacctggaaaaagaaattgagacctactgtctccttataggaggagatgatggagcctgtaagtctgggggttacaagtctaaagattatggatctggaaatgtgggaagtcaagtcaaagacccagccaaagccatagtggttaagaaagttcttgaggaggtagaccaacgcagcaaaatacttaccaccaggctccactccctggaagagaaatctcaaagcaattaatttgagatgcaacagagaacgtatgccacatagcccctgcgaagaaaaggcattatgtatctgtccagaaaaatgtgcatgtctaagaaaaatgtctaacctgttgtctttctgttactttctttctgggcaatcaatgacagcatctccccattcatctagaagaatgccacacacaaatatgactcatttgattatcctacagaaatctgttgtcaattctttgtattcaataaacctcttctttagcaagttat

SEQ ID NO: 2329 - DNA, 2764 bp, Homo sapiens
  source 1..2764: mol_type = genomic DNA
gcagcgactcatcctatcgataaggttcagttagccaaggtggaggatgggaaaagaatggaactgtcccagctactcaatgagatcagggcaaactatgaaaagatcctcaccagaaatcagatagagacggtgctctcaacaaggatccaggtaatgatttcatacagacaggcaccttccagaataaggagacagtccatgtctacccaattcctgtcccggcctctctgagctagaagaagacataagcaaaaaaatggacaaagatgaagaggctttgaaggcagctcaagcagaactcaaggaggcccgacgccagtggcaccacctgcaagtggaaattgaatctctccatgctgtggaaaggggccttgaaaactccctacatgccagcgagcagcattaccagatgcagctgcaagacctagagactgtgattgaaggactagaaaaagagctacaggaagtaaggcgcggcatcgaaaagcagcttcaagagcacgagatgcttctcaacacgaagatgaggctggaacaagaaatagcaacttatcgccacctcctagaaaaagaagaaatcagatattatggttgtatccaaggtgggaaaaaagacaaaaagcctaccacaagtagagttggttttgttttaccatcagccattataaatgaaatatcttttactacaaaagtcccacaaaagtatgagaatgaaaatgtagaaacagtaaccaaacaggcaatcttaaatgggagtatcgttaaggagagcactgaagctcatggcactattcagacagagaaagtggatgaagttattaaagaatgggaaggttctttctttaaagataaccctcgattgaggaaaaagtctgtttctcttcgatttgatcttcatttagcagccactgatgaagggtgtttagagactaagcaggataatctaccagatatagaagtcaggcttatcatgagaagatcatgcagtattccctctatcaaacctccatcaacagctaattaatccaaagatagtatttgacttgattggaaaatgttaggatggaccaaggtgggccataccaactccctctgtcccaaaatgtaagttattacgtatgtatggaaaatgttatgatcaatatgtggttctcttcagaagaaaaaaacaataaaggacatttctctgaatctaattatggagatagacatatatatatatatatgaatgagagggagtagcttaaaaataaaatcacaaatccagtacagtctctttctttatattctcccaatagtcttctttttcccttgaaacttcatcagagactgtaagcattaacctggtttagtaaagtctttgtaatttttttcaatggctgaatacgctaaggaaaaaagaattgtttgaataggattgtgttaagagtcacactgagttattcaccattattccatgactggttaaacctacaatgtttgttctatttttcaaaaagagcaattataaacaagtttttaaagggggactcactattcacctaatgaggattcttctttttgagataaatcatttgtatactgagaaaaatgagttattttccatgagaaattctgagcaaactatagaacacaccccagggctaatttgagataagtacaattaagttaatctacatatatctaaaaggttttttttgtaataagtatctgatttccggaagatttactttactcaaggaactttaaaggttgtatcccccaccaaaaaaagaaaaaaaatcagaaggccaactgcgcaaacaaaacatgaaaagcaaattgaaaaggtagttactatagttatcagaacagttacccaccatcccagtttttccaactgtaaagctaaatgtgattagattgtttgctataagccgtagataagatactatatgaagtattataaatatttcttgcaatcatttatgtgaactaagataacggtattgttatctaagctaagagtatttagaggatttgtttttaaatcgttcaaattgtaataaatatgggtagaaaatatatttgtgaataagtgaggtattgttgcaaagtttttaaaataacctaatttgtttaatacaggtatatttaagatcttaataaatacctgttttaagacattagaaatttataagttcttaattcttttctaagcagaaaaagtagctgagtacaactcaccatactttttcccagctaaagtatcatctaagggctatagctacgttagcattttagtacagcctttaaaatatttctctctctctctcctctctcttctcctctatctctctctccatatatacttattatatatatacatatatataatttatatatatgtatatatatatttcaaccagaaaaatgtatgttttaaccaggaaaatattatgttaaataatctttaacataatacagggatataaaatttttaattttctttcaattacttcagattccttttagtctggtttattctatttagtgaaaagggatgattttgttttgtcaaggatataacagcatgttaagtgcttattcttgcataagcatctgacctaaaatacatcctatacataaaaaatgtttcatttgatattgctaaatgctactaactttattaaagctttaaaaatgcaatcatataagctattgtactaaagttactgtactaagcaacagtgatcataataaagcaatatatctagcataa

SEQ ID NO: 2330 - DNA, 1102 bp, Homo sapiens
  source 1..1102: mol_type = genomic DNA
atcgataaggttcagttagccaaggtggaggatgggaaaagaatggaactgtcccagctactcaatgagatcagggcaaactatgaaaagatcctcaccagaaatcagatagagacggtgctctcaacaaggatccagctagaagaagacataagcaaaaaaatggacaaagatgaagaggctttgaaggcagctcaagcagaactcaaggaggcccgacgccagtggcaccacctgcaagtggaaattgaatctctccatgctgtggaaaggggccttgaaaactccctacatgccagcgagcagcattaccagatgcagctgcaagacctagagactgtgattgaaggactagaaaaagagctacaggaagtaaggcgcggcatcgaaaagcagcttcaagagcacgagatgcttctcaacacgaagatgaggctggaacaagaaatagcaacttatcgccacctcctagaaaaagaagaaatcagatattatggttgtatccaaggtgggaaaaaagacaaaaagcctaccacaagtagagttggttttgttttaccatcagccattataaatgaaatatcttttactacaaaagtcccacaaaagtatgagaatgaaaatgtagaaacagtaaccaaacaggcaatcttaaatgggagtatcgttaaggagagcactgaagctcatggcactattcagacagagaaagtggatgaagttattaaagaatgggaaggttctttctttaaagataaccctcgattgaggaaaaagtctgtttctcttcgatttgatcttcatttagcagccactgatgaagggtgtttagagactaagcaggataatctaccagatatagaagtcaggcttatcatgagaagatcatgcagtattccctctatcaaacctccatcaacagctaattaatccaaagatagtatttgacttgattggaaaatgttaggatggaccaaggtgggccataccaactccctctgtcccaaaatgtaagttattacgtatgtatggaaaatgttatgatcaatatgtggttctcttcagaagaaaaaaacaataaaggacatttctctgaatctaa

SEQ ID NO: 2331 - DNA, 2770 bp, Homo sapiens
  source 1..2770: mol_type = genomic DNA
agtgacctcggggtcgttaggcctccacgtcctcgctggagctgcggacctcagtcgtccatccacacctcccccctgccgcccccgcccatctcactctcccaaccctgggcaccagggcaggtcgacagcccgaggcactcctctactgcgtttccaggcccaggagacccactccagcgccgcggttccttgcgacccggcagccgttcagcagacctcccattctttcctgcatcatcgggcattgtggaggcaccctacggtgattcctctcagagcctgtttgtaggtgaccgtgacagagacaaaaccatggaagtgactgggtttggagtgaccaggtgttcctccctcccctttcccagacacgcctcttgctggcagatcctctgactctctggctgcagaacagtttcttccgtgctctggcctgagtgccacagccagggcctctgctctgtacacagaccgggcaaggtcccccaggccaggatgtcaggcctggtgttggggcagcgggatgagcctgcaggccaccggctcagccaagaggagatcctggggagcacacggctggtcagccaagggctagaggccctacgcagtgaacaccaggccgtgctgcaaagcctgtcccagaccattgagtgtctgcagcagggaggccatgaggaagggctggtgcatgagaaggcccggcagcttcgccgttctatggaaaacattgagctcgggctgagtgaggcccaggtgatgctggctctagccagccacctgagcacagtggagtcggagaaacagaagctgcgggctcaggtgcggcggctatgccaggagaaccagtggctgcgggatgagctggctggcacccagcagcggctacagcgcagtgaacaggctgtggctcagctggaggaggaaaagaagcacctggagttcctggggcagctgcggcagtatgatgaggatggacatacctcggaggagaaagaaggcgatgccaccaaggattccctggatgacctctttcctaatgaggaggaagaggaccccagcaatggcttgtcccgtggtcaaggtgctacagcagctcagcagggtggatatgagatcccagcaaggttgcggacgttgcacaacctggtgatccagtacgcagcccaaggtcgctatgaggtggccgtgccactctgtaagcaggcactagaggacctggagcgcacatcaggccgtggccaccctgatgtcgccaccatgctcaacatccttgctttggtgtatcgtgaccagaataagtataaggaagctgcccacctgctgaatgatgcccttagcatccgggagagcaccttgggacctgaccatcctgctgtggctgccacactcaacaatttggctgtgctctatggcaaaaggggcaagtacaaggaggcagagcctctgtgccagcgggcactggagattcgagaaaaggtcctgggcacgaatcatccagatgtggcaaaacagctgaacaacctggccctcttgtgccaaaaccagggcaagtatgaggccgtggaacgctactaccagcgagcactggccatctacgaggggcagctggggccggacaaccctaatgtagcccggaccaagaacaacctggcttcctgttacctgaaacagggcaaatatgctgaggctgagacactatacaaagagatcctgacccgtgcccatgtacaggagtttgggtctgtggatgatgaccacaagcccatctggatgcatgcagaggagcgggaggaaatgagcaaaagccggcaccatgagggtgggacaccctatgctgagtatggaggctggtacaaggcctgcaaagtgagcagccccacagtgaacactactctgagaaacctgggagctctgtataggcgccagggaaagctggaggctgctgagaccctggaggaatgtgccctgcggtcccggagacagggcactgaccctatcagccagacgaaggtggcagagctgcttggggagagtgatggtagaaggacctcccaggagggccctggagacagtgtgaaattcgagggaggtgaagatgcttctgtggctgtggagtggtccggggatggcagtgggaccctgcagaggagtggctctcttggcaagatccgggatgtgctccgcagaagcagtgaactcttggtgaggaagctccaggggactgagcctcggccctccagcagcaacatgaagcgagcagcctccttgaactatctgaaccaacctagtgcagcacccctccaggtctcccggggcctcagtgccagcaccatggacctctcttcaagcagctgacattcaacccggcccccaggtctgctgggtccccccacccccacagccctcacagcattccccattgctcctggctcttccccacccctaggtgggacagtgaaggggagcagtttaaccagaagattgctgctgcccttagggtctcagctccctcctcaggaatccctcttaggaaggaccctcaggacaccctctctgcaccctgtggtcctctagagtagctagctctgaggccccaaggtgggtacaaagcaggtatggccctcagagatgcagcctgctgctggcttttcagtcagagggttgggggctggccagccaagctgccttgccctggccgctcttactccctccctctgctgtctcacttcaggtccatgtatttcacttttcttaaataaaagaatcaggt

SEQ ID NO: 2332 - DNA, 2470 bp, Homo sapiens
  source 1..2470: mol_type = genomic DNA
gggccaggtcctctgggtagctgtgaagtggtgaaagaaggggtgggaacgctggacttctggactttgggcagggcagatcctctgactctctggctgcagaacagtttcttccgtgctctggcctgagtgccacagccagggcctctgctctgtacacagaccgggcaaggtcccccaggccaggatgtcaggcctggtgttggggcagcgggatgagcctgcaggccaccggctcagccaagaggagatcctggggagcacacggctggtcagccaagggctagaggccctacgcagtgaacaccaggccgtgctgcaaagcctgtcccagaccattgagtgtctgcagcagggaggccatgaggaagggctggtgcatgagaaggcccggcagcttcgccgttctatggaaaacattgagctcgggctgagtgaggcccaggtgatgctggctctagccagccacctgagcacagtggagtcggagaaacagaagctgcgggctcaggtgcggcggctatgccaggagaaccagtggctgcgggatgagctggctggcacccagcagcggctacagcgcagtgaacaggctgtggctcagctggaggaggaaaagaagcacctggagttcctggggcagctgcggcagtatgatgaggatggacatacctcggaggagaaagaaggcgatgccaccaaggattccctggatgacctctttcctaatgaggaggaagaggaccccagcaatggcttgtcccgtggtcaaggtgctacagcagctcagcagggtggatatgagatcccagcaaggttgcggacgttgcacaacctggtgatccagtacgcagcccaaggtcgctatgaggtggccgtgccactctgtaagcaggcactagaggacctggagcgcacatcaggccgtggccaccctgatgtcgccaccatgctcaacatccttgctttggtgtatcgtgaccagaataagtataaggaagctgcccacctgctgaatgatgcccttagcatccgggagagcaccttgggacctgaccatcctgctgtggctgccacactcaacaatttggctgtgctctatggcaaaaggggcaagtacaaggaggcagagcctctgtgccagcgggcactggagattcgagaaaaggtcctgggcacgaatcatccagatgtggcaaaacagctgaacaacctggccctcttgtgccaaaaccagggcaagtatgaggccgtggaacgctactaccagcgagcactggccatctacgaggggcagctggggccggacaaccctaatgtagcccggaccaagaacaacctggcttcctgttacctgaaacagggcaaatatgctgaggctgagacactatacaaagagatcctgacccgtgcccatgtacaggagtttgggtctgtggatgatgaccacaagcccatctggatgcatgcagaggagcgggaggaaatgagcaaaagccggcaccatgagggtgggacaccctatgctgagtatggaggctggtacaaggcctgcaaagtgagcagccccacagtgaacactactctgagaaacctgggagctctgtataggcgccagggaaagctggaggctgctgagaccctggaggaatgtgccctgcggtcccggagacagggcactgaccctatcagccagacgaaggtggcagagctgcttggggagagtgatggtagaaggacctcccaggagggccctggagacagtgtgaaattcgagggaggtgaagatgcttctgtggctgtggagtggtccggggatggcagtgggaccctgcagaggagtggctctcttggcaagatccgggatgtgctccgcagaagcagtgaactcttggtgaggaagctccaggggactgagcctcggccctccagcagcaacatgaagcgagcagcctccttgaactatctgaaccaacctagtgcagcacccctccaggtctcccggggcctcagtgccagcaccatggacctctcttcaagcagctgacattcaacccggcccccaggtctgctgggtccccccacccccacagccctcacagcattccccattgctcctggctcttccccacccctaggtgggacagtgaaggggagcagtttaaccagaagattgctgctgcccttagggtctcagctccctcctcaggaatccctcttaggaaggaccctcaggacaccctctctgcaccctgtggtcctctagagtagctagctctgaggccccaaggtgggtacaaagcaggtatggccctcagagatgcagcctgctgctggcttttcagtcagagggttgggggctggccagccaagctgccttgccctggccgctcttactccctccctctgctgtctcacttcaggtccatgtatttcacttttcttaaataaaagaatcaggtaacctttc

SEQ ID NO: 2333 - DNA, 1494 bp, Homo sapiens
  source 1..1494: mol_type = genomic DNA
ctcgttggggactaaggcgtcggttggcgcgcaacgggttctaggctgcaggcagctcgaggacccgcggccccgccccggctcggcctggcagatagcagaggcagcaggccgtgccgggggggcatgttgctgtaaccagtggcccaggggatgttacggtggacagtgcacctggagggcgggccccgcagggtgaaccatgctgcagtggctgtcgggcatcgggtatactccttcgggggttactgctctggtgaagactatgagacactgcgtcagatagatgtgcacattttcaatgcagtgtccttgcgttggacaaagctgcccccggtgaagtctgccatccgtgggcaagctcctgtggtaccctacatgcgctatggacactcaaccgtcctcatcgacgacacagtcctcctttggggcgggcggaatgacaccgaaggggcctgcaatgtgctctatgcctttgacgtcaatacgcacaagtggttcacaccccgagtgtcagggacagttcctggggcccgggatggacattcagcctgtgtcctaggcaagatcatgtacatttttgggggctacgagcagcaggcggactgtttttccaatgacattcacaagctagataccagcaccatgacatggactcttatctgtacaaagggcagccctgcacgctggagggacttccactcagccacaatgctgggaagtcacatgtatgtctttgggggccgtgccgaccgctttgggccattccattccaacaatgagatttactgcaaccgcattcgagtctttgacaccagaactgaggcttggctggactgtcccccgactccagtgctgcctgaggggcgccggagccactcggcctttggctacaatggggagctgtacatctttggtggttataatgcaaggctgaaccggcacttccatgacctctggaagtttaatcctgtgtcctttacctggaaaaagattgaaccgaaggggaaggggccatgtccccgccggcgccagtgctgctgtattgttggtgacaagattgtcctctttgggggtaccagtccatctcctgaggaaggcctgggagatgaatttgaccttatagatcattctgacttacacattttggactttagccctagtctgaagactctgtgcaaactggccgtgattcagtataacctagaccagtcctgtttgcctcatgatatcaggtgggagctgaatgccatgaccaccaacagcaatatcagtcgccccatcgtctcctccccctttgcctatcccctcccctctgcttgagccttgagccttgactgggagctgaaaggagttgcagctgttggcatgagacctccttctccccgtcttggggaggtggggaccagcagataaatcccacccttccttgagctgtcgctgtactctgaagttcagccagctcagattttataaaaattaattaaaatctcc

SEQ ID NO: 2334 - DNA, 2378 bp, Homo sapiens
  source 1..2378: mol_type = genomic DNA
aaaaggggcggtggcggcggcggcggcggcggcggcggcggcgacggcgagaaagagcttgccggggggcgagcaggacaggacgaagccggagtgtaggcggcagaggattcgctcccagagcagctgcggccaggtatatgaatgacctaaaggtacaaataaagacggagagagaacagtgccaactgggagcagggcaagaatgccaattcctcctcccccgccacccccacctggtcctcctccacctcccacatttcatcaggcaaacacagagcagcccaagctgagtagagatgagcagcggggtcgaggcgccctcttacaggacatttgcaaagggaccaagctgaagaaggtgaccaacattaatgatcggagtgctcccatcctcgagactcctccacccccaccacctgtgatccgaaatggtgccagggatgctccccctcccccaccaccataccgaatgcatgggtcagaacccccgagccgaggaaagcccccacctccaccctcaaggacgccagctgggccaccccctcctcctccaccgcccctgaggaatggccacagagattctatcaccactgtccggtctttcttggatgattttgagtcaaagtattccttccatccagtagaagactttcctgctccagaagaatataaacactttcagaggatatatcccagcaaaacaaaccgagctgcccgtggagccccacctctgccacccattctcaggtgaagcctggcttggtcccgttcctcaggaaaaggatggaccttctcttcttctcagatggtcccttccattcccctgaaacctgcatgagagctcctaacatgtttctccaatgcaatcaagccctagactccaaatgtcctcccagctcacctccatctatgcatctcatctctggatttggtgatcagactctatattgacagtaggatctcaaaccctgcatccatccttcctccagcaagccctgctagccacatgaggaacaagtttccgtgtcttctgccttcctcttggggaaaggtgccttgttgtgatgaattaactcactgttagggcagggtggagaatggtactccttccttctcctgtccactgtgggggaagcttggcaggtatattatatttcatcatttaggaggctggcatgaccaggacttatgggtgggaggggagcatttttagtgaagcaagaaaggagtttgccaagaagtgatctgttttaaaggtcatatttggagaaagggcaaggaattgggtctgctttatttttgggggtattttgtttttgttctcacctgctgcccccccaccccaccaccccagggataaattggatataaacactaaatactaatcagttgaacttaacatttaataaaaagaaagggtgaaataaactgaagaccattttagaactagtcagttctctgcagcaaagggaacaggagccatttgaaccctctgggacccctcaccccactgcttcagggtgctaggctgagggatgtttttcctcccccttaccgcccatgcccttgaaagaaaagtcactttttgtggagggcatcattcattcctgattcacaaaccccaaaaacctctggtgggagataggaagatagggcgtgggcctgggccttaacctcaatcttgtgtctgcctcagtcttttctgactggccctgaagttgtcagtggctctttctgtccttcagcccctggaaggtgctccaggataacaaagaagggcaggttgaagcccctcatggaaggagctggctttgtggggctgcaaaggacttttaagtcctgcctgtactgaagttcacagcccacctgactgagcagactcttcctgttcctttctctaccacccttgccttcccaggactgcacggtttaacacagcagagtacagaagggtgaagaagtgagcagaggcttatgaagatattcagatactcttctatgccaggaagcacaaagactttgttgagatttgcctcagttcagtagatcttccttggcagccagccataggttgtttctttgtcttccgggtcctaaagagcacagagaaaatggaggtccccagtctaggtaggaagctgattggatgaggacttctttttttccgacagcaggatggggctcttgggctccacacaccagatgctttggttttctacaactgttgctatgtgtagagggtgctcagagcgtggcatgagagcaaggagaccatggctactctttgaaatggatggggaaaattagcttaaaaatttaatcacgagattgcgccactgcactccagcctgggcgacagagccagactccgtctc

SEQ ID NO: 2335 - DNA, 1259 bp, Homo sapiens
  source 1..1259: mol_type = genomic DNA
gacgcggtccccgccccaccgtagcgacgccgcggtccgccggatctccagcgctcagtccgcgccgcaggtggtgcttgtctgcagagtcatgacctctttccgcttggccctcatccagcttcagatttcttccatcaaatcagataacgtcactcgcgcttgtagcttcatccgggaggcagcaacgcaaggagccaaaatagtttctttgccggaatgctttaattctccatatggagcgaaatattttcctgaatatgcagagaaaattcctggtgaatccacacagaagctttctgaagtagcaaaggaatgcagcatatatctcattggaggctctatccctgaagaggatgctgggaaattatataacacctgtgctgtgtttgggcctgatggaactttactagcaaagtatagaaagatccatctgtttgacattgatgttcctggaaaaattacatttcaagaatctaaaacattgagtccgggtgatagtttctccacatttgatactccttactgcagagtgggtctgggcatctgctacgacatgcggtttgcagagcttgcacaaatctacgcacagagaggctgccagctgttggtatatccaggagcttttaatctgaccactggaccagcccattgggagttacttcagcgaagccgggctgttgataatcaggtgtatgtggccacagcctctcctgcccgggatgacaaagcctcctatgttgcctggggacacagcaccgtggtgaacccttggggggaggttctagccaaagctggcacagaagaagcaatcgtgtattcagacatagacctgaagaagctggctgaaatacgccagcaaatccccgtttttagacagaagcgatcagacctctatgctgtggagatgaaaaagccctaaagtttatgtttctaatgtgtcacagaataggacgatatgattctacaacataatcaactccctattaaattctttaatgaagattttttttttaattcggccttgtccttcctaggttctctattgagatgagaaagcctcattatgctgacattttccacgccacattaaatagttaaaaaggatgcagcctggagccagagagcagaaagctgggctggttctgaagcttcttccatacttaagttgcctccaagcagtttgtgaaagtatcagatcttggtatcctggtgattgattcacctaatataaatatatttgtgtcatgaacctctta

SEQ ID NO: 2336 - DNA, 4528 bp, Homo sapiens
  source 1..4528: mol_type = genomic DNA
cggcgtccggccgcggccgacggtagttcgcttccccgagagtgcgcggaggcccgggtgcgaggagggcctgtttctcttcagccctggttcattcacctcgcggaccgagggccccgccgtcaggagccggcgaccgtgccctggtgcgagctgtgatggtcattgtcctccagagcagtgatggaggaaataccagcccaggaagcagcagggtcaccaagggtccagtttcagtctttggagacccagtctgagtgtctgtccccagagcctcagtttgtgcaggacaccgacatggaacagggactcactggggatggagagaccagagaagagaacaagctgttgattcctaagcagaaaatttcggaagaagtgcattcatacaaagtgagagtaggaagactcaaacacgatattacccaagttcctgagactagagaagtgtataagtctgaggacagattagaaagacttcaggaaattctaaggaaatttctgtacctggagagagagtttaggcaaataacaatcagcaaggaaaccttcaccagtgagaagaacaatgaatgtcatgaacccgaaaaaagcttcagtctggactctactattgatgcagatcagagagttcttagaatacagaataccgatgacaatgataagtatgacatgagcttcaaccagaattcagcctctggtaaacatgaacacttaaatctaacagaggattttcagagtagtgaatgtaaggaaagcttaatggatctctcccaccttaataaatgggagagcatccctaacactgagaaatcctataaatgtgatgtatgtgggaaaattttccatcagagctcagcccttactagacatcagagaatccatactagagagaagccctacaaatgtaaagaatgtgaaaagtctttcagtcagagctcaagtcttagtcgacataaaagaatacacactagagaaaaaccttacaaatgtgaagcatctgataaatcctgtgaagcgtctgataaatcctgtagtccaagctcaggcataattcagcataagaaaattcacaccagagccaaatcttacaaatgtagcagttgtgaaagagtcttcagtcgtagtgtccaccttactcaacatcagaaaattcacaaagagatgccctgtaagtgtactgtatgtggcagtgacttctgccatacttcatacctacttgaacatcagagggtccatcatgaagagaaagcctatgagtatgatgaatatgggttggcctatattaaacaacaaggaattcatttcagagaaaagccctatacgtgtagtgaatgtggaaaagacttcagattgaattcacatcttattcagcatcaaagaattcacacaggagagaaagcacatgaatgtaatgaatgtggaaaagctttcagtcaaacctcatgccttattcagcatcacaaaatgcataggaaagagaaatcgtatgaatgtaatgagtatgagggcagtttcagtcatagctcagatcttatcctgcaacaagaagtcctcaccagacagaaagcctttgattgtgatgtatgggaaaagaactccagtcagagagcacatctagttcaacatcagagcattcataccaaagagaactcatgaatgtaatgaagatgggaagatatttatcaaattcaggcttcattcagcatctgagagttcacaccagggagaaatcatgtatgtactgcatgtggtaaagccttcagtcatagctcagccattgctcagcatcagataattcacaccagagagaaaccctctgaatgtgacgaatgaagaaaaggtattagtgttaaactcttaatcgactcctgcaaatctataccagtgagaaatcttacaaatgtattgaatgtggcaaatttttcatgctattagtattttcataccttagtcacatttggagaattcacatgggaataaaattccattgctgcaatgaatgtgaaaaagccatcagtcaaagaaactaccttgtttagtatcaaattcacgccatgcaaaaagattataaatgtaataagcatgtatgtgtgtgaggagattcagtcataacccaacgctcattcaacatcaaagaatttatacctaagagaacttatttgggtgtagtaaatggcagatctttcaataggagtttaactagtctttgtcatatcagaatatccatagtagacaagaatttgatgtaacgcaaatggaaaaactcgacaccacatttcaggctttacccaacatcgaaataatggagagaaaattgttgattatttgtttatgaaattgttaatacatagtcccaatctttttcattgcacaaaaatctagggttgacttggtaaatgcagtgacattttctcatggagttcctttatttaatatgtattctaagtaggtacgtttatttttacttttttattataattttgatattaaaaagaacagagatggggtcttgctttgttgcccaggctggtcttgaactcctggcctcaagcgatcctcccacctgtcctcccaaagtgctggggttacaggcgtgtgtcactgtgctgggcctattttatttatagaactcatttaagctgtttttattttaatatgccctataaacatttttatattttttgaaattggttcttagtgttcacaacttccataagatactgctaatgcaccagtattaaaacacatcgacgtaagtagctcatttagctttttctgctgttcttggcccaagttctttccaaaaccaactcttaggcctgctctttactagggatcttatgtcgtattgctttacagccacaacacttggattcctgttgattaacttctccattctcttaagcacctttagaagatttagaagtttcctagttttaagtgtttcaccagcaagtattccatacctacttgatgttgctggtctggtgtcttatttcctaaagtgaagcatctttttttaaaaaagaatttgattgacaatatatccagtccaatataagtatgaaggattctctctcctgagattgtagcaggcagccaaacattttcaaatgatgcccaaggttttagctgtcttgtgtgcatccacagtctgcgaagaagacatgataaggacatcagggagccaacaagactcctaatagcctcactacattcatccagtgcctattctgcatgcctaagcttagagttcttttatatacctctacggccagcaaaatgctcaggtctgctcttggtagggtaaacataaagaagatacacaggccgggcatggtggctcacacctgtaatcccagcactttgggaggctgaggcggatggatcacgaggtcaggcagtcgagaccatcctggccaacatggtgaaaccccgtctctactaaaaatacaaaagttagccgggtgtggtggcacgcgcctgtaatcccagctactcaggaggctgaggcaggagaactgcttgaacctgggaggcggaggttgcagtgagccgagattgcaccactgcactccagcctgggcgacagagcaggactctctctcaaaaaaacacaaaaaaacaaaaacaaaaaaccatacacacacacacacacacacaaatcagcatcataagggaatgtagccttccaacagagatgatgctgttcgtatgttaatctcagagacagtatttcaagagagtggcaggtctgttcctggtaaaattttaaccattaggattgcagataaatgtttgaattctgctcctctctcatcaatccaggacagtatttgaagtgtgagggctttgtgtatagttgtttatccattaccacatttttgtattttaatagtctacaggctatataaaagaacatggctttttgactgataaaagtgattacagatgttggctcaagttcagggccaccatcatatacctaacaagagttcatgattctttaggtaatgtcaaaacattttgtatttttccatcttaagctttataacattttgtgagtaagacaaatgttatttaaaattcttgttgtcagtccagcaattgaggctttcatagttcagtgttataatattcagtagggaccctcaacaaatatataaaaatatgttgctcactctataatcctcctatggctaacctctaggatagttctgccactatattttacttctttgccatcagcaagagtaggatttcatcaaggcaaggtaggaatctaaatgaaattgatatataaatgaattgatctaaatgtaaaagcaaatgaaaaatgcatgtgttttttcctgtcaaacatgtatacccttatgtatagagaccagtagtcacgtatggtgactgaaacaggattatgtaatccctaaaaagcagaatatgtaaaaatcacatgtatgcgtttggtttaggaatgtgcttttgtacttccacttgaataaaggtgtgtttggtattctgagaa

SEQ ID NO: 2337 - DNA, 1183 bp, Homo sapiens
  source 1..1183: mol_type = genomic DNA
agctttgggatctcaggaggaggagaacccaagaaactgtggaatgatgcactaagtgaccgcttcagcggtgagatccccgatgaccagatggcgcacagctccttttttccagatgagtatttcacctgctcctccttgtgcctcagctgtggggttggatgtaagaaaagcatgaatcatgggaaggaaggagtgcctcatgaagccaagagccgctgcagatactcccaccagtatgacaaccgagtgtatacctgcaaggcctgctatgagagaggcgaggaagtcagtgtagtgcccaaaacatctgcttccactgactccccctggatgggtctcgcaaaatatgcctggtctgggtatgtgatcgaatgtcctaactgtggcgtggtctatcgtagtcggcagtactggtttggaaaccaagatcctgtggatacggtggtgcggacagagattgtgcatgtgtggcctggaactgatgggtttctgaaggacaacaacaatgctgcccagcgcctgttggacgggatgaacttcatggctcagtcggtgtccgagcttagccttggacccaccaaggctgtgacttcctggctgacagaccagatcgcccctgcctactggaggcccaactcccagattctgagctgcaacaagtgtgcgacgtcctttaaagataacgacactaagcatcactgccgagcctgtggggagggcttctgtgacagctgttcatcaaagactcggccagtgcctgagcggggctggggccctgcgccagtgcgggtctgtgacaactgctacgaagccaggaacgtccagttagctgttaccgaggcacaagtggacgatgaaggtggaacgctcattgctcggaaggtgggcgaggccgtgcagaacactctgggagccgtggtgacagccattgacataccactaggtctggtaaaggacgcggccaggcctgcgtactgggtgcctgaccacgaaatcctccactgccacaactgccggaaggagttcagcatcaagctctccaagcaccactgccgggcctgcggacagggcttctgtgatgagtgctcccatgaccgccgggctgttccttctcgtggctgggaccatcccgtccgagtctgcttcaactgcaataaaaagcccggtgacctttaacccc

SEQ ID NO: 2338 - DNA, 1006 bp, Homo sapiens
  source 1..1006: mol_type = genomic DNA
cattagagtaaatgaagccatgaagtccagcggacaccgggagtggggagtggggaagcccggcactccgggagaccgggccagggaaggagggtctggaccggacccagcccctgcccggggagcgagctccggagctgccctacgaggtcaaaacgtagcagtggcggagacccgcagggggcgcccgaacgccaccctcggcccctccccgctccagaggccccgccccgtcacgtgcccgcggttcgcgtcacacccggaagcaggggcccgagcggagccggccgcgatgagcggggagccggggcagacgtccgtagcgccccctcccgaggaggtcgagccgggcagtggggtccgcatcgtggtggagtactgtgaaccctgcggcttcgaggcgacctacctggagctggccagtgctgtgaaggagcagtatccgggcatcgagatcgagtcgcgcctcgggggcacaggtgcctttgagatagagataaatggacagctggtgttctccaagctggagaatgggggctttccctatgagaaagatctcattgaggccatccgaagagccagtaatggagaaaccctagaaaagatcaccaacagccgtcctccctgcgtcatcctgtgactgcacaggactctgggttcctgctctgttctggggtccaaaccttggtctccctttggtcctgctgggagctccccctgcctctttcccctacttagctccttagcaaagagaccctggcctccactttgccctttgggtacaaagaaggaatagaagattccgtggccttgggggcaggagagagacactctccatgaacacttctccagccacctcatacccccttcccagggtaagtgcccacgaaagcccagtccactcttcgcctcggtaatacctgtctgatgccacagattttatttattctcccctaacccagggcaatgtcagctattggcagtaaagtggcgctacaaacactaa

SEQ ID NO: 2339 - DNA, 1419 bp, Homo sapiens
  source 1..1419: mol_type = genomic DNA
ttttcatttctcacaaggactgggtgaagagttctgcagccttacagagactggaaaagaagcccaaaccaaggcccccagagaggtcccccaggcccctttgggtccctgagcctcagctggagatccggcgcaggagaccaacgcctgccatgctgttccggctctcagagcactcctcaccagaggaggaagcctccccccaccagagagcctcaggagaggggcaccatctcaagtcgaagagacccaacccctgtgcctacacaccaccttcgctgaaagctgtgcagcgcattgctgagtctcacctgcagtctatcagcaatttgaatgagaaccaggcctcagaggaggaggatgagctgggggagcttcgggagctgggttatccaagagaggaagatgaggaggaagaggaggatgatgaagaagaggaagaagaagaggacagccaggctgaagtcctgaaggtcatcaggcagtctgctgggcaaaagacaacctgtggccagggtctggaagggccctgggagcgcccaccccctctggatgagtccgagagagatggaggctctgaggaccaagtggaagacccagcactaagtgagcctggggaggaacctcagcgcccttccccctctgagcctggcacataggcacccagcctgcatctcccaggaggaagtggaggggacatcgctgttccccagaaacccactctatcctcaccctgttttgtgctcttcccctcgcctgctagggctgcggcttctgacttctagaagactaaggctggtctgtgtttgcttgtttgcccacctttggctgatacccagagaacctgggcacttgctgcctgatgcccacccctgccagtcattcctccattcacccagcgggaggtgggatgtgagacagcccacattggaaaatccagaaaaccgggaacagggatttgcccttcacaattctactccccagatcctctcccctggacacaggagacccacagggcaggaccctaagatctggggaaaggaggtcctgagaaccttgaggtacccttagatccttttctacccactttcctatggaggattccaagtcaccacttctctcaccggcttctaccagggtccaggactaaggcgtttttctccatagcctcaacattttgggaatcttcccttaatcacccttgctcctcctgggtgcctggaagatggactggcagagacctctttgttgcgttttgtgctttgatgccaggaatgccgcctagtttatgtccccggtggggcacacagcggggggcgccaggttttccttgtcccccagctgctctgcccctttccccttcttccctgactccaggcctgaacccctcccgtgctgtaataaatctttgtaaataac

SEQ ID NO: 2340 - DNA, 1504 bp, Homo sapiens
  source 1..1504: mol_type = genomic DNA
ttttcatttctcacaaggactgggtgaagagttctgcagccttacagagactggaaaagaagcccaaaccaaggcccccagagaggtcccccaggcccctttgggtccctgagcctcagctggaggtggggggtgcctgcagtgcgctggctcagtctccttctgaaaagctggatccagcttgtttgaagcccttgagctgatcttagatccggcgcaggagaccaacgcctgccatgctgttccggctctcagagcactcctcaccagaggaggaagcctccccccaccagagagcctcaggagaggggcaccatctcaagtcgaagagacccaacccctgtgcctacacaccaccttcgctgaaagctgtgcagcgcattgctgagtctcacctgcagtctatcagcaatttgaatgagaaccaggcctcagaggaggaggatgagctgggggagcttcgggagctgggttatccaagagaggaagatgaggaggaagaggaggatgatgaagaagaggaagaagaagaggacagccaggctgaagtcctgaaggtcatcaggcagtctgctgggcaaaagacaacctgtggccagggtctggaagggccctgggagcgcccaccccctctggatgagtccgagagagatggaggctctgaggaccaagtggaagacccagcactaagtgagcctggggaggaacctcagcgcccttccccctctgagcctggcacataggcacccagcctgcatctcccaggaggaagtggaggggacatcgctgttccccagaaacccactctatcctcaccctgttttgtgctcttcccctcgcctgctagggctgcggcttctgacttctagaagactaaggctggtctgtgtttgcttgtttgcccacctttggctgatacccagagaacctgggcacttgctgcctgatgcccacccctgccagtcattcctccattcacccagcgggaggtgggatgtgagacagcccacattggaaaatccagaaaaccgggaacagggatttgcccttcacaattctactccccagatcctctcccctggacacaggagacccacagggcaggaccctaagatctggggaaaggaggtcctgagaaccttgaggtacccttagatccttttctacccactttcctatggaggattccaagtcaccacttctctcaccggcttctaccagggtccaggactaaggcgtttttctccatagcctcaacattttgggaatcttcccttaatcacccttgctcctcctgggtgcctggaagatggactggcagagacctctttgttgcgttttgtgctttgatgccaggaatgccgcctagtttatgtccccggtggggcacacagcggggggcgccaggttttccttgtcccccagctgctctgcccctttccccttcttccctgactccaggcctgaacccctcccgtgctgtaataaatctttgtaaataact

SEQ ID NO: 2341 - DNA, 1779 bp, Homo sapiens
  source 1..1779: mol_type = genomic DNA
gggaggtggagaaggacgggagaggcagagagaggagacacgcagagacactcaggaggggagagacaccgagacgcagagacactcaggaggggagagacaccgagacgcagagacacccaggccggggagcgcgagggagcgaggcacagacctggctcagcgagcgcggggggcgagccccgagtcccgagagcctgggggcgcgcccagcccgggcgccgaccctcctcccgctcccgcgccctcccctcggcgggcacggtatttttatccgtgcgcgaacagccctcctcctcctctcgccgcacagcccgccgcctgcgcgggggagcccagcacagaccgccgccgggaccccgagtcgcgcaccccagccccaccgcccaccccgcgcgccatggaccccaaggaccgcaagaagatccagttctcggtgcccgcgccccctagccagctcgacccccgccaggtggagatgatccggcgcaggagaccaacgcctgccatgctgttccggctctcagagcactcctcaccagaggaggaagcctccccccaccaggtgacccctttaacctggcacttcccctggcagagagcctcaggagaggggcaccatctcaagtcgaagagacccaacccctgtgcctacacaccaccttcgctgaaagctgtgcagcgcattgctgagtctcacctgcagtctatcagcaatttgaatgagaaccaggcctcagaggaggaggatgagctgggggagcttcgggagctgggttatccaagagaggaagatgaggaggaagaggaggatgatgaagaagaggaagaagaagaggacagccaggctgaagtcctgaaggtcatcaggcagtctgctgggcaaaagacaacctgtggccagggtctggaagggccctgggagcgcccaccccctctggatgagtccgagagagatggaggctctgaggaccaagtggaagacccagcactaagtgagcctggggaggaacctcagcgcccttccccctctgagcctggcacataggcacccagcctgcatctcccaggaggaagtggaggggacatcgctgttccccagaaacccactctatcctcaccctgttttgtgctcttcccctcgcctgctagggctgcggcttctgacttctagaagactaaggctggtctgtgtttgcttgtttgcccacctttggctgatacccagagaacctgggcacttgctgcctgatgcccacccctgccagtcattcctccattcacccagcgggaggtgggatgtgagacagcccacattggaaaatccagaaaaccgggaacagggatttgcccttcacaattctactccccagatcctctcccctggacacaggagacccacagggcaggaccctaagatctggggaaaggaggtcctgagaaccttgaggtacccttagatccttttctacccactttcctatggaggattccaagtcaccacttctctcaccggcttctaccagggtccaggactaaggcgtttttctccatagcctcaacattttgggaatcttcccttaatcacccttgctcctcctgggtgcctggaagatggactggcagagacctctttgttgcgttttgtgctttgatgccaggaatgccgcctagtttatgtccccggtggggcacacagcggggggcgccaggttttccttgtcccccagctgctctgcccctttccccttcttccctgactccaggcctgaacccctc

SEQ ID NO: 2342 - DNA, 5241 bp, Homo sapiens
  source 1..5241: mol_type = genomic DNA
attgtttgaatttgaaaacggtaacatcgcagtgctgctcgcgggtctggctagtcaggcgaagtttgcagaatggaatctaattttaatcaagagggagtacctcgaccatcttatgtttttagtgctgacccaattgcaaggccttcagaaataaatttcgatggcattaagcttgatctgtctcatgaattttccttagttgctccaaatactgaggcaaacagtttcgaatctaaagattatctccaggtttgtcttcgaataagaccatttacacagtcagaaaaagaacttgagtctgagggctgtgtgcatattctggattcacagactgttgtgctgaaagagcctcaatgcatccttggtcggttaagtgaaaaaagctcagggcagatggcacagaaattcagtttttccaaggtttttggcccagcaactacacagaaggaattctttcagggttgcattatgcaaccagtaaaagacctcttgaaaggacagagtcgtctgatttttacttacgggctaaccaattcaggaaaaacatatacatttcaagggacagaagaaaatattggcattctgcctcgaactttgaatgtattatttgatagtcttcaagaaagactgtatacaaagatgaaccttaaaccacatagatccagagaatacttaaggttatcatcagaacaagagaaagaagaaattgctagcaaaagtgcattgcttcggcaaattaaagaggttactgtgcataatgatagtgatgatactctttatggaagtttaactaactctttgaatatctcagagtttgaagaatccataaaagattatgaacaagccaacttgaatatggctaatagtataaaattttctgtgtgggtttctttctttgaaatttacaatgaatatatttatgacttatttgttcctgtatcatctaaattccaaaagagaaagatgctgcgcctttcccaagacgtaaagggctattcttttataaaagatctacaatggattcaagtatctgattccaaagaagcctatagacttttaaaactaggaataaagcaccagagtgttgccttcacaaaattgaataatgcttccagtagaagtcacagcatattcactgttaaaatattacagattgaagattctgaaatgtctcgtgtaattcgagtcagtgaattatctttatgtgatcttgctggttcagaacgaactatgaagacacagaatgaaggtgaaaggttaagagagactgggaatatcaacacttctttattgactctgggaaagtgtattaacgtcttgaagaatagtgaaaagtcaaagtttcaacagcatgtgcctttccgggaaagtaaactgactcactattttcaaagtttttttaatggtaaagggaaaatttgtatgattgtcaatatcagccaatgttatttagcctatgatgaaacactcaatgtattgaagttctccgccattgcacaaaaagtttgtgtcccagacactttaaattcctctcaagagaaattatttggacctgtcaaatcttctcaagatgtatcactagacagtaattcaaacagtaaaatattaaatgtaaaaagagccaccatttcatgggaaaatagtctagaagatttgatggaagacgaggatttggttgaggagctagaaaacgctgaagaaactcaaaatgtggaaactaaacttcttgatgaagatctagataaaacattagaggaaaataaggctttcattagccacgaggagaaaagaaaactgttggacttaatagaagacttgaaaaaaaaactgataaatgaaaaaaaggaaaaattaaccttggaatttaaaattcgagaagaagttacacaggagtttactcagtattgggctcaacgggaagctgactttaaggagactctgcttcaagaacgagagatattagaagaaaatgctgaacgtcgtttggctatcttcaaggatttggttggtaaatgtgacactcgagaagaagcagcgaaagacatttgtgccacaaaagttgaaactgaagaaacacataattatgtaggatttgaagatattattgattctcttcaagataatgttgctgatattaagaaacaggctgaaattgctcacttatatattgcatctcttcctgacccccaggaagctactgcttgtttagaactaaagtttaatcaaattaaagctgaattagctaaaaccaaaggagaattaatcaaaaccaaagaagagttaaaaaagagagaaaatgaatcagattcattgattcaagagcttgagacatctaataagaaaataattacacagaatcaaagaattaaagaattgataaatataattgatcaaaaagaagatactatcaacgaatttcagaacctaaagtctcatatggaaaacacatttaaatgcaatgacaaggctgatacatcttctttaataataaacaataaattgatttgtaatgaaacagttgaagtacctaaggacagcaaatctaaaatctgttcagaaagaaaaagagtaaatgaaaatgaacttcagcaagatgaaccaccagcaaagaaagggtctatccatgttagttcagctatcactgaagaccaaaagaaaagtgaagaagtgcgaccgaacattgcagaaattgaagacatcagagttttacaagaaaataatgaaggactgagagcatttttactcactattgagaatgaacttaaaaatgaaaaggaagaaaaagcagaattaaataaacagattgttcattttcagcaggaactttctctttctgaaaaaaagaatttaactttaagtaaagaggtccaacaaattcagtcaaattatgatattgcaattgctgaattacatgtgcagaaaagtaaaaatcaagaacaggaggaaaagatcatgaaattgtcaaatgagatagaaactgctacaagaagcattacaaataatgtttcacaaataaaattaatgcacacgaaaatagacgaactacgtactcttgattcagtttctcagatttcaaacatagatttgctcaatctcagggatctgtcaaatggttctgaggaggataatttgccaaatacacagttagaccttttaggtaatgattatttggtaagtaagcaagttaaagaatatcgaattcaagaacccaatagggaaaattctttccactctagtattgaagctatttgggaagaatgtaaagagattgtgaaggcctcttccaaaaaaagtcatcagattgaggaactggaacaacaaattgaaaaattgcaggcagaagtaaaaggctataaggatgaaaacaatagactaaaggagaaggagcataaaaaccaagatgacctactaaaagaaaaagaaactcttatacagcagctgaaagaagaattgcaagaaaaaaatgttactcttgatgttcaaatacagcatgtagttgaaggaaagagagcgctttcagaacttacacaaggtgttacttgctataaggcaaaaataaaggaacttgaaacaattttagagactcagaaagttgaatgtagtcattcagccaagttagaacaagacattttggaaaaggaatctatcatcttaaagctagaaagaaatttgaaggaatttcaagaacatcttcaggattctgtcaaaaacaccaaagatttaaatgtaaaggaactcaagctgaaagaagaaatcacacagttaacaaataatttgcaagatatgaaacatttacttcaattaaaagaagaagaagaagaaaccaacaggcaagaaacagaaaaattgaaagaggaactctctgcaagctctgctcgtacccagaatctgaaagcagatcttcagaggaaggaagaagattatgctgacctgaaagagaaactgactgatgccaaaaagcagattaagcaagtacagaaagaggtatctgtaatgcgtgatgaggataaattactgaggattaaaattaatgaactggagaaaaagaaaaaccagtgttctcaggaattagatatgaaacagcgaaccattcagcaactcaaggagcagttaaataatcagaaagtggaagaagctatacaacagtatgagagagcatgcaaagatctaaatgttaaagagaaaataattgaagacatgcgaatgacactagaagaacaggaacaaactcaggtagaacaggatcaagtgcttgaggctaaattagaggaagttgaaaggctggccacagaattggaaaaatggaaggaaaaatgcaatgatttggaaaccaaaaacaatcaaaggtcaaataaagaacatgagaacaacacagatgtgcttggaaagctcactaatcttcaagatgagttacaggagtctgaacagaaatataatgctgatagaaagaaatggttagaagaaaaaatgatgcttatcactcaagcgaaagaagcagagaatatacgaaataaagagatgaaaaaatatgctgaggacagggagcgtttttttaagcaacagaatgaaatggaaatactgacagcccagctgacagagaaagatagtgaccttcaaaagtggcgagaagaacgagatcaactggttgcagctttagaaatacagctaaaagcactgatatccagtaatgtacagaaagataatgaaattgaacaactaaaaaggatcatatcagagacttctaaaatagaaacacaaatcatggatatcaagcccaaacgtattagttcagcagatcctgacaaacttcaaactgaacctctatcgacaagttttgaaatttccagaaataaaatagaggatggatctgtagtccttgactcttgtgaagtgtcaacagaaaatgatcaaagcactcgatttccaaaacctgagttagagattcaatttacacctttacagccaaacaaaatggcagtgaaacaccctggttgtaccacaccagtgacagttaagattcccaaggctcggaagaggaagagtaatgaaatggaggagagcgcctctcctcctccaaaggaatgcagttcctcaccagcaatggaacaaagctggaaggagaatgactttgacaaattgagagaagaaggcttcagacgatcaaactactccgagctacaggaggaaattcaaaccaaaggcaaagaagttgaaaactttgaaaaaaatttagactaa

SEQ ID NO: 2343 - DNA, 10274 bp, Homo sapiens
  source 1..10274: mol_type = genomic DNA
gggttgaagttgaggctgaggagagagccgagctagcgacgagcagtcgttgcggccgccggcgccgcgggaggtggtggaggcctagccggagccgagaggtctcttgttcccgtcccacggtcccggcgtcacccctccggcgcccagtccccgtcccggaactcccgggcctgtcctgggcccccggtctgtgcactccgctcgccgcagcgcccggcccgggccgcacccgccggccccatgaggagggacgtgaacggagtgaccaagagcaggtttgagatgttctcaaatagtgatgaagctgtaatcaataaaaaacttcccaaagaactcctgttacggatattttcttttctagatgttgttaccctgtgccgctgtgctcaggtctccagggcctggaatgttctggctctggatggcagtaactggcagcgaattgacctatttgatttccagagggatattgagggccgagtagtggagaatatttcaaaacgatgtgggggctttttacgaaagttaagtcttcgtggatgtcttggagtgggagacaatgcattaagaacctttgcacaaaactgcaggaacattgaagtactgaatctaaatgggtgtacaaagacaacagacgctgagggatgtccactgttggagcagttgaacatttcctggtgtgaccaagtaaccaaggatggcattcaagcactagtgaggggctgtgggggtctcaaggccttattcttaaaaggctgcacgcagctagaagatgaagctctcaagtacataggtgcacactgccctgaactggtgactttgaacttgcagacttgcttgcaaatcacagatgaaggtctcattactatatgcagagggtgccataagttacaatccctttgtgcctctggctgctccaacatcacagatgccatcctgaatgctctaggtcagaactgcccacggcttagaatattggaagtggcaagatgttctcaattaacagatgtgggctttaccactctagccaggaattgccatgaacttgaaaagatggacctggaagagtgtgttcagataacagatagcacattaatccaactttctatacactgtcctcgacttcaagtattgagtctgtctcactgtgagctgatcacagatgatggaattcgtcacctggggaatggggcctgcgcccatgaccagctggaggtgattgagctggacaactgcccactaatcacagatgcatccctggagcacttgaagagctgtcatagccttgagcggatagaactctatgactgccagcaaatcacacgggctggaatcaagagactcaggacccatttacccaatattaaagtccacgcctacttcgcacctgtcactccacccccatcagtagggggcagcagacagcgcttctgcagatgctgcatcatcctatgacaatggaggtggtcaaccttggcgaactgagtatttaatgacacttctagagctaccgtggagtctctccagtggaagcaaccccagtgttctgagcaagggttacaaagtgagggagggcagtgtccagatccccagagccacacatacatacacatacacacccttacccccatccactctagctttgtgaccatgggactgaagtttgtgatggcttttttatcaagtagattggtaaaatttaaccattcctgttgaggtgcccataagaaaatcataggccaagatagggaggggcattccagcaaaccccgtgttaatgctactgtggtttttaaatttttgtctaggggtttctttggggattttagaacagcatctgctgtcctccggggtcaagaaaagcatggaaagacaatatatgatgtacccagggaccagaaagaaaatttctttgcatcttagaaatggtagacattcattgtgactaaagagcttctatgcttccttgtttccatgccaacatgctgagcatgctcacaaagaaggctcgtccattcctcctgtgttttagtatttggcccagaggtttcctaaatggttgccttgaaatcactgtggtccaaatgtaattcttacacactcaaattatcactgtctgtagcacacttgtgcacctgtcttacattctctgttgctcccccccacactcttgctcagtctgtcacctgttcagtctgcttactcactcaattgttacccttttgctgttgtcgtgtttacagtttgcattttgaatgattagttgggattaccaaacattttttaaaaagatattatcaataaatatttttttaattctaaattttaccattaggggaccctgcctgaatctttgccaacctgcaaggaaactctaatgaaagcaagaaaagttatgagaagaaactgttttgatgaaaacagatgctaccttttggtttctattttatcttctgatatgtgataattcgcatggtatccccaatattccccctacatattcttccttctgtcagactccaccaactgtatcataaggaaagagagagatgtattattaggaaagagtgaaaatgataaatcacaaaacagagcctgaaagtccccaacacccaagttcagacattaatgattaatgttattatatatttactgaaatctaggagtgatcagtggcatctctgacctatgaggttgttttaacaggaatgccactagaggagctgtgtattctagccagtctgtttctctcttttcccccatttcagcctttcagggatacaagaatggctctataacagctggtcaattgtatgtcagtgttaatggattcatatctagtgttggcaccccaaagggccagaaccttcccataacctgtcagtcatctctcttttctgccccagtctttttttttttttttttttttttttaagacgggttctcactcttgcccagactggagtgcagtggtgcgatctcggctcaccgcaacctccacttcccaggctcaagcgattctcttgcctcagcctaccgagtagctgggattacaggcatgcaccactactgcctggctaatttttgtatttttagtagagatggggtttcacatgttggccagcctggtcttgaactcctgacctcaaatgatccacctgcctcagcctcccaaagtgctgggactacaggcatgagccaccatgcccggccctgttcagacttctgaatgaagtatgaatgtagccaggtgaagcattgaggcagctgaaagagaacactgagaggaagtaaggggtttagtgtctctgcttagcctgggcactagaactgagggaggaatttagtgtccaggactcaagagtccaagaagaagcaccctctgtcttcccaaaaaatcagaggataaaggaagtaaaatgagtttttaaagcataagaagaaaatttctaaaccccaagattagaaacccagtgtgatttttagtagggtgattttggcggggggtgtcctttgagacattaatgtgcaatccatcataatattaatcttctatatgatccagactattaaaaggcttgttttatttatttattttattttattttatttttttagagatggggtctcgctatcttgcccagcctggactcaaactcctgggctcaagccttcctcccacctcagcctcccaagtagctgggactacaggtgtgtgccactgtacccagcttaagaggtttgttttaatgctgcagttgctgattataccagcatatataagaataaagtctgatttatttatccattgatttagaaggcaattggatgaaagggtcttagaagtctatactatccattaatatttatcatattaaatttattttaaatcctgttttattgtgccgctttaaaaacgcagattacttgtttattcattcccctttccccttattctctttcagattaccttataaggaatatagtttttaacatgaaactcagtttcttgtctgtacccctacacataaaaatacatacgtgcatacacacatacttccagatgtggttaataatattcagatccctaggttactcaaacaaaactaaaggagagaactatttaggggccatctgctttaaagtttaaggtgttttgttgttgttttagtgcctgtacaaattgaccataaaacccagattgattagtgagtgtggatttgagttgcctaagttgaggctattaaggtacttctttacttaaaagataagtttaaaagactctattcatcagttcatgatgatcttggaaatgctgtttctctgctcaaaggatatacccacaggcaggtccatggggacttgctctggtgatctctgctattaaggcaaattccagcctgtttgtgccaagaacagagtcaagtgagagagaatgaagactcagagatgtgcagcactggcttgtatgttgtcaggcagaagccttgttcctttctcaagaaaacttcaggcctatcaagcttggaaggaaatacatttttttatgctgatttgcagcctacaccagctgatgaatatgctaggactttgagagaacacaaagcatggtaagttttggtcaggtggaaaggagcctgacatctgaacataatgcttcctctctcaacatctgggatacttttgaaaattcagtaaggcttaatgtaggaaaaattctttacaggaaaagctaattgatctgtttgtctaacctcatagccactccaaaatatgccttttataatggaaaaaaacagtgaacagagagaagagatttggggataagttagaaggtaccctcaaaactactgccgtaaacctacaggtgggcaaggaggaattactgtagtgtctctggagaaagttcttgaacatccaaatcatctcttttctaagcagtttttcccctaatctcataccttacatcttccagcatcatttgctacatcaatgtcttttcatcctcttcatcagccccattgagctgactccagcttatttttgcactgatttccaccatttccttcccacacccatcctttccctctatttaaagcctccatctcaccctcagtaatgctgctgatttactctcagatgtctcaagtctagcttcctttttgaatccttctcctactccaggggctgtcaaaggcagccttaaagttcagtgactgttaggtggctcaggccatttttcattgggtggtctttggtgtttgcatactgaatttgaattcagtttaaaagcaaactgttggatatgaggaagaaagggatatggccttagccctttttccaatatttggaatatgaaagcatattgtgctttgtgtaaaaaatgttttcttctcctattctgctcttgtctttactgaaggtaaaagtattccttaagtagcttttgcaaatttctagtctgatttccacattcattaagttgatttagcagacatgtaagtcagaagtttcacatatcccttgtatcaaacattttatagggaaacctagtaaatttatgatgcttcattttgggctttccagactatttgagttattcaagatagccataatgttttagtagcgacattcttttattacttctaattgccttgtaaaatgcattgttatggcccggcacggtgggtggatcacaaggtcaggagttcaagaacagcctggccaagatggtgaaatgctgtctctactgaaaatacaaaaattagccaggtgtggtggcaggtgcctgtaatcccagctactcgggaggctgaggcagagaattgcttgaacccgggaggtggaggttgcagtgagctgagatcgcaccactgcactccaccctgggcgacagagtgagactatctcaaaaaaaaagaaagaaagaaagaaaaaaatgcatcgttactagtttgatagcccactaatgccatgggggactaaacaaaatatgtgatgaaacctgtcttggtttgaagttgttagaaagtgtgagagtgtcactggaaagaagagagtggcttcctgcctgcttgtttagtcagcatgtccttaggtgactgtgttgttgggagaagagcactcatgggtcatgggtgacccttggccattttatgtttattgtgctgaaagtcacaggcggctcatgccagttgctaccagtgagaggaggggtttaaaggaaattgctctattttgccttattcctccttatgtgtatgatttaagggtaggcttttatcctggttgtatctcctggctgacagactttctcaatcatatgtttgagctctgaagcattttacaaaaagattgcctctctatctgcctgccaatcctagaatctttagccacctcaaacccaggcactgtgaattagccaagtcctgtttgagaagaaatgtaggatgtttggttggaattcttgagacagaacctctctccccattaatgatgttgtaccaaagaattctaaagcagtaaaaggataatggggaaaaatggagtcacagcctttcctcgcctatatttcttttttttttttttttttttgacatggagtctcgctctgtcacccaggttggagtgccatggcacaatctcagttcactgcaacctctgcctcctgggttcaagtgattcttctgtttcagcctcccaagaggccaggattacaggtgcccaccaccacgcccagctaatgtttgtatttttcatagagatggggttttgccatgttggccaggctagtctcgaacttctgacctcaagtggtccacctgccttggcctcccaaagtgctgggattacaggtgtaagccaccgcacctggccagtttctatcataaattttaaatgtaagattggaagatacagagagctgtataaaatcataccagtagggtataattagcccaggtagtttaggaataaaattgggttgtatccgagtgccctaacttgacattttgattctccagcaaagaacataggttactaggttactaaccttgccttctcacttgggataaactttttttttttttcttgttgcccaggctggagtgcaatagtgagatctcggctcaccgcaacctccgcctcttgggttcaagcgattctcctcccttagcctcccgagtagctggaattacagcctgtgccaccacgcccggcaaaatttgtatttttagtagagacggggtttcaccatgttggtcaggctggtttcaaactcccaacctcaggtgatctgcccacctcagcctcccaacatgctaggattacaggcgtgagccactgcgcccagcccaggataaacattctacctgcctgaaagtaccataagaggcaagtgagtttcttgcatgatgggcttctgcagcttccccctcaagtcacatctacctgttgtatttatttatttatttatttttgagacagagtctcgctctgtttcccaggctggagtgcagtggcgtgatctcggctcactgcaagctccacctcccaggttcacgccattctcctgcctcagcctcccaagtagctgggactacaggctcccgccaccacgcccggctaattttttgtatttttagtagagacggggtttcaccctgttagccaggatggtctcgatctcctgacctcatgatccacccgcctcggcctcccaaagtgctgggattacaggcgtgagccaccgcgcccggcccgttgtatctattttttttagacgcatcaattcagtgtctctgaagcctttgatcgttaggaaggtcagtacataacctcttaggtgaagctgagttgatctttggagcccaagagagttaattttcaggagaaaaagaattagggcaagctcccctgtgggatgttaagagaaagtccatatgcgcttcttccatctctgcctcttgtttttaaataagtgcttgtgaagttcagtttatagaggttgagtctcagtgcttcctcagccagggtggtttattgctgttttacaaagaaccatgaacaagcaaaatcctatcaatagtcctttctgttttatgttttatagtcttattttgaagaatcggcatggtaaaatgatagacaagtttcaaataaagcagataattagctctagaattggggtactttgcctcaggtacagcatctgtcttgaatacatagtgatggctgtgtcacacatgggtacatttactttcctctctgatcaactgcacccctttttactggcaaagagggctcctactttctacacacttaaccagtcaaacagataggttttggcaccaccgaaagaaccacaagtgcaccccagctgcatctgggcatggttttggtactaggactagagaagtgagcagtaaatgacagtccttaccctaggaagagatgggagaagagaggtgtccagacatatttaccttttctcttctgtcatgccccaagaaccaaggatcatctttgaagtgacgtcttttttgttaaattggaagaagaaaactttgcagccaggcgtggtggctcacgcctgtaatcccagcactttgggaggccgaggcgggcggatcacaaagtgtcaggagtttgagaacagcctggccaacatggtgaaaccccatctctactgaaaatacaaaatcccagctacttgggaggctgaggcaagagaatcacttgaacctgggaggcggatgttgcagtgagccgagatcacgccactgcactccagcctgggcaacggagtgagactccatctcacaaaaaagagaaaagaaaagaaaactttgcttcactaagtttctcttgccattatctcattaattcagatctgtacctcattgctgctcacacatatatgtttcttaccttagcctgaaccttctcaggccttgaagtcattattctactctttttttttcttttccttttttatggcactagagaatgaaaacctaaggtcttagaaaatcttaacttgaaaaagtctctaactggcatgatttgattacttttttcccctgtggacaaataattttctttcctatataatagatttttagtaagtgaaacctttgctgctgctttcctgggtttacattagttttttcctgcccttaagaataatttatctgtgcttctctgatgactgttaatttctaatagtgcaggaagggatgagcttttgatttcttctcactcccctcctcaccctacttccaaattacacactaacttctaacccttacagcctgttggcacatacacaagatccacgagaccatgctcctcagaagctacccatgtcctttctcaccatggtgtggctcttggagccctgagtatctgtgactacccactccaaaggttgactgtaagaggagagcggccttcttaattttgcatttcttaattttgtttttctccattcctgttttatgacttggccttcagatgcttcctactctggcctcctccttttttctcctaggaattgtttccaggtaacctaccatgtgcacttctcagctgctctgctcacctttgcccaccttcccgtgaccctgagagtacagatccgaataatgtggcctgtgcagagctcagagaactgtgaggactacccatgcctgtcagactctgctcagggacagagatggatgggtaaatggtgctgttggagacatttttatcttcataccaggctctgtttcatccctgcaccccgcacccccactcactcccctgagggggtaaaatgcagaggtggttgacctgaagggtctgattccctccttcccaagccttagggcctaccctggagtgctgcagtgtgtgagagctgctgcttgcttgtttctccactaggcctgctccaaatgcttagccaatctctggagccgacacagttgcctacggggtgacttagcaccaggttccattagctctccaagtgactgtttccacccagtacttttggcgcttgaggatggggggagggggattatttaaaataaataaaatccgaggtggcagtagaggattccttttgctttaaaaatctttggactaaaaaaaaaaaaaaaaagttttttatatataaatatataaagtaaattgttatgtaactattattgtttcttgtatgttctaattttgttttatgatgtaattaaagaaagtaagctgtgaagacttttcattttcctgtg

SEQ ID NO: 2344 - DNA, 3288 bp, Homo sapiens
  source 1..3288: mol_type = genomic DNA
ctcctcttcctaaagcggcgaggcgcagaggagcggcatcactcgagcccaggtcccagccaccaccactcacagcgctcggcgttcaggaagaggagcagcagcggaggcggctgcttcagcggcgggcgggcgccagaaaggccccgatcgaaaagcctgggagggccgccgaactacccccggagggaggagccagtccgaacccaaggcgccaccgccgcagaagcggagcgaggcagcattcgcctccatggcccactcgccggtggctgtccaagtgcctgggatgcagaataacatagctgatccagaagaactgttcacaaaattagagcgcattgggaaaggctcatttggggaagttttcaaaggaattgataaccgtacccagcaagtcgttgctattaaaatcatagaccttgaggaagccgaagatgaaatagaagacattcagcaagaaataactgtcttgagtcaatgtgacagctcatatgtaacaaaatactatgggtcatatttaaaggggtctaaattatggataataatggaatacctgggcggtggttcagcactggatcttcttcgagctggtccatttgatgagttccagattgctaccatgctaaaggaaattttaaaaggtctggactatctgcattcagaaaagaaaattcaccgagacataaaagctgccaatgtcttgctctcagaacaaggagatgttaaacttgctgattttggagttgctggtcagctgacagatacacagattaaaagaaatacctttgtgggaactccattttggatggctcctgaagttattcaacagtcagcttatgactcaaaagctgacatttggtcattgggaattactgctattgaactagccaagggagagccacctaactccgatatgcatccaatgagagttctgtttcttattcccaaaaacaatcctccaactcttgttggagactttactaagtcttttaaggagtttattgatgcttgcctgaacaaagatccatcatttcgtcctacagcaaaagaacttctgaaacacaaattcattgtaaaaaattcaaagaagacttcttatctgactgaactgatagatcgttttaagagatggaaggcagaaggacacagtgatgatgaatctgattccgagggctctgattcggaatctaccagcagggaaaacaatactcatcctgaatggagctttaccaccgtacgaaagaagcctgatccaaagaaagtacagaatggggcagagcaagatcttgtgcaaaccctgagttgtttgtctatgataatcacacctgcatttgctgaacttaaacagcaggacgagaataacgctagcaggaatcaggcgattgaagaactcgagaaaagtattgctgtggctgaagccgcctgtcccggcatcacagataaaatggtgaagaaactaattgaaaaatttcaaaagtgttcagcagacgaatccccctaagaaacttattattggcttctgtttcatatggacccagagagccccaccaaacctacgtcaagattaacaatgcttaacccatgagctccatgtgccttttggatctttgcaacactgaagatttggaagaagctattaaactattttgtgatggcgtttatcattttatattttgaaaggattattttgtaaggaataacttttaatactatagtttcacctgtattctagtaaatgttgagacaccgttttgcttttaagtatccctatttcttaagttacgaggatgaatacctttcacattttgatctttagttgactctacagtcatgaaacatacaggtctttcaaagtcattctcaatattcagcttttgtaaattatcaagcttcaaaaagcttttttttttaaaaaaaaacatgcatattctaaaaatgactattggtggggaggtgtaaataagtcataccttcttaaaacagaaaatttaagtaaagtcttttaaatgaaacctgtaaaagtattgactcttctaccaagttggtatgatattccaggcagctcaatgattatcacatttgagaccctgtgtttgaagcatttacaggcaatgtacagcaacagaggtacctcttggtgtatagtatttacattctcttttaggtagaagaggcaattttacccttatttcacatggttagaaatttaaagcaagatcatttacccaaggataggtgtttggtaatgttgaaggagttagtctggcttcatgttttacatcttcaactaaaatcccatactatctgcttggatttggagagccaaaaaataaagctgattgtcatgtgattaaatatctgatcaacaggtatgaatataacttaaatcagcatatttttgccatggtaataaattgtcctataaactatttatatatttttgttcttcataattatcactaataagcatcagtttgttgtttttaaaaggatatttaagtgagcattttctagttcatatgaaaataaccatagtacaggatgatttctgtccacacaaaggttaaattagattgcacagttaattttcacttatatttatggtactattatgtgggtgatgcctttttcttttaagcccagtacatatattatgcctgcctaagttctgaactggggctgtatttcagtagttgtagaattattgatatttagttttgatagctaatgtttaattgtttggatctgcacagtttggtttttgcacaaaagtcatttaaaaaaatctgagtaattgtcaaatattaaaagaaagatattcttcctgtaaggaatacagtttttagtcaaagtggccattacatcctctttttaatttacataatacagatacttgagaaagttgttgtggtgttgtatgccaagaaaattctttttattggtgcctatattgtaacaattatttttaatgcattgtattttgaagtaacggttcagttaaatttttcacctgctgtgtaactgaaacacaattacagtttataatcatctgtagaagtctggagataattttgcaactcatgttatgggttaaatgaatatttttgtaaaagtaaaagcaacaaatttataaattgattatttgaaactttacaacacaattgcatcccaaatacaaattgtattgcttattcattatagctattcgtcctgtaatctgtttctaggtgaagcatactccagtgttttaggggttttgaaaataaatatttaaatttcacagtc

SEQ ID NO: 2345 - DNA, 3017 bp, Homo sapiens
  source 1..3017: mol_type = genomic DNA
actcgagcccaggtcccagccaccaccactcacagcgctcggcgttcaggaagaggagcagcagcggaggcggctgcttcagcggcgggcgggcgccagaaaggccccgatcgaaaagcctgggagggccgccgaactacccccggagggaggagccagtccgaacccaaggcgccaccgccgcagaagcggagcgaggcagcattcgcctccatggcccactcgccggtggctgtccaagtgcctgggatgcaggggtctaaattatggataataatggaatacctgggcggtggttcagcactggatcttcttcgagctggtccatttgatgagttccagattgctaccatgctaaaggaaattttaaaaggtctggactatctgcattcagaaaagaaaattcaccgagacataaaagctgccaatgtcttgctctcagaacaaggagatgttaaacttgctgattttggagttgctggtcagctgacagatacacagattaaaagaaatacctttgtgggaactccattttggatggctcctgaagttattcaacagtcagcttatgactcaaaagctgacatttggtcattgggaattactgctattgaactagccaagggagagccacctaactccgatatgcatccaatgagagttctgtttcttattcccaaaaacaatcctccaactcttgttggagactttactaagtcttttaaggagtttattgatgcttgcctgaacaaagatccatcatttcgtcctacagcaaaagaacttctgaaacacaaattcattgtaaaaaattcaaagaagacttcttatctgactgaactgatagatcgttttaagagatggaaggcagaaggacacagtgatgatgaatctgattccgagggctctgattcggaatctaccagcagggaaaacaatactcatcctgaatggagctttaccaccgtacgaaagaagcctgatccaaagaaagtacagaatggggcagagcaagatcttgtgcaaaccctgagttgtttgtctatgataatcacacctgcatttgctgaacttaaacagcaggacgagaataacgctagcaggaatcaggcgattgaagaactcgagaaaagtattgctgtggctgaagccgcctgtcccggcatcacagataaaatggtgaagaaactaattgaaaaatttcaaaagtgttcagcagacgaatccccctaagaaacttattattggcttctgtttcatatggacccagagagccccaccaaacctacgtcaagattaacaatgcttaacccatgagctccatgtgccttttggatctttgcaacactgaagatttggaagaagctattaaactattttgtgatggcgtttatcattttatattttgaaaggattattttgtaaggaataacttttaatactatagtttcacctgtattctagtaaatgttgagacaccgttttgcttttaagtatccctatttcttaagttacgaggatgaatacctttcacattttgatctttagttgactctacagtcatgaaacatacaggtctttcaaagtcattctcaatattcagcttttgtaaattatcaagcttcaaaaagcttttttttttaaaaaaaaacatgcatattctaaaaatgactattggtggggaggtgtaaataagtcataccttcttaaaacagaaaatttaagtaaagtcttttaaatgaaacctgtaaaagtattgactcttctaccaagttggtatgatattccaggcagctcaatgattatcacatttgagaccctgtgtttgaagcatttacaggcaatgtacagcaacagaggtacctcttggtgtatagtatttacattctcttttaggtagaagaggcaattttacccttatttcacatggttagaaatttaaagcaagatcatttacccaaggataggtgtttggtaatgttgaaggagttagtctggcttcatgttttacatcttcaactaaaatcccatactatctgcttggatttggagagccaaaaaataaagctgattgtcatgtgattaaatatctgatcaacaggtatgaatataacttaaatcagcatatttttgccatggtaataaattgtcctataaactatttatatatttttgttcttcataattatcactaataagcatcagtttgttgtttttaaaaggatatttaagtgagcattttctagttcatatgaaaataaccatagtacaggatgatttctgtccacacaaaggttaaattagattgcacagttaattttcacttatatttatggtactattatgtgggtgatgcctttttcttttaagcccagtacatatattatgcctgcctaagttctgaactggggctgtatttcagtagttgtagaattattgatatttagttttgatagctaatgtttaattgtttggatctgcacagtttggtttttgcacaaaagtcatttaaaaaaatctgagtaattgtcaaatattaaaagaaagatattcttcctgtaaggaatacagtttttagtcaaagtggccattacatcctctttttaatttacataatacagatacttgagaaagttgttgtggtgttgtatgccaagaaaattctttttattggtgcctatattgtaacaattatttttaatgcattgtattttgaagtaacggttcagttaaatttttcacctgctgtgtaactgaaacacaattacagtttataatcatctgtagaagtctggagataattttgcaactcatgttatgggttaaatgaatatttttgtaaaagtaaaagcaacaaatttataaattgattatttgaaactttacaacacaattgcatcccaaatacaaattgtattgcttattcattatagctattcgtcctgtaatctgtttctaggtgaagcatactccagtgttttaggggttttgaaaataaatatttaaatttcacagtc

SEQ ID NO: 2346 - DNA, 2910 bp, Homo sapiens
  source 1..2910: mol_type = genomic DNA
aggttgttaccatggagatggctaacagctagagcaggctgtcctcggagggagacattccatctccagacacccagagacgctccagaatggaggtcctgagggagaaggtggaggaggaggaggaggccgagcgggaggaggcggccgagtgggctgaatgggcgaggatggagaaaatgatgaggccagttgaggtgcggaaggaggaaatcaccttaaagcaggagacgctcagagacctggagaagaagctgtcagagatccagatcactgtctcagcggagctcccggcctttaccaaggacactattgacatctccaagctgcccatttcctacaaaaccaacacacccaaggaggaacacctgctgcaggtggcagacaacttctcccgccagtacagccatctgtgcccggaccgcgtgcccctcttcctgcaccccctgaacgagtgtgaagtgcccaagttcgtgagcacaaccctccggcccacactgatgccctaccccgagctctacaactgggacagctgtgcccagtttgtctccgacttcctcaccatggtgcccctgcctgaccctctcaagccgccctcgcacctgtactcctcgaccactgtgctcaagtaccagaaggggaactgctttgacttcagtacgctgctctgctccatgcttatcggctctggctatgatgcttactgcgtcaacggctacggctcgctggacctgtgccacatggacctgacgcgggaggtgtgcccactcactgtgaagcccaaggagaccatcaagaaggaggaaaaggtgctgcctaagaagtataccatcaaaccccccagggacctgtgcagcaggtttgagcaggagcaagaggtgaagaagcagcaggagatcagagcccaggagaagaagcggctgagggaggaggaggagcgcctcatggaagcggagaaggcaaagccggatgccctgcacggcctgcgggtgcactcctgggtccttgtgctatcggggaagcgcgaggtgcctgagaacttcttcatcgacccattcacaggacatagctacagcacccaggatgagcacttcctgggcatcgaaagcctgtggaaccacaagaactactggatcaacatgcaggattgctggaactgctgcaaggacttgatctttgacctgggtgaccctgtgagatgggagtacatgctcctggggactgataagtctcagctgtccttgactgaagaagacgacagtgggataaacgatgaggatgatgtggaaaatctgggcaaggaggatgaggataagagcttcgacatgccccactcgtgggtggagcagattgagatctccccggaagcatttgagacccgctgcccgaacgggaagaaggtgattcagtacaagagggcaaagctggagaagtgggccccgtacctcaatagcaatggccttgtgagccgcctcaccacctatgaggacttgcagtgtaccaatattttggagataaaggagtggtaccagaaccgggaagacatgctggagctgaaacacataaacaagaccacagacctgaagacagactacttcaagcctggccacccccaggctctgcgcgtgcactcgtacaagtccatgcaacctgagatggaccgtgtcattgagttttatgaaacggcccgtgtggatggcctgatgaagcgggaggagacacccaggacaatgacagagtactatcaaggacgcccagacttcctctcctaccgccatgccagcttcggaccccgagtcaagaagctcactctgagcagtgcagagtcaaacccccggcccattgtgaaaatcacagagcggttcttccgcaacccagcgaagcccgcggaggaggacgtggcagagcgcgtgtttctggtcgcggaggagcgcatccagctgcgctaccactgccgtgaggaccacatcacggcctccaagcgcgagttcctgcggcgcaccgaggtggacagcaaaggcaacaagatcatcatgacgcccgacatgtgcatcagcttcgaggtggagcccatggagcacaccaagaagctgctctaccagtacgaggccatgatgcacctgaagagggaggagaagctgtccagacatcaggtctgggagtcagagctggaggtgctggagattctgaagcttcgagaggaagaggaggcggcgcacacactgaccatctccatctatgacaccaagcggaatgagaagagcaaggaatatcgggaggccatggagcgcatgatgcacgaagagcacctgcggcaggtggagacccagctggactacctggccccattcctggcccagctcccgccaggagagaaactaacatgctggcaggcggtgcgcctcaaggatgagtgcctcagcgacttcaagcagcggctcatcaacaaggccaacctcatccaggcccgctttgagaaggagacccaggagctgcaaaagaagcagcagtggtaccaggagaaccaggtgacgctgacacccgaggatgaagacctgtacctgagttactgctctcaggccatgttccgcatccgcatcctggagcagcgcctcaatcgacacaaggaactggccccactgaagtacctggctctggaggaaaagctctacaaggacccacgcctgggggagctccagaaaatattcgcttgatgtccctcctggggcctcagccagagctgccagagaaaggaaacctcttcccgcagcctggctcctgtgttccctctatccagccaatgcctgtttacacagacacctggcctcactgccagcccacctcccctacagccctgtttgttcctgcttctcatgattttcctgtaaataaacacactcttaatttgcc

SEQ ID NO: 2347 - DNA, 7356 bp, Homo sapiens
  source 1..7356: mol_type = genomic DNA
gttttgatgaacacctggctttattcttgcaatgaagaaaggttctcaacaaaaaatattctccaaagcaaagataccatcatcatctcactctcctatcccatcatctatgtccaatatgagatctaggtcactttcacctttgattggatcagagactctaccttttcattctggaggacagtggtgtgagcaagttgagattgcagatgaaaacaatatgcttttggactatcaagaccataaaggagctgattcacatgcaggagttagatatattacagaggccctcattaaaaaacttactaaacaggataatttggctttgataaaatctctgaacctttcactttctaaagacggtggcaagaaatttaagtatattgagaatttggaaaaatgtgttaaacttgaagtactgaatctcagctataatctaatagggaagattgaaaagttggacaagctgttaaaattacgtgaactcaacttatcatataacaaaatcagcaaaattgaaggcatagaaaatatgtgtaatctgcaaaagcttaaccttgcaggaaatgaaattgagcatattccagtatggttagggaagaagttaaaatctttgcgagtcctcaatttgaaaggcaacaagatatcatcgctccaagatataagcaagttgaaaccgcttcaagatttgatttctctgatcctagttgaaaatccagttgtgacccttcctcattacctccagtttaccattttccacctccgttcattggaaagtttggaaggtcagccagtaaccactcaggatagacaggaggcttttgagagattcagtttagaagaggtagaaagactggaaagagacctagaaaaaaagatgatagaaactgaagagcttaagagcaaacaaacaaggttccttgaggaaattaaaaatcaagataaattgaataaatcattaaaagaggaggccatgttacagaaacagagctgtgaggaactcaagagtgacttaaacacaaaaaatgaattgctaaaacagaagaccatagaattaacacgagcatgtcagaagcaatatgagctggaacaggaattggccttttataaaattgatgctaaatttgagccactaaattattatccatcagagtatgctgaaattgataaagccccagatgaaagcccttacattggcaaatccagatacaagagaaatatgtttgccacagagagttatattattgacagtgctcaggcagtacagatcaagaagatggagccagatgaacaacttagaaatgatcacatgaacttgagaggccacacaccactggacacgcaactggaagacaaagaaaaaaaaataagtgcagcacaaactcgactatcagaactgcatgatgaaatagaaaaggcagaacaacaaattttgagagctactgaagaatttaaacaactggaagaagctatacaactaaaaaagatttcagaagcagggaaagaccttctttacaagcagttgagtggtagactacaacttgtaaataaattacgccaggaagctctggatctagaactgcagatggaaaagcaaaagcaggaaattgccggaaagcagaaggagattaaggacctgcaaatagccatagatagcctggattccaaagacccaaaacattcccatatgaaggctcaaaagagcggtaaagaacaacagcttgacattatgaacaagcagtaccaacaacttgaaagtcgtttggatgagatactttctagaattgctaaggaaacggaagagattaaggaccttgaagaacagcttactgaaggccagatagcagcaaatgaagccctgaagaaggatttagaaggtgttatcagtgggttgcaagaatacctggggaccattaaaggccaggcaactcaggcccagaatgagtgcaggaagctgcgggatgagaaagagacattgttgcagagattgacagaagtcgagcaggagagagaccagctggaaatagttgccatggatgcagaaaatatgaggaaggagcttgcagagctagaaagtgccctccaagagcagcatgaggtgaatgcatctttgcagcagacccagggagatctcagtgcctatgaagctgagctagaggctcggctaaacctaagggatgctgaagccaaccagctcaaggaagagttggaaaaagtaacaagacttacccagttagaacaatcagcccttcaagcagaacttgagaaggaaaggcaagccctcaagaatgcccttggaaaagcccagttctcagaagaaaaggagcaagagaacagtgagctccatgcaaaacttaaacacttgcaggatgacaataatctgttaaaacagcaacttaaagatttccagaatcaccttaaccatgtggttgatggtttggttcgtccagaagaagtggcagctcgtgtggatgagctaagaagaaaactgaaattaggaactggggaaatgaacatccatagtccttcagatgtcttagggaaaagtcttgctgatttacagaaacaattcagtgaaattcttgcacgctccaagtgggaaagagatgaagcacaagttagagagagaaaactccaagaagaaatggctctgcagcaagagaaactggcaactggacaagaagagttcaggcaggcctgtgagagagccctggaagcaagaatgaattttgataagaggcaacatgaagcaagaatccagcaaatggagaatgaaattcactatttgcaagaaaatctaaaaagtatggaggaaatccaaggccttacagatctccaacttcaggaagctgatgaagagaaggagagaattctggcccaactccgagagttagagaaaaagaagaaacttgaagatgccaaatctcaggagcaagtttttggtttagataaagaactgaagaaactaaagaaagccgtggccacctctgataagctagccacagctgagctcaccattgccaaagaccagctgaagtcccttcatggaactgttatgaaaattaaccaggagcgagcagaggagttgcaggaagcagagaggttcagcagaaaggcagcacaagcagccagagatctcacccgagcagaagctgagatcgaactcctgcagaatctcctcaggcagaagggggagcagtttcgacttgagatggagaaaacaggtgtaggtactggagcaaactcacaggtcctagaaattgagaaactgaatgagacaatggaacgacaaaggacagagattgcaaggctgcagaatgtactagacctcactggaagtgacaacaaaggaggctttgaaaatgttttagaagaaattgctgaacttcgacgtgaagtttcttatcagaatgattacataagcagcatggcagatcctttcaaaagacgaggctattggtactttatgccaccaccaccatcatcaaaagtttccagccatagttcccaggccaccaaggactctggtgttggccttaagtactcagcctcaactcctgttagaaaaccacgccctgggcagcaggatgggaaggaaggcagtcaacctccccctgcctcaggatactgggtttattctcccatcaggagtgggttacataaactgtttccaagtagagatgcagacagtggaggagatagtcaggaagagagtgagctggatgaccaagaagaacccccatttgtgcctcctcctggatacatgatgtatactgtgcttcctgatggttctcctgtaccccagggcatggccctgtatgcaccacctcctcccttgccaaacaatagccgacctctcacccctggcactgttgtttatggcccacctcctgctggggcccccatggtgtatgggcctccaccccccaacttctccatccccttcatccctatgggtgtgctgcattgcaacgtccctgaacaccataacttagagaatgaagtttctagattagaagacataatgcagcatttaaaatcaaagaagcgggaagaaaggtggatgagagcatccaagcggcagtcggagaaagaaatggaagaactgcatcataatattgatgatcttttgcaagagaagaaaagcttagagtgtgaagtagaagaattacatagaactgtccagaaacgtcaacagcaaaaggacttcattgatggaaatgttgagagtcttatgactgaactagaaatagaaaaatcactcaaacatcatgaagatattgtagatgaaattgagtgcattgagaagactcttctgaaacgtcgctcagagctcagggaagctgaccgactcctggcagaggctgagagtgaactttcatgcactaaagaaaagacaaaaaatgctgttgaaaagttcactgatgccaagagaagtttattgcaaactgagtcagatgctgaggaattagaaaggagagctcaggaaactgctgttaacctcgtcaaagctgatcagcagctaagatcgctccaggctgatgcaaaggatttggagcagcacaaaatcaagcaagaagaaatcttgaaagaaataaacaaaattgtagcagcaaaagactcagacttccaatgtttaagcaagaagaaggaaaaactgacagaagagcttcagaaactacagaaagacatagagatggcagaacgcaatgaggatcaccacctgcaggtccttaaagaatctgaggtgcttcttcaggccaaaagagccgagctggaaaagctgaaaagccaggtgacaagtcagcagcaggagatggctgtcttggacaggcagttagggcataaaaaggaggagctgcatctactccaaggaagcatggtccaggcaaaagctgacctccaggaagctctgagactgggagagactgaagtaactgagaagtgcaatcacattagggaagtaaaatctcttctggaagaactgagttttcagaaaggagaactaaatgttcagattagtgaaagaaaaactcaacttacacttataaagcaggaaattgaaaaagaggaagaaaatcttcaggttgttttaaggcagatgtctaaacataaaaccgaactaaagaatattctggacatgttgcaacttgaaaaccatgagctacaaggtttgaagctacaacatgaccaaagggtatctgaattagagaagactcaggtggcagtgctagaggagaaactggagttagagaatttgcagcagatatcccagcagcagaaaggggaaatagagtggcagaagcagctccttgagagggataaacgagaaatagaacgaatgactgctgagtcccgagctttacaatcgtgtgttgagtgtttgagcaaagaaaaggaagatctccaagagaaatgtgacatttgggaaaaaaagttggcacaaaccaaaagggttttagcagcagcagaagaaaatagcaaaatggagcaatcaaacttagaaaagttggaattgaatgtcagaaaactgcagcaggaactagaccaactaaacagagacaagttgtcactgcataacgacatttcagcaatgcaacagcagctccaagaaaaacgagaagcagtaaactcactgcaggaggaactagctaatgtccaagaccatttgaacctagcaaaacaggacctgcttcacaccaccaagcatcaggatgtgttgctcagtgagcagacccgactccagaaggacatcagtgaatgggcaaataggtttgaagactgtcagaaagaagaggagacaaaacaacaacaacttcaagtgcttcagaatgagattgaagaaaacaagctcaaactagtccaacaagaaatgatgtttcagagactccagaaagagagagaaagtgaaaaaagcaaactggaccaagtgctctcaaaggtgctggcagctgaagagcgtgttaggactctgcaggaagaggagaggtggtgtgagagcctggagaagacactctcccaaactaaacggcagctttcagaaagggagcagcaattggtggagaaatcaggtgagctgttggccctccagaaagaggcagattctatgagggcagacttcagccttctgcggaaccagttcttgacagaaagaaagaaagctgagaagcaggtggccagcctgaaggaagcacttaagatccagcggagccagctggagaaaaaccttcttgagcaaaaacaggagaacagctgcatacaaaaggaaatggcaacaattgaactggtagcccaggacaaccatgagcgggccaggcgcctgatgaaggagctcaaccagatgcagtatgagtacacggagctcaagaaacagatggcaaaccaaaaagatttggagagaagacaaatggaaatcagtgatgcaatgaggacacttaaatctgaggtgaaggatgaaatcagaaccagcttgaagaatcttaatcagtttcttccagaactaccagcagatctagaagctattttggaaagaaacgaaaacctagaaggagaattggaaagcttgaaagagaaccttccatttaccatgaatgagggaccttttgaagaaaaactgaacttttcccaagttcacataatggatgaacactggcgtggagaagcactccgggagaaactgcgtcaccgggaagaccgactcaaggcccaactccgacactgtatgtccaagcaagcagaagtattaattaaaggaaagcggcagacagagggcactttacacagtttgaggagacaagtagatgctttaggggaattggtcaccagcacctctgcagattcagcgtcatcacccagtctgtctcagctggagtcttccctcacagaggactctcaacttggacaaaatcaggaaaagaatgcctcagccagatgaggaatactgtcttgtgtaaatatattcaaggaaaacacctccactacctcactgacttcataattggaatgtcacatggtttttttaatcaagatgcagtgaactgagattctgaaactccactgtagtttactttgcctgtaccattaatgccaatgtttttataaatcacttgtacatagtacatatgggaatagttgcatatgggaatttaaaccaacatgtggctgagcctttttttttttaatcttcgtaacatgtttaaaaaaaaacagtgattttaactgcatatttgaacctacaaactggtaaatcttattaacaaaaagaatgtacttaaggccctctttatttatagtgtcgagttatttttgaattttgcttaaaatctatttttcatatgaaaataaaagataacaatc

SEQ ID NO: 2348 - DNA, 3859 bp, Homo sapiens
  source 1..3859: mol_type = genomic DNA
gaaggcagcggcaggtcgggagcaagatggcgctgcggccaggagctggttctggtggcggcggggccgcgggagctggcgcggggtccgccgggggaggcggcttcatgtttcctgttgcaggtgggataagaccccctcaagcaggcctgatgccgatgcagcaacaaggatttcctatggtctctgtcatgcagcctaatatgcaaggcattatgggaatgaattacagctctcagatgtcccaaggacctattgctatgcaggcaggaataccaatgggaccaatgccagcagcgggaatgccttacctaggacaagcacccttcctgggcatgcgtcctccaggcccacagtacactccagacatgcagaagcagtttgccgaagagcagcagaaacgatttgaacagcagcaaaaactcttagaagaagaaagaaaaagacgccagtttgaagagcagaagcaaaagctcagacttttgagcagtgtgaaacccaagacaggagagaagagtagagatgatgctttggaagccataaaaggaaatttagatgggttttccagagatgcaaaaatgcaccctactccagcatcgcaccccaagaaaccaggtgtgggagtatttccctcacaggatcctgctcagcccagaatgcctccttggatttacaatgagagtttggttccagatgcctataagaaaatcttagaaaccacaatgactccaactggaatagatactgccaaactgtatcccattctgatgtcatctgggcttcccagggaaactcttggacagatatgggccttagctaatcgaactacacctggcaaacttacaaaagaagaactttataccgttctagccatgatagcggtaacacagaggggcgttcctgcaatgagtcctgatgctttaaaccagttcccagcagctcctattccaactttaagtggcttttctatgactctgcctacaccggtgagtcagccaactgtgataccttcaggtcctgcgggctccatgcccctcagccttggacagccagtcatgggcattaaccttgttggaccagtgggtggagctgcagcccaggcttctagtggtttcataccaacctaccctgcaaatcaggtagtaaagccagaagaagatgacttccaggattttcaagatgcttctaagtcaggatcccttgatgactcattcagtgatttccaagagttgcctgcttcttcaaaaacaagtaactcccagcatggaaacagtgccccttctttgttgatgccacttcctggaactaaagcattgccttcaatggacaaatatgctgtgtttaaaggaattgcagctgacaagtcctctgaaaatactgttccacctggagatcctggtgataaatatagtgctttcagagaacttgaacagacagcagagaataaacctttaggagaaagctttgcagaattcagatctgcaggaactgatgatggtttcaccgattttaaaacagccgatagtgtatcaccactagagccaccaacaaaagacaaaacttttccaccatccttcccctcaggaactatacaacagaaacaacaaacacaagtgaaaaaccctctgaacttagcagacctagatatgttttcctcagttaattgcagcagcgagaaaccattgtctttttcagctgtgtttagcacatcaaaatcagtttctacaccacagtcaacaggttctgctgctactatgacagcattggcagcaacaaaaacttctagtttggctgatgattttggagaattcagcctttttggggaatattctggtctagcacctgttggggagcaggatgactttgcagattttatggctttcagtaatagctctatttcatctgagcaaaagccggatgacaaatatgatgcccttaaagaggaagccagtcctgttcctctaaccagcaacgtgggcagcacagtgaagggtggacaaaactcgactgctgcgtctaccaagtacgatgtcttcagacaactttctctggaagggtctggactaggtgttgaagacctgaaagataacactccttcaggaaaaagtgatgatgattttgctgacttccactccagtaaattttcttccataaactcggacaaatccctgggagagaaagcagtggctttcagacacaccaaagaagactctgcatcagtgaagtccttagatctcccttccattggtggcagcagtgttggcaaggaggactctgaagatgcactctctgttcagtttgacatgaaattggctgatgtgggaggagatcttaagcatgtcatgtctgatagctctttggatttaccaacagttagtggccagcatcctcctgctgcagatatagaggacttaaaatatgctgcttttggaagctacagtagcaattttgcagtgagcacacttacaagctatgactggtcagacagggatgatgcaactcagggcagaaaactctctccatttgtcctctcagcaggaagtggatccccctcagccacctcaattcttcaaaagaaagagacttcatttggcagttctgaaaacatcaccatgacatctctctccaaagtaacgacctttgtaagtgaagatgctcttccagagaccaccttcccagctcttgccagttttaaagacacgattcctcagaccagtgagcaaaaggaatatgaaaacagagactataaagatttcacaaaacaggacctgcctacggctgaacggagccaggaggccacgtgtcccagcccagcgtccagtggtgcctctcaagaaaccccgaacgaatgttcggatgactttggagagtttcaaagtgaaaagcccaaaatcagcaaatttgacttcttagtagccacttcacaaagcaaaatgaaatccagtgaagaaatgatcaaaagtgagctggcaacctttgacctttctgttcaaggatcacacaagaggagtttgagccttggtgataaagaaataagccgttcttctccttctccagctttggagcagcctttcagagaccgttccaatactctgaatgagaagcccgccctgcccgtcatccgagacaagtacaaagacctgacgggagaggtggaggaaaatgagagatatgcatatgaatggcagagatgcctggggagtgccctgaatgtcattaagaaggcaaatgataccttaaatggaatcagtagtagttctgtttgcacagaagtaattcagtcagctcaaggcatggaatatttattaggtgttgttgaagtgtacagggtaaccaagcgtgtggagctggggataaaagccactgcagtgtgcagtgagaaactccagcagttgctgaaggacatcgataaagtatggaataacctaatcggcttcatgtcactcgccacactcacatgctgctgggaaaagatgactgtgattacaaagcatctctctccttaccatgagctcttagaagaaaagccagatgaaaactcgctggatttttcctcctgtatgttacggcctgggattaaaaatgctcaggagcttgcctgtggagtgtgcctcttgaatgtggactcgaggagccggaaagaagagaagcctgcagaagaacatcctaaaaaagcattcaactcagaaacagacagtttcaagctggcctatggagggcaccagtatcacgccagctgtgccaacttctggatcaactgtgtcgaaccaaagcctcctggcctcgtcctgcctgacctgctctgaacaactcctctgtgaagcattgacttttttttttctgtgacaccccacggggt

SEQ ID NO: 2349 - DNA, 1377 bp, Homo sapiens
  source 1..1377: mol_type = genomic DNA
ggtgtttgacccggaagtggctgtgttcagctgacagctgctgataaggtggcggcggcgaaggcagcggcaggtcgggagcaagatggcgctgcggccaggagctggttctggtggcggcggggccgcgggagctggcgcggggtccgccgggggaggcggcttcatgtttcctgttgcaggtgggataagaccccctcaagcaggcctgatgccgatgcagcaacaaggatttcctatggtctctgtcatgcagcctaatatgcaaggcattatgggaatgaattacagctctcagatgtcccaaggacctattgctatgcaggcaggaataccaatgggaccaatgccagcagcgggaatgccttacctaggacaagcacccttcctgggcatgcgtcctccaggcccacagtacactccagacatgcagaagcagtttgccgaagagcagcagaaacgatttgaacagcagcaaaaactcttagaagaagaaagaaaaagacgccagtttgaagagcagaagcaaaagctcagacttttgagcagtgtgaaacccaagacaggagagaagagtagagatgatgctttggaagccataaaaggaaatttagatgggttttccagagatgcaaaaatgcaccctactccagcatcgcaccccaagaaaccagattgccccacatcatctcattctactaaaactgtctccccatcacctgcctttcttgatgaagaagaattcagtgactttatgcaggggcctgttgaagttcccccatgtgggccttcttccacgtcccagccctttcagtctttccacccctccaccccacttggccagttgcatacacagaaggctgggacacagcctctccctccaagtcagagtccagtgccttttgccttacatggcgtccctgggcaaattccttacttctctactgcttcagcctcacacagtgtaccagaagcaggcccttccttggaggagaagttcctagtatcttgtgatataagtacatctgggcaggaacaaattaaattaaatacttctgaagttggccacaaagccctaggcccaggttccagtaagaagtatcccagtttaatggccagtaacggggttgctgtagatggatgtgtgtgggagtatttccctcacaggatcctgctcagcccagaatgcctccttggatttacaatgagagtttggttccagatgcctataagaaaatcttagaaaccacaatgactccaactggaatagatactgccaaactgtatcccattctgatgtcatctgggcttcccagggaaactcttggacagatatgggccttagctaatcgaactacacctggcaaacttacaaaa

SEQ ID NO: 2350 - DNA, 2181 bp, Homo sapiens
  source 1..2181: mol_type = genomic DNA
cagataccgccgccgccgccattttggaagcgggcacgtcgcccacggcgacgcgaccggtagctacgggaccacggccctaaggagggcggaagtcgtcgctccgtggagcctcctcctctcgcgagaggcgcaaggcgtggagtcgacggctggagagaagccgggagcgagcccaggcggcagtcttgattcccttttggccagcagtttttaggtctgtcagtactgcactgcaagaatggcagattttgggatctctgctggccagtttgtggcagtggtctgggataagtcatccccagtggaggctctgaaaggtctggtggataagcttcaagcgttaaccggcaatgagggccgcgtgtctgtggaaaacatcaagcagctgttgcaatctgcccacaaagaatccagctttgacattattttgtcaggtttagtcccaggaagcaccactctgcacagtgctgagattttggctgaaatcgcccggatccttcggcctggtggatgtctttttctgaaggagccagtagagacagctgtagataacaatagcaaagtgaagacagcatctaagctgtgttcagccctgactctttctggtcttgtggaagtgaaagagctgcagcgggagcccctaacccctgaggaagtacagtctgttcgagaacaccttggtcatgaaagtgacaacctgctgtttgttcagatcacaggcaaaaaaccaaactttgaagtgggttcttctaggcagcttaagctttccatcaccaagaagtcttctccttcagtgaaacctgctgtggaccctgctgctgccaagctgtggaccctctcagccaacgatatggaggacgacagcatggatctcattgactcagatgagctgctggatccagaagatttgaagaagccagatccagcttccctgcgggctgcttcttgtggggaagggaaaaagaggaaggcctgtaagaactgcacctgtggccttgccgaagaactggaaaaagagaagtcaagggaacagatgagctcccaacccaagtcagcttgtggaaactgctacctgggcgatgccttccgctgtgccagctgcccctaccttgggatgccagccttcaaacctggggaaaaggtgcttctgagtgatagcaatcttcatgatgcctaggaggttcctgacatgggacccatctgctcctccagccaactcctgtccctcacatcccaccatggtggctcctcccacctcctctggatttgttcactctgagatctgtttgcagagtgggtgcttagcagacagagtgaagctggctggggggcacagtggtgtgtagtgctgctgtgtatcaaaagaccaaggtattatgggacctggtttcagaatgggatgggtttcttcacctcatgttaagagaagggagtgtgtcctgaagaagcccttcttctgatgttaaaatgctgaccagaacgctcttgagcccaggcatcgttgagcattaacactctgtgacagagctgcagacccctgccttgagtctcatctcagcaatgctgccaccctcttgtctttcagagttgttagtttactccattctttgtgacacgagtcaagtggctcacaacctcctcagggcaccagaggactcactcactggttgctgtgatgatatccagtgtccctctgcccccttccatccccaaccacatttgactgtagcattgcatctgtgtcctgttgtcatttatgttaaccttcaggtattaaacttgctgcatatcttgacatatcttgagattctgcatgtcttgtaaagagaggggatgtgcatttgtgtgtgatgttggatagtcatccacgctcagtttggaccattggaggaacttagtgtcacgcacaaatggggctattcctacgcttagaatagggcttgtctgcccactttagaagagtccaggttggtgagcatttagagggaagcagggcagaactctgaacgacaatacgtctctctgagcagagacccctttgttcttgttatccacccatatggacttggaatcaatcttgccaaatatttggagagattgtgtggatttaagagacctggatttttatattttaccagtaaataaaagttttcattgatatctgtccttgaaacttga

SEQ ID NO: 2351 - DNA, 1316 bp, Homo sapiens
  source 1..1316: mol_type = genomic DNA
tagataggggttttcatttaggccttgcgacatggctgttacatgaccttggttggtctgtttccctaacctctttgtgcctcatttgtcttacctactaaataggctaatagtactacctcgcagcatgaagatgattttaataagatgaatgagagtaacgactcgacaaactatgacatggctccttactatgaagccttgtgcaaatccctcgactggcagatagacgtggacctactcaataaaatgaagaaggcaaatgaagatgagttgaagcgtttggatgaggagctggaagatgcagagaagaatctaggagagagcgaaattcgcgatgcaatgatggcaaaggccgagtacctctgccggataggtgacaaagagggagctctgacagcctttcgcaagacatatgacaaaactgtggccctgggtcaccgattggatattgtattctatctccttaggattggcttattttatatggataatgatctcatcacacgaaacacagaaaaggccaaaagcttaatagaagaaggaggagactgggacaggagaaaccgcctaaaagtgtatcagggtctttattgtgtggctattcgtgatttcaaacaggcagctgaactcttccttgacactgtttcaacatttacatcctatgaactcatggattataaaacatttgtgacttatactgtctatgtcagtatgattgccttagaaagaccagatctcagggaaaaggtcattaaaggagcagagattcttgaagtgttgcacagtcttccagcagttcggcagtatctgttttcactctatgaatgccgttactctgttttcttccaatcattagcggttgtggaacaggaaatgaaaaaggactggctttttgcccctcattatcgatactatgtaagagaaatgagaattcatgcatacagtcagctgctggaatcatataggtcattaacccttggctatatggcagaagcgtttggtgttggtgtggaattcattgatcaggaactgtccaggtttattgctgccgggagactacactgcaaaatagataaagtgaatgaaatagtagaaaccaacagacctgatagcaagaactggcagtaccaagaaactatcaagaaaggagatctgctactaaacagagttcaaaaactttccagagtaattaatatgtaaagccatgtaactaacaaaggatttgctttagagataattatttggaatttttatagcttacttcacaatgtgcccaggtcagctgtataaaataaatactgcattgttgtttc

SEQ ID NO: 2352 - DNA, 2922 bp, Homo sapiens
  source 1..2922: mol_type = genomic DNA
ccacgccgccatggccaagtggggccaggggaacccccactggatcgtggaggagcgggaggacgggaccaacgtgaacaactggcgctggcgcggctggcggcggcctccttccgggatctggggagggccgggccgcgggagccggggctgccctggggtctgtgcggggccgcggggccagggggtcagggggccgccccccctcagctgctggacgcagggctcggccttcgcctctcggctcgggagagtccttgagtacggagaccggctaggagggttgcagctgcctctttttgaaagttgggttgggccccaagagtgacttccgacagacctttccactcccaccgtctgtggcctgagggccttcccttctcctcccgcccacccctctggatgtttcggggagttagaagggagctggattgagagactgtgttaggggcgggggtatggaacgtagtggaaagggcagaaatttggatctcagttcgcgcccaccccgcaggcgcctcccgcgagccgggccctctgtgagtgagacaagctccccttcctttacgcgcctcacctggcgcgtggggagaggtcggcagccctccgccgcagaacctccggaagggatgtcctctgccctgcgcctctggccggggctgtggtccctccaggccgtcgaggggatgctgaggccggtccccagaggagcatgacttggctggtccggaggagctctgagggcatgggcaatcttggctcgctgcaacctcagcttccagagttcaagcgagtctcctgcttcagcctcatgagtagctgggactacagatgcgtgccactacgtccgtctgatgtttgtatttttagtagagacagggtttcaccatgttggtcaggctgctctcgaactccagatctcgtgatccgcccgcctgggcctactaaagtgctgggattacaggcgtgagctagatctgactttctagtgtcctagccttggcccgatggacatgtcatttctctcagctcgtttctgtcccctaaagtgagaatattgcctgggaagattacattagacgatgtatatgcgaagacacttgatagctggtattgtcatgattctgattagttcactactgctactttccctgtggcctaggctttgcctatttccagtgggcgagctagctagatcctcctcccttaaataagccagtgtttttaagacagaatactacttgcatagtggacaataatatcttaaagaactgagcaggatgaaaagaatttgatagaaagcaggtttgaggagcacattggaggttggcaggtttcgaggctgcttgagaggacttgggccgatctgggctgggcttggacgtgaccctggcacccaggcaggtggatcccagctggggcttccattcacgactttctggtccctggcaggacagagcgggatgccaccagcttgtccaaagggaagttccaggagctcctggtgggcatcgttgtggagaatgacgctggccgcggcgagatcaacgagttgaagcaggtggaaggggaggcttcgtgcagcagccgcaaaggaaagctgattttcttctatgagtggaacatcaaactgggctggaaaggcatcgttaaagaatctggagtgaagcacaagggattgattgaaatacccaatctttctgaggaaaatgaagtagatgacactgagaatttacaacgggaatgattttaccaacgaaagctatggcaacccaggaattgactgtcaaaagaaaactgagtgggaataccctgcaggttcaggcctcatctccagtggcactgggtgtaaggattcccactgtggctcttcacatgatggaactgtttgacacaactgtagagcagctgtatagcatcttcactgtaaaggagttaacaaataagaagatcatcatgaaatggagatgtgggaactggccagaagaacactatgccatggttgcactgaattttgtgcctactctagggcaaacagaattacaattgaaggagttcctatctatctgtaaagaagagaacatgaaattctgttggcagaagcagcattttgaagaaataaaaggttcactgcagctgacccccctaaatggttgaattaaaatttattataaggcattactttttgtaagcggaaaaagtgtcacatttacctcttccctatcttttgtttaaaaggactgtctttattttatattggatgaaatctatgaacatatatacaatgtaaagcattgtttgactctttattataactagacactgcattgatttaaaagtagcaaacaacctgaaattaagtattaacctgaccttccatcgatattcctctggaaataggtaagtcctgagtgcagatagttgatgtttcccaagctgaagcttgtcctatagcaagcttgcttgcagctgtacttttagttcaagatgacaaaaaataaatggcatgttgacactattcctttattttactttagggtttttaaggtgtgtagatcttaggtcgtaaaacagtggtatattgcattcaaaagcatgttgaggtgagggcaaattggctgtgttttgctccacatctccctgcacatctccctgctgtggttttgcacttcggtgtggagaggattgagaagtctgtggggacacattagttctgtggactgctggtaacacttccagtgaaacagcatataatggataaatgtttcccccctctttcacggttttctcactactttcacctgagaagactgaagcaacgtatgtaaacaaatgaaaagtcatcacaatcagtttaattaagtgcacagaatagcaatcaatcaatcagtcatgtcaataaaaataaaacaattattttta

SEQ ID NO: 2353 - DNA, 6029 bp, Homo sapiens
  source 1..6029: mol_type = genomic DNA
agactgaggctggctggctggaggttgacacaggagtgctcaggggagcagcatcacaagagggcagatcgaaagcatcgtccttgctgaaaaagtgagcatgggcctggggtgtgccctggactggggagggagacggcaaacttctaagacctgcaatgagagttcaggcctttggcacaaactaagcagcttcgcctgctcaggctgggagggacagagagtgaggcacagggactctcaacttgggccaagctctgagcaaatgctataatgtcctcatggggcaatagatttgggggttctgggggtgggtcccttccaggcagaatccccaccatcctctctggtgtgaggggaccctggagctccggacctcaggccaggagcccagccctgggtctgcagtgaggggctgaccagacagagcttctcctgtcccagcagatggcagaggtggaagcggtacagctgaaggaggaaggaaaccggcatttccagctccaggactacaaggccgccacaaatagctacagccaggccctgaagctgaccaaggacaaggccctgctggccacgctttatcggaaccgggcagcctgtggcctgaaaacggagagctacgtccaggcagcttcagatgcctccagagccatcgacatcaactcctcggacatcaaggctctgtatcggcgatgccaggcactggagcacctggggaagctggaccaggccttcaaagacgtgcagcgttgtgccaccctcgagccacggaaccagaacttccaggagatgctgaggagactcaacaccagcattcaggagaagctccgagtgcagttctccacagactcgagggtacagaagatgtttgagatcctcttggatgaaaacagtgaggctgataagcgggaaaaggctgccaacaatctcattgtcctaggccgtgaggaagcaggggctgagaagatcttccagaacaatggagtagccttgctactgcagcttctggacactaagaagcctgagctggtgctggctgcagtgcggaccctgtcgggcatgtgcagcggccaccaagccagagccacagtgattctgcatgcagtgcggatagaccgaatctgtagcctcatggccgtggagaatgaggagatgtctctggctgtctgcaacctgctccaagccatcattgactccttgtctggggaggacaagcgggagcatcgagggaaggaggaggccctggttctagacaccaagaaggacctgaagcagatcaccagccacctgctggacatgctagtcagcaagaaggtgtctggccagggcagggatcaggcgctgaacctgctcaataagaatgttcccaggaaggaccttgccattcatgacaactcacgtaccatctatgtggtggataatggtctgaggaagatcctgaaggttgtggggcaggttccagatctgccatcctgcctgcccctgactgacaacacccgcatgctggcctctatcctcatcaacaagctctatgatgacctgcgctgtgacccggagcgcgatcacttccgcaagatctgtgaggaatatatcacgggcaagtttgacccccaggacatggacaagaacttgaatgccatccagacagtgtcagggatcctgcagggcccctttgacctgggcaaccagctgctgggactgaaaggtgtgatggagatgatggtggcactatgtggctcagagcgcgagacggaccagctggtggccgtggaggccctcatccatgcctccacgaagctcagccgcgccaccttcatcatcaccaatggagtgtcactgctcaaacagatctacaagaccaccaaaaatgagaagatcaagatccgcacactggtgggactctgtaagctcggctctgcaggtggcacagactacggtctcaggcagtttgcggaagggtcgacagaaaaactggccaaacagtgtcgcaagtggctgtgcaatatgtccatagacactcggacccgacgctgggcagtggagggcctggcctacctcacgctggacgctgatgtgaaggacgactttgtccaggacgtccctgccctgcaggccatgtttgagctggccaaggcaggtaccagtgacaagaccatcctgtactcggtggccaccaccctggtgaactgcaccaacagctacgatgtcaaggaggtcatcccagagcttgtccagctcgccaagttctccaagcagcatgtgcccgaggaacaccccaaggacaagaaggactttatagacatgcgggtgaagcggcttctgaaggcgggtgtcatctctgccctggcttgcatggtgaaagcagatagtgccatcctcactgaccagaccaaggagctgctggccagggtattcctggcactgtgtgacaacccaaaggaccgaggcaccattgtggctcaaggtggtggcaaggccctgattcccctggctttggagggcacagatgtgggcaaggtgaaggcagcccacgctctagcaaagatcgctgctgtctccaatccggacattgcttttcctggggagcgggtgtatgaggtggtgcggccccttgtaagactcttggacacacagagggatgggcttcagaactatgaggctctcctaggcctcaccaacctgtctgggcggagtgacaaactccggcagaagatctttaaggagagggccttgccagacatcgagaactacatgtttgagaatcatgatcagctgcggcaggcggccaccgagtgcatgtgcaacatggtgctccacaaggaggtacaggaaaggttcttggctgacgggaatgaccggctgaagctggtggtgctgctctgcggggaggatgatgataaggtgcagaatgcggctgcaggggctctggccatgctgacagcagcacacaagaaactgtgcctcaagatgactcaagtgacaacccagtggttggagatcctccagcggctttgcctgcacgaccagctgtctgtccaacaccggggcctggtcattgcctacaacctactggcagccgatgctgagctggccaagaagctggtggagagtgagctgctggagatcctgactgtggtgggcaaacaggagccagatgagaagaaggcagaagtggttcagacagcccgagaatgtctcatcaagtgcatggattatggtttcattaaaccagtgtcttagacagcgaccctcagggatgctgggagtggtcctgtactgtgcagagtcctgggttggttgggttctcctgaagagtcaggtcatctagggatcatagcagtgacaatgaagtctcaatataaaggaaagacttgattgttctctgagttgtgagtcttctcctttgtcctgacagagtttggatgtttcactctctctcttgcttcctgtctccttatatttgtcatgtttcagaaattcccagaataattttcacccatgattagaaataggttggatcattctttctgtacccattctgaaggccaggataataggttgaagttctttatattttggaaaatggattttgtggtaaggtaggaactaacgggtgtgtgcatataaaggttaatgctgttgtatttggatgctgatctgtgctgttttcatgacctctctcccacactatttgaatcagtctgttcagaactgtgtgtttcacctgcagtgctctgtcccagtcccatgcccattcccatcacttcactgtgatggaaatagagtttatgttcaacagtggggcatgacctctgcaatttgcttgggaaagtcttccaagcaagatggacatgatgaatacaaataagatctactcaaagtacttcaaacaaaaaataaataattcattggctcatgtatcttggccacccagggaaggtctgacattgttagttagatccagagtttcaaatgtcatcaccatggatgtgtctttttctctctctcatttcccctccccatatcttgtcttttatttattataggtttgtctcattccctggcaggctctctccctgtgataggaaagagagtccccagcagccccagggtgacatagttgttatagttcattatggaatagaagagagaagagcattctcaataacccggcaaagttcccagggatgactctgatatgtctatgtctcaggtcacatttccatctatgaaccaatcatattcagaggtggaatgctaattggccaggcctgggtcatatatacaagtctagggaagaaatgagcttcatccctgtccaattgacatggactgattaggggtattaatggaagaggtgtgccaccacaaaagaatgtaccctgggcagatcaaagaacatattctgtatgtcaggcttggccacaaaagaatgacacaagtaatatgctgtagatcagaacctctctgctaatattgcctttttagcatggttaagatagctaagatctagtactgtcactccagtatgtcccaattctacctacgtttattgaagggtcaacagttctgatctcagcattgggtaaagggtgggacattcagatttacggtccttgataaaaacaatttacaacgttccgttgtgtaataaatgtaagtgtacatatgcctgggacatcagctggaaaagggacagactatcagagagttgcactgttgcggtatgggccaaatccaacataatacccgctgtacctctagagaactaaaaccttaatttctcagatcttttctgcactaatggtctttacatacagcctacattttaactaactcttgcatgggcttgtttcacagcaggaaactatattcatcatatccttattatgatagagaatgacaacattcaaaagggtgtggtgcttctgaaaatatacacaataaatggcatgatttgacctctgtcaaattcttctttcctgctttcctcatatgtgggcttgagtgggtgtatttagctcctttaaaggaaactctttcacaggcagggccacactcttactcgttttgatctcatgaggttacatctgccagtggcgttcagggccagttagataaagttcatcttgtttggattggagagactttttttttttttttttttgagacagggtcttgctctgtaacctaggctcaagtgcagtgcagtggtgcagtcatggctcaccgcagccttggtctcctgggctcaagtgatctttctacttcagcctcctcaatagctgggactacaggcacacaccaccacccccaggtaattaaaaaatttttttttgtagagacagggtctcactatgttgcccagtctgggagaccacattctttaacatgaatattttgtaaatagtccaagaagatctagaggaaagctgaattccttcatctgatttttgccactgggctgcctcccattgtctggctaagtcttcatgggaggcctttaagaaaagctgtgacaaatacctttgtttcccactgcctaggttacataagtagttggcttttccagcctagactcttatattgttgcttgtaagagggcccttctttgcagatttcttttttttttcatctatgctttcaaataggcagatgctagcctgagatcatctctttattgaggtagtttgcccaaaaacagcaaggaacagccaatacctgccaactttctaggtttttccaaccaattctcttacagaaaatctataaatatcttagaggtatgtttcttagtttcccaacatataatgggaaaattcatcatttatattattacttttaactgaagtatgttgttatcagagaacttggtctgtgtcatattaatcctttgccatttgagaagcatacagttttaaagtttatatctccaaaaggatattttgtaaaaatttaacccctttgactcttagtcttctcatttgtgaaaggtaaataataaagaatttctgttcctagtaaga

SEQ ID NO: 2354 - DNA, 533 bp, Homo sapiens
  source 1..533: mol_type = genomic DNA
gtttcccgcactgccggtatccgccgccatccggactcccgggtcctctgtgcaggttggaggatggttggttgtggcgagcgaggctgaaggagccgggacgcggggctctgggcctcgggaactgagccggtactcacctccgccccttctccccgtcgctgtccgcagccatggccctacgctaccctatggccgtgggcctcaacaagggccacaaagtgaccaagaacgtgagcaagcccaggcacagccgacgccgcgggcgtctgaccaaacacaccaagttcgtgcgggacatgattcgggaggtgtgtggctttgccccgtacgagcggcgcgccatggagttactgaaggtctccaaggacaaacgggccctcaaatttatcaagaaaagggtggggacgcacatccgcgccaagaggaagcgggaggagctgagcaacgtactggccgccatgaggaaagctgctgccaagaaagactgagcccctcccctgccctctccctgaaataaagaacagcttgac

SEQ ID NO: 2355 - DNA, 2196 bp, Homo sapiens
  source 1..2196: mol_type = genomic DNA
ttcatggctctcgggtagaacctagtgaaacggccagaatgaattctatggacaggcacatccagcagaccaatgaccgactgcagtgcatcaagcagcacttacagaatcctgccaacttccacaatgccgccacggagctgctggactggtgcggagacccacgggccttccagcggcccttcgagcagagcctgatgggctgtttgacggtggtcagtcgggtggcagcccagcaaggctttgacctggacctcggctacagactgctggctgtgtgtgctgcaaaccgagacaagttcaccccgaagtctgccgccttgttgtcctcctggtgcgaagagctcggccgcctgctgctgctccgacatcagaagagccgccagagcgatccccctgggaaactccccatgcagccccctctcagctccatgagctccatgaaacccactctgtcgcacagtgatgggtcgttcccctatgactctgtcccttggctgccagcctaccctgcctgcactcctccaccatcacaatctcacccaaactcctgctcactcaagcaaaagcagcctctggccttccctccaccgctttgctccatctggcttaccactctccagggcctcctggggagcctgtcctgtgttcactttgtttcaggctggtctgtgccccgtgagccacatggcctagggtgatgccaggttgtcccgtcactggggtcccatctgtaaattctttgcgcccttcccggctgctgcctggggccctttcctgctctcccgtccgctgtgggtggtccccagctctcctctgtgggttttaccggaaaggtggccccagctgttgacttccagtcactgtcccagacggcacaaggttttctgtaggaaagctgccattgccccggccccttttcttcctttgtcccgttgtcgaggttttttcaaatagcgtgttgttcagtatgcaaatcaattattttaagaatcgcttttgtaaatatctttgtgaatattttagtatcgtctttgataatattcaacattttcatgacctggttatagcctttgctggtgtttttaaaatacctggactcaatgacaaagaccgagtcttctttttttttaaacaaaaacaaaaaaagcaaccagggctatttgtacagttgaaggggtgaacagaatgggcggctgtgctgggagttggaagaccgggcagcccgctatttagagccatccctcagtcagctggcagggacaagccaacgccaggtagcatgtggccacccttgcccagtgtctgtggcctggcaagtggccacgccctgtgtcagaccatctgggaattaagctccagacagacttacagatgccttccttaggagttcttgcttcttgcgttgatactttgccccagaaaggcctgggattcattctggttcttatcagggtgtgtccacactctgctcacaggtggatccacggctttccagtgcggagagtcgagatgctccctgcagcccaggccccgggcacctcctgcaaccatctctgggctcagcacctgaggcgggtttcctgggtcccctctccagcaagcctccaccagcaagctcggcccagagcttcccttccggctggctctgaaccgtgcgtggtgcctacagcctgcagtctggagacaagctcttccggagtgctctgggagccaggccagggtgtgagggaggtgcagaggcatccggggcgggagcaagccccaggttgtgacaggtgcaggtagacaacgcccataaacagagatggtcctgaactctggagagatccttccctgatcctttcggacgactacttggagccataagtaacctcagcaaaaacgaggcctctgcaagccacttttccatgccaagcatccacccggcccacaggcatgtttctgccgccactccgcaagatggacagggagccagcaggcaggcgggaagggccaagtacaggcaatcacccccatcttcttggtttgaagctttatccatgtatcatgttccgtgtagccattttattttttaagaaactgctaatactttctccctaatggaagccctgatcccccagagagctacaggtctgctcccgacgggcctcgggcctgacccgtccacacagggccgtgtcaacagcagcgact

SEQ ID NO: 2356 - DNA, 529 bp, Homo sapiens
  source 1..529: mol_type = genomic DNA
gttgtctgcaggtatggatgttgttctcttttccctgtctttatttccttaccaatcggctgccatccgaggagctgaggaagcctagagctctcagaagcagtcctttgagctggtgtaggggcactcagaatggtccagcgtttgacataccgacgtaggctttcctacaatacagcctctaacaaaactaggctgtcccgaacccctggtaatagaattgtttacctttataccaagaaggttgggaaagcaccaaaatctgcatgtggtgtgtgcccaggcagacttcgaggggttcgtgctgtaagacctaaagttcttatgagattgtccaaaacaaagaaacatgtcagcagggcctatggtggttccatgtgtgctaaatgtgttcgtgacaggatcaagcgtgctttccttatcgaggagcagaaaatcgttgtgaaagtgttgaaggcacaagcacagagtcagaaagctaaataaaaaaatgaaacttttttgagtaataaaaatgaaaagacgctgt

SEQ ID NO: 2357 - DNA, 441 bp, Homo sapiens
  source 1..441: mol_type = genomic DNA
cttttttcttcctcttccggggacgttgtctgcaggcactcagaatggtccagcgtttgacataccgacgtaggctttcctacaatacagcctctaacaaaactaggctgtcccgaacccctggtaatagaattgtttacctttataccaagaaggttgggaaagcaccaaaatctgcatgtggtgtgtgcccaggcagacttcgaggggttcgtgctgtaagacctaaagttcttatgagattgtccaaaacaaagaaacatgtcagcagggcctatggtggttccatgtgtgctaaatgtgttcgtgacaggatcaagcgtgctttccttatcgaggagcagaaaatcgttgtgaaagtgttgaaggcacaagcacagagtcagaaagctaaataaaaaaatgaaacttttttgagtaataaaaatgaaaagacgctgt

SEQ ID NO: 2358 - DNA, 853 bp, Homo sapiens
  source 1..853: mol_type = genomic DNA
ccgaggagctgaggaagcctagagctctcagaagcagtcctttgagctggtgtaggggcactcagaatggtccagcgtttgacataccgacgtaggctttcctacaatacagcctctaacaaaactaggctgtcccgaacccctggtaatagaattgtttacctttataccaagaaggttgggaaagcaccaaaatctgcatgtggtgtgtgcccaggcagacttcgaggggttcgtgctgtaagacctaaagttcttatgagattgtccaaaacaaagaaacatgtcagcagggcctatggtggttccatgtgtgctaaatgtgttcgtgacaggatcaagcgtgctttccttatcgaggagcagaaaatcgttgtgaaagtgttgaaggcacaagcacagagtcagaaagctaaataaaaaaatgaaacttttttgagtaataaaaatgaaaagacgctgtccaatagaaaaagttggtgtgctggagctacctcacctcagcttgagagagccagttgtgtgcatctctttccagttttgcatccagtgacgtctgcttggcatcttgagattgttatggtgagagtatttacacctcagcaaatgctgcaaaatcctgttttcccccagagagctggaggttaaatactaccagcacatccctagatactactcaagttacagtatatgatcactaatatagtatgctcttggtaccaggagctctgatatatatctggtacatgtttgataatgacttgattgttattataagtacttattaatacttcgattctgtaaagagtttagggtttgattttataaaatccaaaatgagccttttattgaa

SEQ ID NO: 2359 - DNA, 4049 bp, Homo sapiens
  source 1..4049: mol_type = genomic DNA
atgaaagccataaagaaaagtcttacagaagaagaatacctgtacctggacttttctcaccaaacagaaggatgcatctttcctcttcatacatctgtaactttatttctgttatcttactgtgactgtaaaatctttaaaatttgcttagttgtcaccaaagaggtgagtagagatagttcactactaagagatgacctgatccaggatgttgaaatacagattatttcaaggcaggagctcccaccaatagtccaaaattgctgtttgcctgcagtagtagaacgatcagacaatttttgtagagcaggacttgctgttgtattgagacacataatccagaaatcctatgaagcagaccccttaaagaaggaacttttggaacttctgggctttaaaaagacttgcttgaaagcctgtgctgaagttagtcagtggaccaggctatgtgaactcaccatccctttggctattgagaattttctcagagaatcttctgaccagcccccaactatacctgtagaaatactacagctagagaaaaagcttagtgagcctgttagagtgcataatgatgataaactccgcaggcagaagctcaagcaacagaaggctgatggagttgggcctccccttactaagggaaaggcaaagagcaaggtccacacacaggaaacatctgaagggttggattcttcatccaagagtctggaactgaaagtggcattctcaaagctcacagtacaggaagaaccagctactaccaacagagagccttctcacatcagaaaagcaaaagcctccgaccttccacctctggagcatgtgtttgcagaagggctttacttcactctggcagatattgtgctcttgccctgtatccatcatttcttggtaattatcagcaggaaattttctgagaagctggtagaatttccattgctagcctcttggtaccagaggattcaggaagtgccaggagtaaaaacagcagcttctaagtgtgggatccaatttctccatttaccaaagttgttgacaacctcaactgaacagcatccaaacttatgtgaagtcccaggtgtagaagagcaaagcgatcctttatttataggaggaccaagaccaaccatggccaagttaatggaaaagggcattgaagtgatgttttctccccacccttgccctacttggactcttgattggaatgttctccctgcagcagtcagcccaaaggaaggtaaaatgtccagtgatcgagctttgaggaagcagcaacagttgaacaaccttgtctatgtggtaacaaatcaggccaaacctggtgacagaattgtggatttctgcagcggtgggggccatgttggaattgtccttgctcacatgctgccatcatgtcaggttacattaatagaaaacaaggaattatcattaattcgtgctaagaagagaagtgatgaactgggtttaagcaacatttggttcattcaagcaaatatggaatattttactgggatgtttaatattggagtagcattgcatgcttgtggagtggcaacagacatggtgattgagcactgtatcaaaacacgggcttccttcgtcacatgcccttgctgttatggtttcattcagaacacctcaaagttcaattttccaaaaagtgaacaattcaagaaaactttatcatacaaggaacacatgattctgtgcagatttgcagaccagacagctgtccagctcccaccccaacgaaggctcataggaaaacagtgcatgtgcttggtggatctggatcgagcaagagctgcagaagaatgtggatactccgttcaagtgatatccatggagccagagagctgctctcccaaaaataacatgattgtgggagtccccatttaaaatgagatattcacatttgatattttgccatccgtcttcacgttggatgcccagtggcattcaggaggttcttggcataactaggaaacagcattagccatcttgaacctattgtgctcaggaaggaaagcaacagggaaatcttggaagtaaaggctccctgcaaagcatcacaaatgctttacaatgtgtgattaaaggactgctggtttttatagtgagaatcccctgaagtctcagctgccaaaagaataatactagtggaggttccatcacaggaataacaatttccttctcacttcacaagctcctctgatcttgccaatgtgatgtttaattcaaaacagcgcacttacagcctttattttatacttatttagatattcacatgggaactgaaagtagactcagtggagttttttgttttttatatttttaacaattgtactttttctatcactttaaaaaaatctagtcaggtaattatagtacagttatttttaagctggggttagttgaacttgtatagcatttaatatactccttttaaatatatttctgccaggcatggtggctcatgcctataatcccagcactttgagaggccaaggtgggaggatcatttgagcccaggatatcgagaccagcctgcactacaaaaaaatccaaaaaatgaggtgggaggatcacttgagcccaggaagtcaaggctgcagtgagccttgatagcgccactgcactcctgcctgggaaaatgagacccagactcaaaataaatcaatgaatgaattaataaacaaataaataaataaataaatttcccataaattaccaaatgagattgtcactggttcaaattattaaataattgccataaatttcctattacgggaatgtggaatttggacatacattttaacaataagtacattgattaatacatttaagtttataagtaattattgaggatccagtattttcaagaccttggcctagtttcttttcaattcaaagatgagttgcaaaagacataatgttttgcctatggaagtagatcatctagaagaaaaagattaaagaattagttaagcttttttttttttttttttttgagacagagtttcactcttgttgcccaggctggaattcagtggctcgatcttggctcaccacaacctctgcattctcctgcctcagcctcccgagtagctaggattataggcacctgccaccatgcccggctaattttgtttgtaattttagtagagatggggtttctccatgttggccaggctggtttcgaactcctgacctcaggtgatctacccgcctcagcctcccaaagtgctgaaattacaggcgtgagccacctcacctggccatgttctttatggaatactacaatgtgttgtcacaggatttgttattcagatgtcaatcatttttatttatatatttctgggtaaaacttattagtggtgtgaggagtgcagaatatggaagcttacctaaattctttttctgccagccaacattttaaaagacaaatgatgcatcctttctcaatgctgctaattctttaaattttacatgtcccaatttattccatttgagatttattttaatgttttcaacccctgtgtaacatgtatcatgaggagaaagcactatcattgatcatcactatggattaaaatataggaatattttacagggcagtatgggtgggggtgggagacatattggaatcgtgttttctgggataaaatttttaaaaagaattaatcattagccctgagtattttagtcatttgtgcctatagaaaacaacatgctcttttattgtggactttcttcttttaagtgaggtttaatttatatacaatacaataacagatttttaagtattcatttgagatgttttgacaactgtatatatacatgtaaccatcactggaatcagatatagaatattccccttaaatattgtcaggtaaacacattgagaatattttttccagtctgtggcttacctacttattttcataatgaatgttttacttgtgatgaagatttaacttacccttttactttaatgattaatattttctgtgttctttctaataaattttacgaactctgaggtt

SEQ ID NO: 2360 - DNA, 4043 bp, Homo sapiens
  source 1..4043: mol_type = genomic DNA
gttacttccctttttccggtccgccggattatgaatgacggccggcgcgagtattttccacataaggtggctgtcgtttttctcctggcgtctgtggaggcgagtggtctgcgggcagcagctcccagaggcagccttggaattccagctcggactgggcgggaaggcgcaggcggcccaggtcgccgacacgctcacgcaccctccctgcctggccgcgcctctgcgaccaggtgacccaatgaaagaagaaaatgaaagccataaagaaaagtcttacagaagaagaatacctgtacctggacttttctcaccaaacagaaggatgcatctttcctcttcatacatctgtaactttatttctgttatcttactgtgactgtaaaatctttaaaatttgcttagttgtcaccaaagaggttagtcagtggaccaggctatgtgaactcaccatccctttggctattgagaattttctcagagaatcttctgaccagcccccaactatacctgtagaaatactacagctagagaaaaagcttagtgagcctgttagagtgcataatgatgataaactccgcaggcagaagctcaagcaacagaaggctgatggagttgggcctccccttactaagggaaaggcaaagagcaaggtccacacacaggaaacatctgaagggttggattcttcatccaagagtctggaactgaaagtggcattctcaaagctcacagtacaggaagaaccagctactaccaacagagagccttctcacatcagaaaagcaaaagcctccgaccttccacctctggagcatgtgtttgcagaagggctttacttcactctggcagatattgtgctcttgccctgtatccatcatttcttggtaattatcagcaggaaattttctgagaagctggtagaatttccattgctagcctcttggtaccagaggattcaggaagtgccaggagtaaaaacagcagcttctaagtgtgggatccaatttctccatttaccaaagttgttgacaacctcaactgaacagcatccaaacttatgtgaagtcccaggtgtagaagagcaaagcgatcctttatttataggaggaccaagaccaaccatggccaagttaatggaaaagggcattgaagtgatgttttctccccacccttgccctacttggactcttgattggaatgttctccctgcagcagtcagcccaaaggaaggtaaaatgtccagtgatcgagctttgaggaagcagcaacagttgaacaaccttgtctatgtggtaacaaatcaggccaaacctggtgacagaattgtggatttctgcagcggtgggggccatgttggaattgtccttgctcacatgctgccatcatgtcaggttacattaatagaaaacaaggaattatcattaattcgtgctaagaagagaagtgatgaactgggtttaagcaacatttggttcattcaagcaaatatggaatattttactgggatgtttaatattggagtagcattgcatgcttgtggagtggcaacagacatggtgattgagcactgtatcaaaacacgggcttccttcgtcacatgcccttgctgttatggtttcattcagaacacctcaaagttcaattttccaaaaagtgaacaattcaagaaaactttatcatacaaggaacacatgattctgtgcagatttgcagaccagacagctgtccagctcccaccccaacgaaggctcataggaaaacagtgcatgtgcttggtggatctggatcgagcaagagctgcagaagaatgtggatactccgttcaagtgatatccatggagccagagagctgctctcccaaaaataacatgattgtgggagtccccatttaaaatgagatattcacatttgatattttgccatccgtcttcacgttggatgcccagtggcattcaggaggttcttggcataactaggaaacagcattagccatcttgaacctattgtgctcaggaaggaaagcaacagggaaatcttggaagtaaaggctccctgcaaagcatcacaaatgctttacaatgtgtgattaaaggactgctggtttttatagtgagaatcccctgaagtctcagctgccaaaagaataatactagtggaggttccatcacaggaataacaatttccttctcacttcacaagctcctctgatcttgccaatgtgatgtttaattcaaaacagcgcacttacagcctttattttatacttatttagatattcacatgggaactgaaagtagactcagtggagttttttgttttttatatttttaacaattgtactttttctatcactttaaaaaaatctagtcaggtaattatagtacagttatttttaagctggggttagttgaacttgtatagcatttaatatactccttttaaatatatttctgccaggcatggtggctcatgcctataatcccagcactttgagaggccaaggtgggaggatcatttgagcccaggatatcgagaccagcctgcactacaaaaaaatccaaaaaatgaggtgggaggatcacttgagcccaggaagtcaaggctgcagtgagccttgatagcgccactgcactcctgcctgggaaaatgagacccagactcaaaataaatcaatgaatgaattaataaacaaataaataaataaataaatttcccataaattaccaaatgagattgtcactggttcaaattattaaataattgccataaatttcctattacgggaatgtggaatttggacatacattttaacaataagtacattgattaatacatttaagtttataagtaattattgaggatccagtattttcaagaccttggcctagtttcttttcaattcaaagatgagttgcaaaagacataatgttttgcctatggaagtagatcatctagaagaaaaagattaaagaattagttaagcttttttttttttttttttttgagacagagtttcactcttgttgcccaggctggaattcagtggctcgatcttggctcaccacaacctctgcattctcctgcctcagcctcccgagtagctaggattataggcacctgccaccatgcccggctaattttgtttgtaattttagtagagatggggtttctccatgttggccaggctggtttcgaactcctgacctcaggtgatctacccgcctcagcctcccaaagtgctgaaattacaggcgtgagccacctcacctggccatgttctttatggaatactacaatgtgttgtcacaggatttgttattcagatgtcaatcatttttatttatatatttctgggtaaaacttattagtggtgtgaggagtgcagaatatggaagcttacctaaattctttttctgccagccaacattttaaaagacaaatgatgcatcctttctcaatgctgctaattctttaaattttacatgtcccaatttattccatttgagatttattttaatgttttcaacccctgtgtaacatgtatcatgaggagaaagcactatcattgatcatcactatggattaaaatataggaatattttacagggcagtatgggtgggggtgggagacatattggaatcgtgttttctgggataaaatttttaaaaagaattaatcattagccctgagtattttagtcatttgtgcctatagaaaacaacatgctcttttattgtggactttcttcttttaagtgaggtttaatttatatacaatacaataacagatttttaagtattcatttgagatgttttgacaactgtatatatacatgtaaccatcactggaatcagatatagaatattccccttaaatattgtcaggtaaacacattgagaatattttttccagtctgtggcttacctacttattttcataatgaatgttttacttgtgatgaagatttaacttacccttttactttaatgattaatattttctgtgttctttctaataaattttacgaactctgaggtta

SEQ ID NO: 2361 - DNA, 2161 bp, Homo sapiens
  source 1..2161: mol_type = genomic DNA
gaagccactagccggttactagctgcgcttttgttccacttgagcgggcactcttctgcggcaagcaggtctaggaattcgcctggttcccacctcgcgtcccttgccttccttcctagtctacccactgtagtgccccctgcgtcccgctccctcctagccgactcagagcacaagaaggattgccacggtttccattgcagcagccgtggcgcctctgaccctttttttatatcgcggcgacggcgggctgtcgtcacgacgacgtgcggacgcagcggcgggggcctttcagcttatgtggagaagtcgctgtgaagccacctataaatccatttactgaatttatggagaaggctgtaaatgatggaagtcattcagaagaactcttttgccatcttaaaactatatcagagaaagaagatttaccacggtgtaccagtgaaagtcatctcagctggcgaatctttctgcattgaatttgaagatttctgaacagaaggaaatattaataaaagaattagacaccttcaaaagtgtaaaactagctttagaacatcttcttagaaagagagactacaaacaaacaggagacaatttatccagcatgttgctagaaaatctaactgataatgaaagtgaaaatactaatcttaagaagaaggtatttgaaaaggaggcccatatccaagaactttcttgtttgtttcagagtgaaaaggcaaatactttgaaagcaaaccgtttttcccaatcagtaaaagtagtacatgaacgactacagatccaaattcataaaagggaagccgagaacgataagttgaaagaatatgtaaagagcttagaaaccaagatagccaagtggaacctgcaatcaagaatgaataagaatgaggctatagtgatgaaagaagcaagtaggcaaaaaactgtagctttaaaaaaggcatctaaagtttacaaacaaaggcttgaccattttacaggagctattgaaaagcttacttcccaaattagagatcaggaagccaagttgtctgaaacaatttcagcttccaatgcctggaaaagtcattatgagaaaattgtgatagaaaaaaccgaattggaagtacagattgaaacaatgaaaaagcaaatcattaatcttttggaagatctgaagaaaatggaagaccatggaaaaaattcatgtgaagaaattcttagaaaagttcactcaattgaatatgaaaatgaaactctgaatcttgagaatacaaaattaaagactacacttgctgctttgaaggatgaagttgtatctgttgaaaatgaactctcagaattgcaagaagtagaaaaaaaacagaaaacccttattgaaatgtataaaactcaggtacaaaagttgcaagaagcagctgaaatagtaaaaagcagatgtgaaaatttgctacataaaaataaccaaataacaaaaaccaaaaataaaaatgtagagaagatgagaggccagatggagtctcatctgaaggagttagagcgtgtctgcgattccttgacggcggcggaacggaggcttcacgagtgtcaggagagtctgcagtgctgcaaggggaagtgtgcagaccaggaacacaccattagggagcttcagggccaggttgatggaaatcacaatcttctgacaaagctttctctggaagaggaaaactgtcttattcagctgaagtgtgaaaaccttcaacaaaaattagaacagatggacgcagaaaataaagagcttgagaagaagctggcaaaccaagaagaatgtcttaagcacagcaatcttaagtttaaagagaaatctgcagagtatacagcattggccagacaactggaagctgctttagaagaaggaagacaaaaggttgctgaagaaatagagaaaatgtcatctagagagagtgctttacaaattaaaatattagatctggaaactgagcttagaaagaaaaatgaagaacaaaatcaacttgtttgcaaaatgaacagtaaagcacaacatcaggaagtgtgtttgaaagaagtacaaaatagtcttgagaagtcggaaaatcaaaatgagagtattaagaattatttacagtttcttaaaacttcttatgtaacaatgtttgaataaattgtcaaattt

SEQ ID NO: 2362 - DNA, 1810 bp, Homo sapiens
  source 1..1810: mol_type = genomic DNA
ggagtatagggcttgaactgagagcctggcctcccagaaggttttaatagacctacggcacagaaattgacacagcccggaaaaggcccacaaagagaagcccaaccagccagcccccaggccgccccgccagggacccaccaatgaggcacagatggcagccgctgccgccctagcccggctggagcagaagcagtcccgggcctggggccccacatcgcaggacaccatccgaaaccaggtgagaaaggaacttcaagccgaagccaccgtcagcgggagccccgaggccccagggaccaacgtggtatctgagcccagagaggaaggctctgcccacctggctgtgcctggcgtgtacttcacctgtccgctcactggggccaccctgaggaaggaccagcgggacgcctgcatcaaggaggccattctcttgcacttctccaccgacccagtggccgcctccatcatgaagatctacacgttcaacaaagaccaggaccgggtgaagctgggtgtggacaccattgccaagtacctggacaacatccacctgcaccccgaggaggagaagtaccggaagatcaagctgcagaacaaggtgtttcaggagcgcattaactgcctggaagggacccacgagttttttgaggccattgggttccagaaggtgttgcttcccgcccaggatcaggaggaccccgaggagttctacgtgctgagcgagaccaccttggcccagccccagagcctggagaggcacaaggaacagctgctggctgcggagcccgtgcgcgccaagctggacaggcagcgccgcgtcttccagccctcgcccctggcctcgcagttcgaactgcctggggacttcttcaacctcacagcagaggagatcaagcgggagcagaggctcaggtccgaggcggtggagcggctgagcgtgctgcggaccaaggccatgcgggagaaggaggagcagcgggggctgcgcaagtacaactacacgctgctgcgcgtgcgcctccccgatggctgcctcctgcagggcactttctacgctcgggagcggctgggggcggtgtacgggttcgtccgggaggccctgcagagcgactggctgccttttgagctgctggcctcgggagggcagaagctgtccgaggacgagaacctggccttgaacgagtgcgggctggtgccctctgccctcctgaccttctcgtgggacatggctgtgctggaggacatcaaggccgcgggggccgagccggactccatcctgaaacccgagctcctgtcagccatcgagaagctcttgtgaaataaaagcagggttggcctcagccctgtgggtctgtctcatgctctccctgttcctctccccgccaccccagggcctccaagccacctctggaaatacttggctctgccccatgggcacgggaggggcgccagccgtggagctgtggaattgggccccgtggcagagcccccatcccttgggggctgtggggatgcgcccaagcccccgagggagaggcctggggacaccaacaaatctaagccctccctagctgcttggtaactgtgtcatgaagctgccggacagacacacgtggcatctccctgggcaggagagcaggcctgcagcatgggtcctgttcccgtgtgccgtgggtggcagtggctgcacctggcactagggctgctctgtggatgtgggtgacaacggcaggaggggatgctggccttcctgcacatagacctgcagttagtaaatcataagcccaaataaacaggttgtttgaat

SEQ ID NO: 2363 - DNA, 3256 bp, Homo sapiens
  source 1..3256: mol_type = genomic DNA
ggctccgcgtccggcgcctgtttgtgctgcggcgctgtggcaccggacggccctgccaccccacccccgggagccgagagcggccccgggagagtccgagggcccgggggggtctggagactgcggccccgggcccacagcgccccctccaggccccttccccgcgcccgacagcgccccctcggggtggtggtacggcgcccttcgcgcgcgccccggggtgcttccccttcccctctccccggccgtggcccccgcggcttagacgcctcctccgccgccgccgctcggagcaacccgggggccggatggacggggccgcggggcccggtgacggccctgctcgggaggccctccagtctctgagccagcggcttcgggtgcaggagcaggagatggaactggtaaaggcagccctggcagaagcccttcgcctgctgcggctgcaggtgcccccttcctccctgcagggctctggcacaccagctcctccgggggacagtcttgcagcccccccaggactgccacccacgtgcaccccttccttggtgagccgaggcacccagacggagacagaggtggagctcaagtcatcccctggaccccctggcctgagcaatggacccccagcccctcagggggccagcgaagagcctagcgggacccaatctgaaggagggggcagcagcagcagtggtgctggctcccctggccccccggggatcctcaggcccttgcagcccccacagcgtgctgacacgccgcgaagaaattcttcctcctcctcatccccctcagagcggcctcggcagaagctctccaggaaggcaatctcctccgccaacctgttagtgcggtccgggagcacagagagccgtgggggaaaagaccccctctccagccctgggggccctggatctcggaggagcaattacaatttggaaggcatctcagtgaagatgttccttcgagggcgccccattaccatgtacatcccgtctggcatccgcagccttgaggagctgccgagtggcccaccgccagagaccctcagccttgactgggtttatgggtacaggggtcgtgactcccgctctaatctgtttgtgttgcgctctggggaggtggtctactttatcgcctgtgtggtggtgctgtaccggcctggaggaggcccagggggtcctggaggtggcggccagagacattaccgggggcacacagactgcgttcgatgccttgctgttcaccctgatggtgttcgggtagcctcgggacagacagctggagtggataaggatggaaagcccctgcagcctgtggttcacatctgggactcagagacgctgttgaaactgcaggagattggactgggggccttcgagcggggtgttggggccctggccttttcagctgcggatcagggtgcctttctttgtgtggtggatgattccaatgagcacatgctgtcggtgtgggactgcagccggggaatgaagctggctgagatcaagagtacaaatgactcagtcctggccgttggcttcaaccctcgtgacagcagctgcatcgtcaccagtgggaaatctcacgtccacttctggaattggagtggtggagtaggggttcctgggaatgggacccttacccggaaacagggtgtctttgggaaatacaagaaacccaagtttatcccttgctttgtgttccttccggatggagacattctcactggagactcagaggggaacattctcacctgggggcggagcccttcagattccaagaccccaggcaggggtggcgccaaagagacctatgggattgtggcccaggctcacgctcatgaaggttctatcttcgccttgtgtctccggagggacgggacagtgctgagtggtggcgggcgggaccgccggctggtacagtgggggcccgggttggtggccctccaggaggctgagattcccgagcacttcggggccgtgcgagccattgctgaagggcttggctctgagctgctggtgggaaccacgaagaatgcattgctgaggggagacctggcccagggcttctcccctgtaatccagggccacactgatgagctctgggggctctgcacacacccctcccagaaccgcttcctcacctgcggccacgaccggcagctctgcctgtgggatggggagagccatgcactggcctggagcatcgacctcaaggagactggtctctgtgctgacttccacccgagtggggcagttgtggccgtaggactgaacacggggaggtggttggttttggacacagagaccagagagatcgtgtctgatgtcattgatggcaatgagcagctctcagtggtccggtacagcccagatgggttgtacctggccattggttcccatgacaacgtgatctacatctatagtgtttccagtgatggtgccaaatccagccgctttggccgctgtatgggtcactccagcttcatcactcatcttgactggtccaaggatgggaatttcatcatgtccaattctggggactatgagattctttactgggacgtggctggaggctgcaagcagctgaagaatcgctatgagagccgagaccgggaatgggctacctacacctgtgtgctgggctttcacgtctacggcgtctggccggacggctccgatgggaccgacatcaactccctgtgccgctcccacaacgagcgcgtggtggcggtggccgacgacttctgcaaagtgcatctcttccagtacccgtgcgctcgtgccaaggcgccgagccgcatgtacgggggccacggcagccacgtgaccagcgtccgattcacgcacgacgactcgcacctcgtctcgctgggcggcaaggacgccagcatcttccagtggcgagtgctgggcgctgggggcgcggggccggcgcccgccacgccctctcgaaccccctccctgtcccccgcctcctccctcgacgtttgatcgctgcctggcgggaccgactggcccggcggcgtggccccgccccgccctgcccttccctggcccaatcccccacgactaggggccgactctttcctggactgacttcgagacattcccgatcgcgcattttcctggagggcgcgaacggcgcccctgcacacactgtttagacccgctggctgagccgggcagccccagcctaggccttgactcccgctgcctgctgaggggcaataaaccagaaccaaagtcgc

SEQ ID NO: 2364 - DNA, 4921 bp, Homo sapiens
  source 1..4921: mol_type = genomic DNA
gttgcctgcctgtggtgtgtggtgtgggggggaggcctggggcagcaggagcaggacagccggacaggaagcccagacggggttcgagcacctcaacttctctcctggggacactgttcaaactccgggggccataggccaagctgagcgatgggtgctgaggaggaggtgctggtcacactatcagggggagccccctggggcttccgacttcatgggggggccgagcagaggaaaccgttacaggtgtctaagattcgaagacggagccaggctggcagagcaggactccgagagagggaccagctcttggcaatcaatggggtctcttgcaccaacctctcccatgccagtgccatgagcctcatcgatgcctcaggaaatcagcttgtcctcactgtgcagcggttagcagacgagggtcctgtgcaatctccatctccccatgagcttcaggtgctgtcacccttatctccactaagtcctgagccccctggtgctccagttcctcagcctcttcagcctgggagccttcgttcacctcctgatagtgaggcttactacggagagactgacagtgatgctgatggccctgccacccaggagaagccccgtcgacctcgccgccgaggccccacaaggcccacccctccgggtgccccacctgatgaggtctacctgtctgacagccctgcagagccagcacctactatccctggccctcccagccagggtgacagccgtgtgagctccccgtcttgggaggatggggcagcccttcagccacccccagctgaggctctgctgttaccccatggccccctccgacctggtcctcatctcatccctatggtggggcctgttccccacccagtggcagaagatcttactaccacctacacccagaaggccaagcaagccaaactgcaacgtgcagagagcctccaagagaagagcataaaagaggccaagaccaaatgcaggacaattgcatccctgctcactgcagcccccaacccccactccaaaggggtacttatgtttaagaaacggcggcagagagccaagaagtacaccctggtgagcttcggggctgctgctgggacaggcgctgaggaggaggacggcgttccccccacgagtgagtccgagctggacgaagaagccttctctgacgcccgcagcctcaccaatcaatctgactgggacagtccctatctggacatggagcttgccagggcgggctcaagagcatcagagggccagggctctgggctgggagggcagctgagtgaggtctctgggcgaggggtgcagctctttgaacagcagcgccagcgcgcagactccagcacccaggaactggcacgggtcgaaccagcagccatgctcaacggggaaggcctgcagtcaccacctcgggcccagagtgctcccccagaggcagctgtgctcccacccagccccttgccggcgcctgtagccagccccagacccttccaaccaggtggtggagccccgaccccagctccaagcatctttaaccggtcagccaggccctttaccccgggcctacaagggcagcggccaactaccacctcggttattttccggcctttagcccccaaaagggcgaacgacagcctggggggcctcagccccgccccaccccccttcttgtcttcgcaggggcccacccctctgcccagcttcacttcaggggttcccagccacgcgccagtctctggttcccccagcaccccacgctcctcgggccctgtgacagccaccagctccctgtacatcccagcccctagtcggcctgtcaccccaggtggagctccagagccccccgctcctcctagcgcagctgccatgacctccaccgcttctatcttcctatctgcgcctttgcgaccctctgcgcgcccagaggcgcctgccccaggcccaggggctcctgagccccccagcgctcgcgagcagcgcatctctgtgccagctgcccgcacgggtatcctgcaggaggcccggcgccgggggacccggaagcagatgttccggccgggaaaggaggagacgaagaactcgcccaaccccgagctgctatcgctggtacagaacctggatgaaaagcctcgggccgggggtgcagaatctggtcctgaagaagatgctctgagcctcggggctgaagcctgcaacttcatgcagccagtaggggccaggagttacaagaccctgcctcacgtgacacctaagaccccccctccaatggctcccaagaccccgccccctatgactcctaagactccacccccagtggctcctaagcccccatctcgagggctccttgatgggctcgtgaatggggcagcctcttcggctggaatccctgagccaccaaggctgcagggcaggggtggggagctgtttgctaagcggcagagccgtgcggacaggtatgtggtggaaggtacacctggtcctggtcttggccctcggcctagaagtccttctcctaccccgtctctgcccccttcctggaaatattcacccaacatccgtgccccgcctcctattgcttacaacccactgctctctccctttttcccccaggcggcccgaactctccctaaggcccaatcccaggggcctcgggcaacacccaagcagggcatcaaggctctagattttatgcggcatcagccctatcaacttaaaactgccatgttctgttttgatgaggttcccccgactcctggccctatcgcctcagggtcccccaaaactgcccgagtccaggagattcgccggttttccactccggcaccccagcccactgcagaacccctggctcccactgtgcttgccccccgagcagccactacactggatgagcccatctggagaacagaactggcctcagcccctgttcctagcccagcccctcctccagaggctcccaggggccttggggcttctcccagctcctgcggtttccaggtagccaggccccgattttcagccaccagaacaggattgcaagctcatgtgtggaggcctggggcagggcaccagtgaacaggcacaggtcccaggaccaaggagaggtggaacatccagttcctaaagttgcttctcctaccctatcccatcccctgtcacgcatctggaagctaaattgcctcctgccagagatggtttccaagttgatgtccccttcccccaccttcctcctcactctctacctccctgccgctttccaaccaagtatgtctgctttggtatctttgcctctctttgtctctgcatttcctttcctggatctctgtctttatttccaggcttctccacccatattcctccacagatctctcttccttgacatttgtgcttttctccctgggcctcattttaatgttcagtgagaagtaaacagagcagaagtgaccactgggacttcaggcaagaagctcaccaccaggcacacagcaaagggactgaactgacccctgtttgcactaagccacccccaccccccactctgctttcccaagcttgactggcatatacctaggcctgtgtgtgtgtgtgtgtgtgtgtgtgtgtgtgtgtgtgtgctcttccgtctaaggcatgaataagaggggaggtcaaaataaagacccaatctgaggccgggcacggtggctcacgccggtaatcccagcactttgggaggccgaggcgggcggatcacgaggtcaggagatcgagaccatcctggctaacacggtgaaaccccatttccactaaaaatacaaaaaattagctgggcgtggtggcgagcgcctgtagtcccagctactcgggaggctgaggcaggagaatggcatgaacctggaaggcggagcttgcagtgagctgagattgcgccactgcactccagcctgggcgacggagcgagactctgtctcaaaacaaacaaacaaacaaaagacccaatctgagtcttatcgttgtactgatagaagggtcagatatccccacatggagttgagtgggagaaagagattcactagagaataactccttagagaccaatgtctgtagcaggtgtacagcatcttgtgaaagttatggagcatgaaaagactgaagggccaggacagtttgcatgggctgagttataccagctagaccaggaatagaacaaagaattctatacctcaggatttcaaaaagttagcaacttgagaggccagtgctgagcaacccagtacccaggaaatgaaaaaaagaaagaaaattccctccgagaatgaacaaatcattggcttcattgcctcatgagcttgagagaaaggagaagagagccagagtgtggcaagtgaggccaaaatcagaagcatggcagaaatgagtgtaagtgattgagccacagacagaagtgtggcgagggacaatgccatattgggagaaggtaaagttgagtaacaagaaaccaaccgtgtgtgagagggggattggaaaaaaatttgagggagaagaatgttagaatggaagggaatgatggtggaagggaggtgtgagggtgtgtgctgagtgttgaaagaacggttggtgtctgtgtgattttccttgagtctgttcttcagtgtgtcttctgcagcttgccatgactgcctgggaaagagtagggaaatacccagagccaaaacctcctttcagtcccaccccatccctcaaaaccccagctattgcttcttttcagcttcaggtcctgatctccaatcttagtatggactcccttctcaccaagaccaccaccagctacgtttgctgtgtaatctggaaagtgataatttcctttgcttgttgggtgtgagtcacaatactttggtttgtgcacaagaataaatttatgccccataccttc

SEQ ID NO: 2365 - DNA, 3964 bp, Homo sapiens
  source 1..3964: mol_type = genomic DNA
cttgccgaggattggctgagccttcagttttgaaaatcatagttttcgcccgcgctgcgccgcctggttgctcctcccgtgcggtgagtcccgaaggcccggagccaagtgggtctgggcaagcggggccttacctagggataccaccggacttggatcggagcagccttcaggggacgtggcgcagtcgaacagagccaccatggggacgacggccccagggcccattcacctgctggagctatgtgaccagaagctcatggagtttctctgcaacatggataataaggacttggtgtggcttgaggaaatccaagaggaggccgagcgcatgttcaccagagaattcagcaaagagccagagctgatgcccaaaacaccttctcagaagaaccgacggaagaagagacggatttcttatgttcaggatgaaaacagagatcccatcaggagaaggttatcccgcagaaagtctcggagcagccagctgagctcccgacgcctccgcagcaaggacagtgtagagaagctggctacagtggtcggggagaacggctccgtcctgcggcgtgtgacccgtgctgcggctgcagctgccgcggctaccatggcattggctgcaccttcttcacccacccctgagtctcccacgatgctgactaagaagcccgaggataaccacacccagtgccagctggtgcctgtggtggagatcggcatcagtgagcgccagaatgctgagcagcatgtcacccagctcatgtccaccgagcctctgccccgcactctgtccccgactccagcttcagccacagctccaacctcccagggcatcccgacatcagatgaggaatcaacacctaagaagtcgaaggccaggatactggagtccatcacagtgagctccctgatggctacaccccaggaccccaagggtcaaggggtcgggacggggcggtctgcgtctaagctcaggattgcgcaggtctcccctggcccacgggactcgccagcctttccagattctccatggcgggagcgggtgctggctcccatcctgccggataacttctccacgcccacgggctctcgcacggactctcaatcggtgcggcacagcccgatcgccccgtcttccccgagtccccaagtcttagcccagaagtactctctggtggccaaacaggaaagtgttgtccgcagggcgagcagaaggcttgccaagaagactgccgaagagccagctgcctctggccgcatcatctgtcacagttacctggagaggctcctgaatgttgaggtgccccagaaagttggttctgagcagaaggaaccccccgaggaggctgagcctgtggcggcagctgagccagaggtccctgagaacaatggaaataactcgtggccccacaatgacacggagattgccaacagcacacccaacccgaagcctgcagccagcagcccggaaacaccctctgcagggcagcaagaggccaagacggaccaagcagatggacccagagagccaccgcagagtgccaggaggaagcgcagctacaagcaggccgtgagtgagctggacgaggagcagcacctggaggatgaggagctgcagccccccaggagcaagaccccttcctcaccctgcccagccagcaaggtggtacggcccctccggacctttctgcacacagtgcagaggaaccagatgctcatgaccccgacctcagccccacgcagcgtcatgaagtcctttattaagcgcaacactcccctgcgcatggaccccaagtgcagcttcgtcgagaaggagcggcagcgcctggagaatctgcggcggaaggaggaggccgagcagctgcgcaggcagaaggtggaggaggacaagcggcggcggctggaggaggtgaagctgaagcgtgaggaacgcctccgcaaggtgctgcaggcccgcgagcgggtggagcagatgaaggaggagaagaagaagcagattgagcagaagtttgctcagatcgacgagaagactgagaaggccaaggaggagcggctggcagaggagaaggccaagaaaaaggcggcggccaagaagatggaggaggtggaagcacgcaggaagcaggaagaggaggcacgtaggctcaggtggctgcagcaggaggaggaagagcggcggcaccaagagctgctgcagaagaagaaggaagaggagcaggagcggctgcggaaggcggccgaggctaagcggctggcagagcagcgggagcaggagcggcgggagcaggagcggcgcgagcaggagcggcgcgagcaggagcggcgggagcaggagcggcgcgagcaggagcgacagctggcagagcaggagcgtcggcgggagcaggagcggctccaggccgagagggagctgcaggagcgggagaaggccctgcggctgcagaaggagcagctgcagagggaactggaggagaagaagaagaaggaagagcagcagcgtctggctgagcggcagctgcaggaggagcaagagaagaaagccaaggaggcagcaggggccagcaaggccctgaatgtgactgtggacgtgcagtctccagcttgtacctcatatcagatgactccgcaagggcacagggcccctcccaagatcaacccagataactacgggatggatctgaatagcgacgactccaccgatgatgaggcccatccccggaagcccatccccacctgggcccgaggcaccccgctcagccaggctatcattcaccagtactaccacccaccgaaccttctggagctctttggaaccattctcccactggacttggaggatatcttcaagaagagcaagccccgctatcacaagcgcaccagctctgctgtctggaactcaccgcccctgcagggcgccagggtccccagcagcctggcctacagcctgaagaagcactgaggctggcctgcggccttcttggcagcctcgcctcctgtccatgtctatctgtctgtctgtcggtctctgtcttggtctgttgccctccttcttggcatgccattgtggagggcttggccaggtgtatataaacgtcctctgtgctgggtgtttctgctgcaggtggcaggtggccccaggcctgtttggaggatgggctgggtgggtgggtggggaagaaatgggcccagccccacatggcctgcagacagtgctctgtaaatagttgttttaatttagctgaatgttagcattttagtctttggcattttagcgtttgggaggtagattaataaagtatattccttcaagcctgctgttgataccatgaagactgggcgcctcagtcccagccctgtagctgtgtgtcttgggccaccagtggcctgcaggacgaaggtactgttccatcacctgcggtgtgcctcaggatcaccaggtgcaggcccccaccctcggagatgctgctgcagtgagtggttccactgcctggataacccttgaggaacacgtcagttactgtcacgatggggcaggtggagctccttcctattttttggggtgctccctgtttgtaaaggggagtttgttcattgggaaagacctgggtcttgacacggccctgccacttagtcccctaccctctccattccccaggctccacccgtgctgctcaggtgcaaatggacttgagagcatctatgtgctggtgaagcatgaggtctgagtagaaaaggggtatcccttgagaccaccttgggaccagtgcttgcaagcagcgagatatttccccagcaaaaccaggcagctgctaattaaatgcttagaaccaatgaaagctggctgtggtcctgcctgtgagctgcctactgctgccttctgaatgcatatatctgctactgtagccccgggttgtcaaactatggcctgtgggccaaatccagccacagtcggttctttaaagtt

SEQ ID NO: 2366 - DNA, 4696 bp, Homo sapiens
  source 1..4696: mol_type = genomic DNA
accgcctcgcctctttccgccagcgcccgcaggacccggatgagagcgcacgcttcggggtctccgggaagtcgcggcgccttcggatgtggcggatgcggccgtgagccggcgggggaggtgctgctgctgcctccactgtactcagacccaggtagcacaggattgtccatcctccagcagctcagtgcaacggtgtgaactcagcctgtttcagagcctccacaccatgacctccaagaagctggtgaactcggtggctggctgtgctgatgacgctcttgctggcctggtggcctgcaaccccaacctgcagctcctgcagggccaccgcgtggccctccgttctgacctggacagcctcaagggccgggtggcactgctgtcgggtgggggctctggccatgagcctgcccatgctggtttcatagggaaggggatgctgactggggtcatcgcgggagctgtgttcacctccccggcagtgggcagcatcctggcagccatcagggccgtggcccaggccggcacagtggggacgctccttatcgtgaagaactacactggggatcggctcaacttcggcctggcccgggagcaggcccgggctgaaggcatcccggtggagatggtggtgattggggacgacagcgccttcactgtcctgaagaaggcaggccggcgggggctgtgcggcacggtgcttatacacaaggtggcaggtgctctggctgaggctggtgtggggctggaggagatcgcaaagcaggtgaacgtggtcgccaaggccatgggtaccctgggggtgagcttatcctcctgcagcgtccctggttccaaacccaccttcgagctctcagccgacgaggtggagctgggcctggggatccacggggaagctggtgtgcgccggataaagatggcaaccgccgatgagattgtgaaactcatgctcgaccacatgacaaacaccaccaacgcgtcccatgtgcctgtgcagcccggctcctcagttgtgatgatggtcaacaacctgggtggcctgtcattcctggaactgggcatcatagccgacgctaccgtccgctccctggagggccgcggggtgaagattgcccgtgccctggtgggcaccttcatgtcagcactggagatgcctggcatttctctcaccctcctgctggtggatgagcctctcctgaaactgatagatgctgaaaccactgcagcagcctggcctaacgtggctgcagtctccattactgggcggaagcggagccgggtagcccctgccgagccccaggaggcccctgattccactgctgcaggaggctcagcctcgaagcggatggcgctggtgctggaacgggtgtgcagcactctcctgggcctggaggaacacctgaatgccctggaccgggctgctggtgacggcgactgtggcaccacccacagccgtgcggccagagcaatccaggagtggctgaaggagggcccaccccctgccagccctgcccagctgctctccaagttgtctgtcctgctcctggagaagatgggaggctcatctggggcgctctatggcctgttcctgactgcggctgcacagcccctgaaggccaagaccagcctcccagcctggtctgctgccatggatgccggcctggaagccatgcagaagtatggcaaggctgctccaggggacaggactatgctggattctctgtgggcagcggggcaggagctccaagcctggaagagcccaggagctgatctgttacaagtcctgaccaaagcagtcaagagtgccgaagctgcagccgaggccaccaagaatatggaagctggagccggaagagccagttatatcagctcagcacggctggagcagccagaccccggggcggtggcagctgctgccatcctccgggccatcttggaggtcttgcagagctagggtgtgtgactgcctcccttggcctcagctcctctcactgctgtgctgaggtggcctttgtcacttccttctgccttccaaccctcaccttcccccggcctggccccattggcccaccctctaagttgagcaggaaatcctccaccaagcttccagaactacagacagcacccagagtgagctggagtgggtccccatgcctctccagcatgccctttccctttgcaggagggtggagtccctgggtcatgccctcccctgccagctctgggcttcagagataaggcattttccttgtgcagcctttacctggcaatcctaatttggttttaagactccctgtgaaatgctttccgcaccttaaccccagtgagcgtgaaaaagaaagttaataaactataatacatggaagcaagaaagacactgcctcctctgagggaccttttcccaagcatgtaaacaagggggcccacagccctggctgcaggcatcatgacccatcttctaccaggcagatctttattacctgagcccctaaggcagtgtctcctcagctgggctgcttccactgagacccccgacccatcccctttccagtacacacacctgatgcatgtaagaatggtagaggggcttttcttagcattgaattaataattcagtggctcctcgggagtcgaatgggcatttgggacaccagaaggaaaagaaatcatcatagtctaaggttcagttgtagatcaaaaaatgcagccaggccgggcacggtggctcacacctgcaatcccagcactttgggaggccaaggcaggcggatcccttacactcaggagttcaagaccagtctgggcaacatggtaaaaccctgtctctaccaaaaaatacaaaattagccaggcatagtagtgtgtgcctatagtcctaacttgggaggctgagttgggaggatggcttgggcccaggaggtcgaggctgcggtgagccataagcatgccactatactccagcctgggcaacaaagcgagaccctgtctcaaaaaaaaaaaaaaaaaaaaaagaaactgcagccaagccagcccctaggtctctttctagagcgatcactgatggcaccagggtgagcaggggcactgtatgcatgtggagacaaacagcacatgcctggcacacatgtagggtagggagtggttaaaggcactggctgtcgactcatacacatgatctgaaatctgattctgctttaacccggctacaggagctaaggcctattttttagccctttgggatctgtaaaatcagaatggtacccacctcatggggacatgaaaggattcaaatgaattgatgaagatgggccataaagcccagcacagtccaagtgctcactcactgagagttacggttatcacaggggttgggcccccagcccctcccaggtcatctgctctaccactagctggtaggaaagagcctcctgccctcccaacccccgtcacctacttggcccaaatttggctgcaggctccccgagtgcctgggcttctctacccagggtcctgtctgtcggctgcaccatacgtccctgaccacaaggcatccacgtgcacaggagtatgcgcccagcagctgggaaggaggctgacctcagacggtggcctgtggatcccagctctgtcatttcctggctgggtgacctcaacctagtcaccctttttgagtcttgttttctcagattatgaaataggaaaaatttccttcctcgtgagataagcacgtgccattagctattaaggacacgcacataaatgagctgcatgtgaatccacacatgccattccatgaagacagaggatcatgtggatctttggtgccttccggttggcccctccctaggtctgtgagggtcagacctgtcctgaggcttttacaaattggcccagaactcatttaaccacagcatcatttcattagagggctgttattagagactgaatgtttgtgtcccccccaaattcctgtgttgaaaggctcacccccactatggtagtgttaggacgtggggcctttgggaggtgatggggttatgagggtggagccccagagagctctcacgccctttccaccatgtgaggttatggtgagaagatggtctctgaggaagctggcccttgccacacaccacatttgccagcgccttcatcttggatgtctatagcctccagaactgtgagaaataaacacttgttgtttaagccacccaggctattatatttttgttatagcagcctgaacaaagacagctttgattcttaacatatttaatgaaactcgagcttcataaaccagtgaaatgcctacccctatggagatggggagctggtcatgggacccaggtgcctggaggacatcccagtggctttgaaggctccagccagtcaagacggtcaatattagcccttctgccaacatctggcaatgtgaggctggggtggacgttggcctgatgttgccaggagtaggatgctgatgctgccagagagtaggtgggctccaaaccccaggcttctcacttgcttactaagcacagcagtctgaagcttgggacctggcagtgcgtctttggagaaggcaaaaaagccacagcagcaacacttaggagcaagacccttcccgctctccaccctatttcctcccctgaagaagagcaacagctcaagctctagcatggcacagaacgct

SEQ ID NO: 2367 - DNA, 1999 bp, Homo sapiens
  source 1..1999: mol_type = genomic DNA
gggctggtggggtgaacccttcatcctgggtcttttaatttctcaggcggaacgagtggcggcggacagaggcttttggctgcgctgtctgtgggttgtctgggcttggggaactgggcacggagaccgtggcgccggccgccggtcatacagctctgcttccagtcgtcgggcaaaaagctgaggcgcttctcctttaattgcggtgggcggggcgtgccgacgcggcccgcgttgctattggtggccgttgggggcgcggaaactgaacgggccgcaacggccaccgcagctgccttcggcgccgccagccccgccatggctgcgccctgcgcggaggacccctcgctggaaaggcattttaagggccaccgagatgcagttacctgtgtggacttcagtatcaacacaaagcagctggccagtggctccatggactcatgcctcatggtctggcacatgaagccgcagtcacgcgcctaccgcttcactggccacaaggatgccgtcacctgtgtgaacttctctccttcgggacacctgcttgcttccggctcccgagacaagactgtccgcatctgggtacccaatgtcaaaggtgagtccactgtgtttcgtgcacacacagccacagtgaggagtgtccacttctgcagtgatggccagtccttcgtgacagcctctgacgacaagacagtcaaagtgtgggcaactcatcgccagaaattcctgttctccctgagccagcatatcaactgggtccgctgtgccaagttctcccccgacgggcggctcatcgtgtctgccagtgatgacaagactgttaagctgtgggacaagagcagccgggaatgtgtccactcgtattgtgagcatggcggctttgtcacctatgtggacttccaccccagtgggacgtgcattgccgctgccggcatggacaacacagtgaaggtgtgggacgtgcggactcaccggctgctgcagcattatcagttgcacagtgcagcagtgaacgggctctctttccacccgtcgggaaactacctgatcacagcctccagtgactcaaccctgaagatcctggacctgatggagggccggctgctctacacactccacgggcatcagggaccagccaccactgttgccttttcaagaacgggggagtattttgcttctggaggctctgatgaacaagtgatggtttggaagagtaactttgatattgttgatcatggagaagtcacgaaagtgccgaggcccccagccacactggccagctccatggggaatctgacagtctccattctggagcagcggttgacactgacagaagacaagctgaagcagtgtctggagaaccagcagctaatcatgcagagagcaacaccatgatcaggggagcaggaatcaggagctcggtggatttgcaggtggcaggccagggatttgtaccatgggacttgggtaaataaaggggactgaactctgtgggaatcacatccatactggagccctggatttttgcagttctgccctccaccttgctatctgcaccaggaggctctccacctggcagccagaggtccccagtgggccgggctcacacacaaatgatgcttcagacccgaatgagaggaccacattttgcttaatgtaaaggagccacttgaaaatgtctgctccttcggggtcctgagattgtggctccccctctggaggaggtggctccacgatgccttgattttcactcatcatttggacatgtgactggcttttcctacctctgccatggtgtagaaattgattgcacattgattggatgagccgggggttttctctaaatctgactaaaggcccaaagtgggcccatctgagtcaggtttgttgagaacaagccctctcaagtgggtggtggcttttcagtggccctgatttctgttccacacgtgttcactggagccaggtgacttcctccttgcgtgagtgagggcac

SEQ ID NO: 2368 - DNA, 1818 bp, Homo sapiens
  source 1..1818: mol_type = genomic DNA
ctccggccccaggtcaccgccagcacgcgcctgcttcccgtctgcgcgagtccacgcagctccccagatcaagaagctgaggccccaggttacacactaaagtaaatggcagaggcagaaataacacctatgtcctcctgaccccaaggcatgttcttaaagttctggaaacctcctggaggcttccttgctgctcctctgggactgccaccctgggcagggtgttctgtggcccctcatcatcgtggttttgaaccacaggcccttcaccagcacagcagcagcaggcatggcagcaagcgtggagcagcgcgagggcaccatccaggtgcagggccaggccctcttcttccgagaggccctgcccggcagtgggcaggctcgcttctctgtactgctgctgcatggtattcgcttctcctccgagacctggcagaacctgggtacactgcacaggctggcccaggctggctaccgggctgtggccattgacctgccaggtctggggcactccaaggaagcagcagcccctgcccctattggggagctggcccctggcagcttcctggcggctgtggtggatgccttggagctgggccccccggttgtgatcagtccatcactgagtggcatgtactccctgcccttcctcacggcccctggctcccagctcccgggctttgtgccagtggcccccatctgcactgacaaaatcaatgctgccaactatgccagtgtgaagactccagctctgattgtatatggagaccaggaccccatgggtcagaccagctttgagcacctgaagcagctgcccaaccaccgggtgctgatcatgaagggggcggggcacccctgttacctggacaaaccagaggagtggcatacagggctgctggacttcctgcaggggctccagtgaagcccagcactgctgcagggggtgggctgcctgcctgctctgagctctctcttgcacgctctctcttctctcccaggctctggctcatgcacatgcaacaggtgcgtctgtctatatgtctgggttcttgtcttttgtggtctgtttgtcttttctacctctttctcttgcagtgatagactgagggggtaaaatcaagagaaaaaactctcaggaatcaaggaacataatcctgtggagggtaatccattacatgagcttctcctgttcttccactttcctgcctggctttcactccttcccctgctctgcccagcctttccctcccacccactcctccttctgcaaatgccctgaaggccagcccttaccccaacacccacttccccacctccttaggccccagatacatacatgcccacatgcacgcttacatgtttagagccatccttgtttccaaatatgacccttcgcttgagggcaactgcataggtacatctaactctggactggcatgcacattgtcatgtgcagctttgcatatacacacatgcatacatgagcctccacacaagcacttgcacacatgtggactcctaaccatgctaacctcactggctgggaaggtggggaccccatgggccagcccttgcaggaggcccttttgcaaggcttagggtgtggccagccctgaaagctacttggacacaggtttcagctggccccagcccagaagtgacccccagaaagggagggccaccgctttgccccctgcttttacccttccttctgggtgctctacacctcaggttaccaggcctgaggcatctcagccaagcttgtttcctgctctgaggcttgtggggtgggagccagagtggaggtcggtgaaataa

SEQ ID NO: 2369 - DNA, 3446 bp, Homo sapiens
  source 1..3446: mol_type = genomic DNA
gctaaccttgccgcgggccgagccctgcctcgccatggaccaggactatgagcggcgcctgcttcgccagatcgtcatccagaatgagaacacgatgccacgcgtcacagagatgcggcggaccctgacgcctgccagctccccagtgtcctcgcccagcaagcacggagaccgcttcatcccctccagagccggagccaactggagcgtgaacttccacaggattaacgagaatgagaagtctcccagtcagaaccggaaagccaaggacgccacctcagacaacggcaaagacggcctggcctactctgccctgctcaagaatgagctgctgggtgccggcatcgagaaggtgcaggacccgcagactgaggaccgcaggctgcagccctccacgcctgagaagaagggtctgttcacgtattcccttagcaccaagcgctccagccccgatgacggcaacgatgtgtctccctactccctgtctcccgtcagcaacaagagccagaagctgctccggtccccccggaaacccacccgcaagatctccaagatccccttcaaggtgctggacgcgcccgagctgcaggacgacttctacctcaatctggtggactggtcgtccctcaatgtgctcagcgtggggctaggcacctgcgtgtacctgtggagtgcctgtaccagccaggtgacgcggctctgtgacctctcagtggaaggggactcagtgacctccgtgggctggtctgagcgggggaacctggtggcggtgggcacacacaagggcttcgtgcagatctgggacgcagccgcagggaagaagctgtccatgttggagggccacacggcacgcgtcggggcgctggcctggaatgctgagcagctgtcgtccgggagccgcgaccgcatgatcctgcagagggacatccgcaccccgccactgcagtcggagcggcggctgcagggccaccggcaggaggtgtgcgggctcaagtggtccacagaccaccagctcctcgcctcggggggcaacgacaacaagctgctggtctggaatcactcgagcctgagccccgtgcagcagtacacggagcacctggcggccgtgaaggccatcgcctggtccccacatcagcacgggctgctggcctcggggggcggcacagctgaccgctgtatccgcttctggaacacgctgacaggacaaccactgcagtgtatcgacacgggctcccaagtgtgcaatctggcctggtccaagcacgccaacgagctggtgagcacgcacggctactcacagaaccagatccttgtctggaagtacccctccctgacccaggtggccaagctgaccgggcactcctaccgcgtgctgtacctggcaatgtcccctgatggggaggccatcgtcactggtgctggagacgagaccctgaggttctggaacgtctttagcaaaacccgttcgacaaaggtaaagtgggagtctgtgtctgtgctcaacctcttcaccaggatccggtaaacctgccgggcaggaccgtgccacaccagctgtccagagtcggaggaccccagctcctcagcttgcatggactctgccttcccagcgcttgtcccccgaggaaggcggctgggcgggcggggagctgggcctggaggatcctggagtctcattaaatgcctgattgtgaaccatgtccaccagtatctggggtgggcacgtggtcggggaccctcagcagcaggggctctgtctcccttcccaaagggcgagaaccacattggacggtcccggctcagaccgtctgtactcagagcgacggatgccccctgggaccctcactgcctccgtctgttcatcacctgcccaccggagccgcatgctcttcctggaactgcccacgtctgcacagaacagaccaccagacgccagggctgattggtgggggcctgagaccccggttgcccattcatggctgcaccccaccatgtcaaacccaagaccagccccaaggccagaccaaggcatgtaggcctgggcaggtggctcggggccactggcggagccagcctgtggatccaagagacagtccccacctgggcttcacggcatccttgcagccacctctgctgtcactgctcgaagcagcagtctctctggaagcatctgtgtcatggccatcgcccggcggtcagtgggcttcagatgggcctgtgcatcctggccaagcgtcaccctcacactggaggaggatgtctgctctggacttatcaccccaggagaactgaacccggacctgctcactgccctggctggagaggagcacaacagatgccacgtcttcgtgcattcgccaacacgtgccctcacagggccagcgtcctccttccctgcgcaagacttgcgtcccccatgcctgctgggtggctgggtcctgtggaggccagcagcggtgtggcccccgcccccaggctgcctgtgtcttcacctgtcctgtccaccagcgccaacagccgtggggaagccaaggagacccaaggggtccaggaggtgggcgccctccatccttcgagaagcttcccaggctcctctgcttctctgtctcatgctcccaggctgcacagcaggcagggagggaggcaaggcaggggagtggggcctgagctgagcactgccccctcacccccccaccaccccttcccatttcatcggtggggacgtggagagggtggggcgggctggggttggagggtcccacccaccaccctgctgtgcttgggaacccccactccccactccccacatcccaacatcctggtgtctgtccccagtggggttggcgtgcatgtgtacatatgtatttgtgacttttctttggatttgttttgtgtttttgttgactagtcctggaaatgtttgaggctagacggggaggggccaggacccacccactgctcctgggggatgaggtcctggttttaaagccccgtcatttcaagcgggtcgatcttccacattcactggagagactctccccacctctgtctgggtggggcgcggacccctcactgtgcgcctgtgcagggggtgctggtgcacgtggcagtgtggatttccagtggtcacggtcttactgtttcaaggtttttaaataagaaaaccaaccctgccttcgcccatgcccgcccctgcccgcagttgccaaagagccgccttgtcgctgtgggcgtcagggcttggctggctcagtgcacaacccacagtggccttcagaggctcctcctgggactgggaaccgccgcagggccaggcggacggcgtgaggtttgtgttggggctggttctgcccatgctagggggtgggggagctcccaggacagaccagccttgtttctcatgtaatgcagtgacgctgtcattaaacacgtggattcatgtgtgg

SEQ ID NO: 2370 - DNA, 884 bp, Homo sapiens
  source 1..884: mol_type = genomic DNA
atcttgagtgagggcacgctctccttagaggggcggaacagtttttggcaccttatcgcgagcggcagcttatgcaagagtgatttaaaaaagaaaggcaggtccggagccaggggctaagtagcggtgcggtttctttttctggattagtttccccatcttgcctaaaaatgtcctagtctagtctttttagcagaactccactccctaaacatgtcagaactacacttcccatcaagggtcagaaagaaacttccggcacagtcttttcccagcattccttgtttacttccgggtttattactactgaaggaagaacgccagatcagaaaagggagctcaggtaccttccagagagtgagacccagcgcccttgtctcgcacccagtaggctttcatccccgccatggcggagctgatccagaagaagctacagggagaagtggagaaatatcaacagctacagaaggacttaagtaaatccatgtcggggaggcagaaacttgaagcacaactaacagaaaataatatcgtgaaagaggaactggccctgctggatgggtccaacgtggtctttaaacttctgggtccggtgctagtcaaacaggagctgggggaggctcgggccacagtagggaagaggctggactatatcacagctgaaattaagcgatacgaatcccagcttcgggatcttgagcggcagtcagagcaacagagggagacccttgctcagctgcagcaggagttccagcgggcccaggcagcaaaggcaggggctcctggcaaggcctgaccccatggtggggggaggggaggggaggggagggaatgaggcagctctaggatctatactgtagctaataaaatgtaaaaacacctgg

SEQ ID NO: 2371 - DNA, 2682 bp, Homo sapiens
  source 1..2682: mol_type = genomic DNA
tttttttttttagacagagtcttgctctgttgcggaggctggagtgcagtgatctcagctcactggaagctccgcctcctgggttcaagcgattctcctatctcaacctcccaagtgtgccaccacacctgccgaatgtttgtgtttttagtagggatggggttcgccatgttgggcaggctggtctcaaactcctgacctcaagtgatctgcccgcctcggcctcccagagtgctgggattataggcgtgagccaccatgcctggacatgaccctgtctctaaaacaatgtaatgaactgcagctcattcttgtgtgcacttttctgcaccccctttcccttaacacttactattgtctggcatgctacgtgttttcttgatctcattagcctctcccaccccaactgccacactgcactatcagagggcagcacttatcactgctgtagaacaaagtcctgcactgagccgatggcccagaaattttctttttatttatttatttattttttttttgagacagagtcttactctgtcgctcaggctggagtgtagtggcgcgatctcagctcactgcaacctctgcctcctggtttcaagcaattctccttcctcagcctccagagtagctgggattacacgcgcctgccaccgcgcctggctaatttttgtatttttagtagagatggggtttcaaccatgttggccaggctggtctcaaactcctgacctcaggtgatcctgcccacctaagcctcccaaaatgctggtattacaggcatgagccaccgtgcccggcctaaatatttaataaaataatggacgatgggtgccttctactgagctcccggtaattgtgagtgagtagaggacttgccctggggacattcagtgacctgctgggtgttgctgagctgtgaggaagttcaggtctggctgcagtggtgaggctgtgactcaatcaatcactgctgatgctcccaggacctgcaccagcttagtcctaggggcaaggattttaactgtccacctcagtttcttcatttgtaagatgcaaataacagtcacccctgcctcatgggatggagctgtgtaatgcccgcaacagtgcctgctgcatagaggggttgctgccagctgcctctccctccttgtctcttacctgcctgctgcctgggtcaggatgaagaggggcccttgtgttgcccccaccctggctgcctgctaagggcccatgtgatctgcctggcagaggagtttcttcaggaagaaccagggcagcttctgcccctagagggccaatgcccttgctgtgagaagtcactgctttggggagacctgatctggctgtgccagatggacactgagaaagaagtagaagactcagaattagaagaggaacatggagctgatccaggacacctcccgcccgccactggagtacgtgaagggggtcccgctcatcaagtactttgcagaggcactggggcccctgcagagcttccaagcccgacctgatgacctgctcatcaacacctaccccaagtctggcaccacctgggtgagccagatactggacatgatctaccagggcggcgacctagagaagtgtaaccgggctcccatctacgtacgggtgcccttccttgaggtcaatgatccaggggaaccctcagggctggagactctgaaagacacaccgcccccacggctcatcaagtcacacctgcccctggctctgctccctcagactctgttggatcagaaggtcaaggtggtctatgttgcccgaaacccaaaggacgtggcggtctcctactaccatttccaccgtatggaaaaggcgcaccctgagcctgggacctgggacagcttcctggaaaagttcatggctggagaagtgtcctacgggtcctggtaccagcacgtgcaggagtggtgggagctgagccgcacccaccctgttctctacctcttctatgaagacatgaaggagaaccccaaaagggagattcaaaagatcctggagtttgtggggcgctccctgccagaggagaccatggacttcatggttcagcacacgtcgttcaaggagatgaagaagaaccctatgaccaactacaccaccgtcccccaggagctcatggaccacagcatctcccccttcatgaggaaaggcatggctggggactggaagaccaccttcaccgtggcgcagaatgagcgcttcgatgcggactatgcggagaagatggcaggctgcagcctcagcttccgctctgagctgtgagaggggctcctggagtcactgcagagggagtgtgcgaatctaccctgaccaatgggctcaagaataaagtatgatttttgagtcaggcacagtggctcatgtctgcaatcccagcgatttgggaggttgagctggtaggatcacaataggccacgaatttgagaccagcctggtaaaatagtgagacctcatctctacaaagatgtaaaaaaattagccacatgtgctggcacttacctgtagtcccagctacttgggaagcagaggctggaggatcatttcagcccaggaggttgtggatacagtgagttatgacatgcccattcactacagcctggatgacaagcaagaccctccctccaaagaaaataaagctcaattaaaataaaa

SEQ ID NO: 2372 - DNA, 1413 bp, Homo sapiens
  source 1..1413: mol_type = genomic DNA
acactggaccttcaaaaccctcagggcagagagcagccctacactccctacaccacacccatactcagcccctgcaggcaaggagagaacaggtcaggttcccgagagctcaggaacatggagctgatccaggacacctcccgcccgccactggagtacgtgaagggggtcccgctcatcaagtactttgcagaggcactggggcccctgcagagcttccaagcccgacctgatgacctgctcatcaacacctaccccaagtctggcaccacctgggtgagccagatactggacatgatctaccagggcggcgacctagagaagtgtaaccgggctcccatctacgtacgggtgcccttccttgaggtcaatgatccaggggaaccctcagggctggagactctgaaagacacaccgcccccacggctcatcaagtcacacctgcccctggctctgctccctcagactctgttggatcagaaggtcaaggtggtctatgttgcccgaaacccaaaggacgtggcggtctcctactaccatttccaccgtatggaaaaggcgcaccctgagcctgggacctgggacagcttcctggaaaagttcatggctggagaagtgtcctacgggtcctggtaccagcacgtgcaggagtggtgggagctgagccgcacccaccctgttctctacctcttctatgaagacatgaaggagaaccccaaaagggagattcaaaagatcctggagtttgtggggcgctccctgccagaggagaccatggacttcatggttcagcacacgtcgttcaaggagatgaagaagaaccctatgaccaactacaccaccgtcccccaggagctcatggaccacagcatctcccccttcatgaggaaaggcatggctggggactggaagaccaccttcaccgtggcgcagaatgagcgcttcgatgcggactatgcggagaagatggcaggctgcagcctcagcttccgctctgagctgtgagaggggctcctggagtcactgcagagggagtgtgcgaatctaccctgaccaatgggctcaagaataaagtatgatttttgagtcaggcacagtggctcatgtctgcaatcccagcgatttgggaggttgagctggtaggatcacaataggccacgaatttgagaccagcctggtaaaatagtgagacctcatctctacaaagatgtaaaaaaattagccacatgtgctggcacttacctgtagtcccagctacttgggaagcagaggctggaggatcatttcagcccaggaggttgtggatacagtgagttatgacatgcccattcactacagcctggatgacaagcaagaccctccctccaaagaaaataaagctcaattaaaataaaatatgatttgtgttcatgt

SEQ ID NO: 2373 - DNA, 3113 bp, Homo sapiens
  source 1..3113: mol_type = genomic DNA
cttccccgcccgctccatccgggtcgctgacggctgtctctggactggacagcagtggcgtccgcttttctctaaggaacccgataagaactccattttctgttgatgtggagacatagggtacctccaactttccggggtttcagaagagaattttttattgaaactggaagaccaaaataattacaagcatgttgtgctggggaaatgcatcctttgggcagctaggtttgggtggaattgatgaagaaattgtactagagcccagaaaaagtgacttctttataaataaaagggtccgagatgtaggatgtggactcagacatactgtgtttgttctggatgatggaacagtgtacacatgtggatgtaatgatctaggacagctaggtcatgaaaaatccagaaagaaaccagaaatattaaaagtttgtcagatatccagattgtacaggttgcttgtggttactatcattcacttgcactttctaaagcaagtgaagtcttctgttggggacagaataaatatggccaattgggtttaggtactgactgtaaaaagcaaacttcaccgcagctgcttaagtctttgcttggaatccctttcatgcaagttgcagcaggaggagcccatagttttgtactcaccctttctggagctatctttggatggggacgcaacaagtttggtcagctaggtcttaatgatgaaaatgataggtatgttcctaatttactaaagtcactaagatctcagaaaatagtttatatttgttgtggagaagatcatactgctgctctaaccaaggaaggtggagtgtttacttttggagctggagggtatggtcagttgggccataattctaccagtcatgaaataaacccaaggaaagtttttgaacttatgggaagcattgtcactgagattgcttgtggacggcagcacacttctgcttttgttccttcatcaggacgaatttactcttttgggcttggtggtaatgggcagctgggaaccggttcaacaagcaacaggaaaagcccctttactgtaaaaggaaattggtacccctataatgggcagtgtctaccagatattgattctgaagaatatttctgtgtaaaaagaattttctcagggggagatcaaagcttttcacattactctagtccccagaactgtgggccaccagatgacttcagatgtcccaatccgacaaagcagatctggacagtgaatgaagctctaattcagaaatggctgagctatccttctggaaggtttcctgtggagatagccaatgagatagatggaacgttttcttcctctggttgcctaaatggaagttttttagctgttagcaatgatgatcactatagaacaggtaccagattttcaggggttgatatgaatgctgctaggcttttattccacaaacttatacaacctgatcatccgcagatatctcagcaggtggcagctagtttggaaaagaatcttattcctaaactgactagctccttacctgatgttgaagcattgaggttttatcttactctaccagaatgtcccctgatgagtgattccaacaatttcacaacaatagcaattccctttggtacagctcttgtgaacctagaaaaggcaccactgaaagtacttgaaaactggtggtcagtacttgaacctccactattcctcaagatagtagaactttttaaggaagttgtggtacatcttttgaaactctacaagatcggtattcccccttctgaaagaagaattttcaacagttttcttcatactgcattaaaggttttagaaatactacatagggtaaatgagaaaatgggacagattatacagtatgataaattttatatacatgaagtacaagaattgatagacataagaaatgattatatcaactgggtccaacagcaggcctatggaatgttggcagatatccctgttacaatctgtacatatccatttgtatttgatgcccaagcaaaaactactctgttacagaccgatgcagtcttacagatgcagatggctattgatcaggcccacaggcagaatgtctcctctctttttctcccagtgattgaatctgtgaatccctgcttaattctagtggtgcgtagagaaaatattgtaggagatgcaatggaagtccttaggaaaacaaagaacatagattacaagaagccactcaaggttatatttgttggagaagatgctgtggatgcaggaggggtgcgcaaagaatttttcttgctcatcatgagggaattattggatcctaaatacggcatgtttaggtattatgaagattccaggctcatttggttttctgataagacatttgaagacagtgatttgttccatttgattggtgttatctgtggcttagcaatttataattgtaccattgtggacctccattttcctttggctttatataagaaactactgaaaaagaagccatccttggatgatttgaaagaactaatgcctgatgttgggagaagcatgcaacagttactggattatccagaagatgacatagaggaaacattttgtcttaattttacgatcacagttgaaaactttggtgcaacagaagtgaaagagctggttctaaatggtgcagacacagctgttaacaaacaaaatcggcaagagtttgtcgatgcttatgtggattacatattcaataaatcagtggcttccttatttgatgcttttcatgcgggctttcataaggtctgtggaggaaaagtccttctgctctttcagcctaatgaactacaagcaatggtcattggaaatacaaattatgattggaaggaactggaaaagaatacagaatacaaaggggaatattgggcagaacatcctacgataaaaattttttgggaagtatttcacgaattaccattggaaaagaagaaacagtttctgttatttttgacaggtagtgatcgcattcctattcttggtatgaagagtctgaaactagtcatccagtccacaggaggtggtgaggagtatctcccagtttcccatacttgttttaatcttctggatcttccaaaatatacag

SEQ ID NO: 2374 - DNA, 4445 bp, Homo sapiens
  source 1..4445: mol_type = genomic DNA
agtctcttccccaactctccccacccctggtgctctccgccccgcttgcctcccgttcttccccgcccgctccatccgggtcgctgacggctgtctctggactggacagcagtggcgtccgcttttctctaaggaacccgataagaactccattttctgttgatgtggagacatagggtacctccaactttccggggtttcagaagagaattttttattgaaactggaagaccaaaataattacaagcatgttgtgctggggaaatgcatcctttgggcagctaggtttgggtggaattgatgaagaaattgtactagagcccagaaaaagtgacttctttataaataaaagggtccgagatgtaggatgtggactcagacatactgtgtttgttctggatgatggaacagtgtacacatgtggatgtaatgatctaggacagctaggtcatgaaaaatccagaaagaaaccagagcaggttgttgccctggatgcccaaaatattgtagctgtttcatgtggagaagctcatacgttagcgctaaatgacaaaggccaggtgtatgcttggggtctcgattctgatggacagcttggcctggtaggatcagaggaatgcatcagagtacccagaaatattaaaagtttgtcagatatccagattgtacaggttgcttgtggttactatcattcacttgcactttctaaagcaagtgaagtcttctgttggggacagaataaatatggccaattgggtttaggtactgactgtaaaaagcaaacttcaccgcagctgcttaagtctttgcttggaatccctttcatgcaagttgcagcaggaggagcccatagttttgtactcaccctttctggagctatctttggatggggacgcaacaagtttggtcagctaggtcttaatgatgaaaatgataggtatgttcctaatttactaaagtcactaagatctcagaaaatagtttatatttgttgtggagaagatcatactgctgctctaaccaaggaaggtggagtgtttacttttggagctggagggtatggtcagttgggccataattctaccagtcatgaaataaacccaaggaaagtttttgaacttatgggaagcattgtcactgagattgcttgtggacggcagcacacttctgcttttgttccttcatcaggacgaatttactcttttgggcttggtggtaatgggcagctgggaaccggttcaacaagcaacaggaaaagcccctttactgtaaaaggaaattggtacccctataatgggcagtgtctaccagatattgattctgaagaatatttctgtgtaaaaagaattttctcagggggagatcaaagcttttcacattactctagtccccagaactgtgggccaccagatgacttcagatgtcccaatccgacaaagcagatctggacagtgaatgaagctctaattcagaaatggctgagctatccttctggaaggtttcctgtggagatagccaatgagatagatggaacgttttcttcctctggttgcctaaatggaagttttttagctgttagcaatgatgatcactatagaacaggtaccagattttcaggggttgatatgaatgctgctaggcttttattccacaaacttatacaacctgatcatccgcagatatctcagcaggtggcagctagtttggaaaagaatcttattcctaaactgactagctccttacctgatgttgaagcattgaggttttatcttactctaccagaatgtcccctgatgagtgattccaacaatttcacaacaatagcaattccctttggtacagctcttgtgaacctagaaaaggcaccactgaaagtacttgaaaactggtggtcagtacttgaacctccactattcctcaagatagtagaactttttaaggaagttgtggtacatcttttgaaactctacaagatcggtattcccccttctgaaagaagaattttcaacagttttcttcatactgcattaaaggttttagaaatactacatagggtaaatgagaaaatgggacagattatacagtatgataaattttatatacatgaagtacaagaattgatagacataagaaatgattatatcaactgggtccaacagcaggcctatggaatggatgtcaaccatggattaactgagttggcagatatccctgttacaatctgtacatatccatttgtatttgatgcccaagcaaaaactactctgttacagaccgatgcagtcttacagatgcagatggctattgatcaggcccacaggcagaatgtctcctctctttttctcccagtgattgaatctgtgaatccctgcttaattctagtggtgcgtagagaaaatattgtaggagatgcaatggaagtccttaggaaaacaaagaacatagattacaagaagccactcaaggttatatttgttggagaagatgctgtggatgcaggaggggtgcgcaaagaatttttcttgctcatcatgagggaattattggatcctaaatacggcatgtttaggtattatgaagattccaggctcatttggttttctgataagacatttgaagacagtgatttgttccatttgattggtgttatctgtggcttagcaatttataattgtaccattgtggacctccattttcctttggctttatataagaaactactgaaaaagaagccatccttggatgatttgaaagaactaatgcctgatgttgggagaagcatgcaacagttactggattatccagaagatgacatagaggaaacattttgtcttaattttacgatcacagttgaaaactttggtgcaacagaagtgaaagagctggttctaaatggtgcagacacagctgttaacaaacaaaatcggcaagagtttgtcgatgcttatgtggattacatattcaataaatcagtggcttccttatttgatgcttttcatgcgggctttcataaggtctgtggaggaaaagtccttctgctctttcagcctaatgaactacaagcaatggtcattggaaatacaaattatgattggaaggaactggaaaagaatacagaatacaaaggggaatattgggcagaacatcctacgataaaaattttttgggaagtatttcacgaattaccattggaaaagaagaaacagtttctgttatttttgacaggtagtgatcgcattcctattcttggtatgaagagtctgaaactagtcatccagtccacaggaggtggtgaggagtatctcccagtttcccatacttgttttaatcttctggatcttccaaaatatacagaaaaagaaactctacgctctaaactgatccaagctattgatcacaatgaaggcttcagtttaatataactttggagttataactattcagtttagtgcaaaagcattaaactatttgtgtttttcttgtggtgatgaattcagcaaggtgacagaggtactattataattcttacttgcagaatgttcaatctacgagtgttcatggaagccaaaaaatattaaaggaaaatgaacaaactgttaatattattgtacagaaccatggattttttttgaccatcttctaataaacatagcaagtattatgaatacattaaagttttactaacatgaattttaagagtttgcatatttcagaaatgatctggtgtgagtgcatggaaatattgcttaatttttcttcaatcattgagtgaaaaacctttaactttggcctgcaatagtcatttgattattttttcattttgtaaataatgttaagttttgtaataaaatagttatgttctgataccagtacagtttctatggttgtaattgaacttgaacagacttttaaaggttaaaaattatgatttaaatcttactctgagactctataaaaagaaaaaaaaggtagcatggtggaaacactatcttttcttttttgctagaataagtgtctttgtgcaaacctaaatcacagatagggaatatactacataacctgcagttcttttctttgtgaatcctgacacactgatagatgggggattgtcgatcagagaacttattaatatttagtactggaagaactctgtctccacagttgccagtaataaaaagaaacattggctactatgagcaccaatcactgggttatagctttcaaaattattgatgctgcagtgctttagagctatttccttgaatttaagaaacaaatcttaacagttttatggtgctgatgcttagttgtctcatgccattaaattgtaaaagtgagttgatgcaatacatgtgactttctgctataatgcaaatatttattttttaaatttattttaaaatgccgtgaaaactgtttaataaagatttattgttttaatattt

SEQ ID NO: 2375 - DNA, 3259 bp, Homo sapiens
  source 1..3259: mol_type = genomic DNA
agacaaaacgatcgcggttaaagcttgcggctcagagcccacctggccgcgctgctgggaaacggacggagcggcgcttcaatcagaggtattactcagcacagaaattcaggagacacagacaagttcttccacgatgtcgtacagacgagaactagagaaataccgtgacctggatgaagatgaaatccttggagccctaacagaggaagagctgaggaccctggaaaatgagctggatgagctggaccctgataatgcactgctgcctgcaggcctgaggcagaaggatcagaccaccaaggcgcccacgggcccctttaaaagagaggagctcttggatcacttggaaaagcaagcaaaggagtttaaggaccgagaagatctggtcccctacacaggggaaaaacgaggaaaggtctgggttcctaagcagaagccactggatcctgtgctggaaagtgtgacgctggaaccggagctggaggaagccttggcaaatgcttcagatgcagaactctgtgacattgcagcgatcctgggcatgcacacgctcatgagtaaccagcagtactaccaggccctgagcagcagctccatcatgaacaaggaggggctcaacagcgtgattaaacccacacaatacaagcctgtgcccgacgaagaaccaaattcaacagacgtagaggaaacgctggaacggataaagaacaacgacccaaaacttgaagaagttaacctcaataatatccggaatatccccatccccaccctcaaggcatatgcagaagccctgaaagaaaactcatatgtgaagaagttcagcatcgtggggacacggagtaatgaccccgtggcgtatgcccttgctgagatgctcaaggagaacaaggtgttgaagacactgaatgtggaatccaacttcatttctggagctgggattctgcgcctggtagaagccctcccatacaacacttctctggtggaaatgaaaattgacaaccagagccagcccctgggcaacaaagtggaaatggagattgtgagcatgttggaaaaaaacgcaacacttctcaaattcggctaccactttacccagcaaggaccccggcttcgggcatccaacgcaatgatgaacaacaatgaccttgtgaggaagaggaggcttgcggacctgactgggcccatcattcccaagtgccggagtggtgtctagtgtgtggcggtggagtccatgcctttgaactggatgtgttctattgatgacctgtgctctgcaggggaaaccagaaggcaaaatgctggcagcatgaaacccttttgtggttcagttctttatgcactaaggttttaggttgactagtggttgtagttgaaaattttataaaataccgttaatgtgaagtttttctttagtcacagaagttgaatctggttattatttaaaaactagaagcccccaaaccagcagatcttactgaagatgatgttccagcagcagcgacttagccccaggagcccagtttcaatggccttgctgtgtggtgtttcaagtgcatttaaaatgtgtgacacagaaacggcacactcttccacatgcttttgaagtattataaaacactttattacaaatttgtcttagctattagcaaataaaactgattatcattctttattaaccctccttggaattttgaaaacctcgattaaagttgccaaattgattactggatccagaacacaattttcccctcagaacagatagacagactgaagccactgaactctgccaggagtcaacatgagattccttttgctggatatgcagaaatgataggaaaaaaaccaatggtgaaatttcaagtttcaaaaaccaacctttcattaccaatcccaggcaacaaacatgtccctgagtgttctttaagaacatttgggatttatgtacaatttaatactggagttagaactttttccttattgaatgccaaccttatgatggatgtgaaaatctacggccaaatacttttgaaaacacctttctatattgcacagtgggcaaatggcttatgtgaggtaagacactagagggataaatttccagatcaacatggctatggtatttagtaatggcccagcttagagacttcagctactgatctcatcacttattagacaaattgctgctgaccttacgcctgtatattaagcctccgcaggatgccggacaatggtgaagaaactccagatatcaaggaattgggaaatcctggccaaaccaccccaagatgattacactgaaatgtagtattagtactgctgccagatctctttttaacatcatgtgcgtctcttgggatccagcaaaagtgttaagccacaatgcccttgtgccttttaatataccacagtgccagttaaactaatatttttgtttgttgcttttgggagttattttcattagtgatttcagcaaatctcatgataaaggacaaggtcaagaactccagagcactgagcagagaggctggtgatgaaaaggtgaaggcctgcgcactgaactgtaaggcagtgggcagtacagggtaactggaggcggggccagggcctcagcgctatggaagagtgtccactgaggctgcacatggcccaggagtggcaccatgttgcagggacaaccatccccatttggcttctccttaaaacacaattgcagctgcattctgcatcgctgaaaactgcaatataatattaaatctgttggtctatgcatggctgcgtatgtgtttcttggaacctgtgtgacagggacatgtgcctggcacactggccagaagactgggcagccaccatggcagtgctggatgacctcagtaagaatgtgtcatgtattccaggtgctgatctaaaaactgtggctcaaatgtcaccgagcttatatgaagctcccagagagaacatttaaaagctcagagagtaagtgctggggaaagcagagctatcagaggaaatctctcatagaaacgaaaccaaaccaacagaaaatgaagaaggccacatctttaaggccacctctgcctctatcagatgagctgctggtctagatcaggggctggcaaacttttctgtaaaaggccagacagtaaaaatttccgattttgcaggccacatagtgtctgttgcaactattcaactctgccatagatcatgtgtaaaggaatgggtgtggctgttcaataaactatacagttgacccttg

SEQ ID NO: 2376 - DNA, 895 bp, Homo sapiens
  source 1..895: mol_type = genomic DNA
cgcggcgcggcgccggaggaggaagtggtgaggttgttgctccttcagcgcctatcgctggctcttggggcgcagagaggggccgcagtctccgcggctgcgtcgagctcccttgcagtcccctccatgttccccggcgccactactccccttcctaaggccgccgcttaccccggggtctatggaagtaatggaaggacccctcaacctggctcatcaacagagcagacgagcagaccgtttattagctgcaggcaaatacgaagaggctatttcttgtcacaaaaaggctgcagcatatctttctgaagccatgaagctgacacagtcagagcaggctcatctttcactggaattgcaaagggatagccatatgaaacagctcctcctcatccaagagagatggaaaagggcccagcgtgaagaaagattgaaagcccagcagaacacagtactttatttacttcagcaaaagagtgagccagcagagccatgtattggaagcaaagccccaaaagatgataaaacaattatagaggagcaggcaaccaaaattgcagatttgaagaggcatgtggaattccttgtggctgagaatgaaagattaaggaaagaaaataaacaactaaaggctgaaaaggccagacttctaaaaggtccaatagaaaaggagctggatgtagatgctgattttgtagaaacgtcagagttatggagcttgccaccacatgcagaaactgctacagcctcctcaacctggcagaagttcgcagcaaatactgggaaagccaaggacattccaatccccaatcttcctcccttggattttccatctccagaacttcctcttatggagctctctgaggatattctgaaaggatttatgaataattaa

SEQ ID NO: 2377 - DNA, 7666 bp, Homo sapiens
  source 1..7666: mol_type = genomic DNA
ctcaaagaaaatgaacggcaccctggaccacccagaccaaccagatcttgatgctatcaagatgtttgtgggccaggttccaaggacctggtctgaaaaggacttgcgggaactcttcgaacagtatggtgctgtgtatgaaatcaacgtcctaagggataggagccaaaacccgcctcagagcaaagggtgctgttttgttacattttacacccgtaaagctgcattagaagctcagaatgctcttcacaacatgaaagtcctcccagggatgcatcaccctatacagatgaaacctgctgacagtgagaagaacaatgtggaagacaggaagctgtttattggtatgatttccaagaagtgcactgaaaatgacatccgagtcatgttctcttcgtttggacagattgaagaatgccggatattgcggggacctgatggcctgagccgaggttgtgcatttgtgacttttacaacaagagccatggcacagacggctatcaaggcaatgcaccaagcacagaccatggagggttgctcatcacccatggtggtaaaatttgctgatacacagaaggacaaagaacagaagagaatggcccagcagctccagcagcagatgcagcaaatcagcgcagcatctgtgtggggaaaccttgctggtctaaatactcttggaccccagtatttagcactttatttgcagctccttcagcagactgcctcctctgggaacctcaacaccctgagcagcctccacccaatgggagggttgaatgcaatgcagttacagaatttggctgcactagctgctgcagctagtgcagctcagaacacaccaagtggtaccaatgctctcactacatccagcagtcccctcagcgtgctcactagttcagggtcctcacctagctctagcagcagtaattctgtcaaccccatagcctcacttggagccctgcagacattagctggagcaacggctggcctcaatgttggctctttggcaggaatggctgctttaaatggtggcctgggcagcagtggcctttccaatggcaccgggagcaccatggaggccctcactcaggcctactcgggtatccagcaatatgctgctgctgcgctccccactctgtacaaccagaatcttctgacacagcagagtattggtgctgctggaagccagaaggaaggtccagagggagccaacctgttcatctaccacctgccccaggagtttggtgatcaggacctgctgcagatgtttatgccctttgggaatgtcgtgtctgccaaggttttcatagacaagcagacaaacctgagcaagtgttttggttttgtaagttacgacaatcctgtttcggcccaagctgccatccagtccatgaacggctttcagattggcatgaagcggcttaaagtgcagctcaaacgttcgaagaatgacagcaagccctactgagcgtgctcccctctgagactggagtgagagggtcttctggcacagcttgccctgaagactcggctactgccttctgtgggagtttcgcttcgtacagaggacaagtttgtgctttggtttccagtgttttactttggagtttaggtgccatatcctgaggttttttttgtttttgtttttgtttctcctttatttaaagtttgctgtgtttgtaaccagtgtgtgttgagaaggaccaacaccaaaccaccctggggaagggggacagggaaacatttaacacagacgatgatcaggatttgccccaaaccaccccaagagagaggactgagtggaacaaaaaagtgacccccagaacctctcttagtgtgagggtgggtagaatgagaactgacacctgggagctgtggggagcagagcggctttggggaagagtggagtgactagacacctaatgccctggcagctggagactcaaactcctgtacagctaccttctgggaaatagtttttgacacctatttttcagattcttgtccggaatttctgctgctcttttcaaaaaagggcattaacaattctctggaaataaagcacctgttagcctgacatatgcaaaaagcagggcggcatcacccattacgagctcccccagccagcagtcagtattggattggccttgcctggctggtggcagtttgggagaaacagccaaagaggttagtttatttcaacaccaaattagaccatggcccatttccaacgggtctctttaaaggcctctatggaatacattgcctggtttccttctttgcagttcaccacagcaaggaatgtcacctccatcccaagccaccattttctcatgaaggcaaatccaagaagggcttgcagttcttgctgaagggggtaccatttgtgggcagagtgatcaataccatctagttgggggaggaggagcttatttcttggtgtacttgaatcagaaggtccctgcaagccagtatgcttcatttgccagtggccagaaattctcccttgcctccttgattgaggtgtcccagatgtagtattcccacaggggtctggcaggcccctcctgtaaccactccagtcacattttctgctcttgaggcagaggtgacatcaggacgtttacagcctccacatgaattgagtgttcatttacctcagtattaccgtgttcatttttgtcctcgtgctacagttagctccctgccgcctcttgcaggtcttacttcagctcttgcctgtgacccacacagcttctgggctctgcctctgctctaagaagtgctgtgggggtagagaaccaggaaggacatgctgttgggaatgtacacctgggcagaggtggccctgttaagatgtgactgtagccacagccagggatgggatccctgggtctctggaatctgaaacctcaacaaataccagtcttgacccctagcagcagagataagaataaaggggttggtttgctattaagtcagatgggggctctctccttgtcatgctgtccctgtgggtaacagacagggattgaccatcttactgttgtacaggtagctggtggtgttggattatcccattgaagctgggacagctgttcctttctcatagtgataacttgggtctgttgtcctctaaggaacgtgaaacatacacttcttaagctgaaccacgtaaacttgaaattctgcgcactgggagaaatgtgtcctgtgtttcaaaggataaaactgttctaaaggcttccagggtcatgatgggattttttaaataaatgcaaaaaataaaaataaaaaagaaaaaagaaaacaaaaaaaaaaaagaaaaaaatgctaggttggggaggcgctgttctgaatcccaaccggctggaaccaagaatgtcgtttctatttttatagaagttttatacagctccggggtggagaatatttattacctaaattatatctctggaaaaggccaggattttgtagaatccagaatgtgattgttatacacacagggtgctgtgtatgattgaaactactgactttctgtggcccgtttgcagcccagctaacctgcccaaggggaaggtgttaatgctgtgaattggcagaggagagagctgtgctccatagggtgctgccggtgctgtgctccctagccttctgttctgtcttcctccttagccagaacgccactcccttcccacatccccttcttctctccgccttcccccatctcaccattatttgtccatggatttgtcctgggctctgggaccttatgaaacccctttcctaatgacataagaggccaaggtgcaatccacccacctttgataccagaccctgagggcttcatacctgctgatgggttttcttttctaaaaggaatgctcgccccagcagggtcctgggctgcttgagcagccagctggtgagaccatgcacttctctgttctctcctccccctgcccagtgagttagcacagcagtagcactgcccttgagcacagttctttccccaggccaaagatggttttgtgaagaagctgctcccctacaagtctcacgtgtgaaagggctcagctcagagtggagactcgctgtcaagtcttaagcaatccttttctgttgtgtgaaggtttcacttacaatgtgttttctgctgtagttttgtttcttacttgggttacatcatgaaattgatttgccttgaatgcagccagaccactgtctcctgggttccccttgagtggccagggcctggatggaagctaagagcttggatttctgggaacaaagggccatccccataagattgagcagaaattctggtcctcttccctgaaaaattttccccaccccagccagcatcttctgcttccccttgggttgtgaccagggagtggggagagaggctgaggctctgctcccctggagaccttctcttaggagttgggtgcttcatggaaaatccaagccttaggttcccttctgtctctggcaattagatgtgttcttggtgtcctccatgtcctttttgacttttccctgtgtccattgttagcatgtgcaaaagttccctgtcattacccaacccctgcccgcccacctcatttcagggctgtacacacagtgagtgttcctgttctctctctctttgtttggatgtattgctctgtgtaactcagtgggtctccctctttctggtttgtttttttttctagattcctgccgtttgttcatcgttgtgcctaaagcatgtcgatgtggcgtcaagtacatcgtccaaatccctgtctcttcagcttctctgatgcttgaactctcacctttgaccttgtgttgacctttgatgctgatgtgtatttttattatgtttgtttctttcttcgtttttttttctttttttctttcctttttttttccttttgtgctgccaaattggttttgctagaacgactgctgaaggggaaatatttaaacttgcatttgaatataaaaaaaatctatttttctagaacttcataagataaccacttgattttgtgattccaattctttgtaattgtcttcagagcagccctactagcacataccgcgtggtgtttgtatttctgtgaacacacagccagtccgtttctaggctttgtttctctgtgtgcttagttttaaagacaactttgaagtaaacaatgaaataaaagatgtcactaaaacctctgaggctcctgagcacattttgctgatacagtctgtggggcttgaggagaccgcatgtattgttctttcttttgtttttcttctgagttctcaactgcggagagcacctgaaccccctttcctttttgaccgcaggctgcactttgggccccagccagccctttttctttttctttttcttttgtggttcttccctggagcgactctggggagtcctggatatcccgcctgccccttcccctcagccccatgcttgttccaacagtctccacagcaaaatgtgatgctttgatttttttgttgttgtttttgtttttgtattgtttttgtgtttttgttttgaattttttcctttcctactaagattatgcccagaaaaaagttttgcatgtttcctgctgtttcttcacaccttcgtatatatcaccttcacctctctgttttctatagtttgtgcaaaaactgatcgatttaaaagggtttcaaagaagctgttttaaattgttgtagggttgattatttttttcaagattgtattgtttaattttgaagtggcaactttctcctctattgcccttagagcgtttgcctgtgcacttagactgtcacttcgtgtggcctccaggtcttaccggggcttccgggaggctggctgctttgctcagagagggtgggaagggggcctggagagacacgagaagcagaggtagagcctagaaggtggcagcaggtgggtaagaggcttatttagcacattaggggcagtgagcacctggaggaaggagggcgctcccaatcacccgtaggaggccatctgcacaccaagcggcaattcacctgctggcgcttttcctaggtgacaagcacaatactacagtcttcacactgtttacagccctgggcaccagccacccggcactggctcttcatcacagctctgctcttgcttagctagtggggtgggggaaagggcagggatttgtttttttaattgggtggagagccaaacagctactgtccctgggtgccaagcaagccagttttttggttccctgagggaaactgaccctcctctcttgtggcaccatccagcctcagggtcttggagacttgagtaagaatgtgagtggagggggagaggtgaggagaggagcacagggtggatctgtggagggaagaggttacagggggaggagctgatgatagatcccacccagacttaagctgctggtgggtgggtgagctgggaagtaggactgtccagggaagggtggagagatgtagctaggggctggggagggggaggtggaagcgctattgagcatcctccacaccaaggttgatgaaggaagggatcccagcagggtttctgctctggggctggcaggttgcctggtattatgcccaaggccgctctgcctgggggaaagggcagccaggcagaggcccagtgtctggtaggctgctgaatttcctggaaggggtgattggatggaaagaggccagaaaccccagcctgagagactgctgtgcaccccacagtctgactgcacagagccgcctctgttggcaggaggcactgaggctccccttcctgtgtattgagaagcagtgtttgccaatatattttgctttcaattccaagaggagctctgggaaaacctgtggataaaaccaaatgccaaatgttggacgttgtttccttttccttttctctctctgattgttttaattgttctgtggtggttttaatggatttgagaccctggagcggcagctgcctttctgatttccagctgctttttgtgaataatttaaaaagaaaaaaaaaaagaaactttacattttggagacaaacctgtgtgagttttttattggtacaaacgttgtatttaacactaggggttttgtacagttttttgccttttctactagaaaacaatgtaaagtgatttcacaatgtgaagagaaaaaaaaattgccactatgaccaaacgcacagtctgttctgcagcaacaacgggattcaatcaactcagtcgtgattcagccgtagaaatgcttttcctttatcttgtttgagcttttcctttctttcctgttttgatttgcaaaagaaaatgtcttttttgtgtgaacttgtgttgtactctgtagaaaattatggattttactttaatggtttaaaaaaaggcaaggagagccctcgtcgcttttcttacctaatcacagagtttgtgtagtgaatttaaaaagaaaaaaaaattgttataagtttggagcaagggagtatgtgtttcaaaggaatctccttcctttttttgtgtgtttttccttttgtcccaatggggaacctaaatctgttttaattgcacagacacatggacaaaaagtcattttgtatctgccaagtgtggtaccttcctttgtttatttgctattaaactgtttg

SEQ ID NO: 2378 - DNA, 2191 bp, Homo sapiens
  source 1..2191: mol_type = genomic DNA
atactttgaaaataacagctcttttttgttccctcgtgtgtctcttcccaattgtatccctattgtattttctcatagtatgtttcagcagaaatcaaggtagacgaagtaacctcttgtcctgaattttcatagttgctcattcttaataatggcagcagaagcaacaatgagagtaactacctcctcagctcaaagaaaatgaacggcaccctggaccacccagaccaaccagatcttgatgctatcaagatgtttgtgggccaggttccaaggacctggtctgaaaaggacttgcgggaactcttcgaacagtatggtgctgtgtatgaaatcaacgtcctaagggataggagccaaaacccgcctcagagcaaagggtgctgttttgttacattttacacccgtaaagctgcattagaagctcagaatgctcttcacaacatgaaagtcctcccagggatgcatcaccctatacagatgaaacctgctgacagtgagaagaacaatgcagtggaagacaggaagctgtttattggtatgatttccaagaagtgcactgaaaatgacatccgagtcatgttctcttcgtttggacagattgaagaatgccggatattgcggggacctgatggcctgagccgaggttgtgcatttgtgacttttacaacaagagccatggcacagacggctatcaaggcaatgcaccaagcacagaccatggagggttgctcatcacccatggtggtaaaatttgctgatacacagaaggacaaagaacagaagagaatggcccagcagctccagcagcagatgcagcaaatcagcgcagcatctgtgtggggaaaccttgctggtctaaatactcttggaccccagtatttagcactccttcagcagactgcctcctctgggaacctcaacaccctgagcagcctccacccaatgggagggttgaatgcaatgcagttacagaatttggctgcactagctgctgcagctagtgcagctcagaacacaccaagtggtaccaatgctctcactacatccagcagtcccctcagcgtgctcactagttcagcagggtcctcacctagctctagcagcagtaattctgtcaaccccatagcctcacttggagccctgcagacattagctggagcaacggctggcctcaatgttggctctttggcaggaatggctgctttaaatggtggcctgggcagcagtggcctttccaatggcaccgggagcaccatggaggccctcactcaggcctactcgggtatccagcaatatgctgctgctgcgctccccactctgtacaaccagaatcttctgacacagcagagtattggtgctgctggaagccagaaggaaggtccagagggagccaacctgttcatctaccacctgccccaggagtttggtgatcaggacctgctgcagatgtttatgccctttgggaatgtcgtgtctgccaaggttttcatagacaagcagacaaacctgagcaagtgttttggttttgtaagttacgacaatcctgtttcggcccaagctgccatccagtccatgaacggctttcagattggcatgaagcggcttaaagtgcagctcaaacgttcgaagaatgacagcaagccctactgagcgtgctcccctctgagactggagtgagagggtcttctgattcctgccgtttgttcatcgttgtgcctaaagcatgtcgatgtggcgtcaagtacatcgtccaaatccctgtctcttcagcttctctgatgcttgaactctcacctttgaccttgtgttgacctttgatgctgatgtgtatttttattatgtttgtttctttcttcgtttttttttctttttttctttcctttttttttccttttgtgctgccaaattggttttgctagaacgactgctgaaggggaaatatttaaacttgcatttgaatataaaaaaaatctatttttctagaacttcataagataaccacttgattttgtgattccaattctttgtaattgtcttcagagcagccctactagcacataccgcgtggtgtttgtatttctgtgaacacacagccagtccgtttctaggctttgtttctctgtgtgcttagttttaaagacaactttgaagtaaacaatgaaataaaagatgtcactaaaacctctga

SEQ ID NO: 2379 - DNA, 7610 bp, Homo sapiens
  source 1..7610: mol_type = genomic DNA
cacgcactacgggttggcgccagagtcaaaaggcgtcggccctctggcaagatggctgctgcggaggcgttggagcgcggaaatctggaaccgggatggcgacgtctacactgagtcggaggcgaaggagcttactccacgggaacagcctctagataatctgagttgttgaaaatacgaagcctgttactcgtgaacagtggctgacaacagtgttgttgtgagcctggctgtctgcttggacccagaggtttcgtctgccagggtttttggttgtatttaggatttcagggaaaagtgtccaagctttcagtgttggagcaggtatggacgacaaaggcgacccgagcaatgaggaggcacctaaggccatcaaacccaccagcaaagagttcaggaaaacatggggttttcgaaggaccactatcgccaagcgagagggcgcaggggacgcggaggctgacccactggagccgccacccccacagcagcagctgggcctgtccctgcggcgcagtgggaggcagcccaagcgcactgagcgcgtggagcagttcctgaccattgcgcggcgccgcggcaggaggagcatgcctgtctccctggaggattctggtgagcccacgtcctgccccgccacagacgccgagacagcctccgagggcagcgtggaaagcgcttctgagaccagaagcggcccccagtctgcttccacagctgtgaaggaacgaccagcctcttctgaaaaggtgaaaggaggggatgaccacgatgacacctccgatagtgacagcgatggcctgaccttgaaagagcttcagaatcgccttcgcaggaagcgggaacaggagcccactgagaggcccctgaaagggatccagagtcgcctgcggaagaagcgccgggaggagggtcccgccgagactgtgggctccgaggccagtgacactgtggagggcgtcctgcccagtaagcaggagcccgagaacgatcagggggttgtgtcccaggctgggaaagatgacagagagagtaagttggagggaaaggcggctcaggacatcaaagatgaggagcctggagacttgggccgaccgaagcctgaatgtgagggttacgaccccaacgccctgtattgcatttgccgccagcctcacaacaacaggtttatgatttgctgtgaccgctgtgaagaatggtttcatggcgattgtgtgggcatttctgaggctcgagggaggcttttggaaaggaatggggaagactatatctgcccaaactgcaccattctgcaagtgcaggatgagactcattcagaaacggcagatcagcaggaagctaaatggagacctggagatgctgatggcaccgattgtacaagtataggaacaatagagcagaagtctagcgaagaccaagggataaagggtagaattgagaaagctgcaaatccaagtggcaagaagaaactcaagatcttccagcctgtgatagaggcgcctggtgcctcaaaatgtattggccccgggtgctgtcacgtggcgcagcccgactcggtgtactgcagtaatgactgtatcctcaaacacgccgcagcgacaatgaagtttctaagctcaggtaaagaacagaagccaaagcctaaagaaaagatgaagatgaagccagagaagcccagtcttccgaaatgcggtgctcaggcaggtattaaaatctcttctgtgcacaagagaccagctccagaaaaaaaagagaccacagtgaagaaggcagtggtggtccctgcgcggagtgaagcactcgggaaggaagcagcttgtgagagcagcacgccgtcgtgggcgagcgatcacaattacaatgcagtaaagccagaaaagactgctgctccctcgccgtcactgttgtataaatccacgaaggaagacaggaggtccgaggagaaagcggcagccatggcagcctcaaagaaaacagcccctccaggctccgcggtgggcaagcagcctgcacctagaaacctcgtgccaaagaagtcttcttttgctaatgtggcagcagccacaccagccattaaaaagccaccctcaggtttcaagggcaccatccccaagaggccatggctctccgctaccccatcgagtggtgcttcagctgccaggcaggccggaccggcacctgcagcggcaacggctgcctccaagaagttccctggctccgctgctttggtgggagccgtaaggaagccagtggtaccttctgttccaatggcctcgccagccccaggacgccttggggctatgagtgctgcaccatcgcagccaaattcacaaattcggcaaaatatcagacgctccttaaaagagattttgtggaaaagagtcaatgacagcgatgacttaatcatgacagaaaacgaagtaggaaaaattgccctccatattgagaaggagatgtttaacttgtttcaagttacagataatcgctacaagagtaaatatcgcagcatcatgttcaacctgaaggaccctaaaaatcagggactcttccatcgtgttctgcgtgaggaaatctctttggcgaaacttgtgagactgaagccagaagaacttgtatctaaagagctttccacgtggaaagagaggccagcgagatctgtgatggagtccagaactaaactgcacaatgaaagcaagaagacggcccccaggcaggaggccatccccgatctggaggactctccgccagtgtcggattcagaggaacagcaagagtcagcacgtgctgtccctgagaagagcacagcgccgcttctcgacgtcttcagcagcatgttgaaagacaccaccagtcagcaccgcgcacacctcttcgatctcaactgtaaaatttgcacaggccaggttccctccgcagaagatgagccagctccgaaaaaacaaaaattgtcagcttctgttaagaaagaagacttaaaatcaaagcatgacagctctgcacctgacccagctccggattcagctgatgaggtgatgccggaggctgtgcctgaagttgcctctgagccaggcctagaaagtgcttctcatccaaatgtggacagaacgtatttccctgggcctccaggagatggccatcccgagccctccccgctggaagacctgtccccctgcccagcctcctgtgggagcggggtggtcaccaccgtcacagtgtccggccgggaccccaggaccgctccaagcagttcatgcacagccgtggcctccgcagcatcccgcccagacagcacccacatggtggaagccagacaggatgtgccgaagcctgtcttgacttctgtgatggtgcccaagtccatactagctaagccatcctcatctcctgacccaagatacctgtcagttcctccgtcaccaaatatcagcacttcagaatcacgttcccctccagagggagacacgaccctctttttgtctcgactcagcaccatttggaaaggatttattaacatgcagagtgtggcaaaatttgtcactaaggcgtatcctgtctctgggtgttttgattacctcagtgaggatttgcctgacacaattcacattggtgggaggatcgcaccgaagacagtttgggattatgttggcaaactcaagtcttctgtgtctaaggagctctgtctgatccgcttccaccccgccacagaggaagaggaggtcgcctatatctctctctactcctatttcagcagccgtggccgctttggtgttgtagctaataacaacaggcacgtcaaggacctctacctgatcccgctgagcgcccaggaccctgttccatccaaactcttgccctttgagggaccaggtaagcgccggctttctgggtggaggtgaggcccacctgcacctgcacccctcctcccactgacatgccctgctgagtcctgaccagcccagggctctctgggagcaggagttaggagcacagacgcagcggttagcaataggattcatctttgagggcgtaggactgtggcacgagaagtacccctgattcacagcataaattgtcttaggagagttttttagagagggaaaaacccacagcctgcaaccagctcatcttggcctcaggtcagagaagactcagtgcccagaagcccaaggctcagccagaaagggaggtgacactcccagcggccctgctctttcctctagacagactcgggagccagcacacaccgggaagtggctccatcagggatcacttctctaacagggatggatttccaggagacttaacaataatgacatagaaaactatttctagaaataattattttaaaatctgcagctcaaattgtaataggttcattcatctttggcaagctattttgtgtttgcacgttccttggaaagtactgtatttaaacgattatttacaaatagcctaaaatacatctttgtcaagggttgagggtgattccaggggccacgtgctctgttagtgaccagctctttcatagccccttagaagaagctgatgtgacttcagttaggggttagtatctgatgcccaactgaagtgtctccgtggccatgcagtccccagaggattggtgttctctcaaagcgggtgtgtggatcacacagtgtcctctgaagtgcttcgtcataaaggcaggtgctgtctggaccctgtgcctcagtgccctctgtccctgtcaccaggcctcggcgggtgttcctgccatagctgtgcagggtgttcccacccacacccctcatgccgcaccctagctagctggggtcctgtaggggccactccacatcttgggcgggacttctgtcgccccaggcacagcccacgttcctactggagcccattcttcacagctggagtgggctcagcctatgcctgtgttgtggaattatatgtccataaagggattggttggtatcagtaatttcagggttaaatatttgctggcgtggtgcattaaattattttagtgccagataaatttttaaaagcaaagtgctttagtgtgtcccctcaaatcctacttgggataaagagatgccacctaatgggtggcagaaaggaccctggtagaggttcttggtgttgcttgtgaagagctctggccagctccacgtgaccagggagaggaaaagcccggccctcctggaggtgaagaccgagaagctggcctctccgcacctgtgaagacccactggtcagttgcaagtgcgacagtgtgtgcactcagtgcagacactgcagcacctcagcacctccctaccggggtggaaagagcactttttctttacagaaacatgattcttagatagcgagcctcccctttttaaaacaattgaggcgatatttcatcctttcttgagcttctctccctgctcatctccaaacttggagctgtcaggtgagcacggttgtagggtgttgagcgagccccggcgcatgccgggcaccgggttccccacactgggcagtgacggggcccagggaggccaccagaggagcggcgcctccattctccccacagcaagggctggctgtgcaggtgcagccccggggcagagggaaaggacaggtctcccagcacctcccggatggcaccgggacaaggagggctgggctggggtcactcaccttgtctgctgagtgcgatggcaccaaccacccacactgtcagctccgcgaccagctgggggaacgtcacactcgcccaccaaggcacttgctgaggccacgacgccgcctgacggggacacacaaaagccccagggactttgatccacgataaagagcagaggcgtctgggtaaagtaacacagggcaagggactttagaaaagtaacagctagtgaaacctttccatacacttcagaaatgttttaacttaagacttcagtataatgttaacttctcctgatgtccttgttgacatgaatgcgtgtgcgtgaaatctcacacacttccatggtcactaaacagccttcaccccgggccaggccatcgggtactcggcccgcttcacgtactgattacttgacttggcgttttctagatataaacatgtacatgtgtgtcctggctttgtggtgtaaatgtgtagtgcgtgtgcatgtgcgcgcgtgtgtgtgtgtaaggctaggtcctggcatgtttcccctgtctcagcggaccctgtcctcacggagatagcccagaagcccttggacagcacaggccacacctgagggtgctgatggtggtgactccacagagctgtggtcaggggtgagcgtgtgctgcgcagcttggagtcacgcccccagaagtgctgggtgagggtctgcaggacccagctccattccacagcctcagttctctgcggcacatgcagcacaggcctgaaggagacctggcgccccagccttgagctgcccgtctgcatcagggcactgatgtgggagcatcttcccctggggatgttaaggagaaggtcctgttgggggtagagattcacgcagaaaagagtgactgactcgtccatgtgcctcagtttataccacacaattgcaggtgtccatgcctcccacacatggggacctagtgggttttgacagcgtggtgtccagtcctagccccctcagtgcttgctgttcacacttaagcaagtgaaggcctgaaggtgcccagctgtgccctcaggggaaacttaagtcacccgccctgtcagcacttggcccttgtcgggcagtgagagtggagctgcccccgcagcaccctcaggagccatgcagttcacagcagtagctggatctccctgaggacatttgtccttgcatatcttaatgatttgtccacagaaacaccgggttgtcttcctctgcccctctgccccgcagtgggggcactctctgtaactcagcatcacggtggggggcagctgggaggcctggttccaggtgaccttctccacctagatgttcaccccactcagttccagctttaccaacagggccccccgcagggacttggggtcgcagagtcccggcctgtctcagggccttgttcatggaagggagatgagtcaggttgaaagctcatcgtgtagggttctgtgcagggcccttacaggactggaccgcagccaagatgcctgcctgttaaccatgcccagcccccgtcatttccgcgtgaagccgcaggcctcggagccttggtctgaaatgcctgtggagtaacctcggtccataaacatgggtgcacagtctgttctccccaagtacagggcaggaggaaacaccgccctctgtagctgctcgaatggaaagggctcttttctctgaggtctttatacattagaaagctcttctgggaagaatgtttgaatccatagtgtctttctgtattcacttttaattgctttctaaattagctgagaaattctgacttgaaatattgtcaggtaagcatttcttcagttttcatgtgtgtatgtaacagtagctttgcatggaaattgtaatcagagtcaaatacagtattgaatggaatgtactgccttctcctcctaaatcaataaacatctttcatgg

SEQ ID NO: 2380 - DNA, 7551 bp, Homo sapiens
  source 1..7551: mol_type = genomic DNA
ctcggtggccgtccgcccactccgcggcgttcggggaaatggctgcgagaccctagaggcctgcggagcttactccacgggaacagcctctagataatctgagttgttgaaaatacgaagcctgttactcgtgaacagtggctgacaacagtgttgttgtgagcctggctgtctgcttggacccagaggtttcgtctgccagggtttttggttgtatttaggatttcagggaaaagtgtccaagctttcagtgttggagcaggtatggacgacaaaggcgacccgagcaatgaggaggcacctaaggccatcaaacccaccagcaaagagttcaggaaaacatggggttttcgaaggaccactatcgccaagcgagagggcgcaggggacgcggaggctgacccactggagccgccacccccacagcagcagctgggcctgtccctgcggcgcagtgggaggcagcccaagcgcactgagcgcgtggagcagttcctgaccattgcgcggcgccgcggcaggaggagcatgcctgtctccctggaggattctggtgagcccacgtcctgccccgccacagacgccgagacagcctccgagggcagcgtggaaagcgcttctgagaccagaagcggcccccagtctgcttccacagctgtgaaggaacgaccagcctcttctgaaaaggtgaaaggaggggatgaccacgatgacacctccgatagtgacagcgatggcctgaccttgaaagagcttcagaatcgccttcgcaggaagcgggaacaggagcccactgagaggcccctgaaagggatccagagtcgcctgcggaagaagcgccgggaggagggtcccgccgagactgtgggctccgaggccagtgacactgtggagggcgtcctgcccagtaagcaggagcccgagaacgatcagggggttgtgtcccaggctgggaaagatgacagagagagtaagttggagggaaaggcggctcaggacatcaaagatgaggagcctggagacttgggccgaccgaagcctgaatgtgagggttacgaccccaacgccctgtattgcatttgccgccagcctcacaacaacaggtttatgatttgctgtgaccgctgtgaagaatggtttcatggcgattgtgtgggcatttctgaggctcgagggaggcttttggaaaggaatggggaagactatatctgcccaaactgcaccattctgcaagtgcaggatgagactcattcagaaacggcagatcagcaggaagctaaatggagacctggagatgctgatggcaccgattgtacaagtataggaacaatagagcagaagtctagcgaagaccaagggataaagggtagaattgagaaagctgcaaatccaagtggcaagaagaaactcaagatcttccagcctgtgatagaggcgcctggtgcctcaaaatgtattggccccgggtgctgtcacgtggcgcagcccgactcggtgtactgcagtaatgactgtatcctcaaacacgccgcagcgacaatgaagtttctaagctcaggtaaagaacagaagccaaagcctaaagaaaagatgaagatgaagccagagaagcccagtcttccgaaatgcggtgctcaggcaggtattaaaatctcttctgtgcacaagagaccagctccagaaaaaaaagagaccacagtgaagaaggcagtggtggtccctgcgcggagtgaagcactcgggaaggaagcagcttgtgagagcagcacgccgtcgtgggcgagcgatcacaattacaatgcagtaaagccagaaaagactgctgctccctcgccgtcactgttgtataaatccacgaaggaagacaggaggtccgaggagaaagcggcagccatggcagcctcaaagaaaacagcccctccaggctccgcggtgggcaagcagcctgcacctagaaacctcgtgccaaagaagtcttcttttgctaatgtggcagcagccacaccagccattaaaaagccaccctcaggtttcaagggcaccatccccaagaggccatggctctccgctaccccatcgagtggtgcttcagctgccaggcaggccggaccggcacctgcagcggcaacggctgcctccaagaagttccctggctccgctgctttggtgggagccgtaaggaagccagtggtaccttctgttccaatggcctcgccagccccaggacgccttggggctatgagtgctgcaccatcgcagccaaattcacaaattcggcaaaatatcagacgctccttaaaagagattttgtggaaaagagtcaatgacagcgatgacttaatcatgacagaaaacgaagtaggaaaaattgccctccatattgagaaggagatgtttaacttgtttcaagttacagataatcgctacaagagtaaatatcgcagcatcatgttcaacctgaaggaccctaaaaatcagggactcttccatcgtgttctgcgtgaggaaatctctttggcgaaacttgtgagactgaagccagaagaacttgtatctaaagagctttccacgtggaaagagaggccagcgagatctgtgatggagtccagaactaaactgcacaatgaaagcaagaagacggcccccaggcaggaggccatccccgatctggaggactctccgccagtgtcggattcagaggaacagcaagagtcagcacgtgctgtccctgagaagagcacagcgccgcttctcgacgtcttcagcagcatgttgaaagacaccaccagtcagcaccgcgcacacctcttcgatctcaactgtaaaatttgcacaggccaggttccctccgcagaagatgagccagctccgaaaaaacaaaaattgtcagcttctgttaagaaagaagacttaaaatcaaagcatgacagctctgcacctgacccagctccggattcagctgatgaggtgatgccggaggctgtgcctgaagttgcctctgagccaggcctagaaagtgcttctcatccaaatgtggacagaacgtatttccctgggcctccaggagatggccatcccgagccctccccgctggaagacctgtccccctgcccagcctcctgtgggagcggggtggtcaccaccgtcacagtgtccggccgggaccccaggaccgctccaagcagttcatgcacagccgtggcctccgcagcatcccgcccagacagcacccacatggtggaagccagacaggatgtgccgaagcctgtcttgacttctgtgatggtgcccaagtccatactagctaagccatcctcatctcctgacccaagatacctgtcagttcctccgtcaccaaatatcagcacttcagaatcacgttcccctccagagggagacacgaccctctttttgtctcgactcagcaccatttggaaaggatttattaacatgcagagtgtggcaaaatttgtcactaaggcgtatcctgtctctgggtgttttgattacctcagtgaggatttgcctgacacaattcacattggtgggaggatcgcaccgaagacagtttgggattatgttggcaaactcaagtcttctgtgtctaaggagctctgtctgatccgcttccaccccgccacagaggaagaggaggtcgcctatatctctctctactcctatttcagcagccgtggccgctttggtgttgtagctaataacaacaggcacgtcaaggacctctacctgatcccgctgagcgcccaggaccctgttccatccaaactcttgccctttgagggaccaggtaagcgccggctttctgggtggaggtgaggcccacctgcacctgcacccctcctcccactgacatgccctgctgagtcctgaccagcccagggctctctgggagcaggagttaggagcacagacgcagcggttagcaataggattcatctttgagggcgtaggactgtggcacgagaagtacccctgattcacagcataaattgtcttaggagagttttttagagagggaaaaacccacagcctgcaaccagctcatcttggcctcaggtcagagaagactcagtgcccagaagcccaaggctcagccagaaagggaggtgacactcccagcggccctgctctttcctctagacagactcgggagccagcacacaccgggaagtggctccatcagggatcacttctctaacagggatggatttccaggagacttaacaataatgacatagaaaactatttctagaaataattattttaaaatctgcagctcaaattgtaataggttcattcatctttggcaagctattttgtgtttgcacgttccttggaaagtactgtatttaaacgattatttacaaatagcctaaaatacatctttgtcaagggttgagggtgattccaggggccacgtgctctgttagtgaccagctctttcatagccccttagaagaagctgatgtgacttcagttaggggttagtatctgatgcccaactgaagtgtctccgtggccatgcagtccccagaggattggtgttctctcaaagcgggtgtgtggatcacacagtgtcctctgaagtgcttcgtcataaaggcaggtgctgtctggaccctgtgcctcagtgccctctgtccctgtcaccaggcctcggcgggtgttcctgccatagctgtgcagggtgttcccacccacacccctcatgccgcaccctagctagctggggtcctgtaggggccactccacatcttgggcgggacttctgtcgccccaggcacagcccacgttcctactggagcccattcttcacagctggagtgggctcagcctatgcctgtgttgtggaattatatgtccataaagggattggttggtatcagtaatttcagggttaaatatttgctggcgtggtgcattaaattattttagtgccagataaatttttaaaagcaaagtgctttagtgtgtcccctcaaatcctacttgggataaagagatgccacctaatgggtggcagaaaggaccctggtagaggttcttggtgttgcttgtgaagagctctggccagctccacgtgaccagggagaggaaaagcccggccctcctggaggtgaagaccgagaagctggcctctccgcacctgtgaagacccactggtcagttgcaagtgcgacagtgtgtgcactcagtgcagacactgcagcacctcagcacctccctaccggggtggaaagagcactttttctttacagaaacatgattcttagatagcgagcctcccctttttaaaacaattgaggcgatatttcatcctttcttgagcttctctccctgctcatctccaaacttggagctgtcaggtgagcacggttgtagggtgttgagcgagccccggcgcatgccgggcaccgggttccccacactgggcagtgacggggcccagggaggccaccagaggagcggcgcctccattctccccacagcaagggctggctgtgcaggtgcagccccggggcagagggaaaggacaggtctcccagcacctcccggatggcaccgggacaaggagggctgggctggggtcactcaccttgtctgctgagtgcgatggcaccaaccacccacactgtcagctccgcgaccagctgggggaacgtcacactcgcccaccaaggcacttgctgaggccacgacgccgcctgacggggacacacaaaagccccagggactttgatccacgataaagagcagaggcgtctgggtaaagtaacacagggcaagggactttagaaaagtaacagctagtgaaacctttccatacacttcagaaatgttttaacttaagacttcagtataatgttaacttctcctgatgtccttgttgacatgaatgcgtgtgcgtgaaatctcacacacttccatggtcactaaacagccttcaccccgggccaggccatcgggtactcggcccgcttcacgtactgattacttgacttggcgttttctagatataaacatgtacatgtgtgtcctggctttgtggtgtaaatgtgtagtgcgtgtgcatgtgcgcgcgtgtgtgtgtgtaaggctaggtcctggcatgtttcccctgtctcagcggaccctgtcctcacggagatagcccagaagcccttggacagcacaggccacacctgagggtgctgatggtggtgactccacagagctgtggtcaggggtgagcgtgtgctgcgcagcttggagtcacgcccccagaagtgctgggtgagggtctgcaggacccagctccattccacagcctcagttctctgcggcacatgcagcacaggcctgaaggagacctggcgccccagccttgagctgcccgtctgcatcagggcactgatgtgggagcatcttcccctggggatgttaaggagaaggtcctgttgggggtagagattcacgcagaaaagagtgactgactcgtccatgtgcctcagtttataccacacaattgcaggtgtccatgcctcccacacatggggacctagtgggttttgacagcgtggtgtccagtcctagccccctcagtgcttgctgttcacacttaagcaagtgaaggcctgaaggtgcccagctgtgccctcaggggaaacttaagtcacccgccctgtcagcacttggcccttgtcgggcagtgagagtggagctgcccccgcagcaccctcaggagccatgcagttcacagcagtagctggatctccctgaggacatttgtccttgcatatcttaatgatttgtccacagaaacaccgggttgtcttcctctgcccctctgccccgcagtgggggcactctctgtaactcagcatcacggtggggggcagctgggaggcctggttccaggtgaccttctccacctagatgttcaccccactcagttccagctttaccaacagggccccccgcagggacttggggtcgcagagtcccggcctgtctcagggccttgttcatggaagggagatgagtcaggttgaaagctcatcgtgtagggttctgtgcagggcccttacaggactggaccgcagccaagatgcctgcctgttaaccatgcccagcccccgtcatttccgcgtgaagccgcaggcctcggagccttggtctgaaatgcctgtggagtaacctcggtccataaacatgggtgcacagtctgttctccccaagtacagggcaggaggaaacaccgccctctgtagctgctcgaatggaaagggctcttttctctgaggtctttatacattagaaagctcttctgggaagaatgtttgaatccatagtgtctttctgtattcacttttaattgctttctaaattagctgagaaattctgacttgaaatattgtcaggtaagcatttcttcagttttcatgtgtgtatgtaacagtagctttgcatggaaattgtaatcagagtcaaatacagtattgaatggaatgtactgccttctcctcctaaatcaataaacatctttcatggaaa

SEQ ID NO: 2381 - DNA, 8477 bp, Homo sapiens
  source 1..8477: mol_type = genomic DNA
ctcggtggccgtccgcccactccgcggcgttcggggaaatggctgcgagaccctagaggcctgcggagcttactccacgggaacagcctctagataatctgagttgttgaaaatacgaagcctgttactcgtgaacagtggctgacaacagtgttgttgtgagcctggctgtctgcttggacccagaggtttcgtctgccagggtttttggttgtatttaggatttcagggaaaagtgtccaagctttcagtgttggagcaggtatggacgacaaaggcgacccgagcaatgaggaggcacctaaggccatcaaacccaccagcaaagagttcaggaaaacatggggttttcgaaggaccactatcgccaagcgagagggcgcaggggacgcggaggctgacccactggagccgccacccccacagcagcagctgggcctgtccctgcggcgcagtgggaggcagcccaagcgcactgagcgcgtggagcagttcctgaccattgcgcggcgccgcggcaggaggagcatgcctgtctccctggaggattctggtgagcccacgtcctgccccgccacagacgccgagacagcctccgagggcagcgtggaaagcgcttctgagaccagaagcggcccccagtctgcttccacagctgtgaaggaacgaccagcctcttctgaaaaggtgaaaggaggggatgaccacgatgacacctccgatagtgacagcgatggcctgaccttgaaagagcttcagaatcgccttcgcaggaagcgggaacaggagcccactgagaggcccctgaaagggatccagagtcgcctgcggaagaagcgccgggaggagggtcccgccgagactgtgggctccgaggccagtgacactgtggagggcgtcctgcccagtaagcaggagcccgagaacgatcagggggttgtgtcccaggctgggaaagatgacagagagagtaagttggagggaaaggcggctcaggacatcaaagatgaggagcctggagacttgggccgaccgaagcctgaatgtgagggttacgaccccaacgccctgtattgcatttgccgccagcctcacaacaacaggtttatgatttgctgtgaccgctgtgaagaatggtttcatggcgattgtgtgggcatttctgaggctcgagggaggcttttggaaaggaatggggaagactatatctgcccaaactgcaccattctgcaagtgcaggatgagactcattcagaaacggcagatcagcaggaagctaaatggagacctggagatgctgatggcaccgattgtacaagtataggaacaatagagcagaagtctagcgaagaccaagggataaagggtagaattgagaaagctgcaaatccaagtggcaagaagaaactcaagatcttccagcctgtgatagaggcgcctggtgcctcaaaatgtattggccccgggtgctgtcacgtggcgcagcccgactcggtgtactgcagtaatgactgtatcctcaaacacgccgcagcgacaatgaagtttctaagctcaggtaaagaacagaagccaaagcctaaagaaaagatgaagatgaagccagagaagcccagtcttccgaaatgcggtgctcaggcaggtattaaaatctcttctgtgcacaagagaccagctccagaaaaaaaagagaccacagtgaagaaggcagtggtggtccctgcgcggagtgaagcactcgggaaggaagcagcttgtgagagcagcacgccgtcgtgggcgagcgatcacaattacaatgcagtaaagccagaaaagactgctgctccctcgccgtcactgttgtataaatccacgaaggaagacaggaggtccgaggagaaagcggcagccatggcagcctcaaagaaaacagcccctccaggctccgcggtgggcaagcagcctgcacctagaaacctcgtgccaaagaagtcttcttttgctaatgtggcagcagccacaccagccattaaaaagccaccctcaggtttcaagggcaccatccccaagaggccatggctctccgctaccccatcgagtggtgcttcagctgccaggcaggccggaccggcacctgcagcggcaacggctgcctccaagaagttccctggctccgctgctttggtgggagccgtaaggaagccagtggtaccttctgttccaatggcctcgccagccccaggacgccttggggctatgagtgctgcaccatcgcagccaaattcacaaattcggcaaaatatcagacgctccttaaaagagattttgtggaaaagagtcaatgacagcgatgacttaatcatgacagaaaacgaagtaggaaaaattgccctccatattgagaaggagatgtttaacttgtttcaagttacagataatcgctacaagagtaaatatcgcagcatcatgttcaacctgaaggaccctaaaaatcagggactcttccatcgtgttctgcgtgaggaaatctctttggcgaaacttgtgagactgaagccagaagaacttgtatctaaagagctttccacgtggaaagagaggccagcgagatctgtgatggagtccagaactaaactgcacaatgaaagcaagaagacggcccccaggcaggaggccatccccgatctggaggactctccgccagtgtcggattcagaggaacagcaagagtcagcacgtgctgtccctgagaagagcacagcgccgcttctcgacgtcttcagcagcatgttgaaagacaccaccagtcagcaccgcgcacacctcttcgatctcaactgtaaaatttgcacaggccaggttccctccgcagaagatgagccagctccgaaaaaacaaaaattgtcagcttctgttaagaaagaagacttaaaatcaaagcatgacagctctgcacctgacccagctccggattcagctgatgaggtgatgccggaggctgtgcctgaagttgcctctgagccaggcctagaaagtgcttctcatccaaatgtggacagaacgtatttccctgggcctccaggagatggccatcccgagccctccccgctggaagacctgtccccctgcccagcctcctgtgggagcggggtggtcaccaccgtcacagtgtccggccgggaccccaggaccgctccaagcagttcatgcacagccgtggcctccgcagcatcccgcccagacagcacccacatggtggaagccagacaggatgtgccgaagcctgtcttgacttctgtgatggtgcccaagtccatactagctaagccatcctcatctcctgacccaagatacctgtcagttcctccgtcaccaaatatcagcacttcagaatcacgttcccctccagagggagacacgaccctctttttgtctcgactcagcaccatttggaaaggatttattaacatgcagagtgtggcaaaatttgtcactaaggcgtatcctgtctctgggtgttttgattacctcagtgaggatttgcctgacacaattcacattggtgggaggatcgcaccgaagacagtttgggattatgttggcaaactcaagtcttctgtgtctaaggagctctgtctgatccgcttccaccccgccacagaggaagaggaggtcgcctatatctctctctactcctatttcagcagccgtggccgctttggtgttgtagctaataacaacaggcacgtcaaggacctctacctgatcccgctgagcgcccaggaccctgttccatccaaactcttgccctttgagggaccaggtcttgagtcaccacgtccgaatataattcttgggttagtaatctgccaaaaaatcaaacgtcccgcaaacagtggagagttagacaagatggacgaaaagcggacccgacttcaaccggaagaagcggacgttccggcctatccaaaagtagccacagtcccgcagtcggaaaagaagccctccaagtatccactctgctctgcagacgcggctgtcagcaccacacctcctgggtcgccgccgcctccgccccctcttccagaaccaccggtgctaaaagtgctgtcatccctcaaacctgcagcccccagcccagccacagcagccacaacagcagcggcagcctccacggcagcttcctccaccgcttcgtctgcttccaaaacagcatcaccgctggagcacatcctgcagactctctttggaaagaagaaatcattcgacccgtccgccagagagcctcccgggtccaccgcaggtctcccccaggagcccaaaaccacagcagaggacggggtgccggcacctccgttgttagatccgatcgtccagcagttcggtcagttctcaaaagataaggctctagaggaagaggaggacgacaggccatacgaccctgaggaggagtacgacccggagagggccttcgacactcagcttgtggagcgagggcggcgccacgaggtggaaagggctcctgaagcagctgcagccgagcgggaagaggtggcctatgaccccgaggatgagaccatcttagaagaagcgaaagtgactgttgatgacctgcccaacaggatgtgtgccgacgtgagaaggaactccgtggagaggcctgccgagccggtggccggggctgcgacgccctccctggtggagcaacagaagatgctagaagagctgaacaaacagatcgaggagcagaagagacagctggaggagcaagaagaagctctcaggcagcagagggccgccgtcggggtctccatggcccacttctcggtgtcggacgccttgatgtctccaccaccaaagtcgtccttgcccaaggcagagctgttccagcaagagcagcagtctgcagacaagcccgcctcactgccccccgccagccaggcgtcaaaccacagggacccccggcaggcgaggcgcctggccactgagaccggtgagggggagggggagcctctctccaggctctcggcacgtggtgcccagggtgccctgcccgagagagatgcttccaggggtggcctcgtgggccaggcgcccatgccagtcccggaggaaaaagagccagcctcttccccctgggcttcgggcgaaaagcccccagcggggtccgagcaggacggctggaaggcagagcctggggagggcacccgccccgccacggttggagacagctcggccaggcctgcccggagggtgctgctgcccacaccgccttgcggcgccctgcagcccggcttcccgctgcagcacgacggtgagagggaccctttcacctgcccggggttcgcgtcgcaggacaaggctctcggctcagcccagtatgaggacccaagaaatcttcattctgctggaaggagcagcagccctgcaggtgaaacagagggggacagagagccacaggccagacccggcgagggcaccgccccgctccccccaccaggacagaaagtggggggctctcagcccccgtttcagggtcagcgggaacctggacctcatgctttggggatgtcagggcttcacggccccaatttcccgggaccaagggggccagcccctccgtttccagaagagaatatcgcttctaacgatgggccacgagggcctccgccagccagattcggagcccagaaggggcccatcccttccttattctcggggcaacatgggccacctccttatggggacagcagaggcccctcaccctcttaccttggtggaccacgaggagtggcaccatcccaatttgaagaacgcaaggatccccatggggagaagagggagttccaggacgccccgtataacgaggtgacgggcgcccccgcccagtttgaagggacagagcaagccccatttctgggaagcagaggcggcgcgcctttccagttcggaggccagagaaggccactgctgtctcagctgaaaggcccccgaggcggcccccctccctctcagtttggaggtcagagaggaccaccccctggtcatttcgtgggcccaagagggccccatcctagtcagtttgaaactgcccggggccctcatcccaaccagtttgaaggacccagaggccaagcgcctaactttatgccaggtcccaggggcattcagcctcagcagttcgaagaccagagggtccattcaccaccaagattcacaaaccaaagggcgcctgcacccctgcagtttggtggactacgggggtccgcacccttttctgaaaaaaatgagcagaccccttcgcgatttcacttccagggccaggccccgcaggtgatgaagccgggccccaggcccctgctggagcttcccagccaccccccgcagcaccggaaggaccgctgggaggaggccgggccgccctccgcgctctcctccagtgcgcccggacagggccccgaggccgacggacagtgggcatcggccgacttccgagaggggaaaggccacgaatacagaaaccagactttcgaagggaggcagagagagcggtttgacgtggggcccaaagagaagccgctggaggagcccgacgcccagggccgggcgtccgaggacaggaggagagagcgcgagcgcggccgaaactggagccgagagcgggactgggaccggccccgggagtgggaccgacaccgggacaaggactccagccgggactgggacagaaaccgggagaggagcgccaaccgcgaccgagagcgcgaggccgaccggggcaaggagtgggaccgcagccgggagcggagcaggaaccgagagcgcgagcgagaccggaggcgcgaccgggaccggtcccggagcagagagcgggaccgagacaaggccagggacagggagcggggccgcgaccgcaaggaccggagcaagagcaaagagagcgctcgggacccgaagcccgaggcctcgagggcctccgacgctggcaccgcctcgcaggcctagacgccccggccgggcagagaccctttttaaagccacgttcgtaagatgcgttgaacaaatagcttttgaaatagccacgatcttagattcaggatagaatattctggacttaaacattactgtaattttgtgtaaatggtttcttacaagatttcacatctttacaattctgatgcttttttaaaaaaactaaactttaatatttccatttaaaattaaaagaaatgggaaattgcctacggagcatattgcttttcagatcatagttatcttttccaataactttattgtaaattttaagggagtttcgttggaccctagagccataccttcactgacatctcatccgtttgtgtttccaaaagctgcttttacaggtcttagccgccgccccggaggccggtgtgggcgtgacctgcaggcgtccaccctgcggctacgggagaagtcttagtagcttgtatctggagtcttgagaaacacaaaccttacaaatgcatctttcttttgtcataaaattggaattacaattttcaactgggaaacagaaacacatttcttagcgtgctcagattttatatatcaccttatcaattttttccaaaacatgatttaaagcaacatctgtcctagtataattgttgcattttaaataacaatttattgaaaaatgttaagttttaccagcctaaaaaaagtaacaaaccaattaagtgtactttgggggcagggaggagtccttgatttgaataatcaggagttttgttggtccagtttcgccttctgagcagttcttctgtatcccgggaaaagtacgctcggccccaaactggtatttgtcagacgatacatgtaaaagtttgtccttgaacgtggaacaagacttgtgtaaagtctgagacgggaactagtgatcactagctcaagaactgcaaatgagacaggaagctgttcactgtgaaacagtctcttgcttgtcgtgtatttttcgagtacttctgaagtgtgaagtaaaaaaatctggctaatttatttgtacaaatacactttgataattttttatattttcataaacttttacagatgtaaaattaaagaacttcacttgttctttggagtctgttattccattgtacgtcactacagatttttcactttatagcacagattttttaagttaagaaaacattgagaatgtatcagtttgagatgtttggtgttgaaagccaagtgtccataggttaaattacattaaagtaggtgtcacgttccaacatctagtacgatgagaaggttttgtttgtttaacatataaagcaaatttttctaatttaaatacacaaatgtaaaaatcaagtgtgtttctttagtttacttgatagagattcctgtacattgtattttatattgcggaggcttatatcactgtacatgagaacatggaacgacctaggttttgttactcgcagtagaataaacagctacaggaa

SEQ ID NO: 2382 - DNA, 2369 bp, Homo sapiens
  source 1..2369: mol_type = genomic DNA
agacagagtcttgctctgttgcggaggctggagtgcagtgatctcagctcactggaagctccgcctcctgggttcaagcgattctcctatctcaacctcccaagtgtgccaccacacctgccgaatgtttgtgtttttagtagggatggggttcgccatgttgggcaggctggtctcaaactcctgacctcaagtgatctgcccgcctcggcctcccagagtgctgggattataggcgtgagccaccatgcctggacatgaccctgtctctaaaacaatgtaatgaactgcagctcattcttgtgtgcacttttctgcaccccctttcccttaacacttactattgtctggcatgctacgtgttttcttgatctcattagcctctcccaccccaactgccacactgcactatcagagggcagcacttatcactgctgtagaacaaagtcctgcactgagccgatggcccagaaattttctttttatttatttatttattttttttttgagacagagtcttactctgtcgctcaggctggagtgtagtggcgcgatctcagctcactgcaacctctgcctcctggtttcaagcaattctccttcctcagcctccagagtagctgggattacacgcgcctgccaccgcgcctggctaatttttgtatttttagtagagatggggtttcaaccatgttggccaggctggtctcaaactcctgacctcaggtgatcctgcccacctaagcctcccaaaatgctggtattacaggcatgagccaccgtgcccggcctaaatatttaataaaataatggacgatgggtgccttctactgagctcccggtaattgtgagtgagtagaggacttgccctggggacattcagtgacctgctgggtgttgctgagctgtgaggaagttcaggtctggctgcagtggtgaggctgtgactcaatcaatcactgctgatgctcccaggacctgcaccagcttagtcctaggggcaaggattttaactgtccacctcagtttcttcatttgtaagatgcaaataacagtcacccctgcctcatgggatggagctgtgtaatgcccgcaacagtgcctgctgcatagaggggttgctgccagctgcctctccctccttgtctcttacctgcctgctgcctgggtcaggatgaagaggggcccttgtgttgcccccaccctggctgcctgctaagggcccatgtgatctgcctggcagaggagtttcttcaggaagaaccagggcagcttctgcccctagagggccaatgcccttgctgtgagaagtcactgctttggggagacctgatctggctgtgccagatggacactgagaaagaagtagaagactcagaattagaagaggaacatggagctgatccaggacacctcccgcccgccactggagtacgtgaagggggtcccgctcatcaagtactttgcagaggcactggggcccctgcagagcttccaagcccgacctgatgacctgctcatcaacacctaccccaagtctggcaccacctgggtgagccagatactggacatgatctaccagggcggcgacctagagaagtgtaaccgggctcccatctacgtacgggtgcccttccttgaggtcaatgatccaggggaaccctcagggctggagactctgaaagacacaccgcccccacggctcatcaagtcacacctgcccctggctctgctccctcagactctgttggatcagaaggtcaaggtggtctatgttgcccgaaacccaaaggacgtggcggtctcctactaccatttccaccgtatggaaaaggcgcaccctgagcctgggacctgggacagcttcctggaaaagttcatggctggagaagtgtcctacgggtcctggtaccagcacgtgcaggagtggtgggagctgagccgcacccaccctgttctctacctcttctatgaagacatgaaggagaaccccaaaagggagattcaaaagatcctggagtttgtggggcgctccctgccagaggagaccatggacttcatggttcagcacacgtcgttcaaggagatgaagaagaaccctatgaccaactacaccaccgtcccccaggagctcatggaccacagcatctcccccttcatgaggaaaggcatggctggggactggaagaccaccttcaccgtggcgcagaatgagcgcttcgatgcggactatgcggagaagatggcaggctgcagcctcagcttccgctctgagctgtgagaggggctcctggagtcactgcagagggagtgtgcgaatctaccctgaccaatgggctcaagaataaagtatgatttttgagtcaggc

SEQ ID NO: 2383 - DNA, 1851 bp, Homo sapiens
  source 1..1851: mol_type = genomic DNA
gattgtgggaaggcagctgaactcggcgcctggaaagatggaggcagcggagacagaggcggaagctgcagccctagaggtcctggctgaggtggcaggcatcttggaacctgtaggcctgcaggaggaggcagaactgccagccaagatcctggttgagtttgtggtggactctcagaagaaagacaagctgctctgcagccagcttcaggtagcggatttcctgcagaacatcctggctcaggaggacactgctaagggtctcgaccccttggcttctgaagacacgagccgacagaaggcaattgcagctaaggaacaatggaaagagctgaaggccacctacagggagcacgtagaggccatcaaaattggcctcaccaaggccctgactcagatggaggaagcccagaggaaacggacacaactccgggaagcctttgagcagctccaggccaagaaacaaatggccatggagaaacgcagagcagtccagaaccagtggcagctacaacaggagaagcatctgcagcatctggcggaggtttctgcagaggtgagggagcgtaagacagggactcagcaggagcttgacagggtgtttcagaaacttggaaacctgaagcagcaggcagaacaggagcgggacaagctgcagaggtatcagaccttcctccagcttctgtataccctgcagggtaagctgttgttccctgaggctgaggctgaggcagagaatcttccagatgataaaccccagcagccgactcgaccccaggagcagagtacaggagacaccatggggagagaccctggtgtgtccttcaaggctgttggtctacaacctgctggagatgtaaatttgccatgacttcctggaggacagcagcatggagaaagatcctagaaaaggtcagacccaactcaggccttggtgtccctggactgcaagtgtggaaggagggaaagcctggtttacctctctctgcatctgagctctgctacccatggagcagatggatggtgggaacaggaaagagcttatgttacacctcattcccatgcttagcccacccagagctaacccctgtcttcttccccaggcctctgacttccctcacctcccaaccatcattacaggaaagactgtgaactcctgagttcagcttgatttctgactacatcccagcaagctctggcatctgtggattaaaatccctggatctctctcagttgtgtatttgttcatcttcatatgctggcaggaacaactattaatacagatactcagaagccaataacatgacaggagctgggactggtttgaacacagggtgtgcagatggggagggggtactggccttgggcctcctatgatgcagacatggtgaatttaattcaaggaggaggagaatgttttaggcaggtggttatatgtgggaagataattttattcatggatccaaatgtttgttgagtcctttctttgtgctaaggttcttgcggtgaaccagaattataacagtgagctcatctgactgttttaggatgtacagcctagtgttaacattcttggtatctttttgtgccttatctaaaacatttctcgatcactggtttcagatgttcatttattatattcttttcaaagattcagagattggcttttgtcatccactattgtatgttttgtttcattgacctctagtgataccttgatctttcccactttctgttttcggattggagaagatgtaccttttttgtcaactcttacttttatcagatgatcaactcacgtatttggatctttatttgttttctcaaataaatatttaaggttatacattt

SEQ ID NO: 2384 - DNA, 1615 bp, Homo sapiens
  source 1..1615: mol_type = genomic DNA
atggggacagtcacagaagatcttattagacggaatgctgaacacaacgactgtgtcattttttccctggaggaactctcgttgcatcagcaagaaatagaaagactagaacacattgataaatggtgccgggatttaaaaattctctatcttcaaaataatcttattgggaaaattgaaaatgttagcaaactcaagaaacttgaatatttgaatttagctttaaacaacattgaaaaaatagaaaacttggaaggatgtgaagagctggcaaaacttgacctgactgtgaatttcattggagagctgagcagcattaaaaacttgcagcacaatatccatctgaaggagctctttctcatggggaacccatgtgcttcctttgaccactatagggagttcgtggtagcaactcttccacaattaaagtggttggatggtaaagaaatagagccttcagaaaggattaaggcattgcaggactattcagtaattgaaccacaaatcagagagcaggaaaaagatcactgtcttaaacgagccaaactcaaggaagaggctcagaggaaacaccaagaagaggataaaaatgaagacaagagaagtaacgcaggctttgatggacgttggtacacagacatcaatgctactctttcctctttagagagcaaagaccacctacaggcaccagacacagaggaacacaacacaaagaaattagacaacagtgaagatgacttggaattctggaataagccctgtttgtttactcctgaatcaagattggaaactcttagacacatggaaaaacaacggaagaaacaggaaaaattaagtgaaaaaaagaagaaagtgaaaccacccaggactttgatcactgaagatgggaaagccctaaatgtgaatgagcccaaaattgacttctctttgaaagataacgaaaagcagatcatcctggaccttgctgtctataggtatatggatacctctttaatcgatgttgatgtgcaaccaacttacgtgcgagtaatgatcaaaggaaagccatttcagcttgtccttcctgcagaagtgaaacccgatagtagttctgctaaaagatctcagacaacgggtcatttggtcatctgcatgcccaaggtaggagaagtaatcacaggtggtcagcgagcattcaaatctatgaaaactacctcggacaggagcagagaacaaacaaatacaagctattctactggattctagaggtgatgtttctgacagtcaggtcgtgggtaagaccagtgatgggcgtccgtcctagaggcctctgacattaaggcggggaaagcaaagaagcaagcacatggagaaactagaagtagaccctagcaagcactcattccctgatgtgactaacatagttcaagagaaaaaacacacacccagaagacgacctgaacccaaaattataccaagtgaggaagacccaacctttgaagacaaccctgaagtgcctccgctgatttgaaacatctggctgcgttgccattggctgagacccaccaggtccagttttggttggtgtagagaccatatgcatattattcctgggataaacacagagttatttgtc

SEQ ID NO: 2385 - DNA, 2954 bp, Homo sapiens
  source 1..2954: mol_type = genomic DNA
cttcggagtcggcggtggtcgtccagaccgagtgttctttactttttgtttggttgaggtttcacgctagaaggtggctcaggatgtcttcatcacattttgccagtcgacacaggaaggatataagtactgaaatgattagaactaaaattgctcataggaaatcactgtctcagaaagaaaatagacataaggaatacgaacgaaatagacactttggtttgaaagatgtaaacattccaaccttggaaggtagaattcttgttgaattagatgagacatctcaagggcttgttccagaaaagaccaatgttaagccaagggcaatgaaaactattctaggtgatcaacgaaaacagatgctccaaaaatacaaagaagaaaagcaacttcaaaaattgaaagagcagagagagaaagctaaacgaggaatatttaaagtgggtcgttatagacctgatatgccttgttttcttttatcaaaccagaatgctgtgaaagctgagccaaaaaaggctattccatcttctgtacggattacaaggtcaaaggccaaagaccaaatggagcagactaagattgataacgagagtgatgttcgagcaatccgacctggtccaagacaaacttctgaaaagaaagtgtcagacaaagagaaaaaagttgtgcagcctgtaatgcccacgtcgttgagaatgactcgatcagctactcaagcagcaaagcaggttcccagaacagtctcatctaccacagcaagaaagccagtcacaagagctgctaatgaaaacgaaccagaaggaaaggtgccaagtaaaggaagacctgccaaaaatgtagaaacaaaacccgacaagggtatttcttgtaaagtcgatagtgaagaaaatactttgaattcacaaactaatgcaacaagtggaatgaatccagatggagtcttatcaaaaatggaaaacttacctgagataaatactgcaaaaataaaagggaagaattcctttgcacctaaggattttatgtttcagccactggatggtctgaagacctatcaagtaacacctatgactcccagaagtgccaatgcttttttgacacccagttacacctggactcctttaaaaacagaagttgatgagtctcaagcaacaaaagaaattttggcacaaaaatgtaaaacttactctaccaagacaatacagcaagattcaaataaattgccatgtcctttgggtcctctaactgtttggcatgaagaacatgttttaaataaaaatgaagctactactaaaaatttaaatggccttccaataaaagaagtcccatcacttgaaagaaatgaaggtcgaattgctcagccccaccatggtgtgccatatttcagaaatatcctccagtcagaaactgagaaattaacttcacattgcttcgagtgggacaggaaacttgaattggacattccagatgatgctaaagatcttattcgcacagcagttggtcaaacaagactccttatgaaggaaaggtttaaacagtttgaaggactggttgatgattgtgaatataaacgaggtataaaggagactacctgtacagatctggatggattttgggatatggttagttttcagatagaagatgtaatccacaaattcaacaatctgatcaaacttgaggaatctgggtggcaagtcaataataatatgaatcataatatgaacaaaaatgtctttaggaaaaaagttgtctcaggtatagcaagtaaaccaaaacaggatgatgctggaagaattgcagcgagaaatcgcctagctgccataaaaaatgcaatgagagagagaattaggcaggaagaatgtgctgaaacagcagtttctgtgataccaaaggaagttgataaaatagtgttcgatgctggatttttcagagttgaaagtcctgttaaattattctcaggactttctgtctcttctgaaggcccttctcaaagacttggaacacctaagtctgtcaacaaagctgtatctcagagtagaaatgagatgggcattccacaacaaactacatcaccagaaaatgccggtcctcagaatacgaaaagtgaacatgtgaagaagactttgtttttgagtattcctgaaagcaggagcagcatagaagatgctcagtgtcctggattaccagatttaattgaagaaaatcatgttgtaaataagacagacttgaaggtggattgtttatccagtgagagaatgagtttgcctcttcttgctggtggagtagcagatgatattaatactaacaaaaaagaaggaatttcagatgttgtggaaggaatggaactgaattcttcaattacatcacaggatgttttgatgagtagccctgaaaaaaatacagcttcacaaaatagcatcttagaagaaggggaaactaaaatttctcagtcagaactatttgataataaaagtctcactactgaatgccaccttcttgattcagtgggatcttgctatgttgctcgggctggtcttgaagtcctgggttcaagtgatcctaccacctcagcctcccgagtagctgggactacagccaggtctaaactgcagtaatccatttactcagctggagaggagacatcaagaacatgccagacacatttcttttggtggtaacctgattactttttcacctctacaaccaggagaattttgaatttaaaaataaatccaaacattttccttcatattatcaatgcttatatattccttagactattgaaattttggagaaaatgtatttgtgttcacttctatagcatataatgttttaatattctgtgttcatcaaagtgtattttagatatactctttctcaagggaagtggggatattttgtacattttcaacacagaataaaaaatgtactgtgccttgcctctcttgtttaaaagg

SEQ ID NO: 2386 - DNA, 1872 bp, Homo sapiens
  source 1..1872: mol_type = genomic DNA
atgctttgcagtccatcattttgcaaactttgctggaaaaggcagagggaaaatggacaaagaaaatatggtggccctccacctggttgggatgctgcaccccctgaaaggggctgtgaaatttttattggaaaacttccccgagacctttttgaggatgagcttataccattatgtgaaaaaatcggtaaaatttatgaaatgagaatgatgatggattttaatggcaacaatagaggatatgcatttgtaacattttcaaataaagtggaagccaagaatgcaatcaagcaacttaataattatgaaattagaaatgggcgcctcttaggggtttgtgccagtgtggacaactgccgattatttgttgggggcatcccaaaaaccaaaaagagagaagaaatcttatcggagatgaaaaaggttactgaaggtgttgtcgatgtcatcgtctacccaagcgctgcagataaaaccaaaaaccgaggctttgccttcgtggagtatgagagtcatcgagcagctgccatggcgaggaggaaactgctaccaggaagaattcagttatggggacatggtattgcagtagactgggcagagccagaagtagaagttgatgaagatacaatgtcttcagtgaaaatcctatatgtaagaaatcttatgctgtctacctctgaagagatgattgaaaaggaattcaacaatatcaaaccaggtgctgtggagagggtgaagaaaattcgagactatgcttttgtgcacttcagtaaccgagaagatgcagttgaggctatgaaagctttaaatggcaaggtgctggatggttcccccattgaagtcaccctagcaaaaccagtggacaaggacagttatgttaggtatacccgaggcacaggtggaaggggcaccatgctgcaaggagagtatacctactctttgggccaagtttatgatcccaccacaacctaccttggagctcctgtcttctatgccccccagacctatgcagcaattcccagtcttcatttcccagccaccaaaggacatctcagcaacagagccattatccgagccccttctgttagaggggctgcgggagtgagaggactgggcggccgtggctatttggcatacacaggcctgggtcgaggataccaggtcaaaggagacaaaagagaagacaaactctatgacattttacctgggatggagctcaccccaatgaatcctgtcacattaaaaccccaaggaattaaactcgctccccagatattagaagagatttgtcagaaaaataactggggacagccagtgtaccagctgcactctgctattggacaagaccaaagacagctattcttgtacaaaataactattcctgctctagccagccagaatcctgcaatccaccctttcacacctccaaagctgagtgcctttgtggatgaagcaaagacgtatgcagccgaatacaccctgcagaccctgggcatccccactgatggaggcgatggcaccatggctactgctgctgctgctgctactgctttcccaggatatgctgtccctaatgcaactgcacccgtgtctgcagcccagctcaagcaagcggtaacccttggacaagacttagcagcatatacaacctatgaggtctacccaacttttgcagtgactgcccgaggggatggatatggcaccttctgaagatgcttttttaaatttaagaataagacacacaaaactctattaaaaaaaaaaaagaaataaacctctaactcggtccccaatgatcataaataatatgtttcctaaagaaatgcctttccagagactgtatagcttataccaattatagaatcatgaagt

SEQ ID NO: 2387 - DNA, 2230 bp, Homo sapiens
  source 1..2230: mol_type = genomic DNA
ataatcaaggaaaccttttccgggtggggatctctgaaattactcagataacagtgctgtgccaaaaacctgtggattttctctacaaaaattatcatgactgttatctttttgatggaaaagatgaagttcagcgaagaacaaatctacaacttggccagaagactgtagactttgccttcaaagagtgagcaaccctaattaacctgattttttgctgataatcactctcaatggaatcaaatcacaaatccggggatggattgagcggcactcagaaggaagcagccctccgcgcactggtccagcgcacaggatatagcttggtccaggaatttagaggttcctatagatggaagcagtgtgtctgggcacatgcccagagccagaagcgagcatgagcacagcaattcctggcctcaaaaaaggaaataatgctttgcagtccatcattttgcaaactttgctggaaaaggaaaatggacaaagaaaatatggtggccctccacctggttgggatgctgcaccccctgaaaggggctgtgaaatttttattggaaaacttccccgagacctttttgaggatgagcttataccattatgtgaaaaaatcggtaaaatttatgaaatgagaatgatgatggattttaatggcaacaatagaggatatgcatttgtaacattttcaaataaagtggaagccaagaatgcaatcaagcaacttaataattatgaaattagaaatgggcgcctcttaggggtttgtgccagtgtggacaactgccgattatttgttgggggcatcccaaaaaccaaaaagagagaagaaatcttatcggagatgaaaaaggttactgaaggtgttgtcgatgtcatcgtctacccaagcgctgcagataaaaccaaaaaccgaggctttgccttcgtggagtatgagagtcatcgagcagctgccatggcgaggaggaaactgctaccaggaagaattcagttatggggacatggtattgcagtagactgggcagagccagaagtagaagttgatgaagatacaatgtcttcagtgaaaatcctatatgtaagaaatcttatgctgtctacctctgaagagatgattgaaaaggaattcaacaatatcaaaccaggtgctgtggagagggtgaagaaaattcgagactatgcttttgtgcacttcagtaaccgagaagatgcagttgaggctatgaaagctttaaatggcaaggtgctggatggttcccccattgaagtcaccctagcaaaaccagtggacaaggacagttatgttaggtatacccgaggcacaggtggaaggggcaccatgctgcaaggagagtatacctactctttgggccaagtttatgatcccaccacaacctaccttggagctcctgtcttctatgccccccagacctatgcagcaattcccagtcttcatttcccagccaccaaaggacatctcagcaacagagccattatccgagccccttctgttagagaaatttacatgaatgtacctgtaggggctgcgggagtgagaggactgggcggccgtggctatttggcatacacaggcctgggtcgaggataccaggtcaaaggagacaaaagagaagacaaactctatgacattttacctgggatggagctcaccccaatgaatcctgtcacattaaaaccccaaggaattaaactcgctccccagatattagaagagatttgtcagaaaaataactggggacagccagtgtaccagctgcactctgctattggacaagaccaaagacagctattcttgtacaaaataactattcctgctctagccagccagaatcctgcaatccaccctttcacacctccaaagctgagtgcctttgtggatgaagcaaagacgtatgcagccgaatacaccctgcagaccctgggcatccccactgatggaggcgatggcaccatggctactgctgctgctgctgctactgctttcccaggatatgctgtccctaatgcaactgcacccgtgtctgcagcccagctcaagcaagcggtaacccttggacaagacttagcagcatatacaacctatgaggtctacccaacttttgcagtgactgcccgaggggatggatatggcaccttctgaagatgcttttttaaatttaagaataagacacacaaaactctattaaaaaaaaaaaagaaataaacctct

SEQ ID NO: 2388 - DNA, 1970 bp, Homo sapiens
  source 1..1970: mol_type = genomic DNA
tttgatatgacgattagagcataacccgagtgacacgttgaattcgccataatcaaggaaaccttttccgggtggggatctctgaaattactcagataacagtgctgtgccaaaaacctgtggattttctctacaaaaattattgagcaaccctaattaacctgattttttgctgataatcactctcaatggaatcaaatcacaaatccggggatggattgagcggcactcagaaggaagcagccctccgcgcactggtccagcgcacaggatatagcttggtccaggaaaatggacaaagaaaatatggtggccctccacctggttgggatgctgcaccccctgaaaggggctgtgaaatttttattggaaaacttccccgagacctttttgaggatgagcttataccattatgtgaaaaaatcggtaaaatttatgaaatgagaatgatgatggattttaatggcaacaatagaggatatgcatttgtaacattttcaaataaagtggaagccaagaatgcaatcaagcaacttaataattatgaaattagaaatgggcgcctcttaggggtttgtgccagtgtggacaactgccgattatttgttgggggcatcccaaaaaccaaaaagagagaagaaatcttatcggagatgaaaaaggttactgaaggtgttgtcgatgtcatcgtctacccaagcgctgcagataaaaccaaaaaccgaggctttgccttcgtggagtatgagagtcatcgagcagctgccatggcgaggaggaaactgctaccaggtgctgtggagagggtgaagaaaattcgagactatgcttttgtgcacttcagtaaccgagaagatgcagttgaggctatgaaagctttaaatggcaaggtgctggatggttcccccattgaagtcaccctagcaaaaccagtggacaaggacagttatgttaggtatacccgaggcacaggtggaaggggcaccatgctgcaaggagagtatacctactctttgggccaagtttatgatcccaccacaacctaccttggagctcctgtcttctatgccccccagacctatgcagcaattcccagtcttcatttcccagccaccaaaggacatctcagcaacagagccattatccgagccccttctgttagagaaatttacatgaatgtacctgtaggggctgcgggagtgagaggactgggcggccgtggctatttggcatacacaggcctgggtcgaggataccaggtcaaaggagacaaaagagaagacaaactctatgacattttacctgggatggagctcaccccaatgaatcctgtcacattaaaaccccaaggaattaaactcgctccccagatattagaagagatttgtcagaaaaataactggggacagccagtgtaccagctgcactctgctattggacaagaccaaagacagctattcttgtacaaaataactattcctgctctagccagccagaatcctgcaatccaccctttcacacctccaaagctgagtgcctttgtggatgaagcaaagacgtatgcagccgaatacaccctgcagaccctgggcatccccactgatggaggcgatggcaccatggctactgctgctgctgctgctactgctttcccaggatatgctgtccctaatgcaactgcacccgtgtctgcagcccagctcaagcaagcggtaacccttggacaagacttagcagcatatacaacctatgaggtctacccaacttttgcagtgactgcccgaggggatggatatggcaccttctgaagatgcttttttaaatttaagaataagacacacaaaactctattaaaaaaaaaaaagaaataaacctctaactcggtccccaatgatcataaataatatgtttcctaaagaaatgcctttccagagactgtatagcttataccaattatagaatcatgaagt

SEQ ID NO: 2389 - DNA, 1442 bp, Homo sapiens
  source 1..1442: mol_type = genomic DNA
tttagcctcttccctgcagtggacaatgaggaggctgcactgctgcatgaagaggctaccatgactattgaagagctgctgacacgctacgggcagaactgtcacaagggccctccccacagcaaatctggagcctctgacaagctgcctcgagttgctaagtccaagttctttgaggacagtgaggatgagtcagatgaggcggaggaagaagaggaagacagtgaggaatgcagcgaggaagaggatggctacagcagtgaggaggcagagaatgaggaagatgaggatgacaccgaggaggctgaagaggacgatgaagaagaagaagaagagatgatggtgccagggatggaaggcaaagaggagcctggctctgacagtggtacaacagcggtggtggccctgatacgagggaagcagttgattgtagccaacgcaggagactctcgctgtgtggtatctgaggctggcaaagctttagacatgtcctatgatcacaaaccagaggatgaagtagaactagcacgcatcaagaatgctggtggcaaggtcaccatggatgggcgagtcaacgggggcctcaacctctccagagccattggggaccacttctataagagaaacaagaacctgccacctgaggaacagatgatttcagcccttcctgacatcaaggtgctgactctcactgacgaccatgaattcatggtcattgcctgtgatggcatctggaatgtgatgagcagccaggaagttgtagatttcattcaatcaaagatcagccagcgtgatgaaaatggggagcttcggttattgtcatccattgtggaagagctgctggatcagtgcctggcaccagacacttctggggatggtacagggtgtgacaacatgacctgcatcatcatttgcttcaagccccgaaacacagcagagctccagccagagagtggcaagcgaaaactagaggaggtgctctctactgagggggctgaagaaaatggcaacagcgacaagaagaagaaggccaagcgagactagcagtcatccagacccctgcccacctagactgttttctgagccctccggacctgagactgagttttgtctttttcctttagccttagcagtgggtatgaggtgtgcagggggagctgggtggcttcactccgcccattccaaagagggctctccctccacactgcagccgggagcctctgctgtccttcccagccgcctctgctcctcgggctcatcaccggttctgtgcctgtgctctgttgtgttggagggaaggactggcggttctggtttttactctgtgaactttatttaaggacattcttttttattggcggctccatggccctcggccgcttgcacccgctctctgttgtacactttcaatcaacactttttcagactaaaggccaaaacct

SEQ ID NO: 2390 - DNA, 1902 bp, Homo sapiens
  source 1..1902: mol_type = genomic DNA
actgccgctgccgcggctacctgcggttcatctccgcacattccacacgcggcccaaacggtctctctctctctctctcaaacaccgcctttccgtctttgttttatcttgagtagcttagaaagattggagaagaaagcttacgtggaatgaaaatcaacttttatggatattttgaggactaaaagaataaatagggcgtccgtactgtagcgaaagtgcgactaaggttaggcatctggatttcccccgtagccctctttcaccccccccccccggccattaccgaagcggatgaaaacaaacactaacgatggcggcgccgggaagcgaccggctgctgggcttaaggcgggagtgaccgcttaaccagtgagggaagcactgaagagcgccagtcgacgtgggtgcgacaactcgcggagtcttaggagcaaaacgtctggggcctgcgagccaggacccttctgaagccttaggtgtctatcggcgacgtgtacggtcactgcagctccggagcgcggaaccctcagccaggaggcgcggctggtcggtcccaggtcccggcctccgtaatgagagcccggaaccactctttgtgccgcagcttcgcagcatcttggactcaagtgattctcctgcctcagcctcctgagtagctgggactacagattcctataggcaatggaaactgatctcaattcccaggacagaaaggacctggacaagtttattaaattttttgccctcaagactgtccaagtgattgtccaggctcggcttggtgaaaagatttgcactcgttcatcatcttctccaacgggttcagattggttcaacttagcaatcaaagacatcccagaggttacacatgaagcaaagaaggcactggcaggacagctgcctgcagtcgggaggtccatgtgtgtggagatttcacttaagacttctgagggagattccatggagctggaaatatggtgtcttgaaatgaatgaaaagtgtgataaagaaatcaaagtttcctacacggtgtacaacagactgtcattgctgctgaagtcccttcttgctataactagggtgacaccagcctataggctctccaggaaacaagggcatgaatatgtcatattatacaggatatattttggagaagttcagctgagtggcttaggagaaggcttccagacagttcgtgttgggacagtgggcacccctgtgggcaccatcactctttcttgtgcttacagaattaacttggcattcatgtctaccaggcaatttgagaggaccccacctatcatggggattattattgatcactttgtggaccgtccctatcccagctcctctcccatgcacccctgcaattacagaactgctggtgaggacactggagtaatatacccgtctgtagaagactctcaagaagtgtgtaccacctctttttccacctccccaccatcccagctgatggttcctgggaaggaaggtggggtaccccttgctcccaaccagcctgtccatggtacccaggctgaccaggagagactggcaacctgcaccccttctgacagaacccactgtgctgccacaccctccagtagtgaggatactgaaaccgtatcaaacagcagtgagggacgggcctcccctcacgatgtcttggagaccatctttgtccgaaaagtgggggcttttgtcaacaaacccattaaccaggtgaccctgacgagtttggatataccctttgccatgtttgctcccaagaatttggagctggaggataccgatccaatggtgaatcctccagattccccagagactgaatctcctctccagggcagcctgccttgcagctggccccttccctgcctgctgtcaccatccactgtttga

SEQ ID NO: 2391 - DNA, 3485 bp, Homo sapiens
  source 1..3485: mol_type = genomic DNA
gtcagtccccgcgcttttcggaggctgccagcgtcccacaccagccgcaggtgaaaaccggcagaaagacattaagagattttcctgcagtcactgctggcagatgatagagccaggatttgaaagcaggcagcctggctccagaccctgtgctcttaactcccgttttgcatcaagaacagaatcctatgaaaggcttgcacagtgcttggatagcagcatcaaggagcattgtgtacatgcagaagtgcacagtacctggagtgaaactgcttgtgttcgatttctgataccattcataactggctgtgtgatctcaaaacctctaaaatgcagacctccagctctagatctgtgcacctgagtgaatggcagaagaattacttcgcaattacatctggcatatgtaccggaccgaaggcagatgcataccgtgcacagatattacgcattcagtatgcatgggcaaactctgagatttcccaggtctgtgctaccaaactgttcaaaaaatatgcagagaaatattctgcaattattgattctgacaatgttgaatctgggttgaataattatgcagaaaacattttaactttggcaggatctcaacaaacagatagtgacaagtggcagtctggattgtcaataaataatgttttcaaaatgagtagtgtacagaagatgatgcaagctggcaaaaaattcaaagactctctgttggaacctgctcttgcatcagtggtaatccataaggaggccactgtctttgatcttcctaaatttagtgtttgtggtagttctcaagagagtgactcattacctaactcagctcatgatcgagaccggacccaagacttcccggagagcaatcgtttgaaactccttcagaatgcccagccacctatggtgactaacactgctaggacttgtcctacattctcagcacctgtaggtgagtcagctactgcaaaattccatgtcacaccattgtttggaaatgtcaaaaaggaaaatcacagctctgcaaaagaaaacataggacttaatgtgttcttatctaaccagtcttgttttcctgctgcctgtgaaaatccacagaggaagtctttttatggttctggcaccattgatgcactttccaatccaatactgaataaggcttgtagtaaaacagaagataatggcccaaaggaggatagcagcctgcctacatttaaaactgcaaaagaacaattatgggtagatcagcaaaaaaagtaccaccaacctcagcgtgcatcagggtcttcatatggtggtgtaaaaaagtctctaggagctagtagatcccgagggatacttggaaagtttgttcctcctatacccaagcaagatgggggagagcagaatggaggaatgcaatgtaagccttatggggcaggacctacagaaccagcacatccagttgatgagcgtctgaagaacttggagccaaagatgattgaacttattatgaatgagattatggatcatggacctccagtaaattgggaagatattgcaggagtagaatttgctaaagccaccataaaggaaatagttgtgtggcccatgttgaggccagacatctttactggtttaaggggaccccctaaaggaattttgctctttggtcctcctgggactggtaaaactctaattggcaagtgcattgctagtcagtctggggcaacattctttagcatctctgcttcatccttaacttctaaatgggtaggtgagggggagaaaatggtccgtgcattgtttgctgttgcaaggtgtcagcaaccagctgtgatatttattgacgaaattgattccttgttatctcaacggggagatggtgagcatgaatcttctagaaggataaaaacagaatttttagttcaattagatggagcaacaacatcttctgaagatcgtatcctagtggtgggagcaacaaatcggccacaagaaattgatgaggctgcccggagaagattggtgaaaaggctttatattcccctcccagaagcttcagccaggaaacagatagtaattaatctaatgtccaaagagcagtgttgcctcagtgaagaagaaattgaacagattgtacagcagtctgatgcgttttcaggagcagacatgacacagctttgcagggaggcttctcttggtcctattcgcagtttacaaactgctgacattgctaccataacaccggatcaagttcgacccatagcttacattgattttgaaaatgcttttagaactgtgcgacctagtgtttctccaaaagatttagagctttatgaaaactggaacaaaacttttggttgtggaaagtaagtgggatacttggaatcaaggcatctctgtagtacagtcttctttattttttagcatagaaagttggggatgtgttaattgtatttttaagaatatattctaagttctgtacttcaaataatagcacagattttacatctgattgacatagtgtatgttaatgtaagttttgctttccagtgattacctgatacgtaagcctatttgaacaaagtgagaatgaacttttgtttctaagaagtctttatcttgaagctatataacatgaaaagtgagctcaaattttttttagttgaagattacatataaagttgtgtctgattaatattcatcttttattgaagaaagtgccttctgatggccacataattcttaatgtcagctagtataatggtttacatttggacaaagtattgcttagtgttatttaagtagatttaagatctcaaagctaaagtgccaatttttactttcttcagccaatttgttacctcttttatggtttttaatttttatcaggactaacattttcagaaatagcaaggtgtgatctagtattagattcacagaactgaaaggttaattaagaatgttggttattttcacgggagcgtgtgatatttaacattaatattttatttgacactacagcctgtaatactgctctctttcaaaaacaagttttcagatttttataacagacccattttgttttatgaaacatgttcattacagaaacatgagaaaatagagataagtaaaaagaataaaagtcactattatcctaccactttgcgggacacactattaatatttaagcatagattcttccagatgttttgttttatacagcagtaggattgtgtaatgtattctctcttgtagcctattcttcaaagcgtatcttcactttccatgttaacataaatgtccttttatgattgtctaggattccatggatggatggaatataattgagtcatctggtagagcgcatataggacaggacgctaggttgtttatcttttgtttattgtaaaggaactatgtgggatgcatttggtgatctttttaaaaaatgtataaatttcttgagtaattcctggattaaagaatatgcactttttaaa

SEQ ID NO: 2392 - DNA, 5546 bp, Homo sapiens
  source 1..5546: mol_type = genomic DNA
agattagaaacttcgggtggagagggcggcggcgttgaatgtgtggcggaagcgctgggggtcacggctccgcgcgccgccggacagccggcggcgtctccacagcatgaattacccgggccgcgggtccccacggagccccgagcataacggccgaggcggcggcggcggcgcctgggagctgggctcagacgcgaggccagcgttcggcggcggcgtctgctgcttcgagcacctgcccggcggggacccggacgacggcgacgtgcccctggccctgctgcgcggggaacccgggctgcatttggcgccgggcaccgacgaccacaaccaccacctcgcgctggacccctgcctcagtgacgagaactatgacttcagctccgccgagtcgggctcctcgctgcgctactacagcgagggtgagagcggcggcggcggcagctccttgtcgctgcacccgccgcagcagcctccgctggtcccgacgaactcggggggcggcggcgcgacaggagggtcccccggggaaaggaaacgtacccggcttggcggcccggcggcccggcaccgctatgaggtagtgacggagctgggcccggaggaggtacgctggttctacaaggaggacaagaagacctggaagcccttcatcggctacgactcgctccgcatcgagctcgccttccggaccctgctgcagaccacgggtgcccggccccagggcggggaccgggacggcgaccatgtgtgctcccccacgggcccagcctccagttccggagaagatgacgatgaggaccgcgcctgcggcttctgccagagtacgacggggcacgagccggagatggtggagcttgtgaacatcgagcctgtgtgcgtgcggggcggcctctacgaggtggatgtgacccaaggagagtgctacccggtgtactggaaccaggctgataaaataccagtaatgcgtggacagtggtttattgacggcacttggcagcctctagaagaggaagaaagtaatttaattgagcaagaacatctcaattgttttaggggccagcagatgcaggaaaatttcgatattgaagtgtcaaaatccatagatggaaaagatggcagtgggatcaactattctgctgttcatagtttcaagttgagtcgaaaccatgtggactggcacagtgtggatgaagtatatctttatagtgatgcaacaacatctaaaattgcaagaacagttacccaaaaactgggattttctaaagcatcaagtagtggtaccagacttcatagaggttatgtagaagaagccacattagaagacaagccatcacagactacccatattgtatttgttgtgcatggcattgggcagaaaatggaccaaggaagaattatcaaaaatacagctatgatgagagaagctgcaagaaaaatagaagaaaggcatttttccaaccatgcaacacatgttgaatttctgcctgttgagtggcggtcaaaacttactcttgatggagacactgttgattccattactcctgacaaagtacgaggtttaagggatatgctgaacagcagtgcaatggacataatgtattatactagtccactttatagagatgaactagttaaaggccttcagcaagagctgaatcgattgtattcccttttctgttctcggaatccagactttgaagaaaaagggggtaaagtctcaatagtatcacattccttgggatgtgtaattacttatgacataatgactggctggaatccagttcggctgtatgaacagttgctgcaaaaggaagaagagttgcctgatgaacgatggatgagctatgaagaacgacatcttcttgatgaactctatataactaaacgacggctgaaggaaatagaagaacggcttcacggattgaaagcatcatctatgacacaaacacctgccttaaaatttaaggttgagaatttcttctgtatgggatccccattagcagttttcttggcgttgcgtggcatccgcccaggaaatactggaagtcaagaccatattttgcctagagagatttgtaaccggttactaaatatttttcatcctacagatccagtggcttatagattagaaccattaatactgaaacactacagcaacatttcacctgtccagatccactggtacaatacttcaaatcctttaccttatgaacatatgaagccaagctttctcaacccagctaaagaacctacctcagtttcagagaatgaaggcatttcaaccataccaagccctgtgacctcaccagttttgtcccgccgacactatggagaatctataacaaatataggcaaagcaagcatattaggggctgctagcattggaaagggacttggaggaatgttgttctcaagatttggacgttcatctacaacacagtcatctgaaacatcaaaagactcaatggaagatgagaagaagccagttgcctcaccttctgctaccaccgtagggacacagacccttccacatagcagttctggcttcctcgattctgcattggagttggatcacaggattgattttgaactcagagaaggccttgtggagagccgctattggtcagctgtcacgtcgcatactgcctattggtcatccttggatgttgccctttttcttttaaccttcatgtataaacatgagcacgatgatgatgcaaaacccaatttagatccaatctgaactctcttgaaggacatgaatggcctaaaactgattttttttttttccgttaaaatgtgtgtgtcaagatacggagatttcagggttaaagtatatttcagttttctttagggcaacatatatttgaatttaaaagcactttatttaaaaaaaaaagaagttttcagttctgaagaagtcatttacagtttgcatcattttaattatgagtctgacaaaaccttctccagagaatcaagcaagacctggatgtgaagaaggtttgggtaaactgcatgtaaaggctacaaatcacaatctgattcctcccaaatataaaggcatatggaacataatgtattaaccaaagtatgttataaatcaaaaatggtcaaggttcagcatattctatatgaagatcacaaggtggtatcgttttagatttctatgaaggctttcatttgtacatccctttgaaaaaatataacagatttaaaatgttttgaatttaacttgtttagaaaaactaatgcttaaaacaatatttgaactactgtatttataatttattacctctaattgctttatttcagtgtatgagacattactgttttaatgtttgctttgaacataatttaagaaccagatttattttctatagtgataaacccttttttctcagaactccatctttgtactcttcagatgaatatatagacactgtggcatacattttttttcattaaaaacttatggcttcatacaacactagttcaattttttaaataaactttttattatgttacatgtacttcagagaaagctaaagtttctctaaacttgacacggagtactccataatgggtacatttcattagctttattagaaaactagtaaatgcttttgaataggtagtatgacagctattttaaatgtataaacatttgtgtgccaaacaacatatatgaagggatgtgatgccactaactagtgcacattgtttctcaatgtgccattgagacacaaggcacagtaagtcaggattctgaggcattggaagggttttcttcagctgtaattgtttccacagtgcttttcatctgaggggctcaaagtttaagagtgcattcaataacccatgtactagcttcttgaggtaagtaaataaatcttgttctcatgttacatgttaatacaccaaggcaccaaaacatttaaagtgccatgaattagattacatcagaaatcagaaaagcttggattgagctagtcaccgtggttcacgcctgtaatcccaacacttcgggaggccaagatgggaggatctcttgagcccaggatttcaagaccagcttgggcaacatagtgagaccctcttctctgcaaaaactgacaaaaattagccacttgtagtggtgtacacctgtagtcccagctactcaagaggctgaggtgggaggatcacccgagcccagaagttcaaagctgcagtgagctctgatcacaccaatgcactccagcctgggtgacagagccagaccctgtctctaaaaaacaaaaaagaaaagcttgggttgaagccaggccatattcttttatatgctgttcaatgacttgattcacatgtgaccttttagtagtttgcaaacaataataacagaagttgcaattcataattcagagaaatgaccatgaagccggtgtttccctgcttgatttctatgttcttggattctcacacaaaagaggagttacctagaggggatcagtagccatccctgttgcacacaaccctcacttctgagtggtttccactaggttccacttaaggtgctgtcttttcttaacttgcaaggaattgcttagcttcccaataatcattgtcaaactgggagcaaagttggtcagctgtatctctcacctcctcctttcttcataagatagtagaatctgtggcttacttgtaggttttacttagtgcttcagtactgttggctgttttggccttttgctgaatttgcacaacaacataaagcacttctttttaatgtttaaaaaaaattccaaggctccatgaccaagtatgtgactcactaagaaacccttgctataaaaggcttttgatgaaatcttagcaaagctaaattatctctaacttagagattcctatgaactcaggtcattttcatagcctgtttattttgtaggtctaatttagttctcaggaaaattaaactcatgctatatgactgtatcgttaaaggtacttgagcgtatgttgctgtaggtggtatgacactcaaatgcataagaacttgaagggatttattcttaaccactagaatatgaagagccctttttacctgagaagagtgaaattatgtcagaccttttaatttgatatcactgagtaaaaggtatgttcctatagccataggaatatgtctgcttcctttttttcatgttgagaaaacagtcaaatttaaccatttggagtttatttgaattcttggaaagagcaatattcaaaaccttttcaaaaataagatattctggactactggatggatgttttgttttcagttcatttttcatcagtagagatggtgatttcggttttgtagtatccttgtttctatgtctgtgcatgttaacattggatgtatttgtatatacttaattaatatacagactgtgtgtcattctggcttgattagaagctaagtcagttactgagtaacattttgcaactttattccagcaagtactaaatcggccaaaaaaagttttgtttttgataccattaaaattttattctct

SEQ ID NO: 2393 - DNA, 2929 bp, Homo sapiens
  source 1..2929: mol_type = genomic DNA
ctcgggtcgggatttgaaagattagaaacttcgggtggagagggcggcggcgttgaatgtgtggcggaagcgctgggggtcacggctccgcgcgccgccggacagccggcggcgtctccacagcatgaattacccgggccgcgggtccccacggagccccgagcataacggccgaggcggcggcggcggcgcctgggagctgggctcagacgcgaggccagcgttcggcggcggcgtctgctgcttcgagcacctgcccggcggggacccggacgacggcgacgtgcccctggccctgctgcgcggggaacccgggctgcatttggcgccgggcaccgacgaccacaaccaccacctcgcgctggacccctgcctcagtgacgagaactatgacttcagctccgccgagtcgggctcctcgctgcgctactacagcgagggtgagagcggcggcggcggcagctccttgtcgctgcacccgccgcagcagcctccgctggtcccgacgaactcggggggcggcctctacgaggtggatgtgacccaaggagagtgctacccggtgtactggaaccaggctgataaaataccagtaatgcgtggacagtggtttattgacggcacttggcagcctctagaagaggaagaaagtaatttaattgagcaagaacatctcaattgttttaggggccagcagatgcaggaaaatttcgatattgaagtgtcaaaatccatagatggaaaagatgctgttcatagtttcaagttgagtcgaaaccatgtggactggcacagtgtggatgaagtatatctttatagtgatgcaacaacatctaaaattgcaagaacagttacccaaaaactgggattttctaaagcatcaagtagtggtaccagacttcatagaggttatgtagaagaagccacattagaagacaagccatcacagactacccatattgtatttgttgtgcatggcattgggcagaaaatggaccaaggaagaattatcaaaaatacagctatgatgagagaagctgcaagaaaaatagaagaaaggcatttttccaaccatgcaacacatgttgaatttctgcctgttgagtggcggtcaaaacttactcttgatggagacactgttgattccattactcctgacaaagtacgaggtttaagggatatgctgaacagcagtgcaatggacataatgtattatactagtccactttatagagatgaactagttaaaggccttcagcaagagctgaatcgattgtattcccttttctgttctcggaatccagactttgaagaaaaagggggtaaagtctcaatagtatcacattccttgggatgtgtaattacttatgacataatgactggctggaatccagttcggctgtatgaacagttgctgcaaaaggaagaagagttgcctgatgaacgatggatgagctatgaagaacgacatcttcttgatgaactctatataactaaacgacggctgaaggaaatagaagaacggcttcacggattgaaagcatcatctatgacacaaacacctgccttaaaatttaaggttgagaatttcttctgtatgggatccccattagcagttttcttggcgttgcgtggcatccgcccaggaaatactggaagtcaagaccatattttgcctagagagatttgtaaccggttactaaatatttttcatcctacagatccagtggcttatagattagaaccattaatactgaaacactacagcaacatttcacctgtccagatccactggtacaatacttcaaatcctttaccttatgaacatatgaagccaagctttctcaacccagctaaagaacctacctcagtttcagagaatgaaggcatttcaaccataccaagccctgtgacctcaccagttttgtcccgccgacactatggagaatctataacaaatataggcaaagcaagcatattaggggctgctagcattggaaagggacttggaggaatgttgttctcaagatttggacgttcatctacaacacagtcatctgaaacatcaaaagactcaatggaagatgagaagaagccagttgcctcaccttctgctaccaccgtagggacacagacccttccacatagcagttctggcttcctcgattctgcatatttcagacttcaagaatcgttctttaatctcccacaacttctttttccggaaaatgtaatgcagaataaagataatgccctcgtggagttggatcacaggattgattttgaactcagagaaggccttgtggagagccgctattggtcagctgtcacgtcgcatactgcctattggtcatccttggatgttgccctttttcttttaaccttcatgtataaacatgagcacgatgatgatgcaaaacccaatttagatccaatctgaactctcttgaaggacatgaatggcctaaaactgattttttttttttccgttaaaatgtgtgtgtcaagatacggagatttcagggttaaagtatatttcagttttctttagggcaacatatatttgaatttaaaagcactttatttaaaaaaaaaagaagttttcagttctgaagaagtcatttacagtttgcatcattttaattatgagtctgacaaaaccttctccagagaatcaagcaagacctggatgtgaagaaggtttgggtaaactgcatgtaaaggctacaaatcacaatctgattcctcccaaatataaaggcatatggaacataatgtattaaccaaagtatgttataaatcaaaaatggtcaaggttcagcatattctatatgaagatcacaaggtggtatcgttttagatttctatgaaggctttcatttgtacatccctttgaaaaaatataacagatttaaaatgttttgaattt

SEQ ID NO: 2394 - DNA, 2870 bp, Homo sapiens
  source 1..2870: mol_type = genomic DNA
gtgaacaaaaattgtttgctggcccccaggatactaactagacctttggcctgactcacaggacactaaggctccttttctgaagaagccttttaccagtctcatttaggggatgggaacaacatgtcttcacctagggactttagagcagagcctggtttttgaaaataaagttaattcagagaaggtaaaactttctcttcggaatttcccacataatgattatgaggatgtttttgaagagccttcagaaagtggcagtgatcccagcatgtggacagccagaggccccttcagaagagacaggtggagcagtgaggatgaggaggctgcagggccatcacaggctctctcccctctactttctgatacgcgcaaaattgtttctgaaggagaactagatcagttggctcagattcggccattaatattcaattttcatgagcagacagccatcaaggattgtttgaaaatccttgaggaaaaaacagcagcgtatgatatcatgcaggaatttatggctttagaacttaagaatctgcctggtgagttcaactctgggaatcaaccaagcaacagagaaaaaaatagataccgagatattcttccatatgattcaacacgcgttcctcttggaaaaagcaaggactacatcaatgctagttatattagaatagtcaattgtggagaagagtatttttatatcgctactcaaggaccactgctgagcaccatagatgacttttggcaaatggtgttggaaaataattcaaatgttattgccatgataaccagagagatagaaggtggaattatcaaatgctaccattactggcccatttctctgaagaagccattggaattgaaacacttccgtgtattcctggagaactaccagatacttcaatatttcatcattcgaatgtttcaagttgtggagaagtccacgggaactagtcactctgtaaaacagttgcagttcaccaagtggccagaccatggcactcctgcctcagcagatagcttcataaaatatattcgttatgcaaggaagagccaccttacaggacccatggttgttcactgcagtgccggcataggccggacaggggtgttcctatgtgtggatgtcgtgttctgtgccatcgtaaagaactgttcattcaacatcatggatatagtggcccaaatgagagaacaacgttctggcatggttcaaacgaaggagcagtatcacttttgttacgatattgtgcttgaagttcttcggaaacttctgactttggattaagaaagacttctgttgcctctcacttgaaattaccaagtgggtttgcacctcctcataaagaacatgtttgcactgtgctgaagggctttgctatgcatacaatctgctttcttggtttatcagtttattttctttctaaaagctccctgaagggcaatatcatttggcttggggtgatcagtgtttacttattgatcttgctagacaatatcaaaataacttcccacattttccagtgaaacagatgttacataaaacgattgcagcttggctatttggttgaagggattacagagcccaataaaggatttaaaatatattcattaagattttatttggaaaggtggctggagagagctgaggatttccaggactttgtaagttcttattctgggagaacataaggccaataatcatgacctcttccaggcatttttaagacagatgtctattcatgttctttagctagagcctgtactttttgctggcatttgaataacccagtttaaaaagagtccagttagggtggactaactttggacacaaattggcttccatttcctacattttcatactgctgccttcctacagctgctagaccaagacctgttggtctgggaagcatttcatggatagggagagctcctctcggtgaacagtccaaaactaaaatagatgtttatatagaaagcccaagaggagacttttgccatgcctgagttctttcctatcccaccctaacacttaacatattacttagtctgctttgttaaaagcaagtattacctttaacttgcctcttactctttgccctttagctaactaataaagtttgatataggcattattatataattctgagtcattcatggtatctctcatgtttgatgtatttttcaaactaagatctatgatagttttttttccagagttccattaaatcatttatttcctttactttctcacctctgttgaaacatttagaaactggatttgggaacccaattttggaaaaccagattcatagtcatgaaaatggaaacttccatattctgtttttgaaaagatgtggccattattacagtaattttattataggactttgcctcgtacaattaatagtgatattttggacaaggagttctggtgacaagctatacctaattataagctataaaacaatagatatgagtgtttgtacagtttaactcaatggagatcagaatattctatgtattgagaaaatgtttaatatcaatctataaatcttgaatttctaagaggcttattttgttcttttggctgaatgagtatatttgaattggttgaataattaataattctcattgtaaaaataattatatgccaaaaatatatttgatgttaaatcaaatagatgattctgtttacattgttcatatgaataataatctgtgttaatttcattttgataattggcctttaatatttgtatctctaattttattttctctctgttactgtaaaataatagctataatgtataacaattttcttcagaagaattctatgctattattaaaataaaatatttactgtg

SEQ ID NO: 2395 - DNA, 2323 bp, Homo sapiens
  source 1..2323: mol_type = genomic DNA
gtgaacaaaaattgtttgctggcccccaggatactaactagacctttggcctgactcacaggacactaaggctccttttctgaagaagccttttaccagtctcatttaggggatgggaacaacatgtcttcacctagggactttagagcagagcctgtaaacgattatgagggaaatgactctgaagcagaagacttgaatttcagggagactttgccttcatcaagtcaggaaaacacacctagatcaaaggtttttgaaaataaagttaattcagagaaggtaaaactttctcttcggaatttcccacataatgattatgaggatgtttttgaagagccttcagaaagtggcagtgatcccagcatgtggacagccagaggccccttcagaagagacaggtggagcagtgaggatgaggaggctgcagggccatcacaggctctctcccctctactttctgatacgcgcaaaattgtttctgaaggagaactagatcagttggctcagattcggccattaatattcaattttcatgagcagacagccatcaaggattgtttgaaaatccttgaggaaaaaacagcagcgtatgatatcatgcaggaatttatgttcaacatcatggatatagtggcccaaatgagagaacaacgttctggcatggttcaaacgaaggagcagtatcacttttgttacgatattgtgcttgaagttcttcggaaacttctgactttggattaagaaagacttctgttgcctctcacttgaaattaccaagtgggtttgcacctcctcataaagaacatgtttgcactgtgctgaagggctttgctatgcatacaatctgctttcttggtttatcagtttattttctttctaaaagctccctgaagggcaatatcatttggcttggggtgatcagtgtttacttattgatcttgctagacaatatcaaaataacttcccacattttccagtgaaacagatgttacataaaacgattgcagcttggctatttggttgaagggattacagagcccaataaaggatttaaaatatattcattaagattttatttggaaaggtggctggagagagctgaggatttccaggactttgtaagttcttattctgggagaacataaggccaataatcatgacctcttccaggcatttttaagacagatgtctattcatgttctttagctagagcctgtactttttgctggcatttgaataacccagtttaaaaagagtccagttagggtggactaactttggacacaaattggcttccatttcctacattttcatactgctgccttcctacagctgctagaccaagacctgttggtctgggaagcatttcatggatagggagagctcctctcggtgaacagtccaaaactaaaatagatgtttatatagaaagcccaagaggagacttttgccatgcctgagttctttcctatcccaccctaacacttaacatattacttagtctgctttgttaaaagcaagtattacctttaacttgcctcttactctttgccctttagctaactaataaagtttgatataggcattattatataattctgagtcattcatggtatctctcatgtttgatgtatttttcaaactaagatctatgatagttttttttccagagttccattaaatcatttatttcctttactttctcacctctgttgaaacatttagaaactggatttgggaacccaattttggaaaaccagattcatagtcatgaaaatggaaacttccatattctgtttttgaaaagatgtggccattattacagtaattttattataggactttgcctcgtacaattaatagtgatattttggacaaggagttctggtgacaagctatacctaattataagctataaaacaatagatatgagtgtttgtacagtttaactcaatggagatcagaatattctatgtattgagaaaatgtttaatatcaatctataaatcttgaatttctaagaggcttattttgttcttttggctgaatgagtatatttgaattggttgaataattaataattctcattgtaaaaataattatatgccaaaaatatatttgatgttaaatcaaatagatgattctgtttacattgttcatatgaataataatctgtgttaatttcattttgataattggcctttaatatttgtatctctaattttattttctctctgttactgtaaaataatagctataatgtataacaattttcttcagaagaattctatgctattattaaaataaaatatttactgtg

SEQ ID NO: 2396 - DNA, 2226 bp, Homo sapiens
  source 1..2226: mol_type = genomic DNA
tggacccaactggcgaggctgctggggttgcagcgggacagttggggcggccccgcaggcccaggtttttgaaaataaagttaattcagagaaggtaaaactttctcttcggaatttcccacataatgattatgaggatgtttttgaagagccttcagaaagtggcagtgatcccagcatgtggacagccagaggccccttcagaagagacaggtggagcagtgaggatgaggaggctgcagggccatcacaggctctctcccctctactttctgatacgcgcaaaattgtttctgaaggagaactagatcagttggctcagattcggccattaatattcaattttcatgagcagacagccatcaaggattgtttgaaaatccttgaggaaaaaacagcagcgtatgatatcatgcaggaatttatggctttagaacttaagaatctgcctggtgagttcaactctgggaatcaaccaagcaacagagaaaaaaatagataccgagatattcttccatttcaacatcatggatatagtggcccaaatgagagaacaacgttctggcatggttcaaacgaaggagcagtatcacttttgttacgatattgtgcttgaagttcttcggaaacttctgactttggattaagaaagacttctgttgcctctcacttgaaattaccaagtgggtttgcacctcctcataaagaacatgtttgcactgtgctgaagggctttgctatgcatacaatctgctttcttggtttatcagtttattttctttctaaaagctccctgaagggcaatatcatttggcttggggtgatcagtgtttacttattgatcttgctagacaatatcaaaataacttcccacattttccagtgaaacagatgttacataaaacgattgcagcttggctatttggttgaagggattacagagcccaataaaggatttaaaatatattcattaagattttatttggaaaggtggctggagagagctgaggatttccaggactttgtaagttcttattctgggagaacataaggccaataatcatgacctcttccaggcatttttaagacagatgtctattcatgttctttagctagagcctgtactttttgctggcatttgaataacccagtttaaaaagagtccagttagggtggactaactttggacacaaattggcttccatttcctacattttcatactgctgccttcctacagctgctagaccaagacctgttggtctgggaagcatttcatggatagggagagctcctctcggtgaacagtccaaaactaaaatagatgtttatatagaaagcccaagaggagacttttgccatgcctgagttctttcctatcccaccctaacacttaacatattacttagtctgctttgttaaaagcaagtattacctttaacttgcctcttactctttgccctttagctaactaataaagtttgatataggcattattatataattctgagtcattcatggtatctctcatgtttgatgtatttttcaaactaagatctatgatagttttttttccagagttccattaaatcatttatttcctttactttctcacctctgttgaaacatttagaaactggatttgggaacccaattttggaaaaccagattcatagtcatgaaaatggaaacttccatattctgtttttgaaaagatgtggccattattacagtaattttattataggactttgcctcgtacaattaatagtgatattttggacaaggagttctggtgacaagctatacctaattataagctataaaacaatagatatgagtgtttgtacagtttaactcaatggagatcagaatattctatgtattgagaaaatgtttaatatcaatctataaatcttgaatttctaagaggcttattttgttcttttggctgaatgagtatatttgaattggttgaataattaataattctcattgtaaaaataattatatgccaaaaatatatttgatgttaaatcaaatagatgattctgtttacattgttcatatgaataataatctgtgttaatttcattttgataattggcctttaatatttgtatctctaattttattttctctctgttactgtaaaataatagctataatgtataacaattttcttcagaagaattctatgctattattaaaataaaatatttactgtg

SEQ ID NO: 2397 - DNA, 2872 bp, Homo sapiens
  source 1..2872: mol_type = genomic DNA
tggacccaactggcgaggctgctggggttgcagcgggacagttggggcggccccgcaggcccagtaaacgattatgagggaaatgactctgaagcagaagacttgaatttcagggagactttgccttcatcaagtcaggaaaacacacctagatcaaaggtttttgaaaataaagttaattcagagaaggtaaaactttctcttcggaatttcccacataatgattatgaggatgtttttgaagagccttcagaaagtggcagtgatcccagcatgtggacagccagaggccccttcagaagagacaggtggagcagtgaggatgaggaggctgcagggccatcacaggctctctcccctctactttctgatacgcgcaaaattgtttctgaaggagaactagatcagttggctcagattcggccattaatattcaattttcatgagcagacagccatcaaggattgtttgaaaatccttgaggaaaaaacagcagcgtatgatatcatgcaggaatttatggctttagaacttaagaatctgcctggtgagttcaactctgggaatcaaccaagcaacagagaaaaaaatagataccgagatattcttccatatgattcaacacgcgttcctcttggaaaaagcaaggactacatcaatgctagttatattagaatagtcaattgtggagaagagtatttttatatcgctactcaaggaccactgctgagcaccatagatgacttttggcaaatggtgttggaaaataattcaaatgttattgccatgataaccagagagatagaaggtggaattatcaaatgctaccattactggcccatttctctgaagaagccattggaattgaaacacttccgtgtattcctggagaactaccagatacttcaatatttcatcattcgaatgtttcaagttgtggagaagtccacgggaactagtcactctgtaaaacagttgcagttcaccaagtggccagaccatggcactcctgcctcagcagatagcttcataaaatatattcgttatgcaaggaagagccaccttacaggacccatggttgttcactgcagtgccggcataggccggacaggggtgttcctatgtgtggatgtcgtgttctgtgccatcgtaaagaactgttcattcaacatcatggatatagtggcccaaatgagagaacaacgttctggcatggttcaaacgaaggagcagtatcacttttgttacgatattgtgcttgaagttcttcggaaacttctgactttggattaagaaagacttctgttgcctctcacttgaaattaccaagtgggtttgcacctcctcataaagaacatgtttgcactgtgctgaagggctttgctatgcatacaatctgctttcttggtttatcagtttattttctttctaaaagctccctgaagggcaatatcatttggcttggggtgatcagtgtttacttattgatcttgctagacaatatcaaaataacttcccacattttccagtgaaacagatgttacataaaacgattgcagcttggctatttggttgaagggattacagagcccaataaaggatttaaaatatattcattaagattttatttggaaaggtggctggagagagctgaggatttccaggactttgtaagttcttattctgggagaacataaggccaataatcatgacctcttccaggcatttttaagacagatgtctattcatgttctttagctagagcctgtactttttgctggcatttgaataacccagtttaaaaagagtccagttagggtggactaactttggacacaaattggcttccatttcctacattttcatactgctgccttcctacagctgctagaccaagacctgttggtctgggaagcatttcatggatagggagagctcctctcggtgaacagtccaaaactaaaatagatgtttatatagaaagcccaagaggagacttttgccatgcctgagttctttcctatcccaccctaacacttaacatattacttagtctgctttgttaaaagcaagtattacctttaacttgcctcttactctttgccctttagctaactaataaagtttgatataggcattattatataattctgagtcattcatggtatctctcatgtttgatgtatttttcaaactaagatctatgatagttttttttccagagttccattaaatcatttatttcctttactttctcacctctgttgaaacatttagaaactggatttgggaacccaattttggaaaaccagattcatagtcatgaaaatggaaacttccatattctgtttttgaaaagatgtggccattattacagtaattttattataggactttgcctcgtacaattaatagtgatattttggacaaggagttctggtgacaagctatacctaattataagctataaaacaatagatatgagtgtttgtacagtttaactcaatggagatcagaatattctatgtattgagaaaatgtttaatatcaatctataaatcttgaatttctaagaggcttattttgttcttttggctgaatgagtatatttgaattggttgaataattaataattctcattgtaaaaataattatatgccaaaaatatatttgatgttaaatcaaatagatgattctgtttacattgttcatatgaataataatctgtgttaatttcattttgataattggcctttaatatttgtatctctaattttattttctctctgttactgtaaaataatagctataatgtataacaattttcttcagaagaattctatgctattattaaaataaaatatttactgtg

SEQ ID NO: 2398 - DNA, 1929 bp, Homo sapiens
  source 1..1929: mol_type = genomic DNA
gaagaagggcggggatgtcagggctggagagtgcccgtgtccttctgtgtgcattgggctccttcctccttaattctctgctttccacttttaggctgaactccagtgcacccagttagacttggagcggaaactcaagttgaatgaaaatgccatctccaggctccaggctaaccaaaagtctgttctggtgtcggtgtcagaggtcaaagcagtggctgaaatgcagtttggggaactccttgctgctgtgaggaaggcccaggccaatgtgatgctcttcttagaggagaaggagcaagctgcgctgagccaggccaacggtatcaaggcccacctggagtacaggagtgccgagatggagaagagtaagcaggagctggagacgatggcggccatcagcaacactgtccagttcttggaggagtactgcaagtttaagaacactgaagacatcaccttccctagtgtttacatagggctgaaggataaactctcgggcatccgcaaagttatcacggaatccactgtacacttaatccagttgctggagaactataagaaaaagctccaggagttttccaaggaagaggagtatgacatcagaactcaagtgtctgccattgttcagcgcaaatattggacttccaaacctgagcccagcaccagggaacagttcctccaatatgtgcatgacatcacgttcgacccggacacagcacacaagtatctccggctgcaggaggagaaccgcaaggtcaccaacaccacgccctgggagcatccctacccggacctccccagcaggttcctgcactggcggcaggtgctgtcccagcagagtctgtacctgcacaggtactattttgaggtggagatcttcggggcaggcacctatgttggcctgacctgcaaaggcatcgaccagaaaggggaggagcgcagcagttgcatttccggaaacaacttctcctggagcctccaatggaacgggaaggagttcacggcctggtacagtgacatggagaccccactcaaagctggccctttctggaggctcggggtctatattgacttcccaggagggatcctttccttctatggcgtagagtatgattccatgactctggttcacaagtttgcctgcaagttttcagaaccagtctatgctgccttctggctttccaagaaggaaaacgccatccggattgtagatctgggagaggaacccgagaagccagcaccgtccttggtggggactgctccctagactccaggagccatatcccagacctttgccagctacagtgatgggatttgcattttagggtgatttgggggcaaaaataactgctgatggtagctggcttttgaaatcctatggggtctctgaatgaaaacattctccagctgctctcttttgctccatatggtgctgttctctatgtgtttgcagtaattctttttttttttttttttgagacggagtctcgcactgttgcccaggctggagtgcagtggcgtgatcttggctcactgcaagctccgcctcccgagttcaagcaattctcctgcctcagcctcccgagtagctgggattacaggtgcctgccaccacacccagctaacgttttgtatttttagtagagatggggtttcaccatgttggccaggcagatctcaaacttctgacctcgtgatgcactcacctcggcctcccaaagtgctgggattacaggcgtgagccactgcgccctgcctgtttgtagtaatttttaggcaccaaatctccctcatcttctagtgccattctcctctctgttcaggtaaatgtcacactgtgcccagaatggatgaccaggaaccttcaagagtggctgaaaagattgcagagttatcataataaattgctaacttgcgtatttccta

SEQ ID NO: 2399 - DNA, 2023 bp, Homo sapiens
  source 1..2023: mol_type = genomic DNA
gatcagccacagaagttaaacttctttccagggaagaagggcggggatgtcagggctggagagtgcccgtgtccttctgtgtgcattgggctccttcctccttaattctctgctttccacttttaggctgaactccagtgcacccagttagacttggagcggaaactcaagttgaatgaaaatgccatctccaggctccaggctaaccaaaagtctgttctggctccttgaatgtattgaggcctctcctctctgtactatttctgcttgtcatcattttcgtggtgtcggtgtcagaggtcaaagcagtggctgaaatgcagtttggggaactccttgctgctgtgaggaaggcccaggccaatgtgatgctcttcttagaggagaaggagcaagctgcgctgagccaggccaacggtatcaaggcccacctggagtacaggagtgccgagatggagaagagtaagcaggagctggagacgatggcggccatcagcaacactgtccagttcttggaggagtactgcaagtttaagaacactgaagacatcaccttccctagtgtttacatagggctgaaggataaactctcgggcatccgcaaagttatcacggaatccactgtacacttaatccagttgctggagaactataagaaaaagctccaggagttttccaaggaagaggagtatgacatcagaactcaagtgtctgccattgttcagcgcaaatattggacttccaaacctgagcccagcaccagggaacagttcctccaatatgtgcatgacatcacgttcgacccggacacagcacacaagtatctccggctgcaggaggagaaccgcaaggtcaccaacaccacgccctgggagcatccctacccggacctccccagcaggttcctgcactggcggcaggtgctgtcccagcagagtctgtacctgcacaggtactattttgaggtggagatcttcggggcaggcacctatgttggcctgacctgcaaaggcatcgaccagaaaggggaggagcgcagcagttgcatttccggaaacaacttctcctggagcctccaatggaacgggaaggagttcacggcctggtacagtgacatggagaccccactcaaagctggccctttctggaggctcggggtctatattgacttcccaggagggatcctttccttctatggcgtagagtatgattccatgactctggttcacaagtttgcctgcaagttttcagaaccagtctatgctgccttctggctttccaagaaggaaaacgccatccggattgtagatctgggagaggaacccgagaagccagcaccgtccttggtggggactgctccctagactccaggagccatatcccagacctttgccagctacagtgatgggatttgcattttagggtgatttgggggcaaaaataactgctgatggtagctggcttttgaaatcctatggggtctctgaatgaaaacattctccagctgctctcttttgctccatatggtgctgttctctatgtgtttgcagtaattctttttttttttttttttgagacggagtctcgcactgttgcccaggctggagtgcagtggcgtgatcttggctcactgcaagctccgcctcccgagttcaagcaattctcctgcctcagcctcccgagtagctgggattacaggtgcctgccaccacacccagctaacgttttgtatttttagtagagatggggtttcaccatgttggccaggcagatctcaaacttctgacctcgtgatgcactcacctcggcctcccaaagtgctgggattacaggcgtgagccactgcgccctgcctgtttgtagtaatttttaggcaccaaatctccctcatcttctagtgccattctcctctctgttcaggtaaatgtcacactgtgcccagaatggatgaccaggaaccttcaagagtggctgaaaagattgcagagttatcataataaattgctaacttgcgtatttccta

SEQ ID NO: 2400 - DNA, 790 bp, Homo sapiens
  source 1..790: mol_type = genomic DNA
ctgtggctctgtggtaggggaatgccaccaactccctgaggagcagccgtgtggtatgattgatgattcaacacgcgttcctcttggaaaaagcaaggactacatcaatgctagttatattagaatagtcaattgtggagaagagtatttttatatcgctactcaaggaccactgctgagcaccatagatgacttttggcaaatggtgttggaaaataattcaaatgttattgccatgataaccagagagatagaaggtggaattatcaaatgctaccattactggcccatttctctgaagaagccattggaattgaaacacttccgtgtattcctggagaactaccagatacttcaatatttcatcattcgaatgtttcaagttgtggagaagtccacgggaactagtcactctgtaaaacagttgcagttcaccaagtggccagaccatggcactcctgcctcagcagatagcttcataaaatatattcgttatgcaaggaagagccaccttacaggacccatggttgttcactgcagtgccggcataggccggacaggggtgttcctatgtgtggatgtcgtgttctgtgccatcgtaaagaactgttcattcaacatcatggatatagtggcccaaatgagagaacaacgttctggcatggttcaaacgaaggagcagtatcacttttgttacgatattgtgcttgaagttcttcggaaacttctgactttggattaagaaagacttctgttgcctctcacttgaaattaccaagtgggtttgcac

SEQ ID NO: 2401 - DNA, 4217 bp, Homo sapiens
  source 1..4217: mol_type = genomic DNA
gagcccgggagccggaggtgtagcggcagagacattgttcttgccggctccctacggtgccgtgtgtgcgtgagagaagaccagtctttcctctagcatttgacattgtgcagcaaagaaatggttatggagaagcccagtccgctgcttgtagggcgggagtttgtgaggcaatattatactttgctgaataaagctccggaatatttacacaggttttatggcaggaattcttcctatgttcatggtggagtagatgctagtggaaagccccaggaagctgtttatggccaaaatgatatacaccacaaagtattatctctgaacttcagtgaatgtcatactaaaattcgtcatgtggatgctcatgcaaccttgagtgatggagtagttgtccaggtcatgggtttgctgtctaacagtggacaaccagaaagaaagtttatgcaaacctttgttctggctcctgaaggatctgttccaaataaattttatgttcacaatgatatgtttcgttatgaagatgaagtgtttggtgattctgagcctgaacttgatgaagaatcagaagatgaagtagaagaggaacaagaagaaagacaaccatctcctgaacctgtgcaagaaaatgctaacagtggttactatgaagctcaccctgtgactaatggcatagaggagcctttggaagaatcctctcatgaacctgaacctgagccagaatctgaaacaaagactgaagagctgaaaccacaagtggaggagaagaacttagaagaactagaggagaaatctactactcctcctccggcagaacctgtttctctgccacaagaaccaccaaaggctttctcctgggcttcagtgaccagtaaaaacctgcctcctagtggtactgtttcttcctctggaattccaccccatgttaaagcaccagtctcacagccaagagtcgaagctaaaccagaagttcaatctcagccacctcgtgtgcgtgaacaacgacctagagaacgacctggttttcctcctagaggaccaagaccaggcagaggagatatggaacagaatgactctgacaaccgtagaataattcgctatccagatagtcatcaactttttgttggtaacttgccacatgatattgatgaaaatgagctaaaggaattcttcatgagttttggaaacgttgtggaacttcgcatcaataccaagggtgttgggggaaagcttccaaattttggttttgtggtttttgatgactctgaaccagttcagagaatcttaattgcaaaaccgattatgtttcgaggggaagtacgtttaaatgtggaagagaaaaaaacaagagctgcaagagagcgagaaaccagaggtggtggtgatgatcgcagggatattaggcgcaatgatcgaggtcccggtggtccacgtggaattgtgggtggtggaatgatgcgtgatcgtgatggaagaggacctcctccaaggggtggcatggcacagaaacttggctctggaagaggaaccgggcaaatggagggccgcttcacaggacagcgtcgctgaagctccactgttggcaaagtcttggcagtggtacattattcatcgtgtttgcattcttgttaattttttttttggctttggaatgtgacacagcctttttgatcatttctttgatgtgaaaagcatctttggttatcagttaaattgaggtggacattatttccccaatttcacaacaggattcacattgttaatttataaatctagacttggagaattaaggactgagaaatgaccatatcttaaactatctacgacaaagtgaacttaaaaggacatgcccactgaattcaggtcctttgagtaaaaaaaaaatcttctgctgcacattttgtttaagtgttactgtttctgcctgttaatgctgggaacacaaatagtgcaatttgtgcaattggagaatcttgccttttttcttggctccccccaaaaatacaaaccaacagaaacttgttatgcactcatcaaaatgtactaatgggtactctgaactcattaacattgacatctgcaacaggaggcaacagggaaaaaatctcatcttcttttccagtagaaaatagtttgtgaaatgatgagggcattttatctgcttgctgtgaccagcgtgtgtacacataaaccttaacaagactacaagtatattccagaaggaaatcattttagttatgaactaaataataaaaattagaacttcaaatgcgatggtcttgactattagaccagatttagtagctccatatctaagatttttctacctgcccctcttcagtacagggatggctggctgctcaacacactcctcctccccttttttcctttctttaagctgtgtacagtgaaaattgtctttactgtatttttgttctctggtaatgtaataagcatgatggtgccttctattaatacatcattccagtcttgctggtaattttgtacagtatagtgtatgaattgctgtgctgcaaagccaaacagctgcaaaatgttgaaaaatcatcgaaatgtataaaaattgcagtatctttaaaatcagtaaaatggactagcatattatttatcttgttcttcagttaacaactttgtgttctctgtgggagggagggagtcctgtgtgtttgtggggagagggaaggaggaagtcagttatttgagtaagcctctagttgacttttctcttagcctgaatgtggacgttgaaacatatcacttcagggcttggaaaagtcagtcaacttgacgtacatttttagtgacattttaaaagcagtcagattctataaatggcaagtaagcctgaagtgaggatactgcaattttcggagaaaagaacagcagctctttaagtgtttgcattttctatttggggggcagggaactgtcattcattttgcacaattcttgaactgatgtcagcacccgagtggctcctgaatttaagtctgggacgacatcttttatttttacatgaatctttaaacaattctgtgagcaaagtttgtagctgctggattattgtctgtctttatagcaagttccagtaaaccacaagtatggcaaagcttatccaattttatgcttggagcagtcagtacataccagtttctgatgtttcaggcaggagtggggtaaataagtgtgaccacttaaagctgctcgttagcatggaagacttctccattctatctttgtaaaacagacaagatatgcacttgacatagtagcaaattggttctgaattatgcaactgtttgctatttagtaaactagcaaatgatgcatgtattttgtttttcatgtactgggcaatatgagtaaaatctgtccctttttccccctttgaatgaggtcttccatgtttgagggaaagtcttgcactattgcatatattttggggacacagattttcatagtttccatttttggggggcttaaggattttttttttttctgtttgaaacagttttatactttctgatatagtacttgaaattcttaccagaaaattactttggagttttgaagcctttattaatactacttttaaagaagcagttgttttattgtcaatgttttttttcccccaagcatattttcttgtatttctgtttccatatatatatatatatatataatttccaattcaggatattgccctgccatccatgaaaactgttctggcaccaaaagtaatgacaaatgttaagtgtaataatagaaaagtagagcaaagagccattcagcttcagtctttacataccatgaataaaacattaaaacatcatatggagaagtttacatggtgattgttcacctgcagtactgtggagttttaacattttgtcctcttttcagtgaaacagagtaaaaatattcatctaccattactgttatttgctgattttgttttattttttgatggtaatattctatccttatgacactattgcaaccaaattggctttaccatcttggctttagtaggtatagaagacaatggattaccatctttattgctgtaatgtgttaagcattatatgctagtagaatctagtttaattgtttcaggtggaaagtattctttgagtttccatattgaatgtgtttggactaaacaaacaataaactactgatgtctgcagcattta

SEQ ID NO: 2402 - DNA, 2779 bp, Homo sapiens
  source 1..2779: mol_type = genomic DNA
tggacccaactggcgaggctgctggggttgcagcgggacagttggggcggccccgcaggcccaggtttttgaaaataaagttaattcagagaaggtaaaactttctcttcggaatttcccacataatgattatgaggatgtttttgaagagccttcagaaagtggcagtgatcccagcatgtggacagccagaggccccttcagaagagacaggtggagcagtgaggatgaggaggctgcagggccatcacaggctctctcccctctactttctgatacgcgcaaaattgtttctgaaggagaactagatcagttggctcagattcggccattaatattcaattttcatgagcagacagccatcaaggattgtttgaaaatccttgaggaaaaaacagcagcgtatgatatcatgcaggaatttatggctttagaacttaagaatctgcctggtgagttcaactctgggaatcaaccaagcaacagagaaaaaaacagataccgagatattcttccatatgattcaacacgcgttcctcttggaaaaagcaaggactacatcaatgctagttatattagaatagtcaattgtggagaagagtatttttatatcgctactcaaggaccactgctgagcaccatagatgacttttggcaaatggtgttggaaaataattcaaatgttattgccatgataaccagagagatagaaggtggaattatcaaatgctaccattactggcccatttctctgaagaagccattggaattgaaacacttccgtgtattcctggagaactaccagatacttcaatatttcatcattcgaatgtttcaagttgtggagaagtccacgggaactagtcactctgtaaaacagttgcagttcaccaagtggccagaccatggcactcctgcctcagcagatagcttcataaaatatattcgttatgcaaggaagagccaccttacaggacccatggttgttcactgcagtgccggcataggccggacaggggtgttcctatgtgtggatgtcgtgttctgtgccatcgtaaagaactgttcattcaacatcatggatatagtggcccaaatgagagaacaacgttctggcatggttcaaacgaaggagcagtatcacttttgttacgatattgtgcttgaagttcttcggaaacttctgactttggattaagaaagacttctgttgcctctcacttgaaattaccaagtgggtttgcacctcctcataaagaacatgtttgcactgtgctgaagggctttgctatgcatacaatctgctttcttggtttatcagtttattttctttctaaaagctccctgaagggcaatatcatttggcttggggtgatcagtgtttacttattgatcttgctagacaatatcaaaataacttcccacattttccagtgaaacagatgttacataaaacgattgcagcttggctatttggttgaagggattacagagcccaataaaggatttaaaatatattcattaagattttatttggaaaggtggctggagagagctgaggatttccaggactttgtaagttcttattctgggagaacataaggccaataatcatgacctcttccaggcatttttaagacagatgtctattcatgttctttagctagagcctgtactttttgctggcatttgaataacccagtttaaaaagagtccagttagggtggactaactttggacacaaattggcttccatttcctacattttcatactgctgccttcctacagctgctagaccaagacctgttggtctgggaagcatttcatggatagggagagctcctctcggtgaacagtccaaaactaaaatagatgtttatatagaaagcccaagaggagatttttgccatgcctgagttctttcctatcccaccctaacacttaacatattacttagtctgctttgttaaaagcaagtattacctttaacttgcctcttactctttgccctttagctaactaataaagtttgatataggcattattatataattctgagtcattcatggtatatctcatgtttgatgtatttttcaaactaagatctatgatagttttttttccagagttccattaaatcatttatttcctttactttctcacctctgttgaaacatttagaaactggatttgggaacccaattttggaaaaccagattcatagtcatgaaaatggaaacttccatattctgtttttgaaaagatgtggccattattacagtaattttattataggactttgcctcgtacaattaatagtgatattttggacaaggagttctggtgacaagctatacctaattataagctataaaacaatagatatgagtgtttgtacagtttaactcaatggagatcagaatattctatgtattgagaaaatgtttaatatcaatctataaatcttgaatttctaagaggcttattttgttcttttggctgaatgagtatatttgaattggttgaataattaataattctcattgtaaaaataattatatgccaaaaatatatttgatgttaaatcaaatagatgattctgtttacattgttcatatgaataataatctgtgttaatttcattttgataattggcctttaatatttgtatctctaattttattttctctctgttactgtaaaataatagctataatgtataacaattttcttcagaagaattctatgctattattaaaataaaatatttactgtgta

SEQ ID NO: 2403 - DNA, 2323 bp, Homo sapiens
  source 1..2323: mol_type = genomic DNA
gtgaacaaaaattgtttgctggcccccaggatactaactagacctttggcctgactcacaggacactaaggctccttttctgaagaagccttttaccagtctcatttaggggatgggaacaacatgtcttcacctagggactttagagcagagcctgtaaacgattatgagggaaatgactctgaagcagaagacttgaatttcagggagactttgccttcatcaagtcaggaaaacacacctagatcaaaggtttttgaaaataaagttaattcagagaaggtaaaactttctcttcggaatttcccacataatgattatgaggatgtttttgaagagccttcagaaagtggcagtgatcccagcatgtggacagccagaggccccttcagaagagacaggtggagcagtgaggatgaggaggctgcagggccatcacaggctctctcccctctactttctgatacgcgcaaaattgtttctgaaggagaactagatcagttggctcagattcggccattaatattcaattttcatgagcagacagccatcaaggattgtttgaaaatccttgaggaaaaaacagcagcgtatgatatcatgcaggaatttatgttcaacatcatggatatagtggcccaaatgagagaacaacgttctggcatggttcaaacgaaggagcagtatcacttttgttacgatattgtgcttgaagttcttcggaaacttctgactttggattaagaaagacttctgttgcctctcacttgaaattaccaagtgggtttgcacctcctcataaagaacatgtttgcactgtgctgaagggctttgctatgcatacaatctgctttcttggtttatcagtttattttctttctaaaagctccctgaagggcaatatcatttggcttggggtgatcagtgtttacttattgatcttgctagacaatatcaaaataacttcccacattttccagtgaaacagatgttacataaaacgattgcagcttggctatttggttgaagggattacagagcccaataaaggatttaaaatatattcattaagattttatttggaaaggtggctggagagagctgaggatttccaggactttgtaagttcttattctgggagaacataaggccaataatcatgacctcttccaggcatttttaagacagatgtctattcatgttctttagctagagcctgtactttttgctggcatttgaataacccagtttaaaaagagtccagttagggtggactaactttggacacaaattggcttccatttcctacattttcatactgctgccttcctacagctgctagaccaagacctgttggtctgggaagcatttcatggatagggagagctcctctcggtgaacagtccaaaactaaaatagatgtttatatagaaagcccaagaggagatttttgccatgcctgagttctttcctatcccaccctaacacttaacatattacttagtctgctttgttaaaagcaagtattacctttaacttgcctcttactctttgccctttagctaactaataaagtttgatataggcattattatataattctgagtcattcatggtatatctcatgtttgatgtatttttcaaactaagatctatgatagttttttttccagagttccattaaatcatttatttcctttactttctcacctctgttgaaacatttagaaactggatttgggaacccaattttggaaaaccagattcatagtcatgaaaatggaaacttccatattctgtttttgaaaagatgtggccattattacagtaattttattataggactttgcctcgtacaattaatagtgatattttggacaaggagttctggtgacaagctatacctaattataagctataaaacaatagatatgagtgtttgtacagtttaactcaatggagatcagaatattctatgtattgagaaaatgtttaatatcaatctataaatcttgaatttctaagaggcttattttgttcttttggctgaatgagtatatttgaattggttgaataattaataattctcattgtaaaaataattatatgccaaaaatatatttgatgttaaatcaaatagatgattctgtttacattgttcatatgaataataatctgtgttaatttcattttgataattggcctttaatatttgtatctctaattttattttctctctgttactgtaaaataatagctataatgtataacaattttcttcagaagaattctatgctattattaaaataaaatatttactgtg

SEQ ID NO: 2404 - DNA, 2226 bp, Homo sapiens
  source 1..2226: mol_type = genomic DNA
tggacccaactggcgaggctgctggggttgcagcgggacagttggggcggccccgcaggcccaggtttttgaaaataaagttaattcagagaaggtaaaactttctcttcggaatttcccacataatgattatgaggatgtttttgaagagccttcagaaagtggcagtgatcccagcatgtggacagccagaggccccttcagaagagacaggtggagcagtgaggatgaggaggctgcagggccatcacaggctctctcccctctactttctgatacgcgcaaaattgtttctgaaggagaactagatcagttggctcagattcggccattaatattcaattttcatgagcagacagccatcaaggattgtttgaaaatccttgaggaaaaaacagcagcgtatgatatcatgcaggaatttatggctttagaacttaagaatctgcctggtgagttcaactctgggaatcaaccaagcaacagagaaaaaaacagataccgagatattcttccatttcaacatcatggatatagtggcccaaatgagagaacaacgttctggcatggttcaaacgaaggagcagtatcacttttgttacgatattgtgcttgaagttcttcggaaacttctgactttggattaagaaagacttctgttgcctctcacttgaaattaccaagtgggtttgcacctcctcataaagaacatgtttgcactgtgctgaagggctttgctatgcatacaatctgctttcttggtttatcagtttattttctttctaaaagctccctgaagggcaatatcatttggcttggggtgatcagtgtttacttattgatcttgctagacaatatcaaaataacttcccacattttccagtgaaacagatgttacataaaacgattgcagcttggctatttggttgaagggattacagagcccaataaaggatttaaaatatattcattaagattttatttggaaaggtggctggagagagctgaggatttccaggactttgtaagttcttattctgggagaacataaggccaataatcatgacctcttccaggcatttttaagacagatgtctattcatgttctttagctagagcctgtactttttgctggcatttgaataacccagtttaaaaagagtccagttagggtggactaactttggacacaaattggcttccatttcctacattttcatactgctgccttcctacagctgctagaccaagacctgttggtctgggaagcatttcatggatagggagagctcctctcggtgaacagtccaaaactaaaatagatgtttatatagaaagcccaagaggagatttttgccatgcctgagttctttcctatcccaccctaacacttaacatattacttagtctgctttgttaaaagcaagtattacctttaacttgcctcttactctttgccctttagctaactaataaagtttgatataggcattattatataattctgagtcattcatggtatatctcatgtttgatgtatttttcaaactaagatctatgatagttttttttccagagttccattaaatcatttatttcctttactttctcacctctgttgaaacatttagaaactggatttgggaacccaattttggaaaaccagattcatagtcatgaaaatggaaacttccatattctgtttttgaaaagatgtggccattattacagtaattttattataggactttgcctcgtacaattaatagtgatattttggacaaggagttctggtgacaagctatacctaattataagctataaaacaatagatatgagtgtttgtacagtttaactcaatggagatcagaatattctatgtattgagaaaatgtttaatatcaatctataaatcttgaatttctaagaggcttattttgttcttttggctgaatgagtatatttgaattggttgaataattaataattctcattgtaaaaataattatatgccaaaaatatatttgatgttaaatcaaatagatgattctgtttacattgttcatatgaataataatctgtgttaatttcattttgataattggcctttaatatttgtatctctaattttattttctctctgttactgtaaaataatagctataatgtataacaattttcttcagaagaattctatgctattattaaaataaaatatttactgtg

SEQ ID NO: 2405 - DNA, 790 bp, Homo sapiens; identical to SEQ ID NO: 2400
  source 1..790: mol_type = genomic DNA

SEQ ID NO: 2406 - DNA, 3304 bp, Homo sapiens
  source 1..3304: mol_type = genomic DNA
cgccgccgccattttggagcgatcggagtgccgcccgcggccccgagtcggtctcgagccgccggccggccgtgccggtgtccgtaggcgctgcgccctcggccgggcccatgtgtgtgcggcccgcccgaggccgcccgggctttgcctccaccagcgccctggcctccgctcgggcctccacacgggcctccgaagagctgccgcgacgcccggcccgcagggcaggtaaagagattataaatcttccactgaatgaaaaaaattttcttaaagctgcatatactccaagaaaaaaaccacaaatgtttttctgttttgcctgaatacatgatttaaacaagagatttccacagaagctctgcggccgtcacgatgttctggaagtttgacttgaacaccacgtcccatgttgacaagctgctggacaaggagcatgtgacgctgcaggagttaatggatgaagatgacatcttgcaggagtgtaaggctcagaaccagaagctgctggacttcctgtgcaggcagcagtgcatggaggagctggtgagcctcatcacacaggatccgcccctggacatggaggagaaggtccgcttcaaatatccaaacacagcctgtgagcttctgacttgtgatgtgccgcagatcagcgaccgcctcggtggggacgagagcctgctgagcctcctgtacgacttcttggaccatgagccgcctctcaatcctctgctcgccagttttttcagcaagaccattggcaatctcattgcaagaaaaaccgaacaggtgattacgtttttgaagaagaaggacaagttcatcagcctggtgttgaagcacatcggcacctcagcgcttatggacctgctgctgcgcctggtcagctgtgtggagccagccgggctccggcaggacgtcctgcactggctgaatgaagagaaggtcatccagaggcttgtggagttgatccacccgagccaggatgaagataggcagtcaaatgcttctcagactctctgtgacatagttaggctgggcagagaccagggcagtcagctgcaagaggctctggagccagacccgctcctcacagcgctggagtccaggcaggactgtgtggagcagcttctgaagaacatgtttgatggagaccggacggagagctgcctcgtcagtgggactcaggtgttactcaccttgctggaaaccaggcgggttgggacagagggcttggtggactccttttctcagggactggaaaggtcatacgctgtcagcagcagcgtactacacggcatcgagcctcggctgaaggacttccaccagctcctgctcaacccgcccaagaagaaagcgatcctgaccaccattggtgtgctggaggagcccctggggaatgcccgtctgcatggcgcccgcctcatggcagcactgctgcacacaaacacacccagcatcaaccaggagctctgccggctcaacacgatggacttactgctggacttgttctttaagtacacctggaataactttttgcacttccaagtggaactatgcatagccgctattctctcccacgctgcccgtgaggagaggacagaagccagcggatccgagagcagggtggagcctccgcatgagaacgggaaccggagcctggagactccccagccggccgccagcctccctgacaacacaatggtgacccacctgttccagaagtgctgcctggtgcagaggatcctggaggcctgggaagccaacgaccacacgcaggcagcgggtggcatgagacgtgggaacatgggccacctcacacggatcgccaacgcggtggtgcagaacctggagcggggccctgtgcagacgcacatcagcgaggtcatccgagggctccctgcggactgccgtggccgctgggagagcttcgtggaggagacgctgacggagacgaaccgcaggaacactgtggacctggccttctctgactaccagatccagcagatgacagccaacttcgtggatcagtttggcttcaatgatgaggagtttgccgaccaggacgacaacatcaatgccccgtttgacaggatcgcagagatcaacttcaacatcgacgctgacgaggacagtcccagcgcagctctgtttgaggcctgctgcagtgaccgcatccagccctttgatgatgatgaggacgaggacatctgggaggacagtgacactcgctgtgctgcccgggtgatggccagacccaggtttggagccccccatgcttcagagagttgctcaaagaatggcccagagcgtggaggccaggatgggaaggcgagcttggaagcacacagagatgcacctggggcaggtgccccaccggcccccgggaagaaggaagcgccccctgtggagggtgactcagaaggcgccatgtggacggcagtgtttgatgagccagcgaactcaacgcccacagccccaggagtggtgagggacgtgggttccagtgtgtgggcagctggcacctcagctccagaggagaaaggctgggccaagttcactgacttccaacctttctgctgctccgagtcagggcccaggtgcagctctccggtggacacagaatgcagccatgctgagggcagccggagccaaggccctgagaaagccttcagcccggcttctccatgtgcctggaacgtgtgtgtcaccaggaaggcccccctgctggcctctgacagtagctcctctgggggctcccacagcgaggatggcgaccagaaggcagcgagtgccatggatgcggtgagcaggggtcccggccgggaggcccccccgctgcccacagtggccaggacagaggaggctgtcggcagggtcgggtgtgctgacagccggctgttaagccctgcctgccccgcgccaaaggaagtgactgctgccccagccgtggctgtgccccccgaggctactgtggccatcaccacagcactgagcaaggctggccccgccatacccaccccagcagtctcttctgcactggccgtggcggtccccctagggcccatcatggcagtcacagcagccccagccatggtggccaccctggggacagtgacaaaggacgggaagacagatgccccgccagaaggagctgccttaaatggcccagtgtgatgctgctgccgcccggccacggcccaccctggtcaggctgcctccttaatcgagaaaactacctggtgatgcaatcttttttttttttaatttaatttaattttaaaataaatgctgcattggtaaa

SEQ ID NO: 2407 - DNA, 3293 bp, Homo sapiens
  source 1..3293: mol_type = genomic DNA
ccattttggagcgatcggagtgccgcccgcggccccgagtcggtctcgagccgccggccggccgtgccggtgtccgtaggcgctgcgccctcggccgggcccatgtgtgtgcggcccgcccgaggccgcccgggctttgcctccaccagcgccctggcctccgctcgggcctccacacgggcctccgaagagctgccgcgacgcccggcccgcagggcaggtaaagagattataaatcttccactgaatgaaaaaaattttcttaaagctgcatatactccaagaaaaaaaccacaaatgtttttctgttttgcctgaatacatgatttaaacaagagatttccacagaagctctgcggccgtcacgatgttctggaagtttgacttgaacaccacgtcccatgttgacaagctgctggacaaggagcatgtgacgctgcaggagttaatggatgaagatgacatcttgcaggagtgtaaggctcagaaccagaagctgctggacttcctgtgcaggcagcagtgcatggaggagctggtgagcctcatcacacaggatccgcccctggacatggaggagaaggtccgcttcaaatatccaaacacagcctgtgagcttctgacttgtgatgtgccgcagatcagcgaccgcctcggtggggacgagagcctgctgagcctcctgtacgacttcttggaccatgagccgcctctcaatcctctgctcgccagttttttcagcaagaccattggcaatctcattgcaagaaaaaccgaacaggtgattacgtttttgaagaagaaggacaagttcatcagcctggtgttgaagcacatcggcacctcagcgcttatggacctgctgctgcgcctggtcagctgtgtggagccagccgggctccggcaggacgtcctgcactggctgaatgaagagaaggtcatccagaggcttgtggagttgatccacccgagccaggatgaagataggcagtcaaatgcttctcagactctctgtgacatagttaggctgggcagagaccagggcagtcagctgcaagaggctctggagccagacccgctcctcacagcgctggagtcgcaggactgtgtggagcagcttctgaagaacatgtttgatggagaccggacggagagctgcctcgtcagtgggactcaggtgttactcaccttgctggaaaccaggcgggttgggacagagggcttggtggactccttttctcagggactggaaaggtcatacgctgtcagcagcagcgtactacacggcatcgagcctcggctgaaggacttccaccagctcctgctcaacccgcccaagaagaaagcgatcctgaccaccattggtgtgctggaggagcccctggggaatgcccgtctgcatggcgcccgcctcatggcagcactgctgcacacaaacacacccagcatcaaccaggagctctgccggctcaacacgatggacttactgctggacttgttctttaagtacacctggaataactttttgcacttccaagtggaactatgcatagccgctattctctcccacgctgcccgtgaggagaggacagaagccagcggatccgagagcagggtggagcctccgcatgagaacgggaaccggagcctggagactccccagccggccgccagcctccctgacaacacaatggtgacccacctgttccagaagtgctgcctggtgcagaggatcctggaggcctgggaagccaacgaccacacgcaggcagcgggtggcatgagacgtgggaacatgggccacctcacacggatcgccaacgcggtggtgcagaacctggagcggggccctgtgcagacgcacatcagcgaggtcatccgagggctccctgcggactgccgtggccgctgggagagcttcgtggaggagacgctgacggagacgaaccgcaggaacactgtggacctggccttctctgactaccagatccagcagatgacagccaacttcgtggatcagtttggcttcaatgatgaggagtttgccgaccaggacgacaacatcaatgccccgtttgacaggatcgcagagatcaacttcaacatcgacgctgacgaggacagtcccagcgcagctctgtttgaggcctgctgcagtgaccgcatccagccctttgatgatgatgaggacgaggacatctgggaggacagtgacactcgctgtgctgcccgggtgatggccagacccaggtttggagccccccatgcttcagagagttgctcaaagaatggcccagagcgtggaggccaggatgggaaggcgagcttggaagcacacagagatgcacctggggcaggtgccccaccggcccccgggaagaaggaagcgccccctgtggagggtgactcagaaggcgccatgtggacggcagtgtttgatgagccagcgaactcaacgcccacagccccaggagtggtgagggacgtgggttccagtgtgtgggcagctggcacctcagctccagaggagaaaggctgggccaagttcactgacttccaacctttctgctgctccgagtcagggcccaggtgcagctctccggtggacacagaatgcagccatgctgagggcagccggagccaaggccctgagaaagccttcagcccggcttctccatgtgcctggaacgtgtgtgtcaccaggaaggcccccctgctggcctctgacagtagctcctctgggggctcccacagcgaggatggcgaccagaaggcagcgagtgccatggatgcggtgagcaggggtcccggccgggaggcccccccgctgcccacagtggccaggacagaggaggctgtcggcagggtcgggtgtgctgacagccggctgttaagccctgcctgccccgcgccaaaggaagtgactgctgccccagccgtggctgtgccccccgaggctactgtggccatcaccacagcactgagcaaggctggccccgccatacccaccccagcagtctcttctgcactggccgtggcggtccccctagggcccatcatggcagtcacagcagccccagccatggtggccaccctggggacagtgacaaaggacgggaagacagatgccccgccagaaggagctgccttaaatggcccagtgtgatgctgctgccgcccggccacggcccaccctggtcaggctgcctccttaatcgagaaaactacctggtgatgcaatcttttttttttttaatttaatttaattttaaaataaatgctgcattggtaaa

SEQ ID NO: 2408 - DNA, 2055 bp, Homo sapiens
  source 1..2055: mol_type = genomic DNA
gccgcgaggggccgccgtccgtcccgccccctgccgggccgcggcgctctgctagagcgtggctcagttttggtagcgggaccccggaaatgtaaagcatgagcgggaacagtcgccagggcgagtgacaggcgagccctatgctttacttccgagggcggtgtcagcaaagctagagtcagaggttccggttgagatcaagttgggagacacacccttgttcattctccttgagaagcagctattatcaacagaacattgacagaacctgtgtttggggaaaggactgatggctttgagtctaggttggaaagcacacaggaaccactgtggtctcctcttgcaggctctgcgaagcagtggtcttctcttgtttccctgtggccagtgtccctggagaggagctggaagctttttggaccctgagataaaggctttcctggaggagaacactgaagtcaccagcagtggtagcctcacccctgaaatccagttgcggcttttgacccccagatgcaaattctggtgggagagagctgacctgtggccccacagtgatccttactgggcaatctactggccaggaggccaagccctgtctaggtatcttttggataatcctgatgttgtcagaggaaaatctgtattagatcttgggagtggatgtggagctacagctattgctgctaagatgagtggggcatcaaggatcttggccaatgacatagaccctattgcaggaatggctattacactaaattgtgaattgaacagactgaatccttttcctattttaatccaaaacattttgaatttggaacaagataagtgggaccttgttgttcttggcgatatgttttatgatgaagaccttgcagatagtcttcatcagtggctgaagaagtgcttctggacctatagaactcgagtactgattggtgaccctgggcggccccagttcagtggacacagcattcagcatcacctgcacaaagtggtagaatattcacttttggagtctactaggcaggaaaacagtggactgacaacaagcacagtgtggggttttcagccttgagttgtcaaagtgcttccaagtatgaatatagtaatgtttggatctgactctaaaagttttctctataggagatactctccagtttaatgaatgtaattcttgttaaatggaaaatcttgtttttaaaatatgaaggtttagagttttgtttacttttgtcatgtaactggttctgtatttctatgcatgccaattatacacatctctatctgcatttttttttctattttaaccgctgaaggaatatgattatacaatgccatactcaatggtggcagcatttaatttaagtaatggagaagaattaaacattgtagctggatctgtttctgtagtcgaggacaactgtgatgtaactttgaattaaacaaacaaaacaaaacagaagaagactatatatatattttttctttttttagagacagtctcactttgctcccaggctggaatgcagtggctattcagaggcttaatcattgggcactgcagccttgaactctgggcttttttttttttttgagatggagtctcagctctgtcgtccaggctggagtgcagtgactcatgtctcggctcactgtagcctccacctcccccaatcaagcgattgtcctgtctcagcctccagagtagctgggattttaggtgtgcaccaccatgcctggctaatttttgtatttttagtagagacggggttttgccatgttggccaggccggtctcaaactcctgacctcaggtgatccacccgccttggcctcccaaagtgctaggattacaggtgtgagccaccacgccagcctgacgatgttttttacttctatcacttccttttgattttttcttatagcttctatctctgcttacgtcacccatcattcttgcgtgttgtatgcttttcgcattagagccctttgcatgttaatcagttattttaaatttatgatctggtaattctaaaatgtctgccataactga

SEQ ID NO: 2409 - DNA, 4156 bp, Homo sapiens
  source 1..4156: mol_type = genomic DNA
tagggcacgggaagggctcgctagaatgagctcttaaactggttgggtgtaagcggttttgggctagtctaaaccaaacaactgagaataaacgcggggttcctgcaggttgagagagtacctgtctgcaaatgtccagtagtgatggattgccttgtaggccccagagcaatcggggaagttagcattcttgttcaagaagctgctggttcacttagagctataaaagaatgttgtgagtttggattttcttccaaacgttcaggattgaggttagggctggtggtgagggatcatgtaaagaggtttgagtggctcagccttaggtcccggtgtggaaagcttattcttttggtgtcatcacgtggccgtgggaattatttagaatgtgatctgccctcatgagaagaaaggagctctgaagccgttgcagttcttcctccctatgtggaaaatcgaatttctggaaacatcctccgtattgggagattttgcctatgtaaaggctatccttattggctagcggcactaattactttaaaagtaggatggaagtacaagtatctcaagcatcattgggtttcgagctcacttctgtggaaaagagtttaagggagtggtctagactttccagggaagttattgcctggctgtgtccctctagtcctaattttatacttaactttcccccacctccttcagcctcatctgtttcaatggtgcaactcttttcatccccttttggttaccagtcaccttcaggccattcagaggaggaaagagaggggaatatgaagtcagccaagccccaagtgaaccacagtcagcatggggaaagccagcgggccttgagccccctgcagtctactctgagttctgctgcatctccttcccaagcgtatgagacctatattgaaaatggactcatatgccttaaacacaaaattagaaacatcgagaaaaagaagctcaaactggaggattataaggatcgcctgaaaagtggagagcatcttaatccagaccagttggaagctgtagagaaatatgaagaagtgctacataatttggaatttgccaaggagcttcaaaaaaccttttctgggttgagcctagatctactaaaagcgcaaaagaaggcccagagaagggagcacatgctaaaacttgaggctgagaagaaaaagcttcgaactatacttcaagttcagtatgtattgcagaacttgacacaggagcacgtacaaaaagacttcaaagggggtttgaatggtgcagtgtatttgccttcaaaagaacttgactacctcattaagttttcaaaactgacctgccctgaaagaaatgaaagtctgagtgttgaagaccagatggagcagtcatccttgtacttttgggaccttttggaaggtagtgagaaagcagtggtaggaacgacatacaaacacttgaaggatctactgtctaaattgctgaactcaggctattttgaaagtatcccagttcccaaaaatgccaaggaaaaggaagtaccactggaggaagaaatgctaatacaatcagagaaaaaaacacaattatcgaagactgaatctgtcaaagagtcagagtctctaatggaatttgcccagccagagatacaaccacaagagtttcttaacagacgctatatgacagaagtagattattcaaacaaacaaggcgaagagcaaccttgggaagcagattatgctagaaaaccaaatctcccaaaacgttgggatatgcttactgaaccagatggtcaagagaagaaacaggagtcctttaagtcctgggaggcttctggtaagcaccaggaggtatccaagcctgcagtttccttagaacagaggaaacaagacacctcaaaactcaggtctactctgccggaagagcagaagaagcaggagatctccaaatccaagccatctcctagccagtggaagcaagatacacctaaatccaaagcagggtatgttcaagaggaacaaaagaaacaggagacaccaaagctgtggccagttcagctgcagaaagaacaagatccaaagaagcaaactccaaagtcttggacaccttccatgcagagcgaacagaacaccaccaagtcatggaccactcccatgtgtgaagaacaggattcaaaacagccagagactccaaaatcctgggaaaacaatgttgagagtcaaaaacactctttaacatcacagtcacagatttctccaaagtcctggggagtagctacagcaagcctcataccaaatgaccagctgctgcccaggaagttgaacacagaacccaaagatgtgcctaagcctgtgcatcagcctgtaggttcttcctctacccttccgaaggatccagtattgaggaaagaaaaactgcaggatctgatgactcagattcaaggaacttgtaactttatgcaagagtctgttcttgactttgacaaaccttcaagtgcaattccaacgtcacaaccgccttcagctactccaggtagccccgtagcatctaaagaacaaaatctgtccagtcaaagtgattttcttcaagagccgttacaggcagcaattcccccaggcaagcaaccgtcttcactagcttctccaaatcctcccatggcaaagggctctgaacagggcttccagtcacctccagcaagtagtagttcagtaaccattaacacagcaccctttcaagccatgcagacagtatttaacgttaatgcacctctgcctccacgaaaagaacaagaaataaaagaatccccttattcacctggctacaatcaaagttttaccacagcaagtacacaaacaccaccccagtgccaactgccatctatacatgtagaacaaactgtccattctcaagagactgcacagacgaatgtgtttcccagacctactcagccatttgtcaatagccggggatctgttagaggatgtactcgtggtgggagattaataaccaattcctatcggtcccctggtggttataaaggttttgatacttatagaggactcccttcaatttccaatggaaattatagccagctgcagttccaagctagagagtattctggagcaccttattcccaaagggataatttccagcagtgttataagcgaggagggacatctggtggtccacgagcaaattcgagagctaactgcttcattatgagaaactcactgttgctaataaaacagcagggtggagtgattcttctcaggtgagcagcccagaaagagacaacgaaacctttaacagtggtgactctggacaaggagactcccgtagcatgacccctgtggatgtgccagtgacaaatccagcagccaccatactgccagtacacgtctaccctctgcctcagcagatgcgagttgccttctcagcagccagaacctctaatctggcccctggaactttagaccaacctattgtgtttgatcttcttctgaacaacttaggagaaacttttgatcttcagcttggtagatttaattgcccagtgaatggcacttacgttttcatttttcacatgctaaagctggcagtgaatgtgccactgtatgtcaacctcatgaagaatgaagaggtcttggtatcagcctatgccaatgatggtgctccagaccatgaaactgctagcaatcatgcaattcttcagctcttccagggagaccagatatggttacgtctgcacaggggagcaatttatggaagtagctggaaatattctacgttttcaggctatcttctttatcaagattgaaagtcagtacagtattgacaataaaaggatggtgttctaattagtgggattgaaggaaaagtagtctttgccctcatgactgattggtttaggaaaatgtttttgttcctagagggaggaggtccttacttttttgttttccttcctgaggtgaaaaatcaagctgaatgacaattagcactaatctggcactttataaattgtgatgtagcctcgctagtcaagctgtgaatgtatattgtttgcacttaatccttaactgtattaacgttcagcttactaaactgactgcctcaagtccaggcaagttacaatgccttgttgtgcctcaataaaaaagttacatgc

SEQ ID NO: 2410 - DNA, 2602 bp, Homo sapiens
  source 1..2602: mol_type = genomic DNA
gcttcgttactgggccctggaagcgaggtcagagctggaaatggccttaggggtcacctagggcctaatccatcgtttctcttgtgggggaactgagcctctgggaagggtcacattgcgttaatgcagtgtgtgtcgcctctgtccctcccccttacacgtctggcgtctcgtcagatacatgtcagctcctgggagaagctttccctggccgctttgcagaagggcgtccccttttagcctcttccacgtcaacctgctccatttctttcgtagcagttaccagtctctgaaactaagtctgtttctgtcttagcccgccaagtatttattgtatacgtatataggtgccaccgtacaggcagtacttctccaggttcaaaatgagcctgtttggaacaacctcaggttttggaaccagtgggaccagcatgtttggcagtgcaactacagacaatcacaatcccatgaaggatattgaagtaacatcatctcctgatgatagcattggttgtctgtcttttagcccaccaaccttgccggggaactttcttattgcaggatcatgggctaatgatgttcgctgctgggaagttcaagacagtggacagaccattccaaaagcccagcagatgcacactgggcctgtgcttgatgtctgctggagtgacgatgggagcaaagtgtttacggcatcgtgtgataaaactgccaaaatgtgggacctcagcagtaaccaagcgatacagatcgcacagcatgatgctcctgttaaaaccatccattggatcaaagctccaaactacagctgtgtgatgactgggagctgggataagactttaaagttttgggatactcgatcgtcaaatcctatgatggttttgcaactccctgaaaggtgttactgtgctgacgtgatataccccatggctgtggtggcaactgcagagaggggcctgattgtctatcagctagagaatcaaccttctgaattcaggaggatagaatctccactgaaacatcagcatcggtgtgtggctatttttaaagacaaacagaacaagcctactggttttgccctgggaagtatcgaggggagagttgctattcactatatcaaccccccgaaccccgccaaagataacttcacctttaaatgtcatcgatctaatggaaccaacacttcagctcctcaggacatttatgcggtaaatggaatcgcgttccatcctgttcatggcacccttgcaactgtgggatctgatggtagattcagcttctgggacaaagatgccagaacaaaactaaaaacttcggaacagttagatcagcccatctcagcttgctgtttcaatcacaatggaaacatatttgcatacgcttccagctacgactggtcaaagggacatgaattttataatccccagaaaaaaaattacattttcctgcgtaatgcagccgaagagctaaagcccaggaataagaagtagtggctggagactctggctcagccagagttgtttctctccactctgcctcatctctgtacgaatttgggtcccagccttgttgggttgtcagccatggacatggatttcaacccctggagaaaacgatgtcattgttcagcagctgagagcccaggcgtccgcggcgacttgccgtctctccattccactgcctgttgcagagtttttctgtaactaagggggttgaggttattgtagacgttagattgcgggcaccgccagggattttgcagcgcttcagtgtacgtgttagagaatattggaaaagcgtctgtgagccccgtgctgtattttgtaataaagtcttttgcagattgcttcccgagcttcctttgtccttttctccccttgcccaccccgtaacctcaggaacatgcgtcctgcccagcatcagcgtggggttttgagttgagatttcagacaccctctgggaaatgcggcaaccttaggggaaagggagtccccagctgcgctcacttctgctgcgcggaacggcagcctctgtgagccctggtgggcagagtttgaatgtgtttttccttgcttccctcattcccatcttcaaaatccccagtgctttctggccttgctgctcagatttccgagtgactcaaatggggactgttacttgtgctgggtgacaggccatttgtgggtaacctcctaaggcccaagtgggtgacacttgcgtgactttcaagttagaacccaagccccctgcatgggaattgccctgaactcttacccaccccggtcccctgcatgggaattgccctgaaccctcagtagtggttgtttggctgttcttttgtattttgtgtaatttaaaattcctggttggtaagtattcaaaatgaaattcagctgggctgagaaaaagtgtgacttttgggtctgtcactgtatttctcacctgtgatctcaaatgcttcttaggcctttctgtttggactaatgtgtgaagtctgacttgctgagtgtaaaattctagtatcgatagtgttgtaagatgtgtttgcctactcataaaaaacaatgaaaataaaattttctactggaagagaccacctgca

SEQ ID NO: 2411 - DNA, 2639 bp, Homo sapiens
  source 1..2639: mol_type = genomic DNA
gatcagcccgcctcggcctcccaaagtgctgggattacaggcgtgagccaccgcgcctggccagttgcggatttataaaagcagtcgcttagtaacttgcagcggctacatcaactttggaccaattcgcaaactgctggtgtaaagcgtttttgcgcatgtgctgtcgccttgcgggaaaaggagcctttttcttcgacgatttccgggcgacgcaggaagtggctccagggcgcacgcgcgttgtttccgcggtagtcagggcagtttctaccgcaggcttaaggaggcttcgggctcctgggatttctgtccgcgctcctggccctcgtccttcgcgccagagcaggttcgcaaactcctcagacccttctgctcccggccgccgctttccgccggggcgagacccccaggttcaaaatgagcctgtttggaacaacctcaggttttggaaccagtgggaccagcatgtttggcagtgcaactacagacaatcacaatcccatgaaggatattgaagtaacatcatctcctgatgatagcattggttgtctgtcttttagcccaccaaccttgccggggaactttcttattgcaggatcatgggctaatgatgttcgctgctgggaagttcaagacagtggacagaccattccaaaagcccagcagatgcacactgggcctgtgcttgatgtctgctggagtgacgatgggagcaaagtgtttacggcatcgtgtgataaaactgccaaaatgtgggacctcagcagtaaccaagcgatacagatcgcacagcatgatgctcctgttaaaaccatccattggatcaaagctccaaactacagctgtgtgatgactgggagctgggataagactttaaagttttgggatactcgatcgtcaaatcctatgatggttttgcaactccctgaaaggtgttactgtgctgacgtgatataccccatggctgtggtggcaactgcagagaggggcctgattgtctatcagctagagaatcaaccttctgaattcaggaggatagaatctccactgaaacatcagcatcggtgtgtggctatttttaaagacaaacagaacaagcctactggttttgccctgggaagtatcgaggggagagttgctattcactatatcaaccccccgaaccccgccaaagataacttcacctttaaatgtcatcgatctaatggaaccaacacttcagctcctcaggacatttatgcggtaaatggaatcgcgttccatcctgttcatggcacccttgcaactgtgggatctgatggtagattcagcttctgggacaaagatgccagaacaaaactaaaaacttcggaacagttagatcagcccatctcagcttgctgtttcaatcacaatggaaacatatttgcatacgcttccagctacgactggtcaaagggacatgaattttataatccccagaaaaaaaattacattttcctgcgtaatgcagccgaagagctaaagcccaggaataagaagtagtggctggagactctggctcagccagagttgtttctctccactctgcctcatctctgtacgaatttgggtcccagccttgttgggttgtcagccatggacatggatttcaacccctggagaaaacgatgtcattgttcagcagctgagagcccaggcgtccgcggcgacttgccgtctctccattccactgcctgttgcagagtttttctgtaactaagggggttgaggttattgtagacgttagattgcgggcaccgccagggattttgcagcgcttcagtgtacgtgttagagaatattggaaaagcgtctgtgagccccgtgctgtattttgtaataaagtcttttgcagattgcttcccgagcttcctttgtccttttctccccttgcccaccccgtaacctcaggaacatgcgtcctgcccagcatcagcgtggggttttgagttgagatttcagacaccctctgggaaatgcggcaaccttaggggaaagggagtccccagctgcgctcacttctgctgcgcggaacggcagcctctgtgagccctggtgggcagagtttgaatgtgtttttccttgcttccctcattcccatcttcaaaatccccagtgctttctggccttgctgctcagatttccgagtgactcaaatggggactgttacttgtgctgggtgacaggccatttgtgggtaacctcctaaggcccaagtgggtgacacttgcgtgactttcaagttagaacccaagccccctgcatgggaattgccctgaactcttacccaccccggtcccctgcatgggaattgccctgaaccctcagtagtggttgtttggctgttcttttgtattttgtgtaatttaaaattcctggttggtaagtattcaaaatgaaattcagctgggctgagaaaaagtgtgacttttgggtctgtcactgtatttctcacctgtgatctcaaatgcttcttaggcctttctgtttggactaatgtgtgaagtctgacttgctgagtgtaaaattctagtatcgatagtgttgtaagatgtgtttgcctactcataaaaaacaatgaaaataaaattttctactggaagagaccacctgca

SEQ ID NO: 2412 - DNA, 3106 bp, Homo sapiens
  source 1..3106: mol_type = genomic DNA
gtggtttcctagaaacatgattgtttattggcattgatctcacagtctggtgaggacttctttactgataatgtcaagttcaggttatcctcccaaccaaggagcattcagcacagaacaaagtcgttatcctcctcactctgtccagtatacatttcccaacacccgccaccagcaggatccagcattcggaggcaaacatgaagctccatcctctccaatttcggggcaaccatgtggagatgatcaaaatgcttcaccttcaaaactctcaaaggaagagttaatacagagtatggatcgtgtagatcgagaaattgcaaaagtagaacagcagatccttaaactgaaaaagaaacaacaacagcttgaagaagaggcagctaaacctcctgagcctgagaagcccgtgtcccctcctcctgtggagcagaaacaccgcagtattgtccaaattatttatgatgagaatcggaaaaaagcagaagaagctcataaaatttttgaaggtcttggcccaaaagttgaactgccactgtataaccagccatcagataccaaggtgtaccatgagaacatcaagacaaaccaggtgatgaggaaaaaactcattttattttttaaaagaagaaatcatgcaagaaaacaaagggaacaaaaaatctgccagcgttatgatcagctcatggaggcatgggagaaaaaagtggacagaatagaaaataatcctcggaggaaagctaaagaaagcaaaacaagggaatactatgaaaagcagtttccagaaattcgaaaacaaagagaacagcaagaaagatttcagcgagttgggcagaggggagctggtctttcagccaccattgctaggagtgagcatgagatttctgaaattattgatgggctctctgagcaggagaataatgagaaacaaatgcggcagctctctgtgattccacctatgatgtttgatgcagaacaaagacgagtcaagttcattaacatgaatgggcttatggaggaccctatgaaagtgtataaagataggcagtttatgaatgtttggactgaccatgaaaaggagatctttaaggacaagtttatccagcatccaaaaaactttggactaattgcatcatacttggagaggaagagtgttcctgattgtgttttgtattactatttaaccaagaaaaatgagaattataaagccctcgtcagaaggaattatgggaaacgcagaggcagaaaccagcaaattgctcgaccctcgcaagaagaaaaagtagaagaaaaagaagaggataaagcagaaaaaacagaaaaaaaagaagaagaaaagaaagatgaagaggaaaaagatgaaaaagaagactccaaagaaaataccaaggaaaaggacaagatagatggtacagcagaagaaactgaggaaagagagcaagccacaccccgggggcgaaagactgccaacagtcagggccgccgtaagggccggatcaccaggtccatgacaaacgaagctgcagctgccagtgctgcagccgcagcggctactgaagagcccccaccacctctgccaccgccaccagaacccatttctacagagcctgtggagacctctcgatggacagaagaagaaatggaagttgctaaaaaaggtctagtagaacatggtcgtaactgggcagcaattgctaaaatggtgggaacgaaaagtgaagctcaatgtaaaaacttctattttaactataaaaggcgacacaatcttgacaacctcttacagcagcataaacagaaaacttcacgaaaacctcgtgaagagcgagatgtgtctcaatgtgaaagtgtcgcttccactgtttctgctcaggaggatgaagatattgaagcctccaatgaagaagaaaatccagaagacagcgaaggtgcagaaaatagttctgatacagaaagtgctccttctccttcaccagttgaagctgtcaagcccagcgaggacagtcctgaaaatgctacttctcgaggaaacacagaacctgcggttgagcttgagcccaccacggaaactgcacccagtacatctccctccttagcagttccaagtacaaaaccagctgaagatgaaagtgtggagacccaggtgaatgacagcatcagtgctgagacagcagagcagatggatgtagatcagcaggagcacagtgctgaagagggttctgtttgtgatcccccacccgctaccaaagctgactctgtggacgttgaagtgagggtgccagaaaaccatgcatctaaagttgaaggtgataataccaaagaaagagacttggatagagccagtgagaaggtggaacctagagatgaagatttggtggtagctcagcaaataaatgcccaaaggcccgagccccagtcagacaatgattccagtgccacgtgcagcgctgatgaggatgtggatggagagccagagaggcagagaatgtttcctatggactcaaagccttcactgttaaaccccactggatctatactcgtctcatctccgttaaaaccaaatccactggatctgccacagcttcagcatcgagctgctgttatcccaccaatggtatcctgcaccccatgtaacataccaattggaaccccagtgagcggctatgctctctaccagcgacacattaaagcaatgcatgagtcagcactcctggaggagcagcggcagagacaagaacagatagatttggaatgtagaagttctacaagtccatgtggcacatccaagagtccaaacagagagtgggaaggtaggtagatagagctatcaccaagagaacttttatgaagggaaataaagctaaacccaaaagcagtgtccattgtgctttgtaagttgtcagcctcccaactgattattatatttgtcctaacagacacagttccttaaattgaccttaaactatgaagaaatgttagtattattaactactaaaggatgccagtaacatttttaatagcattctagttaatgtgaattttctgatattcatctttgtgctggaagacattataaataaagttatgctttatgttccgttcatctgaa

SEQ ID NO: 2413 - DNA, 7994 bp, Homo sapiens
  source 1..7994: mol_type = genomic DNA
gtggtttcctagaaacatgattgtttattggcattgatctcacagtctggtgaggacttctttactgataatgtcaagttcaggttatcctcccaaccaaggagcattcagcacagaacaaagtcgttatcctcctcactctgtccagtatacatttcccaacacccgccaccagcaggatccagcattcggaggcaaacatgaagctccatcctctccaatttcggggcaaccatgtggagatgatcaaaatgcttcaccttcaaaactctcaaaggaagagttaatacagagtatggatcgtgtagatcgagaaattgcaaaagtagaacagcagatccttaaactgaaaaagaaacaacaacagcttgaagaagaggcagctaaacctcctgagcctgagaagcccgtgtcccctcctcctgtggagcagaaacaccgcagtattgtccaaattatttatgatgagaatcggaaaaaagcagaagaagctcataaaatttttgaaggtcttggcccaaaagttgaactgccactgtataaccagccatcagataccaaggtgtaccatgagaacatcaagacaaaccaggtgatgaggaaaaaactcattttattttttaaaagaagaaatcatgcaagaaaacaaagggaacaaaaaatctgccagcgttatgatcagctcatggaggcatgggagaaaaaagtggacagaatagaaaataatcctcggaggaaagctaaagaaagcaaaacaagggaatactatgaaaagcagtttccagaaattcgaaaacaaagagaacagcaagaaagatttcagcgagttgggcagaggggagctggtctttcagccaccattgctaggagtgagcatgagatttctgaaattattgatgggctctctgagcaggagaataatgagaaacaaatgcggcagctctctgtgattccacctatgatgtttgatgcagaacaaagacgagtcaagttcattaacatgaatgggcttatggaggaccctatgaaagtgtataaagataggcagtttatgaatgtttggactgaccatgaaaaggagatctttaaggacaagtttatccagcatccaaaaaactttggactaattgcatcatacttggagaggaagagtgttcctgattgtgttttgtattactatttaaccaagaaaaatgagaattataaagccctcgtcagaaggaattatgggaaacgcagaggcagaaaccagcaaattgctcgaccctcgcaagaagaaaaagtagaagaaaaagaagaggataaagcagaaaaaacagaaaaaaaagaagaagaaaagaaagatgaagaggaaaaagatgaaaaagaagactccaaagaaaataccaaggaaaaggacaagatagatggtacagcagaagaaactgaggaaagagagcaagccacaccccgggggcgaaagactgccaacagtcagggccgccgtaagggccggatcaccaggtccatgacaaacgaagctgcagctgccagtgctgcagccgcagcggctactgaagagcccccaccacctctgccaccgccaccagaacccatttctacagagcctgtggagacctctcgatggacagaagaagaaatggaagttgctaaaaaaggtctagtagaacatggtcgtaactgggcagcaattgctaaaatggtgggaacgaaaagtgaagctcaatgtaaaaacttctattttaactataaaaggcgacacaatcttgacaacctcttacagcagcataaacagaaaacttcacgaaaacctcgtgaagagcgagatgtgtctcaatgtgaaagtgtcgcttccactgtttctgctcaggaggatgaagatattgaagcctccaatgaagaagaaaatccagaagacagcgaaggtgcagaaaatagttctgatacagaaagtgctccttctccttcaccagttgaagctgtcaagcccagcgaggacagtcctgaaaatgctacttctcgaggaaacacagaacctgcggttgagcttgagcccaccacggaaactgcacccagtacatctccctccttagcagttccaagtacaaaaccagctgaagatgaaagtgtggagacccaggtgaatgacagcatcagtgctgagacagcagagcagatggatgtagatcagcaggagcacagtgctgaagagggttctgtttgtgatcccccacccgctaccaaagctgactctgtggacgttgaagtgagggtgccagaaaaccatgcatctaaagttgaaggtgataataccaaagaaagagacttggatagagccagtgagaaggtggaacctagagatgaagatttggtggtagctcagcaaataaatgcccaaaggcccgagccccagtcagacaatgattccagtgccacgtgcagcgctgatgaggatgtggatggagagccagagaggcagagaatgtttcctatggactcaaagccttcactgttaaaccccactggatctatactcgtctcatctccgttaaaaccaaatccactggatctgccacagcttcagcatcgagctgctgttatcccaccaatggtatcctgcaccccatgtaacataccaattggaaccccagtgagcggctatgctctctaccagcgacacattaaagcaatgcatgagtcagcactcctggaggagcagcggcagagacaagaacagatagatttggaatgtagaagttctacaagtccatgtggcacatccaagagtccaaacagagagtgggaagtccttcagcctgctccacatcaagtgataactaatctccctgaaggcgttcggcttccgacaactcgaccaaccaggccaccgccccctctcatcccgtcatccaaaaccacagtggcttcagaaaaaccatcttttataatgggaggctccatctcacagggaacaccaggcacttatttgacttctcataatcaggcttcctacactcaagaaacacccaagccgtcagtgggatctatctctcttggactgccacggcaacaggaatctgccaaatcagctactttgccctacatcaagcaggaagaattttctccccgaagccaaaactcacaacctgagggtctgttggtcagggcccaacatgaaggtgtagtcagaggtaccgcaggagccatacaagaaggaagtataactcggggaactccaaccagcaaaatttcagtggagagcattccatccctacggggctctatcactcagggcaccccggctctgccccagactggcataccaacagaggctttggtgaaggggtccatttcgagaatgcccattgaagacagcagtcctgagaaaggcagagaggaagctgcatccaaaggccatgttatttatgaaggcaaaagtggacatatcttgtcatatgataatattaagaatgcccgagaagggactaggagtccaagaacagctcatgaaatcagtttaaagagaagctatgaatcagtggaaggaaatataaagcaagggatgtcaatgagggagtctcctgtatcagcaccgttagaggggctgatatgccgagcattacccagggggagtcctcattctgacctcaaagaaaggactgtattgtctggctccataatgcaggggacaccaagagcaacaactgaaagctttgaagatggccttaaatatcccaaacaaattaaaagggaaagtcctcccatacgagcatttgaaggtgccattaccaaaggaaaaccatatgatggcatcaccaccatcaaagaaatggggcgttccattcatgagattccaaggcaagatattttaactcaggaaagtcggaaaactccagaagtggtccagagcacacggccgataattgagggttccatttcccagggcacaccaataaagtttgacaacaactcaggtcaatctgccatcaaacacaatgtcaaatccttaatcacggggcctagcaaactatcccgtggaatgcctccgctggaaattgtgccagagaacataaaagtggtagaacggggaaaatatgaggatgtgaaagcaggcgagaccgtgcgttcccggcacacgtcagtggtaagctctggcccctccgttcttaggtccacactgcatgaagctcccaaagcacaactgagccctgggatttatgatgacaccagtgcacggaggacccctgtgagttatcaaaacaccatgtccagaggctcacccatgatgaacagaacttctgatgtttcttctaacaagtctaccaatcatgaaaggaaatcgacactgacccctacccagagggaaagtatcccagcgaagtctccagtgcctggggtggaccctgtcgtgagccacagtccgtttgatccccatcacagaggcagcactgcaggcgaggtttatcggagccacctgcccacgcacttggatccagccatgccttttcacagggctttggatcctgcggctgcttacctgtttcagagacagctttcaccaactccaggttacccaagtcagtatcagctttacgcaatggagaacacaagacagacaatcttaaatgattacattacctcacaacagatgcaagtgaacttgcgtccagatgtggccagaggactctccccaagagagcagccactgggtctcccatacccagcaacgagaggaatcattgacctgaccaatatgcctccaacaattttagtgcctcatccagggggaacaagcactcctcccatggacagaatcacttatattcctggtacacagattactttccctcccaggccgtacaactctgcttccatgtctccaggacacccaacacaccttgcagctgctgcaagtgctgagagggaacgggaacgggagcgggagaaggagcgggagcgggaacggattgctgcagcttcctccgacctctacctgcggccaggctcagaacagcctggccgacctggcagtcatggatatgttcgctccccttccccttcagtaagaactcaggagaccatgttgcaacagagacccagtgttttccaaggaaccaatggaaccagtgtaatcacacctttggatccaactgctcagctacgaatcatgccactgcctgctgggggcccttcaataagccaaggcctgccagcctcccgttacaacactgctgcggatgccctggctgctcttgtggatgctgcagcttctgcaccccagatggatgtgtccaaaacaaaagagagtaagcatgaagctgccaggttagaagaaaatttgagaagcaggtcagcagcagttagtgaacagcagcagctagagcagaaaaccctggaggtggagaagagatctgttcagtgtttatacacttcttcagcctttccaagtggcaagccccagcctcattcttcagtagtttattctgaggctgggaaagataaagggcctcctccaaaatccagatatgaggaagagctaaggaccagagggaagactaccattactgcagctaacttcatagacgtgatcatcacccggcaaattgcctcggacaaggatgcgagggaacgtggctctcaaagttcagactcttctagtagcttatcttctcacaggtatgaaacacctagcgatgctattgaggtgataagtcctgccagctcacctgcgccaccccaggagaaactgcagacctatcagccagaggttgttaaggcaaatcaagcggaaaatgatcctaccagacaatatgaaggaccattacatcactatcgaccacagcaggaatcaccatctccccaacaacagctgcccccttcttcacaggcagagggaatggggcaagtgcccaggacccatcggctgatcacacttgctgatcacatctgtcaaattatcacacaagattttgctagaaatcaagtttcctcgcagactccccagcagcctcctacttctacattccagaactcaccttctgctttggtatctacacctgtgaggactaaaacatcaaaccgttacagcccagaatcccaggctcagtctgtccatcatcaaagaccaggttcaagggtctctccagaaaatcttgtggacaaatccaggggaagtaggcctggaaaatccccagagaggagtcacgtctcttcggagccctacgagcccatctccccaccccaggttccggttgtgcatgagaaacaggacagcttgctgctcttgtctcagaggggcgcagagcctgcagagcagaggaatgatgcccgctcaccagggagtataagctacttgccttcattcttcaccaagcttgaaaatacatcacccatggttaaatcaaagaagcaggagatttttcgtaagttgaactcctctggtggaggtgactctgatatggcagctgctcagccaggaactgagatctttaatctgccagcagttactacgtcaggctcagttagctctagaggccattcttttgctgatcctgccagtaatcttgggctggaagacattatcaggaaggctctcatgggaagctttgatgacaaagttgaggatcatggagttgtcatgtcccagcctatgggagtagtgcctggtactgccaacacctcagttgtgaccagtggtgagacacgaagagaggaaggggacccatcacctcattcaggagtttgcaaaccaaagctgatcagcaagtcaaacagcaggaaatctaagtctcctatacctgggcaaggctacttaggaacggaacggccctcttcagtctcctctgtacattcagaaggggattaccataggcagacgccagggtgggcctgggaagacaggccctcttcaacaggctcaactcagtttccttataaccctctgactatgcggatgctcagcagtactccaccaacaccgattgcatgtgctccctctgcggtgaaccaagcagctcctcaccaacagaacaggatctgggagcgagagcctgccccactgctctcagcacagtacgagaccctgtcggatagtgatgactgaactgcacaaagtgaggggaacagggtgcaggagagggatctctagtttttgtggtttaatttttagtagcaggtcaaaaacctgccctcctgtgacttattccctgagacttttcaggagagccagcccacagatgatgaagaaatgatggaagttcatttggagagtcaaatgggaaaaaaacaaacaaaaaactgcctttgatacaggcaattcagtggactataataatagtggagggttgagatgtagagtttttaaaaagtgaacagttgctgttcttacatctgtaaagaaaaccataatgtctttaaatcactcttctgtaaatagatgacctttttgcagtgtatatccccttgctgtagtatctggtgtacttatgttcaaatcagcgcatcaactttgggggtgatttttaaaaatctttttgtctatctatctttttaaccctagccttctaaacaacctcatacagcccagttacataatgttggctgtcacgggcattgtacttttatctgatattgtttcctctaaattcagctttccagtgatgtttaaaatcttgtgaaaatgtttagatttttaacacagaccctgtcataaaatctgtacattagggtcaaaaggtaaaagtaacaaattctgccatattgtaaatttccagtgcaggctttaatttttttttttcattagtagcactgaaaaaatattactgcatgggtatgttctagttcagtttataaagttttaaaggcttatttgaggcatacctcactgttacgcacactggtaatttaaccatgcccctaagtattccttttctcctgcatttgatgcagcccaacaaagcttttgttttgaaataaatttgactaccctgtccata

SEQ ID NO: 2414 - DNA, 7950 bp, Homo sapiens
  source 1..7950: mol_type = genomic DNA
attggcattgatctcacagtctggtgaggacttctttactgataatgtcaagttcaggttatcctcccaaccaaggagcattcagcacagaacaaagtcgttatcctcctcactctgtccagtatacatttcccaacacccgccaccagcaggagttcgcagtccctgattatcgttcctctcatcttgaagtgagtcaggcatcacagcttttgcagcaacagcagcagcaacagcttcgaaggcgaccttccttgctttcagaatttcacccaggttctgacaggcctcaagaaaggagaactagttatgaaccgtttcatccaggcccatccccagtggatcatgattcactggaatcgaagcgaccacgtctggaacaggtttctgattctcattttcagcgtgtcagtgctgcggttttgcctttagtgcacccgctgccagaagggctgagggcttctgcagatgctaagaaggatccagcattcggaggcaaacatgaagctccatcctctccaatttcggggcaaccatgtggagatgatcaaaatgcttcaccttcaaaactctcaaaggaagagttaatacagagtatggatcgtgtagatcgagaaattgcaaaagtagaacagcagatccttaaactgaaaaagaaacaacaacagcttgaagaagaggcagctaaacctcctgagcctgagaagcccgtgtcccctcctcctgtggagcagaaacaccgcagtattgtccaaattatttatgatgagaatcggaaaaaagcagaagaagctcataaaatttttgaaggtcttggcccaaaagttgaactgccactgtataaccagccatcagataccaaggtgtaccatgagaacatcaagacaaaccaggtgatgaggaaaaaactcattttattttttaaaagaagaaatcatgcaagaaaacaaagggaacaaaaaatctgccagcgttatgatcagctcatggaggcatgggagaaaaaagtggacagaatagaaaataatcctcggaggaaagctaaagaaagcaaaacaagggaatactatgaaaagcagtttccagaaattcgaaaacaaagagaacagcaagaaagatttcagcgagttgggcagaggggagctggtctttcagccaccattgctaggagtgagcatgagatttctgaaattattgatgggctctctgagcaggagaataatgagaaacaaatgcggcagctctctgtgattccacctatgatgtttgatgcagaacaaagacgagtcaagttcattaacatgaatgggcttatggaggaccctatgaaagtgtataaagataggcagtttatgaatgtttggactgaccatgaaaaggagatctttaaggacaagtttatccagcatccaaaaaactttggactaattgcatcatacttggagaggaagagtgttcctgattgtgttttgtattactatttaaccaagaaaaatgagaattataaagccctcgtcagaaggaattatgggaaacgcagaggcagaaaccagcaaattgctcgaccctcgcaagaagaaaaagtagaagaaaaagaagaggataaagcagaaaaaacagaaaaaaaagaagaagaaaagaaagatgaagaggaaaaagatgaaaaagaagactccaaagaaaataccaaggaaaaggacaagatagatggtacagcagaagaaactgaggaaagagagcaagccacaccccgggggcgaaagactgccaacagtcagggccgccgtaagggccggatcaccaggtccatgacaaacgaagctgcagctgccagtgctgcagccgcagcggctactgaagagcccccaccacctctgccaccgccaccagaacccatttctacagagcctgtggagacctctcgatggacagaagaagaaatggaagttgctaaaaaaggtctagtagaacatggtcgtaactgggcagcaattgctaaaatggtgggaacgaaaagtgaagctcaatgtaaaaacttctattttaactataaaaggcgacacaatcttgacaacctcttacagcagcataaacagaaaacttcacgaaaacctcgtgaagagcgagatgtgtctcaatgtgaaagtgtcgcttccactgtttctgctcaggaggatgaagatattgaagcctccaatgaagaagaaaatccagaagacagcgaaggtgcagaaaatagttctgatacagaaagtgctccttctccttcaccagttgaagctgtcaagcccagcgaggacagtcctgaaaatgctacttctcgaggaaacacagaacctgcggttgagcttgagcccaccacggaaactgcacccagtacatctccctccttagcagttccaagtacaaaaccagctgaagatgaaagtgtggagacccaggtgaatgacagcatcagtgctgagacagcagagcagatggatgtagatcagcaggagcacagtgctgaagagggttctgtttgtgatcccccacccgctaccaaagctgactctgtggacgttgaagtgagggtgccagaaaaccatgcatctaaagttgaaggtgataataccaaagaaagagacttggatagagccagtgagaaggtggaacctagagatgaagatttggtggtagctcagcaaataaatgcccaaaggcccgagccccagtcagacaatgattccagtgccacgtgcagcgctgatgaggatgtggatggagagccagagaggcagagaatgtttcctatggactcaaagccttcactgttaaaccccactggatctatactcgtctcatctccgttaaaaccaaatccactggatctgccacagcttcagcatcgagctgctgttatcccaccaatggtatcctgcaccccatgtaacataccaattggaaccccagtgagcggctatgctctctaccagcgacacattaaagcaatgcatgagtcagcactcctggaggagcagcggcagagacaagaacagatagatttggaatgtagaagttctacaagtccatgtggcacatccaagagtccaaacagagagtgggaagtccttcagcctgctccacatcaagtgataactaatctccctgaaggcgttcggcttccgacaactcgaccaaccaggccaccgccccctctcatcccgtcatccaaaaccacagtggcttcagaaaaaccatcttttataatgggaggctccatctcacagggaacaccaggcacttatttgacttctcataatcaggcttcctacactcaagaaacacccaagccgtcagtgggatctatctctcttggactgccacggcaacaggaatctgccaaatcagctactttgccctacatcaagcaggaagaattttctccccgaagccaaaactcacaacctgagggtctgttggtcagggcccaacatgaaggtgtagtcagaggtaccgcaggagccatacaagaaggaagtataactcggggaactccaaccagcaaaatttcagtggagagcattccatccctacggggctctatcactcagggcaccccggctctgccccagactggcataccaacagaggctttggtgaaggggtccatttcgagaatgcccattgaagacagcagtcctgagaaaggcagagaggaagctgcatccaaaggccatgttatttatgaaggcaaaagtggacatatcttgtcatatgataatattaagaatgcccgagaagggactaggagtccaagaacagctcatgaaatcagtttaaagagaagctatgaatcagtggaaggaaatataaagcaagggatgtcaatgagggagtctcctgtatcagcaccgttagaggggctgatatgccgagcattacccagggggagtcctcattctgacctcaaagaaaggactgtattgtctggctccataatgcaggggacaccaagagcaacaactgaaagctttgaagatggccttaaatatcccaaacaaattaaaagggaaagtcctcccatacgagcatttgaaggtgccattaccaaaggaaaaccatatgatggcatcaccaccatcaaagaaatggggcgttccattcatgagattccaaggcaagatattttaactcaggaaagtcggaaaactccagaagtggtccagagcacacggccgataattgagggttccatttcccagggcacaccaataaagtttgacaacaactcaggtcaatctgccatcaaacacaatgtcaaatccttaatcacggggcctagcaaactatcccgtggaatgcctccgctggaaattgtgccagagaacataaaagtggtagaacggggaaaatatgaggatgtgaaagcaggcgagaccgtgcgttcccggcacacgtcagtggtaagctctggcccctccgttcttaggtccacactgcatgaagctcccaaagcacaactgagccctgggatttatgatgacaccagtgcacggaggacccctgtgagttatcaaaacaccatgtccagaggctcacccatgatgaacagaacttctgatgttacaatttcttctaacaagtctaccaatcatgaaaggaaatcgacactgacccctacccagagggaaagtatcccagcgaagtctccagtgcctggggtggaccctgtcgtgagccacagtccgtttgatccccatcacagaggcagcactgcaggcgaggtttatcggagccacctgcccacgcacttggatccagccatgccttttcacagggctttggatcctgcagcggctgcttacctgtttcagagacagctttcaccaactccaggttacccaagtcagtatcagctttacgcaatggagaacacaagacagacaatcttaaatgattacattacctcacaacagatgcaagtgaacttgcgtccagatgtggccagaggactctccccaagagagcagccactgggtctcccatacccagcaacgagaggaatcattgacctgaccaatatgcctccaacaattttagtgcctcatccagggggaacaagcactcctcccatggacagaatcacttatattcctggtacacagattactttccctcccaggccgtacaactctgcttccatgtctccaggacacccaacacaccttgcagctgctgcaagtgctgagagggaacgggaacgggagcgggagaaggagcgggagcgggaacggattgctgcagcttcctccgacctctacctgcggccaggctcagaacagcctggccgacctggcagtcatggatatgttcgctccccttccccttcagtaagaactcaggagaccatgttgcaacagagacccagtgttttccaaggaaccaatggaaccagtgtaatcacacctttggatccaactgctcagctacgaatcatgccactgcctgctgggggcccttcaataagccaaggcctgccagcctcccgttacaacactgctgcggatgccctggctgctcttgtggatgctgcagcttctgcaccccagatggatgtgtccaaaacaaaagagatatcttctcacaggtatgaaacacctagcgatgctattgaggtgataagtcctgccagctcacctgcgccaccccaggagaaactgcagacctatcagccagaggttgttaaggcaaatcaagcggaaaatgatcctaccagacaatatgaaggaccattacatcactatcgaccacagcaggaatcaccatctccccaacaacagctgcccccttcttcacaggcagagggaatggggcaagtgcccaggacccatcggctgatcacacttgctgatcacatctgtcaaattatcacacaagattttgctagaaatcaagtttcctcgcagactccccagcagcctcctacttctacattccagaactcaccttctgctttggtatctacacctgtgaggactaaaacatcaaaccgttacagcccagaatcccaggctcagtctgtccatcatcaaagaccaggttcaagggtctctccagaaaatcttgtggacaaatccaggggaagtaggcctggaaaatccccagagaggagtcacgtctcttcggagccctacgagcccatctccccaccccaggttccggttgtgcatgagaaacaggacagcttgctgctcttgtctcagaggggcgcagagcctgcagagcagaggaatgatgcccgctcaccagggagtataagctacttgccttcattcttcaccaagcttgaaaatacatcacccatggttaaatcaaagaagcaggagatttttcgtaagttgaactcctctggtggaggtgactctgatatggcagctgctcagccaggaactgagatctttaatctgccagcagttactacgtcaggctcagttagctctagaggccattcttttgctgatcctgccagtaatcttgggctggaagacattatcaggaaggctctcatgggaagctttgatgacaaagttgaggatcatggagttgtcatgtcccagcctatgggagtagtgcctggtactgccaacacctcagttgtgaccagtggtgagacacgaagagaggaaggggacccatcacctcattcaggaggagtttgcaaaccaaagctgatcagcaagtcaaacagcaggaaatctaagtctcctatacctgggcaaggctacttaggaacggaacggccctcttcagtctcctctgtacattcagaaggggattaccataggcagacgccagggtgggcctgggaagacaggccctcttcaacaggctcaactcagtttccttataaccctctgactatgcggatgctcagcagtactccaccaacaccgattgcatgtgctccctctgcggtgaaccaagcagctcctcaccaacagaacaggatctgggagcgagagcctgccccactgctctcagcacagtacgagaccctgtcggatagtgatgactgaactgcacaaagtgaggggaacagggtgcaggagagggatctctagtttttgtggtttaatttttagtagcaggtcaaaaacctgccctcctgtgacttattccctgagacttttcaggagagccagcccacagatgatgaagaaatgatggaagttcatttggagagtcaaatgggaaaaaaacaaacaaaaaactgcctttgatacaggcaattcagtggactataataatagtggagggttgagatgtagagtttttaaaaagtgaacagttgctgttcttacatctgtaaagaaaaccataatgtctttaaatcactcttctgtaaatagatgacctttttgcagtgtatatccccttgctgtagtatctggtgtacttatgttcaaatcagcgcatcaactttgggggtgatttttaaaaatctttttgtctatctatctttttaaccctagccttctaaacaacctcatacagcccagttacataatgttggctgtcacgggcattgtacttttatctgatattgtttcctctaaattcagctttccagtgatgtttaaaatcttgtgaaaatgtttagatttttaacacagaccctgtcataaaatctgtacattagggtcaaaaggtaaaagtaacaaattctgccatattgtaaatttccagtgcaggctttaatttttttttttcattagtagcactgaaaaaatattactgcatgggtatgttctagttcagtttataaagttttaaaggcttatttgaggcatacctcactgttacgcacactggtaatttaaccatgcccctaagtattccttttctcctgcatttgatgcagcccaacaaagcttttgttttgaaataaatttgactaccctgtccata

SEQ ID NO: 2415 - DNA, 3419 bp, Homo sapiens
  source 1..3419: mol_type = genomic DNA
tttcagtggagagcattccatccctacggggctctatcactcagggcacaccaataaagtttgacaacaactcaggtcaatctgccatcaaacacaatgtcaaatccttaatcacggggcctagcaaactatcccgtggaatgcctccgctggaaattgtgccagagaacataaaagtggtagaacggggaaaatatgaggatgtgaaagcaggcgagaccgtgcgttcccggcacacgtcagtggtaagctctggcccctccgttcttaggtccacactgcatgaagctcccaaagcacaactgagccctgggatttatgatgacaccagtgcacggaggacccctgtgagttatcaaaacaccatgtccagaggctcacccatgatgaacagaacttctgatgttacaatttcttctaacaagtctaccaatcatgaaaggaaatcgacactgacccctacccagagggaaagtatcccagcgaagtctccagtgcctggggtggaccctgtcgtgagccacagtccgtttgatccccatcacagaggcagcactgcaggcgaggtttatcggagccacctgcccacgcacttggatccagccatgccttttcacagggctttggatcctgcagcggctgcttacctgtttcagagacagctttcaccaactccaggttacccaagtcagtatcagctttacgcaatggagaacacaagacagacaatcttaaatgattacattacctcacaacagatgcaagtgaacttgcgtccagatgtggccagaggactctccccaagagagcagccactgggtctcccatacccagcaacgagaggaatcattgacctgaccaatatgcctccaacaattttagtgcctcatccagggggaacaagcactcctcccatggacagaatcacttatattcctggtacacagattactttccctcccaggccgtacaactctgcttccatgtctccaggacacccaacacaccttgcagctgctgcaagtgctgagagggaacgggaacgggagcgggagaaggagcgggagcgggaacggattgctgcagcttcctccgacctctacctgcggccaggctcagaacagcctggccgacctggcagtcatggatatgttcgctccccttccccttcagtaagaactcaggagaccatgttgcaacagagacccagtgttttccaaggaaccaatggaaccagtgtaatcacacctttggatccaactgctcagctacgaatcatgccactgcctgctgggggcccttcaataagccaaggcctgccagcctcccgttacaacactgctgcggatgccctggctgctcttgtggatgctgcagcttctgcaccccagatggatgtgtccaaaacaaaagagagtaagcatgaagctgccaggttagaagaaaatttgagaagcaggtcagcagcagttagtgaacagcagcagctagagcagaaaaccctggaggtggagaagagatctgttcagtgtttatacacttcttcagcctttccaagtggcaagccccagcctcattcttcagtagtttattctgaggctgggaaagataaagggcctcctccaaaatccagatatgaggaagagctaaggaccagagggaagactaccattactgcagctaacttcatagacgtgatcatcacccggcaaattgcctcggacaaggatgcgagggaacgtggctctcaaagttcagactcttctagtagcttatcttctcacaggtatgaaacacctagcgatgctattgaggtgataagtcctgccagctcacctgcgccaccccaggagaaactgcagacctatcagccagaggttgttaaggcaaatcaagcggaaaatgatcctaccagacaatatgaaggaccattacatcactatcgaccacagcaggaatcaccatctccccaacaacagctgcccccttcttcacaggcagagggaatggggcaagtgcccaggacccatcggctgatcacacttgctgatcacatctgtcaaattatcacacaagattttgctagaaatcaagtttcctcgcagactccccagcagcctcctacttctacattccagaactcaccttctgctttggtatctacacctgtgaggactaaaacatcaaaccgttacagcccagaatcccaggctcagtctgtccatcatcaaagaccaggttcaagggtctctccagaaaatcttgtggacaaatccaggggaagtaggcctggaaaatccccagagaggagtcacgtctcttcggagccctacgagcccatctccccaccccaggttccggttgtgcatgagaaacaggacagcttgctgctcttgtctcagaggggcgcagagcctgcagagcagaggaatgatgcccgctcaccagggagtataagctacttgccttcattcttcaccaagcttgaaaatacatcacccatggttaaatcaaagaagcaggagatttttcgtaagttgaactcctctggtggaggtgactctgatatggcagctgctcagccaggaactgagatctttaatctgccagcagttactacgtcaggctcagttagctctagaggccattcttttgctgatcctgccagtaatcttgggctggaagacattatcaggaaggctctcatgggaagctttgatgacaaagttgaggatcatggagttgtcatgtcccagcctatgggagtagtgcctggtactgccaacacctcagttgtgaccagtggtgagacacgaagagaggaaggggacccatcacctcattcaggaggagtttgcaaaccaaagctgatcagcaagtcaaacagcaggaaatctaagtctcctatacctgggcaaggctacttaggaacggaacggccctcttcagtctcctctgtacattcagaaggggattaccataggcagacgccagggtgggcctgggaagacaggccctcttcaacaggctcaactcagtttccttataaccctctgactatgcggatgctcagcagtactccaccaacaccgattgcatgtgctccctctgcggtgaaccaagcagctcctcaccaacagaacaggatctgggagcgagagcctgccccactgctctcagcacagtacgagaccctgtcggatagtgatgactgaactgcacaaagtgaggggaacagggtgcaggagagggatctctagtttttgtggtttaatttttagtagcaggtcaaaaacctgccctcctgtgacttattccctgagacttttcaggagagccagcccacagatgatgaagaaatgatggaagttcatttggagagtcaaatgggaaaaaaacaaacaaaaaactgcctttga

SEQ ID NO: 2416 - DNA, 6839 bp, Homo sapiens
  source 1..6839: mol_type = genomic DNA
ggggatgcaagcgggaggataaagcgatgaagtgtgctgcgttaccgcgcatcaggcgctgttgttggagccggaacaccgtgcgactctgaccgaaccggccccctcctcgcgcacacactcgccgagccgcgcgcgcccctccgccgtgacagtggccgtggcctccgctctctcggggcacccggcagccagagcgcagcgagagcgggcggtcgccagggtcccctccccagccagtcccaggcgcccggtgcactatgcggggcacgtgcgccccccagctctaatctgcgcgctgacaggagcatgatctgtgcccaggccagggctgccaagatatcaatgctatgttcagcagaaacggatacagcaagagcagcatagttcaaaaattgagggaggcatcttctctcttttcctgggatttaaacgcgatttaggagggcagatgccctacccgaaaaggccaaccgttaaagaccccggcagtgttgtggtccaaggcgtctcaaagcaggtggccagatctgcgtttctcatcagcagactcactccggctgtggctattacggaattgatgcgcgtacacgtggtgggtcattatgctgctgcacctgtgtagtgtgaagaatctgtaccagaacaggtttttaggcctggccgccatggcgtctccttctagaaactcccagagccgacgccggtgcaaggagccgctccgatacagctacaaccccgaccagttccacaacatggacctcaggggcggcccccacgatggcgtcaccattccccgctccaccagcgacactgacctggtcacctcggacagccgctccacgctcatggtcagcagctcctactattccatcgggcactctcaggacctggtcatccactgggacataaaggaggaagtggacgctggggactggattggcatgtacctcattgatgaggtcttgtccgaaaactttctggactataaaaaccgtggagtcaatggttctcatcggggccagatcatctggaagatcgatgccagctcgtactttgtggaacctgaaactaagatctgcttcaaatactaccatggagtgagtggggccctgcgagcaaccacccccagtgtcacggtcaaaaactcggcagctcctatttttaaaagcattggtgctgatgagaccgtccaaggacaaggaagtcggaggctgatcagcttctctctctcagatttccaagccatggggttgaagaaagggatgtttttcaacccagacccttatctgaagatttccattcagcctgggaaacacagcatcttccccgccctccctcaccatggacaggagaggagatccaagatcataggcaacaccgtgaaccccatctggcaggccgagcaattcagttttgtgtccttgcccactgacgtgctggaaattgaggtgaaggacaagtttgccaagagccgccccatcatcaagcgcttcttgggaaagctgtcgatgcccgttcaaagactcctggagagacacgccataggggatagggtggtcagctacacacttggccgcaggcttccaacagatcatgtgagtggacagctgcaattccgatttgagatcacttcctccatccacccagatgatgaggagatttccctgagtaccgagcctgagtcagcccaaattcaggacagccccatgaacaacctgatggaaagcggcagtggggaacctcggtctgaggcaccagagtcctctgagagctggaagccagagcagctgggtgagggcagtgtccccgatggtccagggaaccaaagcatagagctttccagaccagctgaggaagcagcagtcatcacggaggcaggagaccagggcatggtctctgtgggacctgaaggggctggggagctcctggcccaggtgcaaaaggacatccagcctgcccccagtgcagaagagctggccgagcagctggacctgggtgaggaggcatcagcactgctgctggaagacggtgaagccccagccagcaccaaggaggagcccttggaggaggaagcaacgacccagagccgggctggaagggaagaagaggagaaggagcaggaggaggagggagatgtgtctaccctggagcagggagagggcaggctgcagctgcgggcctcggtgaagagaaaaagcaggccctgctccttgcctgtgtccgagctggagacggtgatcgcgtcagcctgcggggaccccgagaccccgcggacacactacatccgcatccacaccctgctgcacagcatgccctccgcccagggcggcagcgcggcagaggaggaggacggcgcggaggaggagtccaccctcaaggactcctcggagaaggatgggctcagcgaggtggacacggtggccgctgacccgtctgccctggaagaggacagagaagagcccgagggggctactccaggcacggcgcaccctggccactccgggggccacttccccagcctggccaatggcgcggcccaggatggcgacacgcaccccagcaccgggagcgagagcgactccagccccaggcaaggcggggaccacagttgcgagggctgtgacgcgtcctgctgcagcccctcgtgctacagctcctcgtgctacagcacgtcctgctacagcagctcgtgctacagcgcctcgtgctacagcccctcctgctacaacggcaacaggttcgccagccacacgcgcttctcctccgtggacagcgccaagatctccgagagcacggtcttctcctcgcaagacgacgaggaggaggagaacagcgcgttcgagtcggtacccgactccatgcagagccctgagctggacccggagtccacgaacggcgctgggccgtggcaagacgagctggccgcccctagcgggcacgtggaaagaagcccggaaggtctggaatcccccgtggcaggtccaagcaatcggagagaaggtgaatgtcctatactccataattcccagccagtaagccagcttccttccctgaggcctgaacatcatcactacccaacaatcgatgagcctcttccaccaaactgggaagctcgaattgacagccacgggcgggtcttttatgtggaccacgtgaaccgcacaaccacctggcagcgtccgacggcagcagccaccccggatggcatgcggagatcggggtccatccagcagatggagcaactcaacaggcggtatcaaaacattcagcgaaccattgcaacagagaggtccgaagaagattctggcagccaaagctgcgagcaagccccagcaggaggaggcggaggtggagggagtgactcagaagccgaatcttcccagtccagcttagatctaaggagagaagggtcactttctccagtgaactcacaaaaaatcaccttgctgctgcagtccccagcggtcaagttcatcaccaaccccgagttcttcactgtgctacatgccaattatagtgcctaccgagtcttcaccagtagcacctgcttaaagcacatgattctgaaagtccgacgggatgctcgcaattttgaacgctaccagcacaaccgggacttggtgaatttcatcaacatgttcgcagacactcggctggaactgccccggggctgggagatcaaaacggaccagcagggaaagtcttttttcgtggaccacaacagtcgagctaccactttcattgacccccgaatccctcttcagaacggtcgtcttcccaatcatctaactcaccgacagcacctccagaggctccgaagttacagcgctggagaggcctcagaagtttctagaaacagaggagcctctttactggccaggccaggacacagcttagtagctgctattcgaagccaacatcaacatgagtcattgccactggcatataatgacaagattgtggcatttcttcgccagccaaacatttttgaaatgctgcaagagcgtcagccaagcttagcaagaaaccacacactcagggagaaaatccattacattcggactgagggtaatcacgggcttgagaagttgtcctgtgatgcggatctggtcattttgctgagtctctttgaagaagagattatgtcctacgtccccctgcaggctgccttccaccctgggtatagcttctctccccgatgttcaccctgttcttcacctcagaactccccaggtttacagagagccagtgcaagagccccttccccctaccgaagagactttgaggccaagctccgcaatttctacagaaaactggaagccaaaggatttggtcagggtccggggaaaattaagctcattattcgccgggatcatttgttggagggaaccttcaatcaggtgatggcctattcgcggaaagagctccagcgaaacaagctctacgtcacctttgttggagaggagggcctggactacagtggcccctcgcgggagttcttcttccttctgtctcaggagctcttcaacccttactatggactctttgagtactcggcaaatgatacttacacggtgcagatcagccccatgtccgcatttgtagaaaaccatcttgagtggttcaggtttagcggtcgcatcctgggtctggctctgatccatcagtaccttcttgacgctttcttcacgaggcccttctacaaggcactcctgagactgccctgtgatttgagtgacctggaatatttggatgaggaattccaccagagtttgcagtggatgaaggacaacaacatcacagacatcttagacctcactttcactgttaatgaagaggtttttggacaggtcacggaaagggagttgaagtctggaggagccaacacacaggtgacggagaaaaacaagaaggagtacatcgagcgcatggtgaagtggcgggtggagcgcggcgtggtacagcagaccgaggcgctggtgcgcggcttctacgaggttgtagactcgaggctggtgtccgtgtttgatgccagggagctggagctggtgatagctggcaccgcggaaatcgacctaaatgactggcggaataacactgagtaccggggaggttaccacgatgggcatcttgtgatccgctggttctgggctgcggtggagcgcttcaataatgagcagaggctgagattactgcagtttgtcacgggaacatccagcgtgccctacgaaggcttcgcagccctccgtgggagcaatgggcttcggcgcttctgcatagagaaatgggggaaaattacttctctccccagggcacacacatgcttcaaccgactggatcttccaccgtatccctcgtactccatgttgtatgaaaagctgttaacagcagtagaggaaaccagcacctttggacttgagtgaggacatggaacctcgcctgacattttcctggccagtgacatcacccttcctgggatgatccccttttccctttcccttaatcaactctcctttgattttggtattccatgatttttattttcaaaccaaatcaggattgacaaaagctgtgcatgaagaactgccttcttctaagatctaaccttcaggcttctctcctctgttttcaatgaactgctagcctgtatgcaatattaaaaaacagctgtctcaaggtctgtgtatatctccacatacctccattactaacaatgaaatatgaatgcaagttaagctacacttgaccaaatggtaataaatgtttacttccatttctatcattgaagggaaaatgtgagcattaagcactccaggctttcatatgcccatgtcttctgagcagagccaccattttttataatttctaataaccaactccagaactaggagctgatcaactctttgttttcctctccatctacttttccctgtgcataatatccatccaaaggacaacagtggcaaagctgaaatttttatacattcaactcatgattcacatgtggcatcagtcccatcagccggaactagcctagacatacggtgcaaatatgacacttctaacgattaacaacagcaagaaaacacctgctgctgatgcaatgcaatgcatcccaatggttgtggggattgtgggctcaactcaagagaagtttaggagggggagcatccctagtgaatactcacaccacaagaaggacaaacttgtgcacatgtccaagaaagaaagcttcttgattgaggtagcatgaaggatgaggcttcagcccccattgtcttatgtagaatgtggcaatgccaactggagaaagggaagaaggacatattaccttggtttgaatccctgagttctgtactgttctgttttgtttagtctagccacagttcttcacaaaggaaaaaaaaatgtgtagatgataccatgacttttgttaaagccatgacttttgtttgcttggcagacaaaccctttttttaaaactttgatatttttttttcacatttttttttccttttcctttcttaatcatggagttcaagttcctttgcattcgattgtccatcgggaccacactaggaagctgcagagagtgatggtgcttgttagggatcaagggcaacatagtacttctccttcacccatagtaatcctcctggggcagaaacataacaccccaaaggcacgttgatttgtatcaaaataaatatccagtttcttttagcattcagtgaaaacatatctcagaaaacttcatgttgtcagaaaaacagctgcaggctccaaagacagcctaacctctcaactacatttgaaataaacccaaccataatggt

SEQ ID NO: 2417 - DNA, 1809 bp, Homo sapiens
  source 1..1809: mol_type = genomic DNA
gcttctggcccctttctctggaggagctccgcgcgtggcgagtctgtgtcctccctgtcccccagagcagagaaccctctctgtgtctggacgggggaggagcagacgctggacaggtttttggcaaaatgctggcaattcccaggaagatatgtggagaacggaaaggttgctacacccaaatagtggcgcaaaggctatgattatggaggattggacctgcaaactccagaacagagcaaccttgtaaaatgtgtgtgggcagcacagagaccttgggcaagttaacagtttcctcatctgtaaatactgatttatggaaagcacctggtgtatgttctgccctctgaggaccctgccctttcccaaaaggggtatcttaagaaggaaaatatggctgctctttgccggacagcagagtcccaggctgaactccagtgcacccagttagacttggagcggaaactcaagttgaatgaaaatgccatctccaggctccaggctaaccaaaagtctgttctggtgtcggtgtcagaggtcaaagcagtggctgaaatgcagtttggggaactccttgctgctgtgaggaaggcccaggccaatgtgatgctcttcttagaggagaaggagcaagctgcgctgagccaggccaacggtatcaaggcccacctggagtacaggagtgccgagatggagaagagtaagcaggagctggagacgatggcggccatcagcaacactgtccagttcttggaggagtactgcaagtttaagaacactgaagacatcaccttccctagtgtttacatagggctgaaggataaactctcgggcatccgcaaagttatcacggaatccactgtacacttaatccagttgctggagaactataagaaaaagctccaggagttttccaaggaagaggagtatgacatcagaactcaagtgtctgccattgttcagcgcaaatattggacttccaaacctgagcccagcaccagggaacagttcctccaatatgtgcatgacatcacgttcgacccggacacagcacacaagtatctccggctgcaggaggagaaccgcaaggtcaccaacaccacgccctgggagcatccctacccggacctccccagcaggttcctgcactggcggcaggtgctgtcccagcagagtctgtacctgcacaggtactattttgaggtggagatcttcggggcaggcacctatgttggcctgacctgcaaaggcatcgaccagaaaggggaggagcgcagcagttgcatttccggaaacaacttctcctggagcctccaatggaacgggaaggagttcacggcctggtacagtgacatggagaccccactcaaagctggccctttctggaggctcggggtctatattgacttcccaggagggatcctttccttctatggcgtagagtatgattccatgactctggttcacaagtttgcctgcaagttttcagaaccagtctatgctgccttctggctttccaagaaggaaaacgccatccggattgtagatctgggagaggaacccgagaagccagcaccgtccttggtggggactgctccctagactccaggagccatatcccagacctttgccagctacagtgatgggatttgcattttagggtgatttgggggcaaaaataactgctgatggtagctggcttttgaaatcctatggggtctctgaatgaaaacattctccagctgctctcttttgctccatatggtgctgttctctatgtgtttgcagtaattcttttttttttttttt

SEQ ID NO: 2418 - DNA, 2392 bp, Homo sapiens
  source 1..2392: mol_type = genomic DNA
gagcagcggctctggcggtcgtggcggtcggagatccgagagctctgcttctctgaaaagcgtgtggctttctggacttgtttcaggccacccacgagccagcgggaaaggattgccagccagagaaagacgaactccgaagtcccaatgcacagatcagcccccagtcaaaccaccaagaggagccgatcgccattttccactactcgtcgtagttgggacgacagcgagagttcgggaaccaacctgaatattgataatgaggactattccaggtatccgccaagagagtacagagcttcgggtagcagaagaggaatggcctatggacatattgactcttatggggcagatgatagtgaggaggagggggctgggcctgttgagcgaccgccagtgagagggaaaactggcaagtttaaagatgataagctgttagacccagtccctgcagcaagatgctcagctagcagagctgacttcctgccacaaagtagtgtggcctcacagtcgtcttctgaaggcaagctggctacaaaaggtgacagctcggagagggagagaagggagcaaaatttacctgcacgtcccagcagggctcctgtgagtatttgtggtggtggggaaaacacctcaaagagtgcagaggaacctgtggtcaggcccaaaatcagaaacctggcaagtccaaactgcgtgaaaccaaaaattttttttgatactgatgatgatgacgatatgccacacagtacttccaggtggagggataccgccaatgacaatgagggccactcggatggcctggcaagaagagggagaggcgagagttcaagtggctatcccgagccaaagtaccctgaagacaaacgggaagcgaggagtgaccaagtgaaaccagaaaaggtgccgagacgacgacgcaccatggccgaccctgacttctggacgcacagtgatgattactacaaatactgcgacgaagactctgacagtgacaaagagtggattgctgctctgcgtcggaaatatcgaagccgagagcaaaccctgtcctccagtggcgaaagctgggagactctgccggggaaagaagagcgggaacctccacaggctaaggtgagtgccagcactggcaccagccctggccccggtgctagtgccagtgccggggctggcgccggggccagtgctggcagcaatggcagcaattaccttgaagaagttcgagaaccatctcttcaggaagagcaggcatccctggaagaaggagaaattccttggctccagtaccatgagaatgacagtagcagtgagggggataatgattctggtcacgagttgatgcaacctggggtattcatgctggatggaaacaacaaccttgaagatgactccagtgtgagcgaagacctagaagtggattggagcctctttgatggatttgcagatgggttaggagtggctgaagccatttcctatgtggaccctcagttcctcacctacatggcacttgaagaacgcctggcccaggcaatggaaactgcccttgcgcacttggagtctctcgcagtggatgtagaggtggccaatccaccagcaagcaaggagagcattgacgctcttcccgagatcctggtcactgaagatcatggcgcagttggtcaggagatgtgctgccccatctgctgtagcgaatatgtgaagggggaggtggcaactgagctgccgtgccaccactatttccacaagccgtgtgtgtccatctggcttcagaagtcaggcacctgccccgtgtgccgctgcatgttccctcccccactctaaagaccaaggccgtttactcctggtctgattattttccccatctgaaatccacaatactgcaggagccctcttgaaattaacaatggaaataaaaccaatcagtcagttagcctaaacctattgattcctcgtgattatttccaatgtgaaaacagttgtgtatgattgcattaaaaatcatatcatcttttagaggttagaaaagggaaaactaaactttctaaatgctacttgagattgcagtaagaagatacgttttctaacctgaaagttaaatcgcatttgttttcttcagtagaatgggaatgtgttgctgttacttgtaatgtcaagtttatctgttaaatatgtccaaaaggcaaaatcatttttgttgcatgttatgggtcgatgttcctgtaattgcagtgccgtaaaagcttattaaagttgttcttttggttttacatggtataatggaattttttggttttgtctgaagcagtggtactgaatgactttataattgatcccttgcatttgcatcaaaagctttagtttcactggaaatgctgacttcaacaattgc

SEQ ID NO: 2419 - DNA, 4672 bp, Homo sapiens
  source 1..4672: mol_type = genomic DNA
gtgccaccatgcccagctgagttacgcagcgtgacaaatggtcagtctaaccaaccaagtaatgaaggtgatgccatcaaagtttttgtgcgaattcgtcctcctgcagaaagatctgggtcagctgatggagagcagaacttatgcttatctgtgctgtcctccacgagtctccggctgcactccaaccctgagcccaagaccttcacgtttgatcatgttgcagatgtggataccactcaggaatctgtattcgcaactgtggctaaaagcattgtggagtcttgcatgagcggttataatggtaccatctttgcatatggacagactggctcagggaagacatttactatgatgggaccatctgaatctgataatttttctcataacctgagaggagtaatcccacgaagttttgaatatttgttttccttaattgatcgtgaaaaagaaaaggctggagctggaaagagtttcctttgtaagtgttcctttattgaaatctacaacgagcagatatatgatctactggactctgcatcggctggactgtacttaagggagcatatcaagaagggagtctttgttgttggtgcggtggagcaggtggtaacctcagctgctgaagcctatcaggtgttgtctggaggatggaggaatagacgtgtggcatcaacatcaatgaacagagaatcgtctaggtctcatgccgtctttacaattacaatagagtcaatggagaaaagtaatgagattgtgaatatacggacctccctactcaacctggtggatttagcaggatctgaaaggcaaaaagatacccatgcagaagggatgagattgaaggaagcaggtaacataaatcgatcattgagctgcctgggccaagtgattacagcacttgtcgacgtgggtaatggaaaacagagacatgtttgctacagagactccaaacttaccttcttactacgggattcccttggaggtaatgccaaaacagccataattgcaaatgttcatcctggatccaggtgttttggggaaaccctatcaacacttaactttgctcaaagagccaagctgattaaaaacaaggcagtagtaaatgaagacacccaaggaaatgtgagccagctccaagctgaagtgaagaggctcaaagaacaactggcggagcttgcttcaggacagacaccaccagaaagcttcctgaccagagacaaaaagaagactaactatatggagtatttccaggaagcaatgttattctttaagaaatctgaacaggaaaagaagtctctgatagaaaaagttacccaattagaagacctcaccctcaaaaaggaaaaatttattcaatctaataaaatgattgtgaaattccgagaggatcaaataatacgcttggaaaagctccacaaggaatcccggggaggttttctgcctgaggagcaggatcgtttgctctcagaattaaggaatgagattcaaactctgcgagaacaaatagagcaccaccccagagttgcaaagtatgctatggaaaatcattccctcagggaggagaatagaagactgagattattagagcctgtgaaaagagctcaagaaatggatgcccagaccattgcaaaactagaaaaagctttctctgaaataagtggcatggagaaaagtgacaaaaatcagcaaggattttcacctaaagctcagaaagagccatgtttgtttgcaaacactgagaagttaaaagcacaactcctgcaaattcagacagagctgaataattcaaagcaagaatatgaagaattcaaagaacttactaggaaaaggcagctagaattggaatcagagcttcagtctttgcaaaaagcgaaccttaatcttgaaaaccttttggaagcaacaaaagcctgcaagcggcaagaagtttctcagctgaataaaattcatgctgaaacacttaagattataactacaccaaccaaggcctaccaacttcattcccgaccagtaccaaaattaagccctgaaatgggaagctttggctctctatacactcagaattctagcatattagataatgatatattaaatgagccagttcctcctgagatgaatgaacaagcttttgaggccatttctgaagagcttagaacagtgcaggaacaaatgagtgctcttcaagccaaactggatgaagaagagcataaaaacctaaagcttcagcagcatgttgacaaactggaacatcattctacccaaatgcaggagcttttctcatcagaaagaattgattggaccaaacagcaggaagagcttctctcacagttgaatgtccttgaaaagcagcttcaagagactcaaactaaaaatgactttttgaaaagtgaggtacatgacctgcgagtagtccttcattctgctgacaaggagctttcttcagtgaaattggaatatagttcattcaaaacgaatcaggagaaagaattcaacaaactttccgaaagacacatgcatgtacagcttcaattagataatctcaggttagaaaacgaaaagctgcttgagagcaaagcctgcctacaggattcctatgacaacttacaagaaataatgaaatttgagattgaccaactttcaagaaacctccaaaacttcaaaaaagaaaatgaaactctgaaatctgatctgaataatttgatggagcttcttgaggcagaaaaagaacgcaataacaaattatcattacagtttgaagaagataaagaaaacagttctaaagaaatcttaaaagttcttgaggctgtacgtcaggagaaacagaaagagacggccaagtgtgagcagcagatggcaaaagtacagaaactagaagagagcttgcttgctactgaaaaagtgatcagttccctggaaaagtctagagattctgataagaaagttgtagctgacctcatgaaccagatccaggagctaagaacatcggtctgtgagaaaacagaaactatagacaccctgaaacaagaactgaaggacataaattgcaaatacaactctgctttggttgacagagaagagagcagagtgttgatcaagaagcaggaagtggatattctggatctgaaagaaacccttaggctgagaatactttctgaggacatagagagggatatgctctgtgaggacctggctcatgccactgagcagctgaacatgctcacagaggcctcaaaaaaacactcggggctgctgcagtctgcccagagaactgaccaagaaggaagccctgattcaggaacttcagcacaagctaaaccaaaagaaagaggaagtagaacagaagaagaatataacttcaaaatgaggcaactagaacatgtgatggattctgctgctgaggatccccagagtcctaagacaccacctcactttcaaacacatttggcaaaactcctggaaacacaagaacaagagatagaagatggaagagcctctaagacttctttggaacaccttgtaacaaagctaaatgaagacagagaagtcaaaaatgctgaaatcctcagaatgaaggagcagttgcgtgaaatggaaaacctacgcctggaaagtcagcagttaatagagaaaaactggctcctgcaaggtcagctggatgatattaaaagacaaaaggaaaacagtgatcagaatcatccagataatcaacagctgaagaatgaacaagaagaaagtatcaaagaaagacttgcaaaaagtaaaatagttgaagaaatgctgaaaatgaaagcagacctagaagaagtccaaagtgccctttacaacaaagagatggaatgccttagaatgactgatgaagtcgaacgaacccaaactttggagtctaaagcattccaggaaaaagaacaactgagatcaaagctggaagaaatgtatgaagaaagagagagaacatcccaggagatggaaatgttaaggaagcaggtggagtgtcttgctgaggaaaatggaaagttggtaggtcaccaaaatttgcatcagaagattcagtacgtagtgcgactaaagaaggaaaatgtcaggcttgctgaggagacagaaaagttgcgtgccgaaaatgtatttttaaaagaaaagaaaagaagtgaatcttgaggattccggtcagctacctaggcatcaccttgtttgaagatgtttcttctcttttacaagtaagacctactcctggccacttaggagagctgaatttatggaccttaattattaaatgtttataaggtggtggtaaccacctcaagtttctgatgaacattctgcatccatatacaccctgtgacagtcagcagtctgctattaagtggcctacttcaaggctttgaatcaacttaagggaaaaccttttgtctttgtaaaaataaaagcctgtagctaaggtttacagtggacattagccagatcattttcttcttagattatgccataatctcctttgattcttatggaagttctaacaatatatggtggttccaacacctgcagtgagtttaatgactgacttagtagcaggtacaagaagcaaacttgttaatatagattatttttgtattcttactttaggtattttcttgagcattttccatgactgtaaataaagccattttttaag

SEQ ID NO: 2420 - DNA, 4661 bp, Homo sapiens
  source 1..4661: mol_type = genomic DNA
ggctcggcgctgaaattcaaatttgaacggctgcagaggccgagtccgtcactggaagccgagaggagaggacagctggttgtgggagagttcccccgcctcagactcctggttttttccaggagacacactgagctgagactcacttttctcttcctgaatttgaaccaccgtttccatcgtctcgtagtccgacgcctggggcgatggatccgtttacggagaaactgctggagcgaacccgtgccaggcgagagaatcttcagagaaaaatggctgagaggcccacagcagctccaaggtctatgactcatgctaagcgagctagacagccactttcagaagcaagtaaccagcagcccctctctggtggtgaagagaaatcttgtacaaaaccatcgccatcaaaaaaacgctgttctgacaacactgaagtagaagtttctaacttggaaaataaacaaccagttgagtcgacatctgcaaaatcttgttctccaagtcctgtgtctcctcaggtgcagccacaagcagcagataccatcagtgattctgttgctgtcccggcatcactgctgggcatgaggagagggctgaactcaagattggaagcaactgcagcctcctcagttaaaacacgtatgcaaaaacttgcagagcaacggcgccgttgggataatgatgatatgacagatgacattcctgaaagctcactcttctcaccaatgccatcagaggaaaaggctgcttcccctcccagacctctgctttcaaatgcctcggcaactccagttggcagaaggggccgtctggccaatcttgctgcaactatttgctcctgggaagatgatgtaaatcactcatttgcaaaacaaaacagtgtacaagaacagcctggtaccgcttgtttatccaaattttcctctgcaagtggagcatctgctaggatcaatagcagcagtgttaagcaggaagctacattctgttcccaaagggatggcgatgcctctttgaataaagccctatcctcaagtgctgatgatgcgtctttggttaatgcctcaatttccagctctgtgaaagctacttctccagtgaaatctactacatctatcactgatgctaaaagttgtgagggacaaaatcctgagctacttccaaaaactcctattagtcctctgaaaacgggggtatcgaaaccaattgtgaagtcaactttatcccagacagttccatccaagggagaattaagtagagaaatttgtctgcaatctcaatctaaagacaaatctacgacaccaggaggaacaggaattaagcctttcctggaacgctttggagagcgttgtcaagaacatagcaaagaaagtccagctcgtagcacaccccacagaacccccattattactccaaatacaaaggccatccaagaaagattattcaagcaagacacatcttcatctactacccatttagcacaacagctcaagcaggaacgtcaaaaagaactagcatgtcttcgtggccgatttgacaagggcaatatatggagtgcagaaaaaggcggaaactcaaaaagcaaacaactagaaaccaaacaggaaactcactgtcagagcactcccctcaaaaaacaccaaggtgtttcaaaaactcagtcacttccagtaacagaaaaggtgaccgaaaaccagataccagccaaaaattctagtacagaacctaaagaagtgatacgtgaaattgagatgagtgtggatgatgatgatatcaatagttcgaaagtaattaatgacctcttcagtgatgtcctagaggaaggtgaactagatatggagaagagccaagaggagatggatcaagcattagcagaaagcagcgaagaacaggaagatgcactgaatatctcctcaatgtctttacttgcaccattggcacaaacagttggtgtggtaagtccagagagtttagtgtccacacctagactggaattgaaagacaccagcagaagtgatgaaagtccaaaaccaggaaaattccaaagaactcgtgtccctcgagctgaatctggtgatagccttggttctgaagatcgtgatcttctttacagcattgatgcatatagatctcaaagattcaaagaaacagaacgtccatcaataaagcaggtgattgttcggaaggaagatgttacttcaaaactggatgaaaaaaataatgcctttccttgtcaagttaatatcaaacagaaaatgcaggaactcaataacgaaataaatatgcaacagacagtgatctatcaagctagccaggctcttaactgctgtgttgatgaagaacatggaaaagggtccctagaagaagctgaagcagaaagacttcttctaattgcaactgggaagagaacacttttgattgatgaattgaataaattgaagaacgaaggacctcagaggaagaataaggctagtccccaaagtgaatttatgccatccaaaggatcagttactttgtcagaaatccgcttgcctctaaaagcagattttgtctgcagtacggttcagaaaccagatgcagcaaattactattacttaattatactaaaagcaggagctgaaaatatggtagccacaccattagcaagtacttcaaactctcttaacggtgatgctctgacattcactactacatttactctgcaagatgtatccaatgactttgaaataaatattgaagtttacagcttggtgcaaaagaaagatccctcaggccttgataagaagaaaaaaacatccaagtccaaggctattactccaaagcgactcctcacatctataaccacaaaaagcaacattcattcttcagtcatggccagtccaggaggtcttagtgctgtgcgaaccagcaacttcgcccttgttggatcttacacattatcattgtcttcagtaggaaatactaagtttgttctggacaaggtcccctttttatcttctttggaaggtcatatttatttaaaaataaaatgtcaagtgaattccagtgttgaagaaagaggttttctaaccatatttgaagatgttagtggttttggtgcctggcatcgaagatggtgtgttctttctggaaactgtatatcttattggacttatccagatgatgagaaacgcaagaatcccataggaaggataaatctggctaattgtaccagtcgtcagatagaaccagccaacagagaattttgtgcaagacgcaacacttttgaattaattactgtccgaccacaaagagaagatgaccgagagactcttgtcagccaatgcagggacacactctgtgttaccaagaactggctgtctgcagatactaaagaagagcgggatctctggatgcaaaaactcaatcaagttcttgttgatattcgcctctggcaacctgatgcttgctacaaacctattggaaagccttaaaccgggaaatttccatgctatctagaggtttttgatgtcatcttaagaaacacacttaagagcatcagatttactgattgcattttatgctttaagtacgaaagggtttgtgccaatattcactacgtattatgcagtatttatatcttttgtatgtaaaactttaactgatttctgtcattcatcaatgagtagaagtaaatacattatagttgattttgctaaatcttaatttaaaagcctcattttcctagaaatctaattattcagttattcatgacaatatttttttaaaagtaagaaattctgagttgtcttcttggagctgtaggtcttgaagcagcaacgtctttcaggggttggagacagaaacccattctccaatctcagtagttttttcgaaaggctgtgatcatttattgatcgtgatatgacttgttactagggtactgaaaaaaatgtctaaggcctttacagaaacatttttagtaatgaggatgagaactttttcaaatagcaaatatatattggcttaaagcatgaggctgtcttcagaaaagtgatgtggacataggaggcaatgtgtgagacttgggggttcaatattttatatagaagagttaataagcacatggtttacatttactcagctactatatatgcagtgtggtgcacattttcacagaattctggcttcattaagatcattatttttgctgcgtagcttacagacttagcatattagttttttctactcctacaagtgtaaattgaaaaatctttatattaaaaaagtaaactgttatgaagctgctatgtactaataatactttgcttgccaaagtgtttgggttttgttgttgtttgtttgtttgtttgtttttggttcatgaacaacagtgtctagaaacccattttgaaagtggaaaattattaagtcacctatcacctttaaacgcctttttttaaaattataaaatattgtaaagcagggtctcaacttttaaatacactttgaacttcttctctgaattattaaagttctttatgacctcatttataaacactaaattctgtcacctcctgtcattttattttttattcattcaaatgtattttttcttgtgcatattataaaaatatattttatgagctcttactcaaataaatacctgtaaatgtctaaaggaa

SEQ ID NO: 2421 - DNA, 916 bp, Homo sapiens
  source 1..916: mol_type = genomic DNA
ttctcgcctaacgccgccaacatggtgagtcttactgttgcgggctccggggccgtcgaccatgccgctcgacctccacctccgctgggaagctgaggcgccaaacggctcccagagggtcccgggaagcgcatggtgttcaggcgcttcgtggaggttggccgggtggcctatgtctcctttggacctcatgccggaaaattggtcgcgattgtagatgttattgatcagaacagggctttggtcgatggaccttgcactcaagtgaggagacaggccatgcctttcaagtgcatgcagctcactgatttcatcctcaagtttccgcacagtgcccaccagaagtatgtccgacaagcctggcagaaggcagacatcaatacaaaatgggcagccacacgatgggccaagaagattgaagccagagaaaggaaagccaagatgacagattttgatcgttttaaagttatgaaggcaaagaaaatgaggaacagaataatcaagaatgaagttaagaagcttcaaaaggcagctctcctgaaagcttctcccaaaaaagcacctggtactaagggtactgctgctgctgctgctgctgctgctgctgctaaagttccagcaaaaaagatcaccgccgcgagtaaaaaggctccagcccagaaggttcctgcccagaaagccacaggccagaaagcagcgcctgctccaaaagctcagaagggtcaaaaagctccagcccagaaagcacctgctccaaaggcatctggcaagaaagcataagtggcaatcataaaaagtaataaaggttctttttgacctgttgacaaatgtatttaagcctttggatttaaagcctgttgaggctggagttaggaggcagattgatagtaggattataataaacattaaataatca

SEQ ID NO: 2422 - DNA, 5252 bp, Homo sapiens
  source 1..5252: mol_type = genomic DNA
taatatggcggggaggaggaggagaaggcggcggcggaccgagctgcgctctgtcagtaccatttgagccattcgcttcctgacaaggcccgtggcgaggggagaggagctgaaggggccgtgggggatcagtgtgactgtgggaagatggaggagtatgagaagttctgtgaaaaaagtcttgccagaatacaagaagcatcactatccacagagagctttctccctgctcagtctgaaagtatctcacttattcgctttcatggagtggctatcctttctccactgcttaacattgagaaaagaaaggaaatgcaacaagaaaagcagaaagcacttgatgtagaagcaagaaagcaggttaacaggaagaaagctttactgactcgtgtccaggagattcttgacaatgttcaggttagaaaagcacctaatgccagtgattttgatcagtgggagatggaaacagtttactctaattcagaagtcagaaacttgaatgttcctgctacatttccaaatagctttccaagccatacggaacactctactgcagcaaagcttgataagatagctgggattttgccattggataatgaggaccaatgtaaaactgatggaatagacttagctagagattcagaaggatttaattctccgaagcaatgtgatagttccaatattagtcatgtagaaaatgaagcttttccaaagacctcttcagcaaccccacaagaaactcttatttctgatggtcccttctcagtaaatgaacaacaggatctaccacttttggcagaagtcatcccagatccctatgtaatgagtcttcagaatctgatgaaaaagtcaaaggaatatatagaaagagaacaatctagacgcagtctgagaggtagtatcaacagaattgttaatgagagtcatttagacaaagaacatgatgctgttgaagtggctgactgtgtaaaagagaaaggccagttgacaggcaaacactgtgtctcagttattcctgacaaaccaagccttaataaatcaaatgttcttctccaaggtgcttccactcaagcaagcagcatgagtatgccagttttagctagcttttcgaaagtggacatacctatacgaactggccatcccactgttctagagtctaattctgattttaaagttattcccacttttgttaccgaaaataatgttatcaaaagtcttacaggttcatatgccaaattacctagtccagagccaagtatgagtcctaaaatgcaccgaagacgttccaggacatcatcagcgtgtcatatacttataaataacccaataaatgcctgtgaattaagccctaaaggaaaagaacaggcaatggacttaattattcaagatactgatgaaaacacaaatgtgcccgaaattatgccaaagttaccaactgatttagcgggagtttgttcaagcaaggtttatgtgggcaaaaatacatctgaagtcaaagaagatgtggttttaggtaaatcaaatcaggtatgtcaatcttcaggaaatcatttagaaaataaagttactcatggacttgttactgtggaaggtcagttaacatccgatgagagaggcgcacacataatgaacagtacctgtgctgcgatgccaaagctgcatgaaccatatgccagcagtcagtgtatagcaagtccaaactttggaactgtgagtggactcaagccagccagtatgttagagaaaaactgcagtttgcaaacagaactgaataagtcttatgatgtaaaaaacccttctcctttattgatgcaaaaccagaatacgagacagcagatggacacacctatggtgtcctgtggaaatgaacaatttttggataacagttttgagaaagttaaacggagacttgatttagatattgatggtttgcaaaaagaaaactgcccttatgtcataacaagtggaataactgaacaagaaaggcaacatttgccagaaaaaagataccctaagggatctggcttcgttaacaagaataaaatgttaggaactagttccaaagaaagcgaggagttactaaaaagcaagatgttagcttttgaagaaatgcggaagagactagaagaacagcacgcccagcaattatcactactcatagctgagcaggaaagggaacaagaaagactgcaaaaggaaatagaagagcaggagaaaatgttaaaagagaagaaggcaatgacagcggaagcctctgagttggacattaacaatgcagtggaattagaatggagaaaaataagtgactctagtttgctggaaacaatgctgtctcaagcggactcactccatacttcaaattcaaatagttctggtttcacaaattctgccatgcaatatagctttgtttctgcaaacgaagcaccattctacctctggggatcatcaactagtggcttgaccaaactctcagtaacaaggccttttggaagagccaaaactagatggtctcaagtttttagtctggaaatacaagcaaaatttaacaaaataactgcagtggcaaaaggatttcttactcgtagacttatgcagacagataagctgaagcaacttcgacaaactgtaaaagatactatggaattcataagaagttttcagtcagaagcaccattaaagagaggcattgtttcagctcaagatgcttcacttcaggaaagagtgttagctcagttgcgagctgccttgtacggtattcatgacatattctttgtaatggatgcagctgaaagaatgtctattctacatcatgatcgagaagttcgcaaagagaaaatgctcaggcaaatggataaaatgaaaagtccacgagtggctctttcagctgcaacacagaagtctcttgataggaagaaatacatgaaagctgctgaaatgggaatgccaaataagaaatttctggttaaacaaaatccttctgaaacaagagtccttcagccaaaccaaggacagaatgcacctgttcataggctacttagtagacaagggagtatatgcaggaaaaatccaaagaaagcggccaaatgttgcgacaatttaagaagacaacattcattaggataaaatggggggaaggattattattcatgttattttccctgcccaagactttatttaaccctggactccgtttacacagacaaagtgacatcagaaggctgagcacttatctggatcatttggtcagtttggtaattcctgctccacacccctattttcctcttaataatacgtttgggtgaagacaaattagtgtttagtaattgcatcatctctgtgcttacctatacaaacataagtttattttatatgcccagatgtctacagagaccctttttgtaaatgtcaaggacatttggatttacttttacagaatattgaaaagataagacaaattataaataagttctaaaacataaatttaattcatctctgcatagtgatttttgaatttgattcaaagggaaattattgcagaagaatgcctttccctcattttataactttaaaaacttggattaaccactcaatgtccactttctttgacttacagtataaccatgtagccaattgtggcccactaaaatctacagaagttaatgtgggtcaccattttggtcagaagcatacattcctgtcagacaactagttgtctgacagaaatgttaggcttcatgtatgttaccccagtactgttagaaacatttgtactaggttataagatctttctgtgacaggtaacaaatttggggaagacagcacaatcttcttgaatgtagctcttgggaatgcattattacatccatttctgtaacataataatatgttgcatgcagttatattttctatttagtctgtatattttgttcttcatagtctgttttttctagcatgcttgatttaggagagaataaagggctatataataataaatccagatttccggataagaatattgcctggttaaaattctgcattgcttaaagacacccatgtttaagatttttcatcactaacatatccattaaaagtatcaactggccaggcagggtggctcacgcctgtactcccagcattttgtgaggccaaggtgggtggatcacctgaggtcaggagtttgagaccagcctgaccaaacatggcgaaaccccatctgtactgaaaatacaaaaattaggcatggtggtgcatgcctgtagttccagctacttgggaggctgagacaggcgaattgcttgaacctgggaggcagaggttgcagtgagctgagactgtgccattgcactccagtcgggttaacagagcaagacactgtctcaaaaaaaaaaaaaaaaaaaagtatcaaccaacaaatgttaccaagataacgtgacttcatgagggagaatgtcactattaatttatcataccatttccaaaaagggctttgtgcttttcacataaaattgagacagtgtatatttaatctaatttaaattttaaagagatactggtattttgaaaatgcaacctatatatattcttaatatccttttaagaatatggagatgaagattgttttctccaattttctgtgccattttaaatttaactttgacatccagctatagacagaaataataagccaccctgggtgtaaacttgattttctttattgagatgtatcatgtattgaatgagtgaaccagaaaattagaagatggtcaaaaaaagtccaagttaccaattttttaaaatttataggcaaagtatcaaattgtcttcttaatatgataaactgtgctttatcattctgaaaactcaggatacagcttattcatagcattgtgggtctctccagtaagaaagatgctaaaagttttgtgcactttttgtgtgtgtaatgcaaattagttaaaacaaatagttttggagaaagttaaaactagctttagagtaaggatgagaaacttgagtgtttttaatttaaagataaaagcctgtgttttacacattcttttttggtgttcatagcttcttctcatacaggtgccagacactgtttgtgcttttgatggatttttatttatatactttttttgcttatttttactttgagtggaatgttcattaatgtaaattgtatttatttttatacttttattttcactagttttgcttctaggcaaaaagcaaaataaacttttcatctt

SEQ ID NO: 2423 - DNA, 5474 bp, Homo sapiens
  source 1..5474: mol_type = genomic DNA
ggccctgagaggtggagtcggggtggcagcggcggcggttgccaggagcccgcgttgcagcctgagatccgtaatatggcggggaggaggaggagaaggcggcggcggaccgagctgcgctctgtcagtaccatttgagccattcgcttcctgacaaggcccgtggcgaggggagaggagctgaaggggccgtgggggatcagtgcctgctgtgtgctgatactgttctgtgtaatggggattcagtgaacaagactgaaaaggtacctgtacttatggcgcttacattttggtggaggaagacagacaaaaatcaaggaaataaacacgataatttcagatagtgtgtgactgtgggaagatggaggagtatgagaagttctgtgaaaaaagtcttgccagaatacaagaagcatcactatccacagagagctttctccctgctcagtctgaaagtatctcacttattcgctttcatggagtggctatcctttctccactgcttaacattgagaaaagaaaggaaatgcaacaagaaaagcagaaagcacttgatgtagaagcaagaaagcaggttaacaggaagaaagctttactgactcgtgtccaggagattcttgacaatgttcaggttagaaaagcacctaatgccagtgattttgatcagtgggagatggaaacagtttactctaattcagaagtcagaaacttgaatgttcctgctacatttccaaatagctttccaagccatacggaacactctactgcagcaaagcttgataagatagctgggattttgccattggataatgaggaccaatgtaaaactgatggaatagacttagctagagattcagaaggatttaattctccgaagcaatgtgatagttccaatattagtcatgtagaaaatgaagcttttccaaagacctcttcagcaaccccacaagaaactcttatttctgatggtcccttctcagtaaatgaacaacaggatctaccacttttggcagaagtcatcccagatccctatgtaatgagtcttcagaatctgatgaaaaagtcaaaggaatatatagaaagagaacaatctagacgcagtctgagaggtagtatcaacagaattgttaatgagagtcatttagacaaagaacatgatgctgttgaagtggctgactgtgtaaaagagaaaggccagttgacaggcaaacactgtgtctcagttattcctgacaaaccaagccttaataaatcaaatgttcttctccaaggtgcttccactcaagcaagcagcatgagtatgccagttttagctagcttttcgaaagtggacatacctatacgaactggccatcccactgttctagagtctaattctgattttaaagttattcccacttttgttaccgaaaataatgttatcaaaagtcttacaggttcatatgccaaattacctagtccagagccaagtatgagtcctaaaatgcaccgaagacgttccaggacatcatcagcgtgtcatatacttataaataacccaataaatgcctgtgaattaagccctaaaggaaaagaacaggcaatggacttaattattcaagatactgatgaaaacacaaatgtgcccgaaattatgccaaagttaccaactgatttagcgggagtttgttcaagcaaggtttatgtgggcaaaaatacatctgaagtcaaagaagatgtggttttaggtaaatcaaatcaggtatgtcaatcttcaggaaatcatttagaaaataaagttactcatggacttgttactgtggaaggtcagttaacatccgatgagagaggcgcacacataatgaacagtacctgtgctgcgatgccaaagctgcatgaaccatatgccagcagtcagtgtatagcaagtccaaactttggaactgtgagtggactcaagccagccagtatgttagagaaaaactgcagtttgcaaacagaactgaataagtcttatgatgtaaaaaacccttctcctttattgatgcaaaaccagaatacgagacagcagatggacacacctatggtgtcctgtggaaatgaacaatttttggataacagttttgagaaagttaaacggagacttgatttagatattgatggtttgcaaaaagaaaactgcccttatgtcataacaagtggaataactgaacaagaaaggcaacatttgccagaaaaaagataccctaagggatctggcttcgttaacaagaataaaatgttaggaactagttccaaagaaagcgaggagttactaaaaagcaagatgttagcttttgaagaaatgcggaagagactagaagaacagcacgcccagcaattatcactactcatagctgagcaggaaagggaacaagaaagactgcaaaaggaaatagaagagcaggagaaaatgttaaaagagaagaaggcaatgacagcggaagcctctgagttggacattaacaatgcagtggaattagaatggagaaaaataagtgactctagtttgctggaaacaatgctgtctcaagcggactcactccatacttcaaattcaaatagttctggtttcacaaattctgccatgcaatatagctttgtttctgcaaacgaagcaccattctacctctggggatcatcaactagtggcttgaccaaactctcagtaacaaggccttttggaagagccaaaactagatggtctcaagtttttagtctggaaatacaagcaaaatttaacaaaataactgcagtggcaaaaggatttcttactcgtagacttatgcagacagataagctgaagcaacttcgacaaactgtaaaagatactatggaattcataagaagttttcagtcagaagcaccattaaagagaggcattgtttcagctcaagatgcttcacttcaggaaagagtgttagctcagttgcgagctgccttgtacggtattcatgacatattctttgtaatggatgcagctgaaagaatgtctattctacatcatgatcgagaagttcgcaaagagaaaatgctcaggcaaatggataaaatgaaaagtccacgagtggctctttcagctgcaacacagaagtctcttgataggaagaaatacatgaaagctgctgaaatgggaatgccaaataagaaatttctggttaaacaaaatccttctgaaacaagagtccttcagccaaaccaaggacagaatgcacctgttcataggctacttagtagacaagggagtatatgcaggaaaaatccaaagaaagcggccaaatgttgcgacaatttaagaagacaacattcattaggataaaatggggggaaggattattattcatgttattttccctgcccaagactttatttaaccctggactccgtttacacagacaaagtgacatcagaaggctgagcacttatctggatcatttggtcagtttggtaattcctgctccacacccctattttcctcttaataatacgtttgggtgaagacaaattagtgtttagtaattgcatcatctctgtgcttacctatacaaacataagtttattttatatgcccagatgtctacagagaccctttttgtaaatgtcaaggacatttggatttacttttacagaatattgaaaagataagacaaattataaataagttctaaaacataaatttaattcatctctgcatagtgatttttgaatttgattcaaagggaaattattgcagaagaatgcctttccctcattttataactttaaaaacttggattaaccactcaatgtccactttctttgacttacagtataaccatgtagccaattgtggcccactaaaatctacagaagttaatgtgggtcaccattttggtcagaagcatacattcctgtcagacaactagttgtctgacagaaatgttaggcttcatgtatgttaccccagtactgttagaaacatttgtactaggttataagatctttctgtgacaggtaacaaatttggggaagacagcacaatcttcttgaatgtagctcttgggaatgcattattacatccatttctgtaacataataatatgttgcatgcagttatattttctatttagtctgtatattttgttcttcatagtctgttttttctagcatgcttgatttaggagagaataaagggctatataataataaatccagatttccggataagaatattgcctggttaaaattctgcattgcttaaagacacccatgtttaagatttttcatcactaacatatccattaaaagtatcaactggccaggcagggtggctcacgcctgtactcccagcattttgtgaggccaaggtgggtggatcacctgaggtcaggagtttgagaccagcctgaccaaacatggcgaaaccccatctgtactgaaaatacaaaaattaggcatggtggtgcatgcctgtagttccagctacttgggaggctgagacaggcgaattgcttgaacctgggaggcagaggttgcagtgagctgagactgtgccattgcactccagtcgggttaacagagcaagacactgtctcaaaaaaaaaaaaaaaaaaaagtatcaaccaacaaatgttaccaagataacgtgacttcatgagggagaatgtcactattaatttatcataccatttccaaaaagggctttgtgcttttcacataaaattgagacagtgtatatttaatctaatttaaattttaaagagatactggtattttgaaaatgcaacctatatatattcttaatatccttttaagaatatggagatgaagattgttttctccaattttctgtgccattttaaatttaactttgacatccagctatagacagaaataataagccaccctgggtgtaaacttgattttctttattgagatgtatcatgtattgaatgagtgaaccagaaaattagaagatggtcaaaaaaagtccaagttaccaattttttaaaatttataggcaaagtatcaaattgtcttcttaatatgataaactgtgctttatcattctgaaaactcaggatacagcttattcatagcattgtgggtctctccagtaagaaagatgctaaaagttttgtgcactttttgtgtgtgtaatgcaaattagttaaaacaaatagttttggagaaagttaaaactagctttagagtaaggatgagaaacttgagtgtttttaatttaaagataaaagcctgtgttttacacattcttttttggtgttcatagcttcttctcatacaggtgccagacactgtttgtgcttttgatggatttttatttatatactttttttgcttatttttactttgagtggaatgttcattaatgtaaattgtatttatttttatacttttattttcactagttttgcttctaggcaaaaagcaaaataaacttttcatcttaaagaaaa

SEQ ID NO: 2424 - DNA, 1716 bp, Homo sapiens
  source 1..1716: mol_type = genomic DNA
ggcagaggcgcaggcgcggtgcttcgcagcccgcttccggcctcacacctgccaagcatcacacctgccaagcatcacacctgccaagcatcacacctgccaagcatcacacctgcgatgcctgcacgagctgggtgcggtccgcgcagctgcagtaagggggcgacccggcgtctgttagtcggcggttcatctccttcgtgcctcgatgagctttaacgccattttcctccattctctttcttcacctcttgagtttccaagatggcaactatcaagagtgaacttattaagaatttcgcggaagaggaggccattcatcacaataagatctccattgtaggaactggatcggttggtgtggcttgtgctatcagcatcttattaaaaggtttgagtgatgaacttgtccttgtggatgttgatgaaggcaaactgaagggtgagacaatggatcttcaacatggcagcccttttatgaaaatgccaaatattgtctccagcaaagattacctggtcactgcaaactccaatctagtgattatcacagcaggtgcacgccagaaaaaaggagaaacacgccttgatttagtccagcgaaatgtatccatctttaaattaatgattcccaatattacccagtacagtcctcactgcaaactgcttattgttactaatccagtggatatcttaacttatgtagcctggaagttgagtggatttcccaaaaaccgtgttattggaagtggttgtaatctggactctgctcgttttcgttactttattgggcaaaggcttggcatccactctgaaagctgtcatgggctgatccttggagagcatggcgactcaagtgttcctgtgtggagtggtgtgaacattgctggcgtccctctgaaggatctgaacccagatataggaactgataaagatcctgagcagtgggaaaatgtccacaaaaaagtgatttccagtggctatgagatggtcaaaatgaaaggttatacttcttggggcattagcctatctgtagctgatttaacagaaagtattttgaagaatcttaggagagtgcatccagtttctaccctaagtaagggcctctatggaataaatgaagacatattccttagtgtcccatgtatcctgggagagaatggtatcacagacctcataaaagtaaaactgactcttgaagaggaggcctgcttgcaaaagagtgcagaaacactttgggaaattcagaaggagctcaagctttaaagttgcttaaagctaattctgtagattgaagatgaaatagtagttatggaattgtatatgtcaaacttttgaataaatttgaatttctaaaagttggaaaaatagaggaaagagtgacctatttagtatagccttccagcttttttttttttcttttttgggagggtctcattctgtcacccaggctggagtgcagtggcacaatcatggctcactgcaaccttgacctcccgagctcaggtgagcctcccacttcagcctccagagtaggtgggaccacatgcgtgtgcctccatgcctgcctaatttttgtatctttttgtagagatggggttttgccatgtcatccaagctggttttgaactcccaaagtgctgagattacaggggtgagccactgtgcctggccttagctttgatttagtatccagatgatagatgacacttttttttt

SEQ ID NO: 2425 - DNA, 1146 bp, Homo sapiens
  source 1..1146: mol_type = genomic DNA
aacagttgccttttcctctcacagaaggaagatttcattttgtttgagacgagaaaccaaaccacacaccaaagagaggggtatgatggctaagaagcccccaaaaccagcccctcgcaggatcttccaggaaaggttaaagattactgctctacctttgtactttgaaggttttttattaatcaagcggtcaggataccgggagtatgagcattactggacagagttgagaggaactactcttttcttttataccgacaaaaagagtataatatatgttgacaaattagacatagtagacctcacatgccttactgagcagaattcaactgaaaagaactgtgcgaaattcacccttgttttgccgaaagaggaagtacaactgaagacagagaacacagaaagtggggaagaatggagaggcttcattcttacagtaacagagctgtcagttccccaaaacgtgtcactcctacctgggcaagtaattaaactgcatgaagtcctagagagagaaaagaaaaggaggattgagacagagcagagtacgtccgtggaaaaagagaaggaaccaactgaagattatgtggatgtactgaaccctatgccagcatgtttttatacagtgtcccggaaagaggcaactgagatgctccagaagaacccttctttgggaaatatgatcctgaggcctggtagtgacagtagaaactactccatcactattcggcaggagatagacattccaagaatcaagcactacaaagtgatgagcgtaggacaaaactacactattgaactggaaaaacctgtaacactcccaaaccttttcagtgtcattgattattttgtgaaggagactcgaggaaatttaagaccatttatatgttcaactgatgaaaacactggtcaagaacccagtatggaagggagaagtgaaaagttgaagaaaaatccacacattgcatgaaatacaatgtgaaagctcctttgtatatcttggggaaagactatgtgagacagagggagaaaacagccattgacaactcaaggagagaggcctcggggggaaaaaaagatcaacctggccaaaaccttgaaaatccggcttcttgacttgtgagaaaataaatttgtgttccttaa

SEQ ID NO: 2426 - DNA, 1907 bp, Homo sapiens
  source 1..1907: mol_type = genomic DNA
gccgcctgcgaccggcagctcgttcgccgcactttggaggcttcggctgcccctccgacccacgtagggcccggacccgggcctccttgtgaacagcgtgccggcttcgccccacgggttcaccggctggctgggcttcaagcgccgaggccgccgcagtgaccccgcccccgggccgaggatgtgaggcgggccgggcgtccccacaccgggcccgggcgccgggagtgggcgtctgggcagcgccaggcgatggccctgctgctggtgctcctcgcctcttggggcctggggcagtgagggggccggcgggcgtgggccgagtggccgcgggcgccatggagggggtgctgtacaagtggaccaactatctgagcggttggcagcctcgatggttccttctctgtgggggaatattgtcctattatgattctcctgaagatgcctggaaaggttgcaaagggagcatacaaatggcagtctgtgaaattcaagttcattctgtagataatacacgcatggacctgataatccctggggaacagtatttctacctgaaggccagaagtgtggctgaaagacagcggtggctggtggccctgggatcagccaaggcttgcctgactgacagtaggacccagaaggagaaagagtttgctgaaaacactgaaaacttgaaaaccaaaatgtcagaactaagactctactgtgacctccttgttcagcaagtagataaaacaaaagaagtgaccacaactggtgtgtccaattctgaggagggaattgatgtgggaactttgctgaaatcaacctgtaatacttttctgaagaccttggaagaatgcatgcagatcgcaaatgcagccttcacctctgagctgctctaccgcactccaccaggatcacctcagctggccatgctcaagtccagcaagatgaaacatcctattataccaattcataattcattggaaaggcaaatggagttgagcacttgtgaaaatggatctttaaatatggaaataaatggtgaggaagaaatcctaatgaaaaataagaattccttatatttgaaatctgcagagatagactgcagcatatcaagtgaggaaaatacagatgataatataacagtccaaggtgaaataaggaaggaagatggaatggaaaacctgaaaaatcatgacaataacttgactcagtctggatcagactcaagttgctctccggaatgcctctgggaggaaggcaaagaagttatcccaactttctttagtaccatgaacacaagctttagtgacattgaacttctggaagacagtggcattcccacagaagcattcttggcatcatgttatgctgtggttccagtattagacaaacttggccctacagtgtttgctcctgttaagatggatcttgttggaaatattaagaaagtaaatcagaagtatataaccaacaaagaagagtttaccactctccagaagatagtgctgcacgaagtggaggcggatgtagcccaggttaggaactcagcgactgaagccctcttgtggctgaagagaggtctcaaatttttgaagggatttttgacagaagtgaaaaatggggagaaggatatccagacagccctaaataatgcatatggtaaaacattgcggcaacaccatggctgggtagttcgaggggtttttgcggtgtaggaatgtgggtgtagacggaactccagaaaccatcatggaccatgaggcaactctgaggatggaagccacacactaaggacggtaaagcagaaagaagagctgaaaccctgatgataaagaagcagccaattccgtcctgcactgcccacctccagatctcattcatgtgaaacaaagagaaactttatcttgttcaagtca

SEQ ID NO: 2427 - DNA, 2837 bp, Homo sapiens
  source 1..2837: mol_type = genomic DNA
agctcgttcgccgcactttggaggcttcggctgcccctccgacccacgtagggcccggacccgggcctccttgtgaacagcgtgccggcttcgccccacgggttcaccggctggctgggcttcaagcgccgaggccgccgcagtgaccccgcccccgggccgaggatgtgaggcgggccgggcgtccccacaccgggcccgggcgccgggagtgggcgtctgggcagcgccaggcgatggccctgctgctggtgctcctcgcctcttggggcctggggcagtgagggggccggcgggcgtgggccgagtggccgcgggcgccatggagggggtgctgtacaagtggaccaactatctgagcggttggcagcctcgatggttccttctctgtgggggaatattgtcctattatgattctcctgaagatgcctggaaaggttgcaaagggagcatacaaatggcagtctgtgaaattcaagttcattctgtagataatacacgcatggacctgataatccctggggaacagtatttctacctgaaggccagaagtgtggctgaaagacagcggtggctggtggccctgggatcagccaaggcttgcctgactgacagtaggacccagaaggagaaagagtttgctgaaaacactgaaaacttgaaaaccaaaatgtcagaactaagactctactgtgacctccttgttcagcaagtagataaaacaaaagaagtgaccacaactggtgtgtccaattctgaggagggaattgatgtgggaactttgctgaaatcaacctgtaatacttttctgaagaccttggaagaatgcatgcagatcgcaaatgcagccttcacctctgagctgctctaccgcactccaccaggatcacctcagctggccatgctcaagtccagcaagatgaaacatcctattataccaattcataattcattggaaaggcaaatggagttgagcacttgtgaaaatggatctttaaatatggaaataaatggtgaggaagaaatcctaatgaaaaataagaattccttatatttgaaatctgcagagatagactgcagcatatcaagtgaggaaaatacagatgataatataacagtccaaggtgaaataaggaaggaagatggaatggaaaacctgaaaaatcatgacaataacttgactcagtctggatcagactcaagttgctctccggaatgcctctgggaggaaggcaaagaagttatcccaactttctttagtaccatgaacacaagctttagtgacattgaacttctggaagacagtggcattcccacagaagcattcttggcatcatgttatgctgtggttccagtattagacaaacttggccctacagtgtttgctcctgttaagatggatcttgttggaaatattaagaaagtaaatcagaagtatataaccaacaaagaagagtttaccactctccagaagatagtgctgcacgaagtggaggcggatgtagcccaggttaggaactcagcgactgaagccctcttgtggctgaagagaggtctcaaatttttgaagggatttttgacagaagtgaaaaatggggagaaggatatccagacagccctaagtgtaggaatgtgggtgtagacggaactccagaaaccatcatggaccatgaggcaactctgaggatggaagccacacactaaggacggtaaagcagaaagaagagctgaaaccctgatgataaagaagcagccaattccgtcctgcactgcccacctccagatctcattcatgtgaaacaaagagaaactttatcttgttcaagtcactttagtcaagatttttattatcagatgaatgcaatttctaattgatacaccttaaaattttcaacatgtacacctgatttaacaaaatctagaattaagtcaatacttctacatgcattatagaccaaaggtcactgctataagaactttgggtatatagtcaaattcctcacatttttagaaacttgtttattcattgcatccctcccccatctcactctctcacacactcacatatttattttctcagatccttataagttcataagacatatgtccttattccatttttacagatgagaaaactggggtttgcaggggttaagtaacttatccaagatcacacaattaattagtggcgaagtcataatttgaagtctttctaatgcccaaatgtttccattgtgtcacatatcggagctgtgctctttccatcagccagtttcccattatcatagctgatgacatgcacacccaccatctggggcaggctttagtacagcactctgtgccatcatccagatcaccaaatcttagtaaatggacgtgtcataagagataaggctgccatagaatcacagcagcttctggcttagtaaattacctggatacacaccttttcctagaggaaatcccacatcttcgtaggagatctggtgtaatgctcttgggacctctctctagaggatgagctagtatcactgggtcctagtaagtttcagcaaatataatagagacagaactgtcatcattatcagaaaagaaacagagaaaaatgttaaaacaatggttttgtgaccttaaagtctgtgttagtcccttagcaccaccgctgagattttgctgaaagggacgttttgtgtgttgggcttcactgaaggaagcccctgaaagtgttcagaaatagggaaaatgagaaactgttccagctgaaaatacgggcaagggggaatcattgaagaagacagaatattgaagtgttcaaatgaataaagaagctaaaaact

SEQ ID NO: 2428 - DNA, 1886 bp, Homo sapiens
  source 1..1886: mol_type = genomic DNA
aatgacatgacagccattccgtggccagggacaccactgcccaagctggagaccacgaggattcagggactgaagccagcatgggaattcctggtttgagatcagagtcctgagtacctcgtgggaacttgggcactcatccgcaggaggtctagacccccagagaattccttgagtctaaggcacaggcccaacatgtgtagcaccagtgggtgtgacctggaagaaatccccctagatgatgatgacctaaacaccatagaattcaaaatcctcgcctactacaccagacatcatgtcttcaagagcacccctgctctcttctcaccaaagctgctgagaacaagaagtttgtcccagaggggcctggggaattgttcagcaaatgagtcatggacagaggtgtcatggccttgcagaaattcccaatccagtgagaaggccataaaccttggcaagaaaaagtcttcttggaaagcattctttggagtagtggagaaggaagattcgcagagcacgcctgccaaggtctctgctcagggtcaaaggacgttggaataccaagattcgcacagccagcagtggtccaggtgtctttctaacgtggagcagtgcttggagcatgaagctgtggaccccaaagtcatttccattgccaaccgagtagctgaaattgtttactcctggccaccaccacaagcgacccaggcaggaggcttcaagtccaaagagatttttgtaactgagggtctctccttccagctccaaggccacgtgcctgtagcttcaagttctaagaaagatgaagaagaacaaatactagccaaaattgttgagctgctgaaatattcaggagatcagttggaaagaaagctgaagaaagataaggctttgatgggccacttccaggatgggctgtcctactctgttttcaagaccatcacagaccaggtcctaatgggtgtggaccccaggggagaatcagaggtcaaagctcagggctttaaggctgcccttgtaatagacgtcacggccaagctcacagctattgacaaccacccgatgaacagggtcctgggctttggcaccaagtacctgaaagagaacttctcgccatggatccagcagcacggtggatgggaaaaaatacttgggatatcacatgaagaagtagactgaaatatcagatttgtcatcaggaatactctttgtctactgtggtcctgtgcacgttggcctcagatggactacaggagattacaacgtacaaggcagatggagcattgacgttttcaaaaccattattcctgtgactggagaggcatcaggagaggtctcgttcgtctccagctcataaaatgtagcagcatcatccttgacagtgatgtttttcaggccctccattgagaacctgaggaaatctgtaaagataagtggtgatgttgtttcaaacgttcagaacagataccatcatcctgcctttgttagctgctgtagggaaagtgcgttacagatgtctgctgacctcacaagagtgaaaagataaactgtgcatgtgtttccacttccgtttctagtactatttatttttaaactacacttggggtggcctaatacctaggaagatgttgctattcacgttagtaaacagcctaaagaaactcttaggtttactgctacatccatttgtttggagaggtaactgttgtctgtgcctttttgaaaaacttccatttggtacaaaatttttactccaacaccccctcaacccttttctcagggaccacacctcttcttcccaaggtccctgggacttcctcattctttgtggtagtacaatgattggtagcaggtaaaataaatacatagaaagactactgtcaaaa

SEQ ID NO: 2429 - DNA, 7743 bp, Homo sapiens
  source 1..7743: mol_type = genomic DNA
gggcggtgcggtgcggaagcggaagtgaagggtgcgcttggcggcggcggcgggagctgcggagtcgggaatcaaaacaaagggcctggggggggcggggggaaggcggcggggccggaatgtgagcggaggtggagccggcggcagagggtggaagaatgaaagaaaagaaagatgaaaggatgttgaatcactttgcatggctgtatgatggaaggaaacggaactgagaactcctgcagtagaacacgtggatggcttcaacaagataatgatgctaagccatggctttggaaattctctaattgcttttctcgtcctgagcagacgctgccacatagtccccaaacgaaagagtacatggagaacaagaaagttgctgtggaactaaaggatgtaccatcaccccttcatgctggctctaagctttttccagcagtcccacttcctgatattcgttctcttcagcagcctaaaatacagctttcttctgtccccaaagtaagctgctgtgctcattgccctaatgaaccctccacttcgccaatgcgttttggtggtggtggtggcggtagcggaggtaccagtagcttgattcacccgggcgcactgttagactcgcaaagcaccaggacaatcacgtgtcaggtagggtcagggtttgctttccagtctgcatcttcactccagaatgcctcagctaggaacaatttggcaggcattgcaagtgactttcccagcatgtgtctagagagtaacctgtcttcctgcaaacacctgccctgttgtggaaaactccacttccagtcatgtcatggtaatgtgcacaagctgcatcagtttccgagtctgcagggctgcacctccgctggctatttcccctgttctgatttcacaagcggggctccagggcatttggaagagcacatttcacagtcggagctaacgcctcacttgtgcaccaactctttgcaccttaatgtggtacctccggtttgtttaaagggctcactttactgcgaagactgtctaaacaagccagcaagaaatagcataatcgatgcggctaaagtctggccaaatataccacctccaaatactcaacctgcacctcttgctgtccctctgtgtaatggctgtggaaccaaaggaacagggaaggagaccacgttgttattggcgaccagtctaggcaaagctgcttcaaaatttgggtcaccagaagttgcagtagctggacaggtgctagaaaacttaccccccattggagttttttgggatattgaaaactgctccgttccctctggccggtcagcaactgctgttgtgcaaagaatccgtgagaagttttttaaaggccacagagaagcagaattcatctgtgtatgtgacatcagtaaagaaaacaaggaagttattcaagagctgaataattgccaggtaaccgttgcccacatcaatgctactgcaaagaatgccgctgatgataaactgcggcagagtctccgcagatttgcaaatacacacactgctccagccacagtggttcttgtgtcaactgatgtcaattttgcattggaacttagtgacctgagacacaggcatggtttccacattattttggtccataaaaaccaggcctcagaagcactgctgcatcatgctaacgagctgatcagatttgaagagttcatttccgacttgccccccaggttaccactaaaaatgccacagtgccacactctgctctatgtttataacctaccagcaaataaggatggcaagagcgtcagcaacaggctcagacgcctgtccgataattgtggtgggaaagtgctgagtatcacaggctgcagtgcaattctccgcttcataaaccaagatagtgcagagcgcgctcagaagcgaatggaaaacgaagatgtctttggtaataggatcattgtgtcatttactccaaaaaatagagaactctgtgaaacaaagagttcaaatgcaattgctgataaagtgaagtctcccaaaaaacttaagaatccaaaattgtgcctcatcaaagatgcaagtgaacaatcttccagtgccaaagccacgcctggaaaagggtcacaggcaaattctggatctgctacaaaaaatacaaatgttaaaagtttacaggagctgtgccgcatggagtcaaaaactggtcatagaaacagtgagcaccagcaaggtcacctgaggctggtcgtacccactcacggtaactcaagtgctgcagtgtcgacgccgaaaaactcgggggtggcagaacccgtttacaaaaccagtcagaaaaaggagaacctcagtgcccgaagtgttaccagttctcctgtagagaaaaaagataaagaggagactgtattccaagtgagttacccgtctgcttttagcaagttagttgcatccaggcaagtcagtcctctgctcgcatctcagtcttggtcttctaggagtatgtctccaaaccttttaaacagagcatccccgcttgctttcaacattgcaaattcgagcagcgaagccgactgcccagacccatttgcaaatggtgctgatgtccaagtcagcaacatagactacagattatcccggaaggagctgcagcagctcctgcaggaagcatttgccaggcatggcaaggtgaagagtgttgagctcagcccccatacagattatcaactcaaggctgttgtgcaaatggaaaacttacaagatgcgatcggtgcagtgaatagcctccacagatacaaaattggcagcaaaaagatcctggtctcacttgccaccggggctgccagcaaatcactctctttactgagtgcagaaacaatgtctgttcttcaggatgcccctgcctgttgcctgcctctgtttaaatttacagatatctatgaaaaaaagtttggacacaagttgaatgtgtcagatctatataaattaacagacacggtcgcaatccgtgaacaaggaaacggacggctggtgtgtctcctacccagcagtcaggcccgccagagccccttggggtcttcccagtcacacgacggctcctccacgaattgcagcccaattatatttgaagagttagaatatcacgagcctgtctgcagacagcattgttccaataaggatttcagcgaacatgaatttgatccagactcttacaagattccttttgtgattctttctttgaagacatttgcgccccaggttcacagtcttctccagacccacgagggcaccgtgcctttattgagctttccagattgttacattgcagagtttggcgatctagaagtagtgcaagaaaaccaaggaggtgttcccttagaacacttcattacctgtgttccaggtgtaaacattgccactgctcagaatggcatcaaagtggttaaatggattcacaacaagcccccgcctcccaacactgacccttggcttctgcgttcgaagagtcctgtaggtaacccccagctgatccagttcagtagagaagtgattgacttgctgaaaagccagccatcttgtgtcatacccatcagtcatttcatcccatcctatcaccatcattttgcaaagcagtgccgagtgtcagactacggatactccaagctgattgagttattagaagcagtgcctcatgtattgcagattcttggaatgggctccaaacgtctgctgacccttacccacagggcccaggtgaagcgctttactcaggatttactaaaacttctcaaatcccaggccagcaaacaggtcattgtgagagaattctcacaggcttatcactggtgtttctcaaaggactgggatgtcactgaatatggtgtttgtgagttgattgacatcgtatcagagattccagacacaaccatctgcttgtcccaacaagataatgaaatggtgatttgtatccccaaaagagaacgcactcaggatgaaatagaaaggacaaaacagttctccaaggatgtcgttgatttgctgcgtcaccaaccccatttccggatgccctttaataaatttatcccttcttaccatcaccactttggccggcagtgcaaacttgcgtactatgggtttaccaaactacttgaactttttgaagccatacctgatactttacaagtattggaatgtggagaagaaaagatccttactctgacagaggtggagcggttcaaagctctagctgcccagtttgttaaactccttcggtcccaaaaagataactgccttatgatgacagatctccttacagaatatgctaaaacttttggttatacatttcgtctccaagactatgatgtcagttccatttcggctttaactcagaaactctgccatgtcgtgaaggttgccgatatagaatctggcagacagattcagctgatcaaccgaaagtctctgcgatctctcactgcccagttgctggtattgttgatgtcttgggaaggaaccacccatctttctgttgaggagctcaagagacattacgaaagtacccacaacactccccttaacccctgtgaatatggattcatgaccttgaccgaactgctgaagagcctgccatacttggttgaggttttcactaatgataagatggaagaatgtgtgaagctcacaagtctgtatttgtttgcaaagaatgtgcggtctttacttcatacttaccactaccagcagattttccttcatgagttttccatggcctataccaagtatgtcggagaaactctgcagcccaagacctacggccacagcagcgtggaggagctcttgggagcaattccacaggtggtctggataaaaggacatggtcataagagaattgtagtgttaaaaaatgacatgaaaagtcgtttgagttcactcagtctctcccctgccaatcatgaaaaccagccctcggagggcgagcgcatcctggaggtgcccgaatcgcacacagcctcggaactcaagcttggagctgacggcagtgggcccagtcacacagagcaggagcttctccgcctgaccgacgactcccccgtcgacctcctgtgtgcgcctgtcccctcgtgcctgccgtcccctcagctgagaccagaccccgttatcctccaatctgctgatctcattcagtttgaggagcgccctcaagagccttctgaaattatgattttaaaccaagaagaaaaaatggagattccaataccaggaaagagcaaaactctgacctctgactccagctcgtcctgcatctcagcagctgtccccgtgcctccctgcccctcctcggaaacctccgagtcactgctcagcaaggaccccgtggaaagcccggccaaaaagcaacccaaaaatagagtcaaattggcagccaacttttccttagcacctataaccaagctttaactcccatttggaatatagaattaggatgggaaaacactgtctgattctgcacacaaaagtgggtttcaaaaatacatccttttctgtgtcatgaaaaccccccgaagccattgacttcatcttacctgtgttctatcatgtttttcttttccattgaacacagctttgagctgaagtctttcttttcttcttcctttttctttcttttttcaattatttgaagaacttgtggcatttgttaaagaatccttaatatattttaccaaatttttagtaactattatgaaatacaatggtgttccaaaagaagaaagcactaaaaactcaactagcaggaagcggttttgcttccattgagccacgtcggtggtgtcatcctacatgtagcataatagagtctctcagcctttgcttactggtgtttccgacagtattaacccagtgcgtggcatgtctttgaagcaaagcctgtcccgctagcctgtgtgttcacacaccaaaggagaagggtaggcgaggggttcggagtgtattttcaggttggaatgtgaaggttcctggcttccatgtgacttgtaagtgtgccttgttttttatttaaactatgtctgtagttgacaaaagtggcttcatcacaaatttttttaaacgtttctactttggggttccatttaggagctttctagaaagttgaggatgtttgaagcttcccttctgtgttccagtttgatatgggttaggttaaggaaaaggagatggtctcgatgtcatggatttaaagtcagcatttggattacaacacacattattgtgtgtcgagaggcagcattggaaagagcctgattttctaaaatatgcatcaagtgcataaattacaaatcagagctgagtggggaggtgcttcagcagcagcgggatcaatacgatttccactgggaagagacaggaattctacctacacataggaaggccaaggttgatccacttaaccttgttattgtaattttaaagctggtatcggtagctgggaagctttatgtgtgtgtatgtcagctcagcatcttttaatcgtgtctgattttactctcgttacttctcgctgttggaagcatctctgggtttcttgtggcgtctggtgtggaatggccttcctctctaggtgcctgaggtgtccgctgacgggtggcctctcacccccctctagagaaacctgacatttacaatggattgtatttgtccggcaaaaaaggcggattcattcatagagcagaaagaacctgttggcgtaaggtcttccactagttagatggtttcttttggggaaatgtttatatttggtaacttctagaaagccagaaaatggactctgatttcatagcattttgataaaatgccacaaaataagggctatagagagatttttacaagtcagattttttgttccccaaatcttttaaatgaagccagtgactcccagttctcaacacatggccccagtcaagacagaacaccatggaaaaaaccctgtaagtattatggcactctccgaatcctcctgaaggcatttcctctacagacatagtgttacaggaagtgaaatgcaaatgtgcaattttttttaaaggagcttttaaacaaagtaataataattggtgttgagaacatcagttgccttattctaagatttcataaggctgagtttgcacgcttggacttcagttctgctagcatgtaaagagtggtggactttaaaaccgtaagaggtatcattacaagtcacctggaacagactcaaagaacaggttctttgggcaacagacaaagaagaatcaagttctgtgctgtcccgtgagtgtgtctgagtaccattcactggagttgctgcttaggtctgggacgtgtgtgtgactcttaacaattgctgtctgaaaatgagagagaagacttcggaagcacattgtgttcataatgtactccacaatggccagtccaattgctatctatttttttatccagaggcttaattaaatgatgtggtaaaatgatgtttgagcattaagacaatgtaattctttatttctgggtggaaagatataccggattaaatttatctgtttaaaaaaatgacaaaagttatcaccaaaaccccctttcccatcttgcactgtttgttttggattgggtttgggggaaagagatgtttttcttagttgtctactttgtttgaacacttttgttgtggttcaagtgctgttttgtgtgttgggaccaaacagttgtcaataaactttacaagcgagcatctat

SEQ ID NO: 2430 - DNA, 1026 bp, Homo sapiens
  source 1..1026: mol_type = genomic DNA
aatgacatgacagccattccgtggccagggacaccactgcccaagctggagaccacgaggattcagggactgaagccagcatgggaattcctggtttgagatcagagtcctgagtacctcgtgggaacttgggcactcatccgcaggaggtctagacccccagagaattccttgagtctaaggcacaggcccaacatgtgtagcaccagtgggtgtgacctggaagaaatccccctagatgatgatgacctaaacaccatagaattcaaaatcctcgcctactacaccagacatcatgtcttcaagagcacccctgctctcttctcaccaaagctgctgagaacaagaagtttgtcccagaggggcctggggaattgttcagcaaatgagtcatggacagaggtgtcatggccttgcagaaattcccaatccagtgagaaggccataaaccttggcaagaaaaagtcttcttggaaagcattctttggagtagtggagaaggaagattcgcagagcacgcctgccaaggtctctgctcagggtcaaaggacgttggaataccaagattcgcacagccagcagtggtccaggtgtctttctaacgtggagcagtgcttggagcatgaagctgtggaccccaaagtcatttccattgccaaccgagtagctgaaattgtttactcctggccaccaccacaagcgacccaggcaggaggcttcaagtccaaagagatttttgtaactgagggtctctccttccagctccaaggccacgtgcctgtagcttcaagttctaagaaagatgaagaagaacaaatactagccaaaattgttgagctgctgaaatattcaggagatcagttggaaagaaaggaaaaagaatgggaggagtcagcaaagaccaagataaaaatggcacttctctggaggagcagtggtggtggacccagagttctgagtatacctgaggcatttatgaagaacagcttcactctcaccccacctggcttctcagaacacaattag

SEQ ID NO: 2431 - DNA, 1857 bp, Homo sapiens
  source 1..1857: mol_type = genomic DNA
ggtgccacccctccccccggcggccccgcgcgcagctcccggctccctcccccttcggatgtggcttgagctgtaggcgcggagggccggagacgctgcagacccgcgacccggagcagctcggaggcggtgaataatagctcttcaagtctgcaataaaaaatggcctccaacaaaactacattgcaaaaaatgggaaaaaaacagaatggaaagagtaaaaaagttgaagaggcagagcctgaagaatttgtcgtggaaaaagtactagatcgacgtgtagtgaatgggaaagtggaatatttcctgaagtggaagggatttacagatgctgacaatacttgggaacctgaagaaaatttagattgtccagaattgattgaagcgtttcttaactctcagaaagctggcaaagaaaaagatggtacaaaaagaaaatctttatctgacagtgaatctgatgacagcaaatcaaagaagaaaagagatgctgctgacaaaccaagaggatttgccagaggtcttgatcctgaaagaataattggtgccacagacagcagtggagaattgatgtttctcatgaaatggaaagattcagatgaggcagacttggtgctggcgaaagaggcaaatatgaagtgtcctcaaattgtaattgctttttatgaagagagactaacttggcattcttgtccagaagatgaagctcaataattgttcacattgttcttttatatatatttatatatatatataaaaattgggtcttagattttgatttactagtgtgacaaaataactacatcctaatgaaaatcaagtttgatatgtttgttttgaaagtagcgttggaagagttgttgggggttttttgcatccatagcactggttactttgaacaaataaataaaagctttctgtagttgcttcctttatcagaaaagaacatttgataccatggtatatcatttcctcttcattaaagaacagcttttctaaatgttgggggaaatgtccatagtcattactcagtcaaaacttgtgttctcatgagcctaaggaccattctagatttattacgtgttttttgtgtgtgtgtgtgtgtgtgtgtgtgtgtgtatccataaaatgcatatgtaaatttttttttgtttttaagcattcacccaaacaaaaaaatcacaggtaaacccatgtttctgagatgccattattccaagcaaaataagagataatcccttcaagttaaattgaaaattttcctgaaaccatacatttcaagtgaaataagtaattctagataggacaatttaaattggataattttaaagtgtctataattgcagtggtttatttgcaaaattcctaaaaggaaaaattttatcactgccatcacagcaggtttcctcatccagatgaggaaactagacaaatgctagtgtgttttaactagctaaacaaaactaagttaaatgaacatttaaaagtttccctagcgggccattccttagcaaaatgttggaatccctgttgctacattgactaaaaggtcatgatgaatggaatatgtaagacttggctcatagaaacctaatcagatggttagaggtgttggcagtttaggacctgctgtcataaatgtgtgaacaaccttttgtaacctaacctattgacctgcatgttttttctttaccccaattcattacatggaggctcaatcttgagtttgctttactggttcagcaaaagccaggaagaacaactttgtagtaatcaaaatgttatccaactgtatattgtttactttattgtaaatactggtgaacagtggttaataaatagttttatattccttta

SEQ ID NO: 2432 - DNA, 1384 bp, Homo sapiens
  source 1..1384: mol_type = genomic DNA
agtcggcggccggactgggaagatggacgcagctactctgacctacgacactctccggtttgctgagtttgaagattttcctgagacctcagagcccgtttggatactgggtagaaaatacagcattttcacagaaaaggacgagatcttgtctgatgtggcatctagactttggtttacatacaggaaaaactttccagccattggaggttgtcgggacatttcactctccagtaaatgtggcccttggcgttactgagtcctaagaggggggacaggccccacctcggacacaggctggggctgcatgctgcggtgtggacagatgatctttgcccaagccctggtgtgccggcacctaggccgagattggaggtggacacaaaggaagaggcagccagacagctacttcagcgtcctcaacgcattcatcgacaggaaggacagttactactccattcaccagatagcgcaaatgggagttggcgaaggcaagtccataggccagtggtacgggcccaacactgtcgcccaggtcctgaagaagcttgctgtcttcgatacgtggagctccttggcggtccacattgcaatggacaacactgttgtgatggaggaaatcagaaggttgtgcaggaccagcgttccctgtgcaggcgccactgcgtttcctgcagattccgaccggcactgcaacggattccctgccggagctgaggtcaccaacaggccgtcgccatggagacccctggtacttctcattcccctgcgcctggggctcacggacatcaacgaggcctacgtggagacgctgaagcactgcttcatgatgccccagtccctgggcgtcatcggagggaagcccaacagcgcccactacttcatcggctacgttggtgaggagctcatctacctggacccccacaccacgcagccagccgtggagcccactgatggctgcttcatcccggacgagagcttccactgccagcacccgccgtgccgcatgagcatcgcggagcttgacccgtccatcgctgtggggtttttctgtaagactgaagatgacttcaatgattggtgccagcaagtcaaaaagctgtctctgcttggaggtgccctgcccatgtttgagctggtggagctgcagccttcacatctggcctgccccgacgtcctgaacctgtccctagattcttctgatgtagagcgactggaaagattcttcgactcagaagatgaagactttgaaatcctgtccctttgaaaatcctggggtcgggggtggcacctgtgagagcctggggctcctggtgccgctgcgtttcatccatcccgcccgctcgcctgccgagggctgcgccccgtgctgcctccccccaga

SEQ ID NO: 2433 - DNA, 1306 bp, Homo sapiens
  source 1..1306: mol_type = genomic DNA
tgcctccgggtcgcggtcattttgagcccctgtctggatgacttcttgcggctgttctacccctccccctccccgcggtaccttgcacttttctccctccctgccccctctcgagtccaccctccgggccttctgcccctgatcgcttggttttccttgcagtcgcctgctgctgtcgtcgggaggaaagatgaatgggagggctgattttcgagagccgaatgcagaggttccaagaccaattccccacatagggcctgattacattccaacagaggaagaaaggagagtcttcgcagaatgcaatgatgaaagcttctggttcagatctgtgcctttggctgcaacaagtatgttgattactcaaggattaattagtaaaggaatactttcaagtcatcccaaatatggttccatccctaaacttatacttgcttgtatcatgggatactttgctggaaaactttcttatgtgaaaacttgccaagagaaattcaagaaacttgaaaattccccccttggagaagctttacgatcaggacaagcacgacgatcttcaccacctgggcactattatcaaaagtcaaaatatgactcaagtgtgagtggtcaatcatcttttgtgacatccccagcagcagacaacatagaaatgcttcctcattatgagccaattccattcagttcttctatgaatgaatctgctcccactggtattactgatcatattgtccaaggtagaaacttctcttgaaatgaatttcaacattttatggtccaactcaaagtaaacaagtatggagatacttgggatgagtgaaaaattacatcattggacatgaaggagtttcaacatccagcttcatctaggtggtcatgattacctgcatgctttgagctcagcagcagtcttcataaacacatttaaaacaagatcctgggtttttgtggtttgacttctatggtgttttaaaaaaacacagatttttagtgttaatattgtgtaaatgtactcaccttagggattcatttgaatgatggtattataccatgattgtatacagtttgtgaaattgttgcaagggcaaagataactcttaaaaaaccgtcgagattacaatgctctagaatcagcatataagaaaataaatgatatctgcatgttgaattggggtggatggggggagcaagcataatttttaagtgtgaagctttgcatcaagaaattattaaaaagctttttttctccagtattttctgtattatcttaatgtttatggcaaataaaatgtaaaggaacatgcaa

SEQ ID NO: 2434 - DNA, 1304 bp, Homo sapiens
  source 1..1304: mol_type = genomic DNA
aacagattttaactctgaaaagccatttccagtgtctatagactattgtgagcctggagaagtagcatttagttgggatagcttcactagagctgcctgccaaagacttccttccacaggatcttgtcgcaccagcaactgacaggagcttgggagctcgggagcttgggagagggcttatgtttttaataatgtagctgtcagttcgaagcctggaaatgttgaccctcaaagggcataaaatcttgttattttaatttgcatctgggagaatgtctgagcaaggagacctgaatcaggcaatagcagaggaaggagggactgagcaggagacggccactccagagaacggcattgttaaatcagaaagtctggatgaagaggagaaactggaactgcagaggcggctggaggctcagaatcaagaaagaagaaaatccaagtcaggagcaggaaaaggtaaactgactcgcagccttgctgtctgtgaggaatcttctgccagaccaggaggtgaaagtcttcaggatcagactctctgaaaactgcaaatggaaaggaattcaaaagaatttagattaaaagttaaataaaaagtaggcacagtagtgctgaattttcctcaaaggctctcttttgataaggctgaaccaaatataatcccaagtatcctctctccttccttgttggagatgtcttacctctcagctccccaaaatgcacttgcctataagaaacacaattgctggttcatatgaaacttaggaaatagtgaataaggtgcatttaactttggagaaatacttttatggctttggtggagatttctcaatactgcaaaagttgtccagaaatgaatctgagctgatggtgactttaagttaatattattaatatatcactgcatatttttacccttatttttgctccttacagcaagattagtaggttataaaaatttaaatttaaacaaaattatttcatgacaaaatgggaaacttcacatcatacttatttttgtttgcctttcaggcatcatattagcttttataaaaaatggtcttgctgctgaaattgtacttattttatcagaggctgggtgcagtcaagacaaaagtaaaatggtttacctgagcccaggggagggaaaattgattaagatatcattatttttgtttggtttggttttgcttttttcctcttactttaattgaaatactctgaattcccctcatggaaacagagagcattgagagcactttctttaaaaggaccaaaaataaattcctaatagattttgtcct

SEQ ID NO: 2435 - DNA, 2416 bp, Homo sapiens
  source 1..2416: mol_type = genomic DNA
agagaagaagcaggcagcttgagacaggtggagctggatcaagctgtgaacgtgatttgctggaagctggtcattagtgttgacgatgtgtcacactgtgtaagggaatcgcatggagatgggcattccgaactgttaatggggacatgggactccagttgtctctgatcacttgtgtggattttcctggcgtagaacgacagaagccgctagtaagtcgccaagacctacagcaggaattctgcaccaaagggcataaaatcttgttattttaatttgcatctgggagaatgtctgagcaaggagacctgaatcaggcaatagcagaggaaggagggactgagcaggagacggccactccagagaacggcattgttaaatcagaaagtctggatgaagaggagaaactggaactgcagaggcggctggaggctcagaatcaagaaagaagaaaatccaagtcaggagcaggaaaaggtaaactgactcgcagccttgctgtctgtgaggaatcttctgccagaccaggaggtgaaagtcttcaggatcagactctctgaaaactgcaaatggaaaggaattcaaaagaatttagattaaaagttaaataaaaagtaggcacagtagtgctgaattttcctcaaaggctctcttttgataaggctgaaccaaatataatcccaagtatcctctctccttccttgttggagatgtcttacctctcagctccccaaaatgcacttgcctataagaaacacaattgctggttcatatgaaacttaggaaatagtgaataaggtgcatttaactttggagaaatacttttatggctttggtggagatttctcaatactgcaaaagttgtccagaaatgaatctgagctgatggtgactttaagttaatattattaatatatcactgcatatttttacccttatttttgctccttacagcaagattagtaggttataaaaatttaaatttaaacaaaattatttcatgacaaaatgggaaacttcacatcatacttatttttgtttgcctttcaggcatcatattagcttttataaaaaatggtcttgctgctgaaattgtacttattttatcagaggctgggtgcagtcaagacaaaagtaaaatggtttacctgagcccaggggagggaaaattgattaagatatcattatttttgtttggtttggttttgcttttttcctcttactttaattgaaatactctgaattcccctcatggaaacagagagcattgagagcactttctttaaaaggaccaaaaataaattcctaatagattttgtcctaagagagtgtttttttttctagcatcattttctttacatgccactcatgtcataaggcatggacaggctatctttcagtggccattactatgtttcgtacacatgctttattttacttgggctctgagaaatgtgtggctttccttcagcattttatttgtgcttctctttttaatggagattgaaaagggagaataatgtgaatatcacggcttatattattaaatgttgattgatggcttgtaatgtactgcacacaatatatgttaactctgcagaatgacagaccctgggagaagtaatgccccagttgtcccccactcctaatgccaggcagagaaggacagcctttatagacttaatctgctttttgtcccatttgacaaggtaccaggaggaaattttttaagggatcaactgtatcacagtgcccactctggacctaagtctagtgtatccatacaattggtgcagagaaataaggtgtaaatggtgctttgttcctgctggttccaagctcagaaaccaagactagctttgtaggagagaatgagagcctgcaagcctctctttggattggctgaggagtggtgggagcagggggttgatagaaaacatccagacacacatataagcaagtggccgtgctacctttttagagaataaagaaacagacttttgagtttatatgcaatgccttcattaggtaccaccggcacttacaaaatgtgcggactgaatcccagagaacactggcagatgtatacagtatatggattgtatcgcttccccaatgtttgtaaattcacagtatttggaaaactgccttcattttccagtgtgggaaaaactcttgctacctgtattacttgatctcagacccatacctgatggttcagtctgtccttaagttaaaagaattttgcttttctaatgttatactatttacctgtcagtgtattactgcaacttgaatcactcttttactgttgttggatataaacttatcctgtaccaatgtatttattaacacttgtattttattattgagcatatcaataaaaatattaaaaaataacagattgttttttacc

SEQ ID NO: 2436 - DNA, 1994 bp, Homo sapiens
  source 1..1994: mol_type = genomic DNA
ggcttgctcgcgcgtgcgcaccagaagccagcagtggggttgcacacgcgcctcttcacgaggtggaaacaagatggaggattcggcctcggcctcgctgtcttctgcagccgctactggaacctccacctcgactccagcggccccgacagcacggaagcagctggataaagaacaggttagaaaggcagtggacgctctcttgacgcattgcaagtccaggaaaaacaattatgggttgcttttgaatgagaatgaaagtttatttttaatggtggtattatggaaaattccaagtaaagaactgagggtcagattgaccttgcctcatagtattcgatcagattcagaagatatctgtttatttacgaaggatgaacccaattcaactcctgaaaagacagaacagttttatagaaagcttttaaacaagcatggaattaaaaccgtttctcagattatctccctccaaactctaaagaaggaatataaatcctatgaagccaagctccgccttctgagcagttttgatttcttccttactgatgccagaattaggcggctcttaccctcactcattgggagacatttctatcaaagaaagaaagttccagtatctgtaaaccttctgtccaagaatttatcaagagagatcaatgactgtataggtggaacagtcttaaacatttctaaaagtggttcttgcagtgctatacgtattggtcacgttggaatgcaaattgagcacatcattgaaaacattgttgctgtcaccaaaggactttcagaaaaattgccagagaagtgggagagcgtgaaactcctgtttgtgaaaactgagaaatcggctgcacttcccatcttttcctcgtttgtcagcaattgggatgaagccaccaaaagatctttgcttaataagaagaaaaaagaggcaaggagaaaacgaagagaaagaaattttgaaaaacaaaaggagaggaagaagaagaggcagcaggctaggaagactgcatcagttcttagtaaagatgatgtggcacctgaaagtggtgatactacagtgaagaaacctgaatcaaagaaggaacagaccccagagcatgggaagaaaaaacgtggcagaggaaaagcccaagttaaagcaacaaatgaatccgaagacgaaatcccacagctggtaccaataggaaagaagactccagctaatgaaaaagtagagattcaaaaacatgccacaggaaagaagtctccagcaaagagtcctaatcccagcacacctcgtgggaagaaaagaaaggctttgccagcatctgagaccccaaaagctgcagagtctgagaccccagggaaaagcccagagaagaagccaaaaatcaaagaagaggcagtgaaggaaaaaagtccttcgctggggaaaaaagatgcgagacagactccaaaaaagccagaggccaagtttttcaccactcctagtaaatctgtgagaaaagcttcccacacccccaaaaaatggcccaaaaaacccaaagtaccccagtcgacctaaagtcagtgattcaactggaaggaaacctcaatgctgcctccagagctttttggaaatactcagatcctggccgcctttgtaaccttctctaaacgtcaggcctggacttaaaagattttttaaaacctccataagtagtccaggggcggtggctcacgcctgtaatcccagcactttgggaggccgaggcaggcggatcacaaggtcaacgagatcgagaccatcctggccaacatggtgaaaccctgtctgtaccaaaaatacaaaaattaattgggcatggtggtggacacctgtaatcccagctactagggaggctgaggcaggagaattgcttgaacctgggaggcggaggttgcagtgagccactgcactccagcctgatgacagagcaagactcagtctcaaaaataaataaaaataataaaacctccataagtaatcctga

SEQ ID NO: 2437 - DNA, 768 bp, Homo sapiens
  source 1..768: mol_type = genomic DNA
ggtgtttggtggagcccgcgatggccgaacctgcgtctgtcgcggctgaatctctcgcgggcagcagggcgcgcgctgcacgcacagtactaggtcaggtggtgctcccgggtgaggagctgctcctgccggaacaggaggacgcggaaggccctgggggtgcagtggagcgaccgttgagcctgaatgctagagcgtgctcgcgggtgcgcgttgtatgcggtccgggccttcggcgctgtggggaccgcctgctggtcaccaagtgcggccgcctccgtcacaaggagcccggcagtggcagcggcggcggtgtttactgggtggactctcagcagaagcggtatgttccagtaaaaggagaccatgtgattggcatagtgacagctaaatctggagatatattcaaagttgatgttggagggagtgagccagcttctttgtcttacttgtcatttgaaggtgcaactaaaagaaacagaccaaatgtgcaggctattagctccagattgtgaaatcatacaggaagtgggaaaactctatccactggagatagtatttggaatgaatggaagaatatgggttaaggcaaaaaccatccagcagactttaattttggcaaacattttagaagcttgtgaacacatgacgtcagatcaaagaaaacagatcttctccagattggcagaaagttgatataggtggacttttttacaggtcagttgaggcaaaaaactatgggttttttcaggtgaacctcccccattt

SEQ ID NO: 2438 - DNA, 3012 bp, Homo sapiens
  source 1..3012: mol_type = genomic DNA
gactcctgtgcggaacgtgagtgactgagcggcaaagcccgaatggtctctagcgaccggcccgtgtcactggaggacgaggtctcccatagtatgaaggagatgattggaggctgttgcgtttgctcagacgagagaggctgggccgagaacccgctggtttattgcgacgggcacggctgcagcgtcgcggtgcatcaagcttgctatggcattgttcaagtacccactggaccgtggttttgcaggaaatgtgaatctcaggagagagcagccagagtgagatgtgaactttgtccccataaggatggagctttaaaaagaacagataatgggggttgggcccatgtggtttgtgccctgtatattccagaggtacaatttgccaatgtttccacaatggaaccaattgttttacagtctgttccgcatgatcgttataataagacttgctacatttgtgatgaacaaggaagagaaagcaaagcagccactggtgcttgcatgacatgtaataaacatggatgtcgacaggctttccatgtaacatgcgctcagtttgccggactgctttgtgaagaagaaggtaatggtgccgataatgtccaatactgtggctactgtaaataccattttagtaagctgaaaaagagcaaacggggatctaataggtcatatgatcaaagtttaagtgattcttcctctcactctcaggataaacatcatgagaaagagaaaaaaaaatataaagagaaggacaaacacaaacagaaacacaagaagcagccagaaccatcacctgcattggttccatccttgactgttactacagaaaaaacttatacaagcactagcaacaactctatatctggatcattgaagcgcttggaagatactactgcacgatttacaaatgcaaatttccaggaagtctctgcacacacctctagtggaaaagatgtttcagagactagagggtcagagggcaaagggaagaaatcttcagctcacagctcaggtcaaaggggaagaaagcctggtggtggaagaaatccaggaacaactgtgtcagcagctagcccttttcctcaaggcagtttttcaggaactccaggcagtgtaaagtcatcttctggaagttcagtgcagtctccccaggatttcctgagctttacagactcagatctgcgtaatgacagttactctcactcccaacagtcatcagcaaccaaagatgtacataaaggagagtctggaagccaggaagggggggtaaatagttttagtaccttaattggcctcccttcaacctcagctgttacttcacagcctaaaagctttgaaaattcacctggagatttgggtaattccagccttcctacagcaggatataagcgggctcaaacttctggcatagaagaagaaactgtaaaggaaaagaaaaggaaaggaaataaacaaagtaagcatgggcctggcagacccaaaggaaacaaaaatcaagagaatgtttctcatctctcagtttcttctgcttcaccaacatcatctgtagcatcagctgcaggaagcataacaagctctagtctgcagaaatctcctacattgctcaggaatggaagtttacagagcctcagtgttggctcatctccagttggttcagaaatttccatgcagtatcggcatgatggagcttgcccaacaactagtatttataacagcaatgatgtagcagtatcgtttccaaatgtagtatctggctcgggatctagtactcctgtctccagctctcacttacctcagcagtcttctgggcatttgcaacaagtaggagcgctctctccctcagctgtgtcatctgcagcccctgctgttgctacaactcaggcaaatactctatctggatcttctctcagtcaggcaccatctcatatgtatggcaatagatcaaattcatcaatggcagctcttatagctcagtctgaaaacaatcaaacagatcaagatcttggagacaatagccgcaacctagttggcagaggaagctcaccccgaggaagtctctcgccacgatcccctgtaagcagcttacagattcgctatgatcaaccaggcaacagcagtttggaaaatctgcctccagtagcagccagcatagaacagcttttggagaggcagtggagtgaaggacagcaatttttactagaacagggtactcctagtgacattttaggaatgctgaagtcattacaccaacttcaagttgaaaaccgaagattagaggaacaaattaaaaacttgactgccaaaaaggaacggcttcagttattgaatgcacagctttcagtgccttttccaacaataacagcaaatcctagtccgtctcatcaaatacacacattttcagcacagactgctcctactactgattccttgaacagcagtaagagccctcatataggaaacagctttttacctgataattctcttcctgtattaaatcaggacttaacctccagtggacaaagtaccagcagctcatcagctctttctaccccacctcctgctgggcagagtccggctcaacaaggctcaggagtgagtggagttcagcaggtcaatggcgtgacagtgggggcactagctagtggaatgcagcctgtaacttccaccattcctgccgtgtctgcagtgggtggaataattggagctttgccaggtaaccaactggcaattaatggcattgtaggagctttaaatggggttatgcagactcctgtcacaatgtcccagaaccctacccctctcacccacacaaccgtaccacctaatgcaacacatccaatgccagctacactgactaacagtgcctcaggactaggattactttctgaccagcaacgacaaatacttattcatcaacagcagtttcagcagttgttaaattctcaacagctcacaccaaacatggttaaggaattttcagcacaaattattgcttggagaccatga

SEQ ID NO: 2439 - DNA, 3318 bp, Homo sapiens
  source 1..3318: mol_type = genomic DNA
gggagattacggggcggggacgagctgtcgcgctggttgctcgtgcaggagcgggacccggaacagaccgccgtgagagaggaggggtgccggccgggattcgcggcccggagctcgggaccggttgcttcattccagcctcgcagtcacctctgtgccctgctggttgtcttcccagcgctgctgtagttgccttccatggatctataggagagcaagtcctccaggagaagaagtcctcaccagtgaacggagacctctctgaactaaggataccatggccacgtcagccccactacggagcctggaagaggaggtgacctgctccatctgtcttgattacctgcgggaccctgtgaccattgactgtggccacgtcttctgccgcagctgcaccacagacgtccgccccatctcagggagccgccccgtctgcccactctgcaagaagccttttaagaaggagaacatccgacccgtgtggcaactggccagcctggtggagaacattgagcggctgaaggtggacaagggcaggcagccgggagaggtgacccgggagcagcaggatgcaaagttgtgcgagcgacaccgagagaagctgcactactactgtgaggacgacgggaagctgctgtgcgtgatgtgccgggagtcccgggagcacaggccccacacggccgtcctcatggagaaggccgcccagccccacagggaaaaaatcctgaaccacctgagtaccctaaggagggacagagacaaaattcagggcttccaggcaaagggagaagctgatatcctggccgcgctgaagaagctccaggaccagaggcagtacattgtggctgagtttgagcagggtcatcagttcctgagggagcgggaggaacacctgctggaacagctggcgaagctggagcaggagctcacggagggcagggagaagttcaagagccggggcgtcggggagcttgcccggctggccctggtcatctccgaactggagggcaaggcgcagcagccagctgcagagctcatgcaggacacgagagacttcctaaacaggtatccacggaagaagttctgggttgggaaacccattgctcgagtggttaaaaaaaagaccggagaattctcagataaactcctctctctgcaacgaggcctgagggaattccaggggaagctgctgagagacttggaatataagacagtgagcgtcaccctggacccacagtcggccagtgggtacctgcagctgtcagaggactggaagtgcgtgacctacaccagcctgtacaagagtgcctacctgcacccccagcagtttgactgtgagcctggggtgctaggcagcaagggcttcacctggggcaaggtctactgggaagtggaagtggagagggagggctggtctgaggatgaagaagagggggatgaggaggaagagggagaagaggaggaggaggaagaggaggccggctatggggatggatatgacgactgggaaacggacgaagatgaggaatcgttgggcgatgaagaggaagaagaggaggaggaagaggaggaagttctggaaagctgcatggtgggggtggctagagactctgtgaagaggaagggagacctctccctgcggccagaggatggcgtgtgggcgctgcgcctctcctcctccggcatctgggccaacaccagccccgaggctgagcttttcccagcactgcggccccggagagtgggcatcgccctggattatgaagggggcaccgtgactttcaccaacgcagagtcacaggaactcatctacaccttcactgccaccttcacccggcgcctggtccccttcctgtggctcaagtggccaggaacacgcctcctgctaagaccctgagccctgacatctgcccccagccccaaccctcagatgcttcacttctttggaattccaggactctcaatggggggacgggatgcctggcctaagcacctggagcaggggaccccatatccactggtagccacctccccattgctgtggccccctgaaatctcactcagtgctgttgctccatctactgccctaatggggctcttttcccacctcctgctggtttcccgagggaacttctgaccctggagtccatgagggctcctttcctttttgaccacgaccttggccccagctctgcactctctggaataagggcccgatgcagcattttcttgcccagtgtggcaagacctcagaaaaaccagtcaattacgcctaagatcattttgctgtccttaaaccccccaggttccttcttgcacaaatccactctgctgcccaccttccctggcattttaaacagacctaccccaccccaactcagagttaagcatacatggcaatgctgaaaataaacaaaatccactgaggcttcccaggccatttaaagcctggagtaccagcgcatatcatctcatggggtccagagtggagtccaggcttctctgaaaccagggctgagcatatttccatagccaaggaggtgggactccctggagctatctgtggtcttagggaaggatccagacatacacggctttggggtacaagctgtgatcactgatcaataaattatctctagattggtccttgtgaggggagttttaagaatccagaacatcttgctcttgatcagcacatccaaaaacaccaagacaaacatccagtggagcagaacctctcctgcctcgggagttctgaccgggttccccagcagggtgttaagcctctgtctctggccctaccagcatccaggttccactttcctaggagagagtggagatgggaagacagggaaaggaaggcagcaggaggccacaagcccaccaggtcttcatgtcaagagagggagtaacatgtcttctcattgcccacggacccaacctctgtccaggtgcccctcatcatcacagtttaacacaagctcccctgctccagccaaattgatctcccagtcttgtccttacccattccaagtgctctgccagcccctgttcatccaagttttaagtcctccaccctgttctaagagactgttccaacggctctgggcctcagtggtcacttgaccaccattgtctcagagctgcccactttgtgtgtgtcacatgctgcctgagtcacatgtacatcttatttctgcctctagttttgtaagctcctggagggcggataacatcttatactactcttgtattctcatggcacctagtgcagtgctgggcacagagtaggtgctcaataaagacttgttgaatgaa

SEQ ID NO: 2440 - DNA, 3026 bp, Homo sapiens
  source 1..3026: mol_type = genomic DNA
ggtgccttaggcgctggagaaaaacttcacccgcgcccacaggccccctttccgcaggctgcgctggcggttcaggtttgcaggccggaagtgaaatgttcttttttgatttttaaaaaggaagcctccggccctatggttttctggggttggagtggatgtgtgtgctgggggaggcggagacgtcccgctccaggcagggccttgggtcttaataggtggggaaatctctgccaaataggaggcctctcggagcctcagtttccccatctgcagactgggctctgacttcttctggcatgagagggtgtgtgagagtaaaaggaggcagctagccccgtgccgggagacacgtcagccatgtcatctgagcctcccccaccaccacagccccccacccatcaagcttcagtcgggctgctggacacccctcggagccgtgagcgctcaccatcccctctgcggggcaacgtggtcccaagcccactgcccactcgccggacgaggaccttctcggcgacggtgcgggcttcacagggccccgtctacaaaggagtctgcaaatgcttctgccggtccaagggccatggcttcattactccagctgatggcggccccgacatcttcctgcacatctctgatgtggaaggggagtatgtcccagtggaaggcgacgaggtcacctataaaatgtgctccatcccacccaagaatgagaagctgcaggccgtggaggtcgtcatcactcacctggcaccaggcaccaagcatgagacctggtctggacatgtcatcagctcctaggagatggtggaagcaccccttgtcctgtgcttgtgggagactttgcagggaggaggcagcagacactggagatgacattcttccacacgagacggggcttcagccgggcatggtccctctcaagtatctcctggaggaaggggtatggggggcaggtgtggggtgtggggtgttcccggccatcagcacagcctatgaccattgcaacaacctctcaccatctgaagagcattaaaagcatttaaaaaggagaggtgcccactggtggctgagtggaggttccaaccccatcccagggagtggatcaagggtggtatttctccagctgctcagacacatgggctcaacccacagaatccctcttcctcctggagctggaggccccagattcccagatctggccccctggcagcctgacagggaccttgcgtgacttctccaaggcaaatttccacctaagtgccccttgcgcctctcctggggcctgggcaaagcagttttctaattcttggcttggttggttctaggggagctggcttgaagtgggtggggaaaggcgggggtggcggtctttggattggacggatgttgccttttggtgcctttgcagtgggaggcggcatagctgcctgtctggggaagacagttctcccagcactcccacccctgggcacagcaggctggtactgggaggctgaacccctcttagagcctgaccttttcatctgccttctggttgtgtgaccatcactcaacagccatttcacagcccctgtaattatggcggcggggggctggggtggtggtggtgggaagggcttgtggagaggacacagtctttgtttaaaaactttgtcccgatccatccagaaaagagtaggtagcttgcatcctgacagcctggcaaagtcaagaaagttgaaggagaaacatacctttggagagggggttttctttaaaactagtgttaagaaatgcttagggattttttttttcttatttttcataactaaagctttcacccagagccggctctgtttgcactttgctgccgacattgcaaactttttggcagggtgggagactgagtctcattctgtcacccaggctggagtgcagtggcccgatctcagcttactgcaacctctgccctccagggttctggcaattccgcctcagtctcctgagtagctgggattacaggcatgcgccaccacacccggttaatttttgtatttttagtagagaccaggtttcatcatgttgggcaggatggtcttgaacccctgacctcagatgatctgcccatctcggcctctcaaagtgctgggattacaagtgtgagccatcgcgcccggcctgcaaacttttttgtaggtatttctggtaaacaaatccttaggttatctttgctgtggttgtggtttggctttagtcatgatttcaaagtagaaatagctaggcattattttttgaaatatatgacctatatgtagtcaagaatccactgaacagaggcaagcaaaccttttggaaactggcttttgggcagacagtaaacgtccagtttgatgctggaagcatgaacagcttcatcaggtaggtactcctcaactctgatgagtttgtcctttcagcctaagggggtggaagggagttgtttgagaatagcaaatacgcatgttgattgcgagtgtgtggagacaaaggcagttcccaccacagttaggtcctggccattgtttcctcgcctgcgatgctccttgtacatcctcaccctcctctcccgcctctgccttctgctgggtcaaaggtggccttttctctccagccttgaattgttccctgttggcttcccaagggcccatctgctggtacagtccacacttccacagccaagacccgagagggctttcactgccccaagcctctctcctgtgaccctgggattctgtcttggcagaatcctttgtcagcggctcttactctgtccttcctgtttggccacagctctttcaatcaatgggtattctagaaccgcaggatgtcagagctggaagggacgcgataccggtttacacaaggggaaactcctcgaggctctgggagggacggagggttttggtgacagagcgagagctaaaattgaggattcctgaatccagatcttgcctcccatcagccatctttctcccaataaatttttgttttgtgcaaggcta

SEQ ID NO: 2441 - DNA, 1380 bp, Homo sapiens
  source 1..1380: mol_type = genomic DNA
ggccctcgcggggggcttgtgggtcctcctccccctcccactgacaactgccccaactgctcttcccgccccggtcacagtgaaaatgtagacggggtcgttgtccactatgttaggtcttaatggtgggaggacgcccgagtgctcggcccgtttcaccccgaggaggaaggacactgggtcatgacgccatcagagggcgccagagcagggaccggacgcgagttggagatgttggactcgctgttggccttgggcggcctggtgctgcttcgggattccgtggagtgggaggggcgcagtctcttgaaggcgcttgtcaagaaatctgcactgtgtggggagcaagtgcatatcctgggctgtgaagtgagcgaggaagagtttcgtgaaggttttgactctgatatcaacaatcggctggtttaccatgacttcttcagagaccctctcaactggtcaaaaactgaggaggcctttcctggggggccgctgggagccttgagagccatgtgcaagaggacagatcctgttcctgtcaccattgctctcgattcactcagctggctgctacttcgccttccctgcaccacactctgccaggtcctgcatgctgtgagccatcaggactcttgtcctggtgacagctcctcagtggggaaagtgagtgtgctgggcttgctacatgaagagcttcatggaccaggccctgtgggagctctcagcagccttgctcagactgaggtgaccctgggcggtaccatgggccaggcctcggcccacatcctgtgtcggaggccccgacagcgcccaactgaccagactcagtggttctccatccttccggacttcagcctggatctccaagaggggccctctgtagagtcccagccctactccgatcctcatatacccccggtggatcccacaactcatttgacctttaaccttcacctgtccaagaaagagagagaagccagagatagcctgatcctgcccttccagttcagttctgaaaaacagcaggctctcctgcggcctaggccagggcaggctaccagccacatcttctatgagccagatgcttatgatgacctggaccaagaagacccagatgacgacctggatatttgactggccagatttgattagattgtaattggagggggcgcgggaagactttgggcccagaaccatctttctattgtttgtgttagccttaccctgtccctgccccaccttggttccccttgtctatggagccccgccttgtgagccaggaagcagcgtctcatcaggacagaaggtaggatgaagacatggggtaatgtgagagagtagaacacccccgtacctaataaaaatctttatttttttatt

SEQ ID NO: 2442 - DNA, 1468 bp, Homo sapiens
  source 1..1468: mol_type = genomic DNA
ggccctcgcggggggcttgtgggtcctcctccccctcccactgacaactgccccaactgctcttcccgccccggtcacagtgaaaatgtagacggggtcgttgtccgtacgactgtgcgccagggctcggggaggggcgccctccgcgtgagcgcccccctgggaatattgaacataatcacctctcattccagactatgttaggtcttaatggtgggaggacgcccgagtgctcggcccgtttcaccccgaggaggaaggacactgggtcatgacgccatcagagggcgccagagcagggaccggacgcgagttggagatgttggactcgctgttggccttgggcggcctggtgctgcttcgggattccgtggagtgggaggggcgcagtctcttgaaggcgcttgtcaagaaatctgcactgtgtggggagcaagtgcatatcctgggctgtgaagtgagcgaggaagagtttcgtgaaggttttgactctgatatcaacaatcggctggtttaccatgacttcttcagagaccctctcaactggtcaaaaactgaggaggcctttcctggggggccgctgggagccttgagagccatgtgcaagaggacagatcctgttcctgtcaccattgctctcgattcactcagctggctgctacttcgccttccctgcaccacactctgccaggtcctgcatgctgtgagccatcaggactcttgtcctggtgacagctcctcagtggggaaagtgagtgtgctgggcttgctacatgaagagcttcatggaccaggccctgtgggagctctcagcagccttgctcagactgaggtgaccctgggcggtaccatgggccaggcctcggcccacatcctgtgtcggaggccccgacagcgcccaactgaccagactcagtggttctccatccttccggacttcagcctggatctccaagaggggccctctgtagagtcccagccctactccgatcctcatatacccccggtggatcccacaactcatttgacctttaaccttcacctgtccaagaaagagagagaagccagagatagcctgatcctgcccttccagttcagttctgaaaaacagcaggctctcctgcggcctaggccagggcaggctaccagccacatcttctatgagccagatgcttatgatgacctggaccaagaagacccagatgacgacctggatatttgactggccagatttgattagattgtaattggagggggcgcgggaagactttgggcccagaaccatctttctattgtttgtgttagccttaccctgtccctgccccaccttggttccccttgtctatggagccccgccttgtgagccaggaagcagcgtctcatcaggacagaaggtaggatgaagacatggggtaatgtgagagagtagaacacccccgtacctaataaaaatctttatttttttatt

SEQ ID NO: 2443 - DNA, 1734 bp, Homo sapiens
  source 1..1734: mol_type = genomic DNA
cgcgcagaagtccggggctggcaagcgcttcctgcgcagcgcctaggcgacctggagtttgtgacgctgtgatggtctagaggctggagattcaagatctgggtgccatcattttctggttctgttgatgaccctcttccaggttacatacagcttacatcttgcatcctcaagcgtttttcttataaggctaaaaattcacaaagcatatatcaatgaatcaggaggatctagatccggatagtactacagatgtgggagatgttacaaatactgaagaagaacttattagagaatgtgaagaaatgtggaaagatatggaagaatgtcagaataaattatcacttattggaactgaaacactcaccgattcaaatgctcagctatcattgttaattatgcaagtaaaatgtttaaccgctgaactcagtcaatggcagaaaaaaacacctgaaacaattcccttgactgaagacgttctcataacattaggaaaagaagagttccaaaagctgagacaagatcttgaaatggtactgtccactaaggagtcaaagaatgaaaagttaaaggaagacttagaaagggaacaacggtggttggatgaacagcaacagataatggaatctcttaatgtactacacagtgaattgaaaaataaggttgaaacattttctgaatcaagaatctttaatgaactgaaaactaaaatgcttaatataaaagaatataaggagaaactcttgagtaccttgggcgagtttctagaagaccattttcctctgcctgatagaagtgttaaaaagaaaaagaaaaacattcaagaatcatctgtaaacctgataacactgcatgaaatgttagagattcttataaatagattatttgatgttccacatgatccatatgtcaaaattagtgattccttttggccaccttatgttgagctgctgctgcgtaatggaattgccttgagacatccagaagatccaacccgaataagattagaagctttccatcagtaaaaggatgttttcttttttcacacagtaaaaattcttatcattcaaggatattggaaccacaggactatttggataaaaaacattatttgcaaattaatgcgcataggccatcttacttttattgcaaaatggcatgtgctgccatctattattcatttttaaatggtcatttcttattcagtgagtgctttagtgttttaaactatatggataagaatgcaggtagataatattctaggcataaaacatttaatgtaccttacctcatgcaatattctttggattctttgttgatttatgatattgctaatataatattttcttaaaatatataacaatatcttttatgcattttgagttccagctggtgcttctttatatttagaaattataatgggaaggtcatttaatttacagatggttttaaaattgaggtaatatctgaggtggcataatttaaaaatatttagcaaatttgtttcatatatactgtcttatttctagatttgtttaaaattggaatatgaaaaactaatggataaagctagcataaaattgatattttagtttgtattattaatatatcatgttaccttatatattaatctactcttgattctgctaattattaccaacaaaattgtattcatgacattttattaatcctctgtgaattttctgtaaataaaattatttctgaaaatctcta

SEQ ID NO: 2444 - DNA, 3824 bp, Homo sapiens
  source 1..3824: mol_type = genomic DNA
gagcacagagaagctcccagctttgaaggtcttgcggtggtgcgtggcgggcaggaacccacaattccaaatacaaacggtcggcgcgagaagcgcttctgggcgcaggcgcctggctgtagcgactggttgcgggaggctggactctggtgactgtaagcatcaagtgtacctgatttgtgaacctatcttgcttcagttggtttcctcctaaatattaggcagatgggattggctggtctgtgctctgctaggtgaaaaattagacgatttcaagaattggagctgaatctgatgttaagtaatggcaacaggtgacttaaaaagaagcttacggaacctagaacaggtgctccgcttgctaaattatcctgaagaggtggactgtgtaggtttgataaagggagacccagcagcatctttgcccatcatcagctattcttttacctcatactcaccttatgtaacagaacttataatggaatccaatgtagagctcatagcaaaaaatgacttgcgctttatagatgctgtctataagcttcttcgtgatcaatttaattataaaccaattttgacaaaaaagcagtttatccaatgtgggtttgcagaatggaaaatccaaattgtttgtgatattttgaattgtgtgatgaaaaagcacaaggaattaagcagtcttcagaagattccatcacaacaaagaaagaaaatcagttctggtaagtcagaacctcctttgggcaatgagaaaatatctgcagaggctgttggcgttgatatcagtggcaggtttatgacctcaggaaagaagaaagctgtggtgattcgtcacttgtataatgaagataatgttgacatttctgaggatacattaagtccaataacagatgttaatgaagcagttgatgtgtctgacttaaatgctactgaaataaagatgcctgaagtaaaggttcctgaaatcaaggctgagcaacaggatgtaaatgttaatcctgagattactgcactacaaactatgcttgctgaatgccaagaaaatcttaagaaactgacttcgatagagaaaaggttagactgtttggaacaaaaaatgaaaggaaaagtgatggtagatgaaaacacctggactaatcttcttagtcgtgtcactcttcttgaaacagaaatgcttttgtctaaaaagaatgatgaatttatagagtttaatgaagttagtgaagactacgcttcttgtagtgacatggaccttctgaatcctcacagaaaaagcgaagtagagaggccagcaagtattcctctgtcctctggctatagtacagcatcatcagattcaactcccagagcctctactgttaattactgtggtttgaatgagatttcagaggaaacaacaatccagaaaatggaaaggatgaaaaaaatgtttgaagaaactgcagagttactgaaatgtccaaatcactacttgtaggattttctacatgaacttttttctaggactttggttactatacatattgtatattttaagaattctttatacaattttaatatactgcaatactgcagtttttgacaatttggattccatttggtatatgaatttttgcattcattattgaataactcttttaatatttttgagcaatgattatactgctttaccttgtgtcactttttttttttttaggaaaaactcatgttccagtatatttctcttacagagtgaagtcattacagcactgtatttctgtgttgacatttgttggcagtgtgctaagtaatgttttttaaagcacaggcttgaggactatggtttacatcctgttggaaacattccaaatgggacttgtgtattatacccaggaggctctcatatataccatcttggcatctgtactgatgaataagttataatgaacagttaaaaatgctcattgaaaattaaataaaacaaaaaggcagttatttcatgcttggtcaaaaacatcaatacctttccaattaacactgagaaattaaggttaagattctccttttgtactgggaaacaggctggaggactatggtcctcaagtttagaccaagaggactatggtctcaaggttcaccatgagaaatgtgttgaacattttagtatgctctattgtataatttttttggagggggggatggagtttcgctgttgttgcccaggctggagtgcaatagcacgatcttggctcaccgcaacctctgcctaccgggttcaagtgattcttgtgcctcagcctcctgagtagctgggattataggcatgcaccaccatgcccagctaattttgtatttttattagagacagggtttctccgtgttggtcaggctggtctcaaactcctgacctcaggtgatctgcctgtcttggcctccggcgtaacactttttaagaccagtgtaacagaaagagaatgtagccattctagccaccgttaaaagatacacagtgaggtgttgtgttttgtttttttaatgatgaaaagttacacattttttggagagaaaagtcttagctgaaggtaaatcaatggaaaaatgaaatttatttttaatattactactatatgaattatctttttttaaacttgtagataaaagtgttccagtaatcagaaaatcctcaagaaaattgacttcattatttggaaggaaaattagtattttttttaatattatatggaccatctgattatattttatttattcatctatttatgggtctcactctattgcccaggctggagtgcactggcgtgatctcggctcactgcaccttctgcctaccgagttcaagcgattcttgtgcttcagcctcctgagtagctgggactataggcctgtaccgtcatgcctggctaatttttgtatttttgtagagacagggtttcaccatgttgcccagtctgttctcaaactcgtgagctaaagctactcgcccacctggatgtcccaaagtgctagattccatggaattttcctgcatggagtgctacatcctcttgttccagtctcagctggctgctccgtgggcatacttcatacctttcatcacagagctttgcttggcctctctcctgtgtgtaatctctgtttcttggatcctgtgcttaccttttcctgctgtactctgatgtttcagtgaagctcatccacgaagtccagaattctgcctggaaaccagcttcctcctcagctccagctcttttaatgggcatatcaaaactgatgactttttccttcctgctacatgggtaacacttagttgtttgtctaatttctattttccagaaatttctcaaaatgtctgctgatagcccctcactcatatttttcatgtgggtttatagctttcatatttctttattattgtaaatgggggctgtggaaggtgagaaaacacatgctttcttaaaacagaagctctctccttcattaatttaaatatttttatcggctctagaaaatgcataaggttagtacaagatcagtagagagaaagtcaaagattacagaagtgctgaagcagaccattcttcctttcttcccaatgtctattaagatcacacataggtaaactgttacaaatccagaatggtgaaagagtccaacaatggctgagggaagtagaggttaagatatagctcaacagtgaaagtagcagggaaagagctgggcaaggccaagaccatcttttgtaccgttggtacagtaggctaaaggtacggtgttccatattaaatacagcaatatgaagaaaaataaattaagtcccttatacctaa

SEQ ID NO: 2445 - DNA, 1269 bp, Homo sapiens
  source 1..1269: mol_type = genomic DNA
gcaggcggcaggaggcgggtgggtcaaggtaactctgggctacagagtccttgctgggggttcggggagcgcttggaccccggcttctgggacgcgtcagaatattatccagcaatgcaaatgaacaaactataactacacacagctgcatggataaatgtcagaaacatgacgttgagtgtgagaagccagatgcaaacgaggactcactgtgcaattctgtgcatgtacagtggccaggagaagggagcactggctttgctttcatcaggccaaagatgcctttctttgggaatacgttcagtccgaagaagacacctcctcggaagtcggcatctctctccaacctgcattctttggatcgatcaacccgggaggtggagctgggcttggaatacggatccccgactatgaacctggcagggcaaagcctgaagtttgaaaatggccagtggatagcagagacaggggttagtggcggtgtggaccggagggaggttcagcgccttcgcaggcggaaccagcagttggaggaagagaacaatctcttgcggctgaaagtggacatcttattagacatgctttcagagtccactgctgaatcccacttaatggagaaggaactggatgaactgaggatcagccggaagagaaaatgaagaccccagagacatttattggggagtaggatgtggctgagtgctttttttttggccagactagcggattcagtcctggaagagagtatcatataatgagacccacaggcactggcacccttgggttggcaatagaaggtgacatggaatggagaaaaccaagattccagatggggatagtaactagaaggtgcttcagatgcactgcctgcgggtgccagtctgaaaaccagaccgcacagaggcctggggctgctgatgagctttttggtgctctccacacacaagctcgcaaacacacatgtcccagaatagctctgttgggttgtgttgggagaagcggctggagttcattctctcacccccttatgttggtgtttggcgtgtgacagcagttctacagagctctgtgttggggtcatggatgagcggctctcttggctcttaaaggcaggcctctctcttcttgcctttaaagaatcctccttcctcacacctggcctcctctggcttcagcttctcagcagcaagcaccagccttccacaacaacactatatttttatgctactttcctgtttgcactactacttttttattaaacgatgttaa

SEQ ID NO: 2446 - DNA, 1552 bp, Homo sapiens
  source 1..1552: mol_type = genomic DNA
gctcaggccccgccctcagacgagcaccgcccgccggctcctcccgcggctcgaatcgccgtctctctcctccccgccccgccgagttctagaattcgccgcgcagctgcttcagcccctcagccccagccggaccctcgggtcctcatccaccctcgcaggcgcaggccgtggctaccccgaagtcaactgtggaggatccttcctggcttccttcagctccatcctgcccttggatctaggtcacccgcttggacccaactatctgaggcccgaatgccccgcagctcccgctgctccctcgcgttctgctgacccccctccgagtcaggacatcccctttagaccccactttaggccctttcagcccaactccaactagccccatctgccgcttccgcacgagacagagtttcactcttgttgcacagactggagtgcaatggcgcgatctcaactcaccgcaacctctgcctccctggttcaagcaattctcctgcctcagcctcctgagtagctgggattacagcaccaaaaaggagactaactacccagccccgtccagtcatgcaggtgcaggatgatggagtcaacctcatcccctttgccaagtgttccagggtggtcagccgatctccacccccaaggttgccttcccagagcctcagacccatgccccagcgttatggagatgtcttctggaagaaccttaatcaaaggcccacccccacttggctggaggagcagcacattccacccatgctgagagccactggttgctcccagcttggtctgtatcctcctgagcagctcccaccccctgaaatgctttggagaagaaagaagaggaggccatgtttggaaggaatgcagcagcagggccttgggggagtccccgcccgggtgagggctgtcacttaccacctggaggacctaagaaggcgtcagagcatcatcaacgaactgaagaaggcccagtggggcagctctggggctgcatctgagccagtggtgcttggcgaagagggctgtggattccccagcaccaatgaataccctgatctggaagaggagagagcaacctatccacaggaagaggaccgttttctcactcctggcagggcccagctgctttggtctccctggagccccctggatcaggaggaggcttgtgcctccaggcagctgcactctctggcctcgttcagcactgtcacagccagaaggaacccccttcacaatccctgggggatggagttggcagcgtctgaagagtaaggagaaaccaccgatgccgagaggctagtggtgccccagggacccaagactagttccgtcactagagtcaccctcattgctgacatgaaggcgtttccccttccttcgtctctccaactgcctttcccatcctctgaactaggcattaacagcccccgtgggctcccatctcaacccaccgctctcacaggagcaccccaagtcctgttttcctccaggccccgctcctggccttgtattctctctgctctgttattaaaaagcaagcaagtgg

SEQ ID NO: 2447 - DNA, 2677 bp, Homo sapiens
  source 1..2677: mol_type = genomic DNA
tgctcctgcaccggtctgcatctcccagcagaaggcgcagccatgaatccgttattcggccccaacctcttcctcctgcagcaggagcagcagggcctggccgggccactgggggactcactgggaggcgaccacttcgccgggggaggagacttgcccccggcgcctctctcgccggccggccctgctgcctactcgccgcccgggccgggcccggccccgcctgccgccatggccctccgcaatgacctgggctccaacatcaacgtgctcaagaccctgaacctccggttccgctgcttcctggccaaggtgcatgagctggagcgccggaaccggctgttggagaagcaactgcagcaagcgctggaggagggtaagcagggccggcggggcctgggtcgtcgcgaccaggcagtgcagaccggcttcgtcagccccatccggcccctggggctgcagctgggcgcccggccggccgctgtctgcagcccttcggcgcgcgtgctgggctcgcccgcgcgctccccggccggccccctcgcgccctccgcggccagcctctcgtcgtcctccacctccacctccaccacctattcctcgtcggcccgcttcatgcccggcaccatctggtcgttctcgcacgcccgccggctcgggccgggactggagcccactctggtgcaagggcctggcttgtcgtgggtgcacccggatggggtgggcgtccagatcgacaccatcacgcccgagatccgcgctctctacaacgtgctggccaaagtgaagcgggagcgggacgagtacaagcggaggtgggaagaggagtacacggtgcggatccagctgcaagaccgtgtaaatgagctccaggaggaagcccaggaggctgatgcctgccaggaggagctggcactgaaggtggaacagttgaaggctgagctggtggtcttcaaggggctcatgagtaacaacctgtcggagctggacaccaagatccaggagaaagccatgaaggtggatatggacatctgccgccgcatcgacatcaccgccaagctctgcgatgtggctcagcagcgcaactgcgaggacatgatccagatgttccaggtcccatccatgggggggcggaagcgggagcgcaaggctgccgtcgaggaggacacctccctgtcggagagtgaggggccccgccagcccgatggggatgaggaggagagcacagccctcagcatcaacgaggagatgcagcgcatgctcaaccagctgagggagtatgattttgaggacgactgtgacagcctgacttgggaggagactgaggagaccctgctgctttgggaggatttctcaggctatgccatggcagctgcagaggcccagggagagcaggaagatagcctggagaaggtgattaaagatacggagtccctgttcaaaacccgggagaaggagtatcaggagaccattgaccagatagagctggagttggccacggccaagaacgacatgaaccggcacctgcacgagtacatggagatgtgcagcatgaagcgcggcctggacgtgcagatggagacctgccgccggctcatcacccagtctggagaccgaaagtctcctgctttcactgcggtcccgcttagcgacccgccgccgccgccaagcgaggctgaggactccgatcgcgatgtctcatctgacagctccatgagatagagacctgcctcccccttgcacccgaggccctcgcagcagggagctcagcgaggcagagggtggggctgcacagaggggaacatcagctgcagctctgcaccaggccggtccctggggactggggcgctcctccctcaggctttctccctcagtcttggcttctccagggctctggggtgtctggagctaggcttggccctaccattctggggccatttccaccacagttggggctctcctgccttcacgcgtgggtgtctgctacttccccatctttaaaatgctgccagagcgattgcggcccctcaccttgtccacgtatcaggaatgtgaatgtgggacctttcctccatccctgttgtccggagccagctcactgtcttccacactggtgctaactggcccaggcactggagtggaatagaatgcagctggaggctacgcatggcctctgcagcacacgcagctggagagggcttctgtccctgtcagcggcagagggcgttggggctggccggggcaccttgtccctgctatggtccacgtgctcacgctgtccacctgccaggtggagtgtatgtggctgtggccctccctcgtggaggtgccgtgctttaaagaggccttagtgcccgggatgggcacagtgttttgaagggaggtgggagctcttgctctcctggtcactgcagaatgacagagaaggtgaagctccatgcatgtgtgcgcgggtgtatgtgcgctcagggtctctgtttaagtatcagctaaagatgtgcttcctccgtgtctgtcatacactgagaccaacaggctacagtgtccctgattcttggaaaagcctggagaagctggggagatgcggttcacaatgcctcggtataggaggctgtgttgagctgacattcaaatggattctttaataataatgaaactggcgagtatttattgtgca

SEQ ID NO: 2448 - DNA, 1838 bp, Homo sapiens
  source 1..1838: mol_type = genomic DNA
atctgagggaggcaggggaatgagccaggctggagctgagccagcagggcagggcccccctgctgcgacagtggcatcctgatagtgagatgctcagatgctgctgccctctagtggccgccagttccctgcaactcagaccacgtgatttctgggaaaaggccctccctggaggagaactgaaacttagggtggggactgtagaaaggggcggagagatcagccgcccagccaggagttaagctgaggtcgtctgagccctgcgacagcctggacagcaactcaggatggcatcaggcagggcacgctgcacccgaaaactccggaactgggtggtggagcaagtggagagtgggcagtttcccggagtgtgctgggatgatacagctaagaccatgttccggattccctggaaacatgcaggcaagcaggacttccgggaggaccaggatgctgccttcttcaaggcctgggcaatatttaagggaaagtataaggagggggacacaggaggtccagctgtctggaagactcgcctgcgctgtgcactcaacaagagttctgaatttaaggaggttcctgagaggggccgcatggatgttgctgagccctacaaggtgtatcagttgctgccaccaggaatcgtctctggccagccagggactcagaaagtaccatcaaagcgacagcacagttctgtgtcctctgagaggaaggaggaagaggatgccatgcagaactgcacactcagtccctctgtgctccaggactccctcaataatgaggaggagggggccagtgggggagcagtccattcagacattgggagcagcagcagcagcagcagccctgagccacaggaagttacagacacaactgaggccccctttcaaggggatcagaggtccctggagtttctgcttcctccagagccagactactcactgctgctcaccttcatctacaacgggcgcgtggtgggcgaggcccaggtgcaaagcctggattgccgccttgtggctgagccctcaggctctgagagcagcatggagcaggtgctgttccccaagcctggcccactggagcccacgcagcgcctgctgagccagcttgagaggggcatcctagtggccagcaacccccgaggcctcttcgtgcagcgcctttgccccatccccatctcctggaatgcaccccaggctccacctgggccaggcccgcatctgctgcccagcaacgagtgcgtggagctcttcagaaccgcctacttctgcagagacttggtcaggtactttcagggcctgggccccccaccgaagttccaggtaacactgaatttctgggaagagagccatggctccagccatactccacagaatcttatcacagtgaagatggagcaggcctttgcccgatacttgctggagcagactccagagcagcaggcagccattctgtccctggtgtagagcctgggggacccatcttccacctcacctctttgttcttcctgtctcctttgaagtagactcattcttcacacgattgacctgtcctctttgtgataattctcagtagttgtccgtgataatcgtgtcctgaaaatcctcgcacacactggctggtggagaactcaaggctaattttttatccttttttttttttaattttgagatatacgccctctttcatctgtaagggactaggaaattccaaatggtgtgaacccagggggcctttccctcttccctgacctcccaactctaaagccaagcactttatattttcctcttagatattcactaaggacttaaaataaaattttattgaaagaggaa

SEQ ID NO: 2449 - DNA, 2592 bp, Homo sapiens
  source 1..2592: mol_type = genomic DNA
ccttctcttctggtaggactcaagagtagccttcctcgaggacctgcctttcccatttgctgcctgaagttaatgtttcttgctggccaaatcagggacatgccggcattagcgggatgagtgggtgttccggcagggatgtggtcattgacggccagtgagggcgagagtaccacggcccacttcttccttggagctggagatgaggggctgggcacccgtggaataggcatgaggccagaagagagtgacagcgagctccttgaggatgaggaggatgaagtgcctcctgaacctcagatcattgttggcatctgtgccatgaccaagaaatccaagtccaagccaatgactcaaatcctagagcgactctgcagatttgactacctgactgttgtcattctgggagaagatgtaatccttaatgaacctgtggaaaactggccatcctgccactgcctcatctctttccactccaaaggctttcctctggacaaagctgttgcttactccaagcttcgaaacccctttcttatcaatgatctggccatgcagtattacatccaagataggagggaggtgtaccggatcctgcaggaagagggtattgatctgcctcgatatgctgtgctcaaccgtgatcctgcccggcctgaggaatgcaacctgatagaaggtgaagaccaagtagaggtcaatggagctgtctttcccaagccctttgtggagaagccagtgagtgcagaagaccacaatgtttacatctactaccccagctcagctggaggaggaagccagcgtctctttcgtaagattggcagccgaagcagtgtttactctcctgagagcagcgtccgaaagacggggtcgtacatctatgaggagtttatgccaacagatggcacagatgtcaaggtgtatacagtggggccagattatgcccatgctgaagctagaaaatctccagctttggatgggaaggttgaacgagacagtgaggggaaagagattcaatatccagtcatgctgactgccatggaaaagctggtggccaggaaagtctgcgtagctttcaagcaaacagtttgtggatttgaccttcttcgtgccaatggtcattcctttgtgtgtgatgtcaatggctttagttttgtcaagaactcgatgaaatactacgatgactgtgccaagattctggggaacaccataatgcgggagcttgccccacagttccagattccatggtccatccccacggaggctgaggacattcccattgttcccaccacatctggcactatgatggaacttcgttgtgtcattgcaattattcgtcatggggatcgtactcccaagcagaagatgaagatggaagtgaaacacccaaggttttttgctctgtttgaaaaacatggtggctacaagacagggaaattaaaactcaagcgacctgagcagctccaggaggtgctggatatcacaaggctgttgttggctgaactggagaaagaaccaggtggtgagatcgaggagaagactggaaaactagagcagctgaagtctgtactggagatgtatggtcacttctcaggtataaaccggaaggtacaattgacttactaccctcatggagtaaaagcttctaatgaggggcaagatccacagagggaaactctggccccatctctgttgctggtactgaagtggggtggagaactgactcctgctggccgtgttcaggctgaggagctggggcgagcttttcgctgcatgtaccctggaggacagggtgactatgctggcttccctggttgtgggctgcttcgtctccatagcactttccgccacgatctcaagatctatgcctctgatgagggtcgtgttcagatgactgctgctgccttcgccaagggccttctggctctagaaggggagctgacacccattttggtgcaaatggtgaagagtgccaacatgaatgggctactggacagcgatggggattccttgagcagctgccagcaccgggtgaaggctcggctgcaccatattctacagcaggatgcgccctttggccctgaggactacgatcagctggctcccaccagaagtacttccctgctcaactccatgactatcatccagaatcctgtgaaggtctgtgatcaggtatttgccctgatcgaaaacctcacccaccagatccgggaacgaatgcaggaccccaggtctgtagacctgcagctctaccacagtgagacactagagctaatgctacagcgttggagcaagctggagcgtgactttcgacagaagagtgggcgctatgatatcagtaagatccctgacatctatgactgtgtcaagtatgatgtgcagcacaatgggagtctgggacttcaaggcacagcagagttgctccgtctctctaaggcactggctgatgtggtcattccccaggagtacgggatcagtcgggaggagaaactggaaattgctgtgggcttctgtcttccactgttgcggaagatactacttgacctgcagagaacccacgaggatgagtctgtcaacaagctgcatcccctgtga

SEQ ID NO: 2450 - DNA, 788 bp, Homo sapiens
  source 1..788: mol_type = genomic DNA
aacctcacgaggccttacgtgcctagagcggttcctctccgtggcgccctaccgccttcggcgcgaaggtggctggtgcgtaccgtcccgaaccctaggagccgagatcccacccgcaggaccccaaaacccaatgatcctgcagcagcccttgcagcgaggcccccagggaggggcccagcgcctcccgcgggccgccttgggggtgacttggggcctggacgccagctcccctctccgaggagctgtgcccatgagcaccaagcggcgcctggaggaggagcaggagcctctgcgcaagcagtttctgtctgaggagaacatggccacccacttctctcaactcagcctgcacaatgaccacccctactgcagcccccccatgaccttctccccagccctgcccccactcaggagcccttgctctgagctgcttctctggcgctatcctggcagcctcatccctgaggccctccgtctgctgaggctgggggacacccccagtcccccctaccctgcaaccccagctggggacataatggagctctgagtgctggtggacagtgcccctcccaccttccttcttccccacaacagaagagaccagcgactcccgcaaagggacaaggttcctccctctcctgcagagtaggcatctgggcaccaagaccttccctcaacagaggacactgagcccaacggagttctgggatgggaggggtgggagcatgggaagggaggcatcccacccccaagaagaactgaataaagattgctgagcaaaggaa

SEQ ID NO: 2451 - DNA, 5644 bp, Homo sapiens
  source 1..5644: mol_type = genomic DNA
tccggcgggactcaagagtagccttcctcgaggacctgcctttcccatttgctgcctgaagttaatgtttcttgctggccaaatcagggacatgccggcattagcgggatgagtgggtgttccggcagggatgtggtcattgacggccagtgagggcgagagtaccacggcccacttcttccttggagctggagatgaggggctgggcacccgtggaataggcatgaggccagaagagagtgacagcgagctccttgaggatgaggaggatgaagtgcctcctgaacctcagatcattgttggcatctgtgccatgaccaagaaatccaagtccaagccaatgactcaaatcctagagcgactctgcagatttgactacctgactgttgtcattctgggagaagatgtaatccttaatgaacctgtggaaaactggccatcctgccactgcctcatctctttccactccaaaggctttcctctggacaaagctgttgcttactccaagcttcgaaacccctttcttatcaatgatctggccatgcagtattacatccaagataggagggaggtgtaccggatcctgcaggaagagggtattgatctgcctcgatatgctgtgctcaaccgtgatcctgcccggcctgaggaatgcaacctgatagaaggtgaagaccaagtagaggtcaatggagctgtctttcccaagccctttgtggagaagccagtgagtgcagaagaccacaatgtttacatctactaccccagctcagctggaggaggaagccagcgtctctttcgtaagattggcagccgaagcagtgtttactctcctgagagcagcgtccgaaagacggggtcgtacatctatgaggagtttatgccaacagatggcacagatgtcaaggtgtatacagtggggccagattatgcccatgctgaagctagaaaatctccagctttggatgggaaggttgaacgagacagtgaggggaaagagattcgatatccagtcatgctgactgccatggaaaagctggtggccaggaaagtctgcgtagctttcaagcaaacagtttgtggatttgaccttcttcgtgccaatggtcattcctttgtgtgtgatgtcaatggctttagttttgtcaagaactcgatgaaatactacgatgactgtgccaagattctggggaacaccataatgcgggagcttgccccacagttccagattccatggtccatccccacggaggctgaggacattcccattgttcccaccacatctggcactatgatggaacttcgttgtgtcattgcaattattcgtcatggggatcgtactcccaagcagaagatgaagatggaagtgaaacacccaaggttttttgctctgtttgaaaaacatggtggctacaagacagggaaattaaaactcaagcgacctgagcagctccaggaggtgctggatatcacaaggctgttgttggctgaactggagaaagaaccaggtggtgagatcgaggagaagactggaaaactagagcagctgaagtctgtactggagatgtatggtcacttctcaggtataaaccggaaggtacaattgacttactaccctcatggagtaaaagcttctaatgaggggcaagatccacagagggaaactctggccccatctctgttgctggtactgaagtggggtggagaactgactcctgctggccgtgttcaggctgaggagctggggcgagcttttcgctgcatgtaccctggaggacagggtgactatgctggcttccctggttgtgggctgcttcgtctccatagcactttccgccacgatctcaagatctatgcctctgatgagggtcgtgttcagatgactgctgctgccttcgccaagggccttctggctctagaaggggagctgacacccattttggtgcaaatggtgaagagtgccaacatgaatgggctactggacagcgatggggattccttgagcagctgccagcaccgggtgaaggctcggctgcaccatattctacagcaggatgcgccctttggccctgaggactacgatcagctggctcccaccagaagtacttccctgctcaactccatgactatcatccagaatcctgtgaaggtctgtgatcaggtatttgccctgatcgaaaacctcacccaccagatccgggaacgaatgcaggaccccaggtctgtagacctgcagctctaccacagtgagacactagagctaatgctacagcgttggagcaagctggagcgtgactttcgacagaagagtgggcgctatgatatcagtaagatccctgacatctatgactgtgtcaagtatgatgtgcagcacaatgggagtctgggacttcaaggcacagcagagttgctccgtctctctaaggcactggctgatgtggtcattccccaggagtacgggatcagtcgggaggagaaactggaaattgctgtgggcttctgtcttccactgttgcggaagatactacttgacctgcagagaacccacgaggatgagtctgtcaacaagctgcatcccctctgttatctcaggtactcccgaggcgtgctctccccaggtcgccacgttcgaacgcgtctctatttcaccagtgagagccatgtccactccctgctcagtgtcttccgttatggaggacttcttgatgagacccaggatgcacaatggcagcgagctttggattatcttagtgccatctcagagcttaactacatgacccagattgtcatcatgctttatgaggacaacacacaggatcccttatcagaggaacggttccatgtggagctacacttcagccccggagtgaaaggtgttgaggaagaaggcagtgccccggctggctgtggattccgtccagcctcttctgagaatgaggagatgaaaaccaaccaaggcagtatggagaacctgtgtccaggaaaggcatcagatgaaccagaccgggcattgcagacttcaccccagcctcctgagggccctggccttccgaggagatcacccctcattcgtaaccgaaaagctggttccatggaggtactttctgagacttcatcctcgaggcctggtggctaccggctcttttcatcttcacggccacccacagaaatgaagcagagtggcctaggctcacagtgcacagggctgttcagcaccacagtgctgggtggctcctccagtgccccgaatcttcaggactacgcccgcagccatggcaaaaagctaccacctgccagtctgaagcaccgagatgagctcttgtttgtcccggccgtaaaacgattttctgtgtcgtttgcaaagcatccgactaacgggtttgaagggtgttccatggtgcctaccatctaccctctggaaacactgcataatgccctttccctacgtcaagtgagtgaattcttgagtagagtctgccagcgccacactgatgcccaggcacaggcatctgcagccctctttgattccatgcacagcagccaggcctcagataacccattttctccaccacgtactcttcattcacctcccctgcaactccagcagcgctctgagaagcccccttggtacagcagtggcccttctagcactgtgtccagtgctggtccttcttcccctactacagtagatggtaactcccaatttggcttcagtgatcaaccctccctaaattcacacgtggctgaagaacatcaaggccttgggctgctccaggagacccctgggagtggagcacaagagctctccatagaaggggagcaagagctttttgaaccaaatcagtccccacaggtgccacctatggaaaccagccagccatacgaggaggtcagccagccatgtcaggaggtccctgacatcagccagccatgccaggacatttctgaggcgctcagccagccatgtcagaaggtccctgacatcagccagcaatgccaggagaaccatgacaatggtaaccacacatgccaggaggtccctcacatcagccagccatgccagaagtccagccaactgtgccagaaagtctctgaggaagtttgccagctatgtctggagaactccgaggaggtcagccagccatgccagggggtctctgtggaggttggcaagctggtccataagttccatgtaggggttggtagcttggtccaggaaacccttgtagaagttggcagcccagctgaagagatccctgaggaggtcatccagccataccaggagttctctgtggaggttggcaggctggcccaggagacttctgcgatcaatctgttatctcagggcatccctgagattgataaaccatcccaagagttccctgaggagattgatctgcaggcccaggaggtccctgaggagataaattagaagtcctgggtggtccctgaagtgattgatcagctgcctggagagggtattcctcaagcccagcatccatctggtgatccaaaccctcagagccagtctctagcccatgaccagcactcaccccttccaccagcaacatgtgattaattttctcattagtggtatcacactataccagccatttgagccagcaaccttttctgttggctaactcactggccagctctcaccagcggtgtctggggaagtagttctctttgtatgaagcatacctgtgccagagctgtggttgaggaggagccagttttaggttcgaagaagccattggctcctcacttagccattagacttgaataggatttccttggggtgggttggtctgtcattacccagccttctctgagcatcctaggaaatcacagattgttaaaggaaatgccgcttcactgctgaagacaccatctggcgacagcaaatgcaaaagaggggactctagggtcttcacttttctggggaaatgttcacgacttctcaaggtacgcttagaccatatgtgcattcaggggactcttgtctttgccagcactcctcaggtgagcccgggatggctatctgaaatgtctggaaaatagagtcccttccccaaacatctgacatggccactaaatctttagacttgccttatagatccttccatatcatccccaagtgccccttctgcctcagtcctgttcctctgggcaatagctctagggaaaagtaggtattagactgctgtgcaaaattcagagcaactacttaaaatgctctagaggattcttagccagtctgtgaaagtgggcctcctctgtggtggggctgtttggcttaggagatgctgtagtagtagagataatcaggttctattttaagcaatcagcagagatcaatattgtacagatacaagcaaaggtttaataaatatatatatatatatttatttctgtagttgtgccagggacagactggccaaagaccaaacactgcagggtccccaagaaatttgtccttatatcattgtgtctgagggccagatatgattatgaagctttttccaaagatccagggatgggaatgggagtgggtaggaggggtaatgcggtcattggagtcgggggctggaacattatgagtgctcaataaatataaactaatgagaatggtggtgatgga

SEQ ID NO: 2452 - DNA, 928 bp, Homo sapiens
  source 1..928: mol_type = genomic DNA
cttttccaagcggctgccgaagatggcggaggtgcaggtcctggtgcttgatggtcgaggccatctcctgggccgcctggcggccatcgtggctaaacaggtactgctgggccggaaggtggtggtcgtacgctgtgaaggcatcaacatttctggcaatttctacagaaacaagttgaagtacctggctttcctccgcaagcggatgaacaccaacccttcccgaggcccctaccacttccgggcccccagccgcatcttctggcggaccgtgcgaggtatgctgccccacaaaaccaagcgaggccaggccgctctggaccgtctcaaggtgtttgacggcatcccaccgccctacggaaacaggccgagaagaacgtggagaagaaaattgacaaatacacagaggtcctcaagacccacggactcctggtctgagcccaataaagactgttaattcctcatgcgttgcctgcccttcctccattgttgccctggaatgtacgggacccaggggcagcagcagtccaggtgccacaggcagccctgggacataggaagctgggagcaaggaaagggtcttagtcactgcctcccgaagttgcttgaaagcactcggagaattgtgcaggtgtcatttatctatgaccaataggaagagcaaccagttactatgagtgaaagggagccagaagactgattggagggccctatcttgtgagtggggcatctgttggactttccacctggtcatatactctgcagctgttagaatgtgcaagcacttggggacagcatgagcttgctgttgtacacagggtatttctagaagcagaaatagactgggaagatgcacaaccaaggggttacaggcatcgcccatgctcctcacctgtattttgtaatcagaaataaattgcttttaaag

SEQ ID NO: 2453 - DNA, 1734 bp, Homo sapiens
  source 1..1734: mol_type = genomic DNA
gcgctgcctacggaggtggcagccatctccttctcggtaagtgttaatccgtggcaatccgcattcctgcgggattcatctggccccgtcgcccagtggtgcggaggcctccccttcagcgcggtagtgtctgtgggtattgttattgtcagcttactggagcgtgtacaggaacagaacgaagccgccgagttgatagggctttgcgtcccagagcctcctgccctccgcctgtattcagagctgcgggctgcttgtttgttccttggcggtggagggtgctagttgaggccagacttcggggtctcctgggggccgtgggacgaccaggggtggcccagcttgacagctttcagctgggatctgtggatcccagcgctcaccaatgtcggcccacgtgtattcgttcatgccatggccggcttcttccgctgcagtctctggcccgagggctgctgctgcgggaccgccaaggaaagacgagctgtaggtcggctggtccagctgcaggcagaaattctggtagtatctctgggaatatgaagatgcaactgcccccaccttgccttcgaggatatcatgggccagaaggcagagtcgttttgaatacgtggttcattgagtacccactctgggccagttgatggctgcgaagagagcagaaggggtgctgctgtaggaaatcaatggctcggaagaccacactgaggaaggtgtgagttgatactggaagatctccaggtttgaggcatcttcagaggtatatggtggttttgtgtgtgttgagggtgtggtagcgcagcagctccctagggaattagaaggttttattgaacatttaccctgtgacaggcactgcaggcattcagcgcgcagtgtcatcttcattttacaggtgaggaaaagactcaggttcaagtagatggtcaaggccagtactaccggaaggaccatctgggggttcggacactggtggggtgggatttgctgccccttgcaaattgagagtgtcttggggtcagttttgatttgctcagctgttggcattctttgggctctgagtgggtgaggtgacccttgacctcctgggatcgcatctggagagtgcctagtattctgccagcttcggaaagggagggaaagcaagcctggcagaggcacccattccattcccagcttgctccgtagctggcgattggaagacactctgcgacagtgttcagtccctgggcaggaaagcctccttccaggattcttcctcacctggggccgcttcttccccaaaaggcatcatggccgccctcagaccccttgtgaagcccaagatcgtcaaaaagagaaccaagaagttcatccggcaccagtcagaccgatatgtcaaaattaagcgtaactggcggaaacccagaggcattgacaacagggttcgtagaagattcaagggccagatcttgatgcccaacattggttatggaagcaacaaaaaaacaaagcacatgctgcccagtggcttccggaagttcctggtccacaacgtcaaggagctggaagtgctgctgatgtgcaacaaatcttactgtgccgagatcgctcacaatgtttcctccaagaaccgcaaagccatcgtggaaagagctgcccaactggccatcagagtcaccaaccccaatgccaggctgcgcagtgaagaaaatgagtaggcagctcatgtgcacgttttctgtttaaataaat

SEQ ID NO: 2454 - DNA, 1749 bp, Homo sapiens
  source 1..1749: mol_type = genomic DNA
aggggttacgacccatcagcccttgcgcgccaccgtcccttctctcttcctcggcgctgcctacggaggtggcagccatctccttctcgctggcgattggaagacactctgcgacagtgttcagtccctgggcaggaaagcctccttccaggattcttcctcacctggggccgcttcttccccaaaaggcatcatggccgccctcagaccccttgtgaagcccaagatcgtcaaaaagagaaccaagaagttcatccggcaccagtcagaccgatatgtcaaaattaagcgtaactggcggaaacccagaggcattgacaacagggttcgtagaagattcaagggccagatcttgatgcccaacattggttatggaagcaacaaaaaaacaaagcacatgctgcccagtggcttccggaagttcctggtccacaacgtcaaggagctggaagtgctgctgatgtgcaacaaatcttactgtgccgagatcgctcacaatgtttcctccaagaaccgcaaagccatcgtggaaagagctgcccaactggccatcagagtcaccaaccccaatgccaggctgcgcagtgaagaaaatgagtaggcagctcatgtgcacgttttctgtttaaataaatgtaaaaactgccatctggcatcttccttccttgattttaagtcttcagcttcttggccaacttagtttgccacagagattgttcttttgcttaagcccctttggaatctcccatttggaggggatttgtaaaggacactcagtccttgaacaggggaatgtggcctcaagtgcacagactagccttagtcatctccagttgaggctgggtatgaggggtacagacttggccctcacaccaggtaggttctgagacacttgaagaagcttgtggctcccaagccacaagtagtcattcttagccttgcttttgtaaagttaggtgacaagttattccatgtgatgcttgtgagaattgagaaaatatgcatggaaatatccagatgaatttcttacacagattcttacgggatgcctaaattgcatcctgtaacttctgtccaaaaagaacaggatgatgtacaaattgctcttccaggtaatccaccacggttaactggaaaagcactttcagtctcctataaccctcccaccagctgctgcttcaggtataatgttacagcagtttgccaaggcggggacctaactggtgacaattgagcctcttgactggtactcagaatttagtgacacgtggtcctgattttttttggagacggggtcttgctctcacccaggctgggagtgcagtggcacactgactacagccttgacctccccaggctcaggtgatcttcccacctcagccttccaagtagctgggactacagatgcacacctccaaacctgggtagtttttgaagtttttttgtagaggtggtctagccatgttgcctaggctcccgaactcctgagctcaagcaatcctgcttcagcctcccaaagtactgggattacaggcatcttctgtagtatataggtcatgagggatatgggatgtggtacttatgagacagaaatgcttacaggatgtttttctgtaaccatcctggtcaacttagcagaaatgctgcgctgggtataataaagcttttctacttctagtctagacaggaatcttacagattgtctcctgttcaaaacctagtcataaatatttataatgcaaactggtc

SEQ ID NO: 2455 - DNA, 803 bp, Homo sapiens
  source 1..803: mol_type = genomic DNA
tggaaatctaaagggaatggtgaagttgcaccgtaaggggaaggtgactgaggagctgaaactgactgaggggctgaagcatttcggacaggagaaaggatcaggaggagacagagcggagaatggagcctcagggctacccagcgtttggctgggatcactcgcttcacaaaaggaaaagacttcctcctgtgaagagatccttagtatactacttgaagaaccgggaagtcaggctacagaatgaaaccagctactctcgagtgttgcatggttatgcagcacagcaacttcccagtctcctgaaggagagagagtttcaccttgggacccttaataaagtgtttgcatctcagtggttgaatcataggcaagtggtgtgtggcacaaaatgcaacacgctatttgtcgtagatgtccagacaagccagatcaccaagatccccattctgaaagaccgggagcctggaggtgtgacccagcagggctgtggtatccatgccatcgagctgaatccttctagaacactgctagccactggaggagacaaccccaacagtcttgccatctatcgactacctacgctggatcctgtgtgtgtaggagatgatggacacaaggactggatcttttccatcgcatggatcagcgacactatggcagtgtctggctcacgtgatggttctatgggactctgggaggtgacagatgatgttttgaccaaaagtgatgcgagacacaatgtgtcacgggtccctgtgtatgcacacatcactcacaaggccttaaaggacatccccaaa

SEQ ID NO: 2456 - DNA, 1552 bp, Homo sapiens
  source 1..1552: mol_type = genomic DNA
atgaccaggctggggacagttcccaggaaggccttggagatgagctgtgccatccagaatcagctggcccgcatcctggccgagtttgagatgaccctggagagggacgtcctgcagccactcagcaggctgagtgaggaggagctgccagccatcctcaaacacaagaaaagcctccagaagctcgtgtccgactggaacacactcaagagcaggctcagtcaggcaaccaagaattcaggcagcagtcaaggcctaggaggcagcccgggtagtcacagccatacgaccatggccaacaaggtggagacgctgaaggaggaggaggaggagctgaagaggaaagtggagcaatgcagggacgagtacttggctgacctgtaccactttgttaccaaggaggactcctatgccaactacttcattcgtctcctggagattcaggccgattaccatcgcaggtcactgagctcgctggacacagccctggctgagctgagggagaaccacggccaagcagaccactccccttcgatgacagccacccacttccccagggtgtatggggtgtcgctggcaacccacctgcaagagctgggccgggagattgccctgcccatcgaggcctgcgtcatgatgctgctttctgagggcatgaaggaagagggtctcttccgtctggctgctggggcctcggtgctgaagcgtctcaagcagacaatggcctcggacccccacagcctggaggagttctgctccgacccgcacgctgtggcaggtgccctcaagtcctatctgcgggagctgccagagcctctgatgaccttcgacctctatgatgactggatgagggcagccagcctgaaggagccaggggcccggctgcaggccctccaagaggtgtgcagccgcctaccccccgagaacctcagcaacctcaggtacctgatgaagttcctggcacggctggccgaggagcaggaggtgaacaagatgacacccagcaacatcgccatagtcctgggacccaacttgctgtggccacctgagaaagaaggggaccaggcccagctggatgcagcctccgtgtcttccatccaggtggtgggcgtcgtcgaggcgctgatccagagcgcagacaccctcttccctggagacatcaacttcaacgtgtcaggcctcttctcagctgttaccctccaggacacagtcagtgacaggctggcctctgaggaacttccgtccactgccgtgcccaccccagccaccaccccggctccggctccggctccagctccagctccggccccagccttggcttcagcagctaccaaggaaaggacagagtctgaggtgcctcccagaccagcctcccccaaggtcaccaggagtcccccggagacagctgccccagtggaggacatggctcggaggagtcctaggggagccaccggaaggaaggagaggtttgcctgctcctacgggactgattcttctcttgccgacatgttttttgtaaggctggtaaataaattattttggacaaaactgg

SEQ ID NO: 2457 - DNA, 2010 bp, Homo sapiens
  source 1..2010: mol_type = genomic DNA
ggcccgcgggactcagaccagcggggagcgcggcctccgcccttggggccctcccgccgggccggagacccaagcccccaacgccaggccctgccctggaagcgctcgcggcccggcgcctggacgggggagttgctgctctttggcgtaaattgcaatcgattagggatcgtttctcagaatcaagttagaagtgagagttcagataagtgaggccgccattgctgctttgaacacctcagaaggggagaatggatttatcaggagtgaaaaagaagagcttgctaggagtcaaagaaaataataaaaagtccagcactagggctccttcacctaccaaacgcaaagaccgctcagatgagaagtccaaggatcgctcaaaagataaaggggccaccaaggagtcgagtgagaaggatcgcggccgggacaaaacccgaaagaggcgcagcgcttccagtggtagcagcagtaccaggtctcggtccagctcgacttccagctcaggctccagcaccagcactggctcaagcagtggctccagctcttcctcagcatccagccgctcaggaagctccagcacctcccgcagctccagctctagcagctcttctggctctccaagtccttctcggcgcagacacgacaacaggaggcgctcccgctccaaatccaaaccacctaaaagagatgaaaaggagaggaaaaggcggagcccatctcctaagcccaccaaagtgcacattgggagactcacccggaatgtgacaaaggatcacatcatggagatattttccacctatgggaaaattaaaatgattgacatgcccgtggaaaggatgcatccccatctgtccaaaggctatgcgtacgtagagtttgagaatccagatgaagccgagaaggcgctgaagcacatggatggaggacaaattgatggccaggagatcactgccaccgccgtgctggccccctggcctaggccaccccccaggagattcagccctcccaggagaatgttgccaccaccgcctatgtggcgcaggtctcccccacggatgaggagaaggtcccgctccccgaggcgcaggtcccccgtgcgccggagatcacggtccccgggccgccgccgccacaggagccgctccagctccaactcctcccgataaacaggccactgaagctctcgcccctgtaacttataccccacccagctcagttttgtcacttttctagccaaaggaagaccagtaggaaagcaaacccttgactctggcaggatttgcaggcagcaggcagcacccctctgccagccgggccccggctgcagaagtgctgttggtttggatgctgtgtgcctgtcaagattccctccggttttctggctagaaagctcatccgtttccggtttctaagagtcagttcagtggcagagccaccagggaaaagtgaggctcttgggggtggtttgaccctgcttacctgggagcacacttttcccttccccgatgacctgggatggtggccaggccgtgcccttgctgttgctgggcagtgtccttttggaaagggagctgccccaggctttagtgcagctgccaaccctgttaggcctggcctctcgaggcctcttctgacctcaagggtcacaccccctcaaagatcctctcacccatggtagttgctgctcgtggttctgtctgtccgtgcaccgatgcacacaccgcaccccaccactgtactctgaaattggcgagtgagtggagagccagctctgcggagtcatcacgcagccatggttgtgcctgccgttcatggtggtctttcaggttatcttggcaacatgtacattgcttttattttttttcttttttgctttcattgtacagtcagtactataaaatttctcttttgagttttatacctttgtagcattttagatgacattgtgtttgtactttgttgtgtagagtggaagaattgtgttgaataaacccaagatcggaatgc

SEQ ID NO: 2458 - DNA, 1467 bp, Homo sapiens
  source 1..1467: mol_type = genomic DNA
tggtactgaggaggcctagcagggtgaaggccacggtcgcggccttcacgggttcctcggccgtcctgagtcccaaatcccaagctggagccgttcagctcccctccaccgcttagagatttggggggctctggccccgtccttgcggaccattccgaggggagtccagaggtgtcagtaattaacactgtggatacctcccatgaggacatgattcacgacgcccagatggactactatggcacccgcctggcaacctgctcatcagacaggtccgtcaaaatctttgatgtgcgcaatggagggcagatccttatcgccgacctcaggggtcatgagggtcctgtgtggcaagtggcctgggctcaccccatgtacggcaacatcctggcatcgtgctcctatgaccggaaagtcattatctggagagaggaaaacggcacctgggagaagagccacgagcatgcgggacacgactcctcagtgaactcggtgtgctgggccccccatgactacggcctgatcctggcctgtgggagctcggatggggccatctccctgctgacttacaccggggaaggccaatgggaagtaaagaagatcaacaacgctcacaccattggctgcaatgccgtcagctgggcccctgctgttgtacctggaagcctcatagaccacccatcggggcagaaacccaattacatcaagaggtttgcatcaggtggctgtgacaacctcatcaagctgtggaaggaggaggaggacggccagtggaaggaggagcagaagctagaagcgcacagtgactgggttcgagatgtggcctgggccccctccatcggcctgcccaccagcaccatcgccagctgctcccaggatggtcgtgtgttcatttggacctgtgatgatgcctcaagcaatacgtggtcccctaaattgttgcacaagttcaacgatgtggtgtggcatgtgagctggtccatcacagccaacatcctggctgtctctggtggagacaataaggtgaccctgtggaaggagtcagttgatgggcagtgggtgtgcatcagtgatgtcaacaagggccagggctccgtatcagcatcagtgacagagggccagcagaacgagcagtgacaagacaggtggggcctggctccccacccgccagctccaggactgccccttcctgggccaactaaccagacaactgggaagagcccccaactccaacaggattattttcccaggaggagttacagatgcagccacagattgatcatctgccttaacgtgatcggagatgctttgtaatctactgtccagctgaaagcactcatgttacgaggaagaaactacaagtgatgttcaaatctattttgggtcatttttatgtacctttgggttcaggcattatttggggggttttgtttccaaaggaactaaataaagtcatattgcttataa

SEQ ID NO: 2459 - DNA, 7122 bp, Homo sapiens
  source 1..7122: mol_type = genomic DNA
cgcgactggccttgagggagagctggggcctgctcccggagagatacggctatgtcgatcgaaatcgaatcttcggatgtgatccgccttattatgcagtacttgaaggagaacagtttacatcgggcgttagccaccttgcaggaggagactactgtgtctctgaatactgtggacagcattgagagttttgtggctgacattaacagtggccattgggatactgtgttgcaggctatacagtctctgaaattgccagacaaaaccctcattgacctctatgaacaggttgttctggaattgatagagctccgtgaattgggtgctgccaggtcacttttgagacagactgatcccatgatcatgttaaaacaaacacagccagagcgatatattcatctggagaaccttttggccaggtcttactttgatcctcgtgaggcatacccagatggaagtagcaaagaaaagagaagagcagcaattgcccaggccttagctggcgaagtcagtgtggtgcctccatctcgtctcatggcattgctgggacaggcactgaagtggcagcagcatcagggattgcttcctcctggtatgaccatagatttgtttcgaggcaaggcagctgtcaaagatgtggaagaagaaaagtttcctacacaactgagcaggcatattaagtttggtcagaaatcacatgtggagtgtgctcgattttctccagatggtcagtatttggtcactgggtctgttgatggattcattgaagtatggaactttactactggaaaaatcagaaaggatcttaagtaccaggcccaagataactttatgatgatggatgatgctgtcctctgcatgtgtttcagcagagatacagaaatgttagcaactggggcccaagatggaaaaatcaaggtgtggaagattcagagtggacaatgtttaaggagatttgagagggcacacagtaagggtgtcacctgtctaagcttttctaaggatagcagtcagatccttagtgcttcttttgaccagacaattagaattcatggtttaaaatctgggaaaaccctgaaggaatttcgtggccattcctcctttgttaacgaagcaacatttacacaagatggacattacattattagtgcatcctctgatggcactgtaaagatctggaatatgaagaccacagaatgttcaaatacctttaaatccctgggcagcaccgcagggacagatattaccgtcaacagtgtgattctacttcctaaaaaccctgagcactttgtggtgtgcaacagatcaaacacggtggtcatcatgaacatgcaggggcagattgtcagaagcttcagttctggtaaaagagaaggtggggactttgtttgctgtgccctctctccccgtggtgaatggatctactgtgtaggggaggactttgtgctctactgtttcagtacagtcactggcaaactggagagaactttgacagtgcacgagaaggatgtgattggtattgcacatcaccctcatcagaacctgattgctacctacagtgaagatggactcctaaagctctggaaaccataattcaacttttctttttaaatcagctcgaaagcatgtacttaaatgaagcatattcatgtaatgtgcttttttttttttttgccagcttttctaagcaaatagattgtctgaattagtcacagaataattttgtgaaaattcatgtttaagtagcaactaccctttctttttttatatatttttaaggtattagtttatcttcttctaactggtgcagtcacttaatgttttcattaatcttcgacctggagagtgaaatactgatatttctagaaaaaaattctactcctctgattatttgaaatgctgaggaaaatgtccctcccatagtaaaacttgtaaataaggaactatatcatattcagtagctgtgttctgttccatctttttttttttttttgagatggagttttgcttgttgcccaggctggagtgcagcggcacgatcttggttcactgcaacctccgcctcccaggttcaagcgattctcttgcctcagcctcccgagtagctggggactacaggtgtgcgacaccatgcctggctaatttttttgtatttttagtagagatggggtttcaccatgttggccaggctggtctcaaactcctgacctcaaaggatccacccgccttggcctcccaaagtgctgggatcacaggcgtgagccaccatgcccggcccatctttttttttttttttttttttaaagatgttaataaactttatacctttctggagactttgttctaaaatgtacataaatgctcatctagttaacatatttacttagaatgtgggaggaggagtcacattattatccctgaatctcaagtacagcagaagtgaattcctgggatagtaggatagactaacatgtaaaaaggccaggtgatgcataggttctcatttcactgccctcagccttcctctccttctgagctgtgccttctcacatgttcagtcaactccagggaatattgtctccatcttctggatagaactagttgcaggatccgttacaagaattcagagttttggcatctcccctttgtatgttgtaggagaaggtttggcattgaaaatgtgctgttgttccaaagaaaaattagcaaaggacttgagatttagaaaagtctcctttgtaatgtgcatcattaccagttatctaaagaaaaacatgtaaaagccaacaaaacccttgaaaatattttgcatatggatgtctgtttcacgtttcaactgaagatgtatagagcacctctgatgatgaggaagataccatgctaggcagtactttcaagaacgtgagttcttatttctgcaggccttttgtgcccccttttaaatgttagcatttattaggtacaaactagtggggaaggtttttttaaaaagttttgcagtcttgtaatttacctttttaaaaaatttattttatttttctgagatggagtcttgctctgttgcccaggctggagtgcagtggtgccatctcagctaactgcaacttccacttcccaggttcaagcgattctcctgccttagcctcccaagtagctgggactacaggcgcatgccagcatgcctggctaatttttgtatttttagtagagcgggggttttgccatgttggccaggctggtcttgaactcctgacctcaggtgatccgcctgccctggcctcccaaagtgctgggattacaggcatgagccactgcgcccagccttgtaatttacctttgatggtgacctgaaatgcagtatgatcctatatgtggcacgtagtaatgttcagtgtttgctgaattaattctgggcagcactaagaaatccctctttcccagtcatattctataacacatttcccatttgccacaaaacctgcagctttttggtccaggtaatgacatttgctgccattttgatgatttaaaaatggtcgtgggagttgaacatagtcatgaattcaggattcctgagcatgtagacagtcatcccagtggaaagacacgttcacttaagagaagtttaagttagaggaaacagtttatgctaaaaaaatttttagaaaagtccttgagaatttttgatttagtcttgacctcatgaagctggtagttatgatgtgcatagtttgtatcaccgtttatgaagatggagaatctagtcagcacgtgttggtttattctaggaatttttagggaacacttctgttgctggcaccaggtgatgaatatggttaaaaaaagactcgtttctgcctaaacatagggaagaagagcaaattaaaaggagtaattaaaactgataaaagctcaagttacctttgtgatgatgaggcgggcagttaacgcgaaagggttgggaaaggcttcctggagggactagggggcggtctaagcacagggaacctaaccggggactccagtgtggcacagcggcaaggtatgtgctgggcaaaatgataggtgtcttgggagaccaggcaaagagagctggattaggagccgttaagtatatatttttcttctttttaaataaaataatgcactgggtgaacatgtaaacgctaagttgaaaatctgcctttcccaggtaacccttgttaatctttctacaacttcatttcgtacaaacctgaaaaacacactgattttgtctttaaatgggcacacgctgcttacactcctcggcgcctagcctttctgaagccccacgcggccgtccctccagcattgaaggctggggcagcccagctcccctccagcgcccttacagccagaccgcggcggggtcgggccgcgcacgcgcagggcggacggccggatctggggcgccgctgctccgggtggtcggaggtaggagtcccatcttgggtccagggccggtagagccccttaccgggggtagggagactgcgcacccgctagagccaactgtcagggcctgcagacgtcgggtgacgtcactgttacaaaattggcggtcacatcgtcttaagggccggtggcagcggctgcgcgaacgggagttggctgccgggaatcagtgctcacttccttctgaattgggcgtgtgcagtcggttcctagggaagtgctctgctgcagccaccagatttaacggatgctgctctctagcacttaacatagaagctaaactacctggcgttaaaattaattccatgagcataaggacatttgtcctatcccctattctgctgttgaattaatgactggaaaacattgcgcggaggtatttgggagtagtatggctttttttttttttttttttttaacagcaaatggtataaatctcaggtacaattcagtatcttcttcaccagttgttttttttcagcatgtattattactaccactaacggcctctgttgagcccttccttgctatgtaagcagccatatttaattctcagaacaatgtaatgagggtgcgcaaatgcacatgaagaaacaggtttccagacgtgaggcacctaactcagtccaacttgcacgaagctcgcattgaaaaccagatgtgactccgaagctaggttttttttctctcttgcctcactctcaatattgctgtcagttcctcctcaatctttaggtttgggcagggacaaagaatacatggattgttcctccacatgctgcaaacacattcacctaagcagagcacaggtagtgagatgagtagagagaactgaattagaggattctggatgtcagtctttgctgtcacttcttttggcttgtgctagaacagtggttcttacaagtgtcacgtgatagacacattctaaggtcctatcccagacctacagaatcagaaattggtggtggggcccagcaagcgtgctcaaatttgagagcaggtagactacagggtagtttccgcatatacaaaaggtgttttaattcttgctgtcagtctcagaagtttcatgctgagataaccaaatttaaatgataaaggtgcaagactgactcttaaaatcacattttttcaaattgccatagcttgctagtgttctcattcactgtgcttttacagcttcattttccactattttaagagaagaaattgctatgaagtgtatgtccaagtgaggaagttccctggtctgaggttgtttaaaacttacaataggccgggcacggtggctcaagcctgtaatcccagcactttgggaggccgaggtgggtggatcacgaggtcaggagttcaagaccaccctggccaacatggtgacaccctgtctctactaaggatacaaaattagccgggcatggtggcacacgcctgtagtcccagctacctaggaggctgaggcaggagaatagctggaacccgggaggcagaggttgcagtgagctgagactgtgccactgcactccagcctgggtgacagagcaagacttggtctcaaaaacaaaaaacaaaaaaaccaaacttggaatagcaagggctgcccattatttaaccttccacggcaattttaacagtggtattctgttccaagtggttaatattaaatccatgtgtcagtgttggtggctttcaaccttggctgcgcataatcattttgatgcttaggctacacccagccgagttatacagaatccctggagggtgggacctgatgagtgttttaatgtttcccgggtaattccaatggtagccaaggttaagaaccagtaccgtacgtacaaaaaagttgagaagctaatttcacgtacagaaaatttgccactgttccaagagcactctcaagcgacataattggcctctactcctattccctacaagtatgaatgggcaggagaagcatcacagagaaagcagagttagtgctggaacttgtatttttgtggatgatgaccttggttaatgttttttcataggctctgtttcataggctttgttttttcataggctctccctcattacattgttctgagaattaaatatggctgcttacatagtaatgaagggttcaacagaggctgttagtggtagtaataatacaagctgaaaaactacacagacaaacctatcagtttctgcctcttcaggatataactattaggttagtgcaaaagtaattgcggtttttgccattaaaagtaatggcacattacttttgcaccaaccgacctaatatgactttcttttagtgttcttaggatttttaattgtaaaacatgtaacaaattttcctaaacaattgtgcaattcagtggcattatttacgatgttacgcaaccactattgtatttccaaaatgtcatcaccctaaacagaagccctgtaacattgtcaattaacttctccttcccttcccctcagcctttggtactgtttctgcctcaatgcatttgtctaagtttagttcatataagtgaaattatacaatacttgtccttttttatctggcttatttcatttagcatgttttaaaggttcatccatgtatcaaacagtaaagtgcttcatatttgggggaagtataaaaag

SEQ ID NO: 2460 - DNA, 4921 bp, Homo sapiens
  source 1..4921: mol_type = genomic DNA
attccgactttcccgccccgtacgtgaggggccgccttgaagcctcttccgccacggacactcgaaactgatcttgaagcccctgccgtcacggatactagaaactgatctcgaagccccttccgccacggacactcgaaactctcccccactgttagacctcagcagccagcagcccgccgcccggcgctgcagctccctgcccgcaggagccacgtctcgcgcgactccccccacctctcgcgacacttgccgcccgtgccctgcggccctgcacgccccacccgcggtcgcgcgccgcgctccccgccgcctcaccttttcgcctggcatccgggcccgctactcgcccactgggagcgccgtggcgcctggtgttcggcgcgagcccggcggggctgcaggttccgccctgctccgccgcgccccgcccgggctggggtaaaggccgcggccgggccatgcagtgtcctcctcagggagggcaggagagcctgaggagtggcggggccgccagagagcgaaatgtcatcagtgcagtcacaacaggagcagttgtcccagtcagatccatctccgtcaccaaactcatgtagttcctttgagctaatagacatggatgctggcagcttgtatgaaccagtttctccccattggttttattgtaagataatagattctaaggagacatggattcctttcaactctgaggattcacagcagctggaagaggcatatagctctggaaaaggttgtaatgggagagttgttcctactgatgggggcagatatgatgttcatttgggggagaggatgcggtatgctgtatactgggatgaactggcatcggaagtgagacgatgtacgtggttttacaagggggacaaagacaataagtatgttccctactcggagagcttcagccaagttttagaggaaacttacatgcttgctgtaactttggatgaatggaaaaagaaactggaatctcccaacagagaaattattattttacacaatccaaagcttatggtgcattaccagccagttgcagggtctgatgattggggttcaacacccacggagcagggtcgaccaagaactgtgaagagaggagttgagaacatctctgttgacattcattgtggagaacctttacaaatagatcacttggtttttgtagtccatgggattggaccagcttgtgatctccgctttcgaagcattgtacagtgtgttaatgattttcgcagtgtttccttgaacttgctacagacacattttaagaaagcccaagaaaatcagcagattgggagggtagaatttcttccagtcaactggcacagtcctttgcattctactggtgtggatgtagatctgcagcgaataaccctgcccagcattaaccgcctcaggcacttcaccaatgacacaattctggatgtcttcttctacaatagtcccacctactgtcagactattgtggacacagttgcttctgaaatgaaccgaatatacacactttttctacagaggaaccctgatttcaaagggggtgtatccattgctggtcatagtttaggttcgcttatattgtttgatatcctaacaaatcagaaagattctttgggggatattgacagtgaaaaggattcgctaaatattgtaatggatcaaggagatacacctacactagaggaagatttgaagaaacttcagctctctgaattctttgatatctttgagaaggagaaagtagataaggaagctctggctttatgtacagaccgagatcttcaggaaataggaattcctttaggaccaagaaagaagatattaaactatttcagcaccagaaaaaactcaatgggtattaagagaccagccccgcagcctgcttcaggggcaaacatccccaaagaatctgagttctgcagtagcagtaatactagaaatggtgactatctggatgttggcattgggcaggtgtctgtgaaatacccccggctcatctataaaccagagatattctttgcctttggatctcccattggaatgttccttactgtccgaggactaaaaagaattgatcccaactacagatttccaacgtgcaaaggtttcttcaatatttatcacccttttgatcctgtggcctataggattgaaccaatggtggtcccaggagtggaatttgagccaatgctgatcccacatcataaaggcaggaagcggatgcacttagaactgagagagggcttgaccaggatgagtatggaccttaagaacaacttgctaggttcgctgcggatggcctggaagtcttttaccagagctccataccctgccttacaagcttcagaaacaccagaagaaactgaagcagaacctgaatcaacttcagagaagcctagtgatgttaacacagaagagacctctgtggcagttaaagaagaagtcctgcctatcaatgtggggatgctgaatggaggccaacgcattgactatgtgctacaggagaagcctattgaaagttttaatgagtatttatttgctttacaaagccatctatgctactgggagtctgaagatacagtattgctcgtcctcaaagagatctaccaaacccagggtatcttccttgatcagcctttacagtaaaaatgacccatctatggctgcttaatacggacattgagggatccttccccagaaaatccacctgtttgttgctgcaattttcctctcctcagctgcgtcatttcctgcatgttgcctgccacttactcaccactggggtctttggaagataatcttcctctttggaaatgaatggaaaagcaaaaggccctattacttttaaccactggcttcatataaacacttgccatttttttctgcatagctgggggtggtttgtgtctttaattctttgatgatagtttatagttgccacactttattgattagtacttgacagggtgtaaagcctattttgggtttgatttgttttgggtggggtagacatgtttttaaggaacttattgcttatctttagaaaatgttctagtttggaaacagattcttgagattcagaaggcattttggagtacacttatctcttgtttgtgttgaactgaaggctaagtctcagtggacatggaaaagacttttgggtgatttatttttgaacctgcatttctttcttatgtgtagtgtatgaagaaagactagaatgtagctttaaaaaagtgttgtttactctcttagaactgacagacttattgccagaaatcactgatgttcattgtttttgcaactgtttgagctgctgtaagagtctaaagttgacaagttagttcatgttaggtgcatctttataaagcaaagatgttgtatatcctaggcctcccttttatatttgatagaagttatttgctaatagcttctattcttacgttgaaaatagttgtaaaagctgatgaacctgaaattgtgtagcctctacaggctgctgaggttctaaataaaaccttttagtggtgcctttatggtgaaacagaatttgtcacctgccatttctacttgagctaaggtagtattgtgtatcctctttccttcttaggtatccataatccacaaagcatatttaaaaggctcttggcacgggcagcattggttgagcaggtaggtttggctagggggaaatgtttaacttgttctgaaagaaaaacttatgtctgtagggtccaagaaacagctattccagagtcagtgtcagctgagtctggaacatatgaagtgaggtttacttctaagaacacaagtgactgcacactaattttgtcaaggcatcttttcactactttgctgtagatttttcttcttcattggtcagtttgtcattgtctttgtagttctctttatgataatcctttatacttgctctcagattccacaggcctctgtttatagagtggcaaaggcaggcgagctgtggtttattgtttataaatttttttataaatgttatggtattcaaagccactgacatttaatatttactgaagccattccttagacagcagtggtctttatccctttctggaaagaaaaggaaaatgaagggtaattactgtcaccatggagattgtagaggtaaggttggggtataggtcaggcctggcctttctttgtcatctgcttatagtctagtgctaagtatgccactaagtttcagatatatggaatactttatttttttaaaggtatataaactctgagttattgagaattaagtattcactgtatattaaggggaagcttttgccaagttgtggtcttcaaatttatgtttactcttcctattggcagaataggtgctatttaagagtaaaccaaaggataagcagagggagtccctataaccaaagatggacagcatagccctggatagccagataaaccactctttgtattaagaaatgtttctttcctagtggtgaggggtgggtaactgtgaaagagctttatatcttgtctattcatggtattatagctgtatattcccaggatgataagcttgattgaaatcctgtatttagtcatatattatttgcgctgcttcatttgtatcatgtgcaatctctagaccaaccctatttttaaactctggtacagcatcattttgtacatattcccagctgcagaactagtatcacttatctcagcaaaagagattgtttgcatggaaagattaatagcactgattagatttctaatattttgcatttttgaaatgtttgttttctacgtgattatatttaaaactttagtaaatactaacatgaaaccatattgactagtggcctacttttacctggactcacccgtctcaaagtcaagaaaatcagtacagtca

SEQ ID NO: 2461 - DNA, 9451 bp, Homo sapiens
  source 1..9451: mol_type = genomic DNA
gtgctgtggcggcggcggcggcggtagtggcggcggcggcggtgcctgggcggcagcagcagcagtagcggcagccctgaggacggtgagacggccgcggcggcggcgacagcgcggaagtcgcgcgggacccagagcttcccccctgtcgctagtgctgaggctttcgcctttcctacccagcttcttgctcacggcccgggctgggctgggcagggcaacgcgcccccggggaggggcggagctgtagatatggtgtaagatacttcttcaagattggacagctggggaccttcttctgattaaccttaaaccaacttgtagccatagagacacctcacaaggttcccatttttgttgttgttgttgttgattttctgctcacacctttcctgaccttgcaaccatgtatggaagtgcccgctctgttgggaaggtggagccgagcagccagagccctgggcgttcacccaggcttccacgttcccctcgcttgggtcaccgtcgaaccaacagtacgggagggagttcgggaagcagtgttggaggtggcagtgggaaaaccctttcaatggaaaatatacaatctttaaatgctgcctatgccacctctggccctatgtatctaagtgaccatgaaaatgtgggttcagaaacacctaaaagcaccatgacacttggccgttctgggggacgtctgccttacggtgttcggatgactgctatgggtagtagccccaatatagctagcagtggggttgctagtgacaccatagcatttggagagcatcacctccctcctgtgagtatggcatccactgtacctcactcccttcgtcaggcgagagataacacaatcatggatctgcagacacagctgaaggaagtattaagagaaaatgatctcttgcggaaggatgtggaagtaaaggagagcaaattgagttcttcaatgaatagcatcaagaccttctggagcccagagctgaagaaggaacgagccctgagaaaagatgaagcttccaaaatcaccatttggaaggaacagtacagagttgtacaggaggaaaaccagcacatgcagatgacaatccaggctctccaggatgaattgcggatccagagggacctgaatcagctgtttcagcaggatagtagcagcaggactggcgaaccttgtgtagcagagctgacagaggagaactttcagaggcttcatgctgagcatgagcggcaggccaaagagctgtttcttcttcgaaagacattggaggaaatggagctgcgtattgagactcaaaagcagaccctaaatgctcgggatgaatccattaagaagcttctggaaatgttgcagagcaaaggactttctgccaaggctaccgaggaagaccatgagagaacaagacgactggcagaggcagagatgcacgttcatcacctagaaagccttttggagcagaaggaaaaagagaacagtatgttgagagaggagatgcatcgaaggtttgagaatgctcctgattctgccaaaacaaaagctctgcaaactgttattgagatgaaggattcaaaaatttcctctatggagcgtgggcttcgagacctggaagaggaaattcagatgctgaaatcgaatggtgctttgagtactgaggaaagggaagaagaaatgaagcaaatggaagtgtatcggagccattctaaatttatgaaaaataaggtagaacaactgaaggaggaactaagttcgaaagaggctcaatgggaggagctgaaaaagaaagcggctggtcttcaggctgagattggccaggtgaaacaggagctgtccagaaaggacacagaactactcgccctgcagacaaagctagaaacactcacaaaccagttctcagatagtaaacagcacattgaagtgttgaaggagtccttgactgctaaggagcagagggctgccatcctgcagactgaggtggatgctctccgattgcgtttggaagagaaggaaaccatgttgaataaaaagacaaaacaaattcaggatatggctgaagagaaggggacacaagctggagagatacatgacctcaaggacatgttggatgtgaaggagcggaaggttaatgttcttcagaagaagattgaaaatcttcaagagcagcttagagacaaggaaaagcagatgagcagcttgaaagaacgggtcaaatccttgcaggctgacaccaccaacactgacactgccttgacaactttggaggaggcccttgcagagaaagagcggacaattgaacgcttaaaggagcagagggacagagatgagcgagagaagcaagaggaaattgataactacaaaaaagatcttaaagacttgaaggaaaaagtcagcctgttgcaaggcgacctttcagagaaagaggcttcacttttggatctgaaagagcatgcttcttctctggcatcctcaggactgaaaaaggactcacggcttaagacactagagattgctttggagcagaagaaggaggagtgtctgaaaatggaatcacaattgaaaaaggcacatgaggcagcattggaagccagagccagtccagagatgagtgaccgaatacagcacttggagagagagatcaccaggtacaaagatgaatctagcaaggcccaggcagaagttgatcgactcttagaaatcttgaaggaggtggaaaatgagaagaatgacaaagataagaagatagctgagttggaaaggcaagtgaaagaccagaataagaaggtagcaaatctgaagcacaaggaacaggtggaaaaaaagaagagtgcacaaatgttagaggaggcgcgacgacgggaggacaatctcaacgacagctctcagcagctacaggacagtctccgtaagaaggatgacaggattgaagagctggaagaagcactaagagaaagtgtacagataactgcagagcgggaaatggtgctagcacaagaggaatcagccaggaccaatgctgaaaaacaggtggaggagttactgatggccatggagaaggtaaagcaggaactagaatccatgaaagcaaagctgtcctccacccagcagtctctggcagaaaaggaaactcacttgactaatcttcgggcagagagaaggaaacacttagaggaagttctggagatgaagcaagaagctcttctggctgccattagtgaaaaagacgccaatatagctctcttggagctttcgtcctctaagaagaagacccaagaggaagtggctgccctgaagcgggagaaggatcgtctggtacagcagcttaagcagcagacgcaaaatcgaatgaagctaatggccgacaactacgaggatgaccacttcaaatcctcccattccaatcaaacaaatcacaagccctccccagaccagatcatccagcccctcttagaacttgaccaaaatagaagtaaattaaagttgtacattggacacctgacaaccctctgccatgaccgagaccccctgatcctccgtggactcactccaccagcttcctataacttggacgatgaccaggcggcttgggagaatgagctgcagaagatgacccgggggcagcttcaggatgagttagagaaaggtgaacgggacaatgcagaactgcaggagtttgccaacgccattcttcagcagatagcagaccattgtcccgacatcctagagcaagtggtcaacgccctggaagagtcctcttgaccctgctttatggggaagcctgaggtagtcaacccaggagccaagaaaagagaactacgaggaacaggtgcccggaaccttcttggcaccaaacactacaaacttcatcccaacttgctcacttgaagaagtgtgattccagcaccgtttctacatctgccatcttactctgcctttctgctttggatgtggtctctacactaaccttcttgatgtccagggtagataaagggtcgaatctctctgaagaactgccacctggtcatcagcagtggagaactgtgggagctggtggctctgccctgacagagagccatggagcagaggagcctctcacctcctgtcctctgacatgagaatgaaaccaggaatggacttggagttcaacaggctgagaggatgcctccaatggaccagagagctgagtgttctaatatcacaataggtgctttctcctaaaagggcaaaaaacaatctcaaaaagattagaaaaagagaaggggggaagggaagagaaaatcgactcttctttttactgtctcttctgcttactttccacatgagatgctttgtaccggggagctgtgagcaggcctcacgatggcttgggagcactcgttctcccaaggtctgagtcttcatccagccctgcctgtctgtcgcagccttcctcactctgttcctcggccagttaacaagaagatggtgtgaggtgttctccaccagtctctcctgtttgagactgttgacgttatcatactgaggtgttagatcaaatatctctaattgaagaacatgtgaggttgaaagagcaccagccagggcaacatagcgtgaccctgtctctacaaaaaattaaaaagagaacatacaaagttgacatatgagaccctgttgtccccgcctgcagctttgccccagtaacagatgcccgttgctcttgggctggtttcccctgaacacctccaagaggctgcctgccttgccagcacccgtgtcctgagctcctgcagcccagtggctgctgaagttgtgatccctcactcaccctgctagctttgcccttgactcgtcttctctgaacctcagcctcgtgcattgcctggaaccttcttctagcataaatgaaggtttttcctcctacacacattccttcctcggttatttcattcagagaatatttatgaaatgcctactgtgtgcaagtcatccatccttgaaaaggccacttctcagtgagggagagatgtagtggattctgtgagacatacctgctggagttgaagcagtaaatagcatgtccttcccctccccgatcttaaggtgtgttttctagaaaagttccctaatggaattcatgagtttgggggtctcagtcacccgcttgcctgtaggattccatttgatgattctggatttttgctgtttgttattgcccttagaggggctctgagtatctacttgtgggtggccatttcctgacatctgcatgtacctcgtggaattcagccagcttcatgttgcaaatcagaaagctgaccccaagactgcaaatcaatgaaggtattggcattgttaaggacgtagcgtagacaacagcagtcataaataattaggcaggaacttaacccaaatctagttctttgaccacctctaccaccagaacccagcagacactcacatctcctgataagagttgctggactcgatgtttttgttttgcattttctcctctccttccccacttactcagagaatttaaagtctgtagagtcagcacagccccatcagtccaggaacttcccaccaccagcccttgactgtcccattaactgacatggtcagatttccagctccccctactccctgctgtgaaacaatccctctccctgtgagaggaaactgtggagcgtttcttatcgaaggttaaatggactctgctcataaacctcttactgagatgcttcctgatagccaggctggccagagaggggtgcaggggttagatagtaagtggtggtcgtttgtggtcagttacctcaattctgttcattgcagtgcccgtaaaccatgtagaaagctcccagcactgaaaggcaggagtgttagcatctcgctttatccaccataacgtaaagaactgcggtgtgataacagccttcacggggccacggtggaaccaagacagcaggcgaggccatgcctaaacaagtggtctggcacgggcactggccagctgctctctccaagcaggtggcccagatcccacccacgtggactttctcatcaggtgcagcgcctgccactctcagccactgggtgtgtcactctcctcttcatctcagcattctccatcacttcccctccagaaaaacggatggaaggaagccctctgtgacactgcttctgagaagaagcatttccgggaccgatatcatctgtctggtctctgtgaacagcaaggaatcttcttgaccgttcttgggcactggaggctggctaggagttcagtaataaacgtggccttcgtgctgtagggcagagtggatgcagtttgtagctttcagagtgtctcattgagtctagatcattgaaccaacacttaaccaaatgtcccactcccatcacactaggacttgtcattccatgcccctctcctagtggtcatggtttcatatgggcatacaactgctactgaagttatatagccttgaaaactcagtgcaggttgcccttaattttccccaaacccctccatcggcaagtctagttgccctttagcacctaaagatctgcaccccaaaccaatgtcaccataaagagggcacgaagaagagtgggtgtgatcccaacggggttttgtaactgaagaagcccagtgtgagcttctcatcttttcatatacctctaacccccggtactcattgaatcattgatgaggtatctcaattgagatttgcaaggactttgataccatttgaaatggaaaaattttgaacgggctttaacatgtttaagaaatatggatggggccggccacagtggctcacgcctgtaatcccagaactctggaaggctgaggcaggcggatcacctgagatcaggagttcgaggccagcctggccaagatggcaaaaaccccgactctactaaaaatacaaaattagccaggcgtggtggcgtacgcctgtaatcccagctactcaggaggcaggagaatcgcttgagcctgggaggcagaggctgcggtgagccgagatcgtgtcactgcactccagcctgggtgacagagactccatttaaaaaaaaaaaaaaaaaatatatatatatatatatatatatatatatggatgggaatcaccaaattcatctcagctctaaccttttaacctttgtccttgcactttacaatctaaagatctacctgtggctctcagacttcctcacacttgggttttagaaataacttgtaaagcagactggacccaaggccgccttcagtgtcaagaagggcattgtgacttgcccctcaatttctgtccattgaagtctggttttccatgaggaacttgcgggctcacccacccccagagtgagagaagaggaaggcgaagtcatcacagacacggtcttagccacctgctgaactaatccctccgctattgagggtcagggttgtgaggcaaccatcatgtgtcaccccaaaatataaatgtttctgagccgcccatccactggcatttggatttgctgccagagtcctgttcctcccagaaccatcccgccctcctgttgaccatgttacttgagtgtaggcccggtgtcaagaccctcagagtctttgaggaaagagccaagcagagaagaccgctgcgtggagtgtgacaccacatggcatttctcaagcccagcggaccctgtgtcagcaaataccagtaatttaacatctgctcctggcctcctcttcacctgcctgggttcggaactgaggaggaaggatgagaagagactgcaatgcagcaggcaccctctgcagagtgaggccgcccgtccatcactgccagccctgggctgctcaggaggggacgtgaaccactcaaaggaatgtcttaaagaggatctggagtttcccccatgcaaattagggaagaattaggcaagaaaagacatacattacagggaaatccttctgaacaaaatggctgtcttcacctactcttcttgcaagaaaagacatacattacagggaaatccttctgaacaaaatggctatcttcacctactcttcagcaaaaaccgtctccagactttttagtgtcaaaaatgtaaccaactgtctcctgattttttccaatgtgtttggcaagtgctgtggccctgttgtaggtacttctcctgactcttgggggagaagtggttttagggattgatttgggggagcgggtttttgtcccatcccacctcctctcttctttctctgcttgtcgatattgtctgtgtgattcagagaattggggcagttacattgtgtctgttgttgagattattaaaagattaaaacgtagttgtagaaatgaaaaattaaacagctgtgttttaaaaatgcaaaccaatatcttgttaataaaggaattcaagctatggggcagccacactcccctcctcccaggctggcataggtggccctgggctggcggcttaggaagcatggagcacacttagggtagtgcctgcctgggcaagagacacctgccgagcaaaaggaacgagaatctggggctcagagcctcgcagttgtgccaggattttcctatacatgttcaggacctctgggtagaggtttcacagtttgtgaccccataaccaccctcacccgacgtgggttctagctcagtgtgcctaatactgcatggtaacctgggcttgaccctgaagcccctgcctggcaggccacaggacctctcctgcccacttggtgctatctcttccagtgaccacccagcacgggtgagcactggccagcctggagcctgcaatccaggtggaacagactgtcctccatgtcagttccttctggcttcaggccctcaattatttccctttgagcttttttagaccctagatctcctaggcccaggctctctcttgaccccagagaagccactgtcaggaaaggaagtgaaccctactgaagccagagaattcaccccggccaaagcaggccctctgggtccagcccctcattccacaccacgccagtattgcatccatctactgcagctacacatcctgagggcagcaccacccactctggcctgctggcccatcgcaggactagcccaggcacctgccgggcattgcaggatatccagtggggcctgtgactgctccctgatgcgtcagaagagaagtgttgcactttagtggaggagctgaggagcacctgcccccttgtagcttgagttccttttggtaacagtagcagcctccatggtggtgtctgggatgcacgtgcacccgctgccttcagctgtatgtgtgtgttcctgctggagttgtgttactgacaggataatgacattacaaagaaattgtgttatattcaactttgccttgataattattgtaaacactttgttcattttttcttttttattcacaaactaaatccaccaggaaattataaagttattt

SEQ ID NO: 2462 - DNA, 3061 bp, Homo sapiens
  source 1..3061: mol_type = genomic DNA
gccatgaacttccaggcgggcggggggcagagcccgcagcagcagcagagcctggcggctccggggggcggcggcgctgccgcgcagcagctcgtctgcggcgggcagttcggcggcgcggggcccggggccgggggcggcggcggcccctcgcagcagctggccggcgggcccccccagcagttcgcgctctccaactccgcggccatccgggccgagatccagcgcttcgagtccgtgcatcccaatatctacgccatctacgacctgatcgagcgcatcgaggatttggcgctgcagaaccagatccgggagcacgtcatctccatcgaggactcgtttgtgaacagccaggagtggacgctgagccgctccgtaccggagcttaaagtgggcatagtggggaacctgtctagcgggaagtcagccctggtgcaccgctatctgacggggacctatgtccaggaggagtcccctgaaggggggcggtttaagaaggagattgtggtggatggccagagttacctgctgctgatccgagatgaaggaggcccccctgagctccagtttgctgcctgggtggatgcagtggtgtttgtgttcagcctggaggatgaaatcagtttccagacggtgtacaactacttcctgcgtctctgcagcttccgcaacgccagcgaggtgcccatggtgcttgtgggcacgcaggatgccatcagcgctgcgaatccccgggttatcgacgacagcagagcccgcaagctctccacagatctgaagcggtgcacctactatgagacgtgcgcgacctacgggctcaatgtggagcgtgtcttccaggacgtggcccagaaggtagtggccttgcgaaagaagcagcaactggccatcgggccctgcaagtcactgcccaactcgcccagccactcggccgtgtccgccgcctccatcccggccgtgcacatcaaccaggccacgaatggcggcggcagcgccttcagcgactactcgtcctcagtcccctccacccccagcatcagccagcgggagctgcgcatcgagaccatcgctgcctcctccacccccacacccatccgaaagcagtccaagcggcgctccaacatcttcacgtctcggaagggtgctgacctggaccgggagaagaaggctgccgagtgcaaggtggacagcatcgggagcggccgcgccatccccatcaagcaggggatcctgctaaagcggagcggcaagtccctgaacaaggagtggaagaagaagtatgtgacgctctgtgacaacgggctgctcacctatcaccccagcctgcatgattacatgcagaacatccacggcaaggagattgacctgctgcggacaacggtgaaagtgccagggaagcgcctgccccgagccacacctgccacagccccgggcaccagcccccgtgccaacgggctgtccgtggagcggagtaacacacagctgggtgggggcacagccagtggcccagctgaggtactcagttccagccccaagctggatcctcccccatctccccactccaaccggaagaagcaccggaggaaaaagagcaccgggaccccccgaccagacggccccagcagtgctactgaagaggcagaggagtcgtttgaatttgtggtggtgtccctcactgggcagacgtggcacttcgaggcttcaacggcggaggagcgggagctgtgggttcagagtgtgcaggcccagatccttgccagcctgcaaggctgccgcagtgccaaggacaagactcgactggggaaccagaacgcagctctggctgtgcaggccgtccgcaccgtccgcggcaacagcttttgtatcgactgcgatgcacccaatccagactgggccagcctgaacctgggtgccctgatgtgcattgagtgctcaggcatccaccgacacctgggggctcacctgtcccgggtgcgctcccttgacctcgatgactggccgcctgagctgctggctgtcatgactgccatgggcaatgccctcgccaacagcgtctgggagggggccttgggtggctactccaagccagggcctgatgcctgcagagaggagaaggaacgctggatacgggccaagtatgaacagaagctcttcctggccccactgccaagctcagatgtgccactggggcagcagctgctccgggccgtggtggaagatgacctgcggctgttggtgatgctcctggcacatggctccaaagaggaggtgaatgagacctatggggacggggacgggcggacggctctacatctctccagtgccatggccaacgttgtcttcacgcagctgctcatctggtacggggtggacgtgaggagccgggacgcccggggcctgactccactggcatatgctcgccgggccggcagccaggagtgtgcagacatcttgatccagcatggctgccctggggagggctgtggcttagcgcctacccccaacagagagcctgccaatggcaccaacccctctgctgagctgcaccgtagtcctagcctcctataaggcccaggaagagggcagaggggccagaaggactccatggcccaaagaccctcctccctgcaggcactgtgggaacagacacagagatggagaagcagggacatgctgagaggacgaagccaaggaaattagggaggagagtcaaagggatcaaggagagttggggatttgagctgcagcagagagggatgagggatttagccctctgccctaaggtgccattgaaaagggacaggacccttcggaggtgcctgtgaggagaggggagcaggacctctccctcctccagatccctgcctcctagtgccagcccctcacacgccttcatcctgaaacaggaagaggacggcaccaagttgggggtgctggatgaaagagacgaggggtgatctgtgagtcccatgtaaactttgtacattggaatatttatgtttgtgtacatatttgatgtgtgtgtgtatgatgagccaataaaccagactgtgtgcgtggc

SEQ ID NO: 2463 - DNA, 681 bp, Homo sapiens
  source 1..681: mol_type = genomic DNA
gttgctagccggggccagcggcggtggcggcggcggcggaggcgtcggtggaggaggggaggcggcgaggaggcgcagctcccgctgcaccgcgatcgacgctgcggagcgagcccacccgccccgggagctcgcctccccggtgctcccccgccctccccgcccccccagcggcgctgcctcctccaaatgagcgattcgcccgctggatctaacccaaggacacccgaaagcagcggcagcggcagcggcggcggcgggaagaggccggcggtgccggcagcggtgtccctcttgccaccggcggaccccctgcgccaggcgaaccggctcccgatcagggtcctgaagatgctgagcgctcacaccggtcacctcctgcacccggagtacctgcagccgctgtcctccactcccgtcagccccattgagctggacgccaagaagagccccttggcgctgctggctcagacctgctcgcagatcggcagccccgggtcgctgtccttgcggaatccacacactttgggcctaagccggtaccacccctatggcaagagccacttatccacagcggggggcctggccgtgccgtccctccccacagccggaccctactattcgccatacgcgctgtatggacagagactagcttcagcctcggcgctgggataccagtaa

SEQ ID NO: 2464 - DNA, 3225 bp, Homo sapiens
  source 1..3225: mol_type = genomic DNA
atgaacttccaggcgggcggggggcagagcccgcagcagcagcagagcctggcggctccggggggcggcggcgctgccgcgcagcagctcgtctgcggcgggcagttcggcggcgcggggcccggggccgggggcggcggcggcccctcgcagcagctggccggcgggcccccccagcagttcgcgctctccaactccgcggccatccgggccgagatccagcgcttcgagtccgtgcatcccaatatctacgccatctacgacctgatcgagcgcatcgaggatttggcgctgcagaaccagatccgggagcacgtcatctccatcgaggactcgtttgtgaacagccaggagtggacgctgagccgctccgtaccggagcttaaagtgggcatagtggggaacctgtctagcgggaagtcagccctggtgcaccgctatctgacggggacctatgtccaggaggagtcccctgaaggggggcggtttaagaaggagattgtggtggatggccagagttacctgctgctgatccgagatgaaggaggcccccctgagctccagtttgctgcctgggtggatgcagtggtgtttgtgttcagcctggaggatgaaatcagtttccagacggtgtacaactacttcctgcgtctctgcagcttccgcaacgccagcgaggtgcccatggtgcttgtgggcacgcaggatgccatcagcgctgcgaatccccgggttatcgacgacagcagagcccgcaagctctccacagatctgaagcggtgcacctactatgagacgtgcgcgacctacgggctcaatgtggagcgtgtcttccaggacgtggcccagaaggtagtggccttgcgaaagaagcagcaactggccatcgggccctgcaagtcactgcccaactcgcccagccactcggccgtgtccgccgcctccatcccggccgtgcacatcaaccaggccacgaatggcggcggcagcgccttcagcgactactcgtcctcagtcccctccacccccagcatcagccagcgggagctgcgcatcgagaccatcgctgcctcctccacccccacacccatccgaaagcagtccaagcggcgctccaacatcttcacgtctcggaagggtgctgacctggaccgggagaagaaggctgccgagtgcaaggtggacagcatcgggagcggccgcgccatccccatcaagcaggggatcctgctaaagcggagcggcaagtccctgaacaaggagtggaagaagaagtatgtgacgctctgtgacaacgggctgctcacctatcaccccagcctgcatgattacatgcagaacatccacggcaaggagattgacctgctgcggacaacggtgaaagtgccagggaagcgcctgccccgagccacacctgccacagccccgggcaccagcccccgtgccaacgggctgtccgtggagcggagtaacacacagctgggtgggggcacaggtgccccccactcggccagcagcgcatccctgcactctgagcgccccctcagcagctcggcctgggctggcccgcgccctgaggggctgcaccagcgctcctgctccgtttccagcgccgaccagtggagtgaggccaccacttccctgcccccaggcatgcagcaccctgccagtggcccagctgaggtactcagttccagccccaagctggatcctcccccatctccccactccaaccggaagaagcaccggaggaaaaagagcaccgggaccccccgaccagacggccccagcagtgctactgaagaggcagaggagtcgtttgaatttgtggtggtgtccctcactgggcagacgtggcacttcgaggcttcaacggcggaggagcgggagctgtgggttcagagtgtgcaggcccagatccttgccagcctgcaaggctgccgcagtgccaaggacaagactcgactggggaaccagaacgcagctctggctgtgcaggccgtccgcaccgtccgcggcaacagcttttgtatcgactgcgatgcacccaatccagactgggccagcctgaacctgggtgccctgatgtgcattgagtgctcaggcatccaccgacacctgggggctcacctgtcccgggtgcgctcccttgacctcgatgactggccgcctgagctgctggctgtcatgactgccatgggcaatgccctcgccaacagcgtctgggagggggccttgggtggctactccaagccagggcctgatgcctgcagagaggagaaggaacgctggatacgggccaagtatgaacagaagctcttcctggccccactgccaagctcagatgtgccactggggcagcagctgctccgggccgtggtggaagatgacctgcggctgttggtgatgctcctggcacatggctccaaagaggaggtgaatgagacctatggggacggggacgggcggacggctctacatctctccagtgccatggccaacgttgtcttcacgcagctgctcatctggtacggggtggacgtgaggagccgggacgcccggggcctgactccactggcatatgctcgccgggccggcagccaggagtgtgcagacatcttgatccagcatggctgccctggggagggctgtggcttagcgcctacccccaacagagagcctgccaatggcaccaacccctctgctgagctgcaccgtagtcctagcctcctataaggcccaggaagagggcagaggggccagaaggactccatggcccaaagaccctcctccctgcaggcactgtgggaacagacacagagatggagaagcagggacatgctgagaggacgaagccaaggaaattagggaggagagtcaaagggatcaaggagagttggggatttgagctgcagcagagagggatgagggatttagccctctgccctaaggtgccattgaaaagggacaggacccttcggaggtgcctgtgaggagaggggagcaggacctctccctcctccagatccctgcctcctagtgccagcccctcacacgccttcatcctgaaacaggaagaggacggcaccaagttgggggtgctggatgaaagagacgaggggtgatctgtgagtcccatgtaaactttgtacattggaatatttatgtttgtgtacatatttgatgtgtgtgtgtatgatgagccaataaaccagactgtgtgcg

SEQ ID NO: 2465 - DNA, 3257 bp, Homo sapiens
  source 1..3257: mol_type = genomic DNA
cagtccgaggagggtcacgcaggcggcagatgccaggcgggcagccccgcccctgcgcgccgcctcagcggcgccttcaagacgctggtcccaggcacccacgcccagggcgcctcggatacccaccccctcggccccccgcacaccccggtcctcgacccctctccgcaggatggtttcccggtcctctggcgaggatcctccaaggcgtctcacatgaaccggctcagaaacgccaaaatctacgtggagagagctgtcaagcagaagaagatctttacaatccaaggctgctacccggtgatccggtgtctcttgcgccggaggggctgggtggagaagaagatggtccatcgctcaggccccaccctgctgccaccccagaaggatctggatagctcagcgatgggtgacagtgacaccactgaggatgaggatgaagatgaggacgaggagttccagccatcacagctgttcgacttcgatgatttactgaaatttgatgacctagatggaacacatgctctgatggtgggtctatgtctcaatctccggaatttgccgtggtttgatgaggttgatgccaactccttcttcccacgctgctactgcctgggggctgaggatgacaaaaaagccttcatagaggacttctggctgactgctgcccgcaacgttctcaagctggtggtgaagtctgagtggaagtcataccctattcaggcagtagaggaagaggcctcaggagacaagcagcccaagaaacaggagaaaaacccagtgttggtgtccccagagtttgtggatgaagctctgtgtgcgtgcgaggagtaccttagcaacttggcccacatggacatcgacaaggacctggaggccccgctgtacctcacccccgagggctggtccctcttcctccagcgctactaccaagtggtccacgaaggggcagaactcaggcacctcgacactcaggtccagcgctgtgaggacatcctgcagcagctgcaggccgtggtaccccagatagacatggaaggggatcgcaacatctggatcgtgaagccaggagccaagtcccgcggacgaggcatcatgtgcatggaccacctggaggagatgctgaagctggtgaacggcaaccccgtggtgatgaaggacggcaagtgggtggtgcagaagtatattgagcggcccctcctcatctttggcaccaagtttgacctcagacagtggttcctggtaactgactggaacccacttaccgtgtggttctaccgcgacagctatatccgcttttccacgcagcccttctccctgaagaacctggacaactcagtgcacctgtgcaacaactccatccagaagcacctggagaactcatgccatcggcatccactgcttccgccagacaacatgtggtctagccagaggttccaggcccacctgcaggagatgggtgccccaaatgcttggtccaccatcatcgtgcctggcatgaaggatgctgtgatccacgcacttcagacctcccaggacaccgtgcagtgtcggaaggccagctttgagctctatggcgctgacttcgtgttcggggaggacttccagccctggctgattgagatcaacgccagccccacgatggcaccctccacagcagtcactgcccggctctgtgctggcgtgcaagctgacaccctgcgcgtggtcattgaccggatgctggaccgcaactgtgacacaggagcctttgagctcatctataagcagcccgtcaccacttccccagcctccacaccaaggcccagctgccttctccccatgtactccgacaccagggccaggtcctcagacgacagcacagcaagctggtgggcactaaggccctgtcgaccacaggcaaggccttgaggactctacccacggctaaggtcttcatttccctcccaccgaaccttgatttcaaggtggcacccagcatcctgaagccaagaaaggctcctgctctcctgtgcctccgaggcccccagctggaagtgccttgttgcctctgccctttgaagtcggaacaattcctagcacctgtcggaaggtcaaggccaaaggcaaattcaaggccagactgtgacaaacccagggctgaggcctgccccatgaagaggctgagccccctgaaacccctgccccttgttggtacattccagaggcgcaggggcctgggggatatgaagctagggaagcccctgcttcgattccccactgcccttgtcctggatccaacaccaaataaaaagaaacaagtgaagtatttggggcttgactccattgctgttggagggtcaagagtggatggggcgaggccgtgtaccccagggtccacagcaagagcctgaggccatcagcagctcctccgtgcagcgaggcccagaattcccacctaaggacagacatggggcttcctatttagggactcccccagcatctccgatccaggggtggggagcgtgagccttcactttacagatgaagaaactgagtctgaaagaggaggcatggcttacccaagatcacgtggcagtgagtcgacgcagggacatattgccagaactgccgagcactgggagccccccaaccccagagaacaagccaagctagcagaatgacacctaccgggcataggaacgttaatgccatgagacaggggaaggaattggccttgcctaaacctcagcccttctgcagagggcatgggtctatcccttcttcagcaaggggccaaggtcacctaaaaatgaaacatccaataagccacacccacctgaagaaaagtgtggcactgcttagttgtagtgggttgaactgtggtcccctgaaaagagatgtctacttggaccctgtgaatgtgaccttatgtgggaaaagagtctttgtagctgggtatggtggctcacacctgttatcccagcactttgagaggccaaggcaggagatcgcttgagcccgcaagttcaagaccagtctgggcaacatggtgaaaccgtttctacagaaaattagctgggtgtggtggcacacacctgtagtcctagctactcgggaggcctaggtgggaggattacctgagcctgggaagatcaaaactgtggtgagctgtgatcacgccactgcgctctgagcctgggagacagagtgaaaccctaaatcaaaaaaaaaaaaaaaggtctttgcagatgtaaataaatttaagatcttaaatg

SEQ ID NO: 2466 - DNA, 1961 bp, Homo sapiens
  source 1..1961: mol_type = genomic DNA
aaggtgggcctcgagcaaagccgctagaggtggggtgcgggtggtcggcctcaggcgagccccggggcacagcccggggcgggaggcggagcttggcggccgagatctccgcgctgcagttagccccgccgagcgccaggagctgcgggtaggaggggcgagagaaaggatgggggtacagaaccggaagaaacgaagggctcgtccgcttcggcttgtcctaatttggtgcccaatctgaagctgggctgtaccattgcatacctgggggaggctgtggcaaaggtgacaagaaggccgaaggcacaaagggaagctgcacccattcctggaggagcttaaatagtgactcgagtgcaagaatttaaaaataccgagacagccctaggtggaaaacttccggaaggcccaagcgttcgtaagggctctctaccccgctcggagcatagatggtaccgtccggaagtccgggcggagaccgtagctgcgcttctcgcgaaagggcaggcatcgcggggctggccacttccgtacttccgctttccggcccagccagcgcccgcgatgactgccactctccgcccctacctgagtgccgtgcgggccacattgcaggctgccctctgcctggagaacttctcctcccaggttgtggaacgacacaacaagccggaagtggaagtcaggagtagcaaagagctcctgttacaacctgtgaccatcagcaggaatgagaaggaaaaggttctgattgagggctccatcaactctgtccgggtcagcattgctgtgaaacaggctgatgagatcgagaagattttgtgccacaagttcatgcgcttcatgatgatgcgagcagagaacttctttatccttcgaaggaagcctgtggaggggtatgatatcagctttctgatcaccaacttccacacagagcagatgtacaaacacaagttggtggactttgtgatccacttcatggaggagattgacaaggagatcagtgagatgaagctgtcagtcaatgcccgtgcccgcattgtggctgaagagttccttaagaatttttaaaccatctggctggatctcgtggccttccccctcagactacccatgtctccacgaaggcgtcctggagtcactccccgagcagcgcggcggcggcagggagttgggttggggtgggcatttgatgcgggaggtgggtggtgtgcttgctagctgggcaagaaagcagcagtggacctgccccaaggccacacgtgcctggtcaggctggcttctgatgttcagtcccctgggccgggacagattttttttaacgtcttgaaacttaaactctgtgcttgtaggatactgtaacctttttgtctttttttttttttttttttttaaacctccacctccagtggctgtgactggtcccagtgattatacgttattggttgctgtgggtctgggcgggcctggagccagaaggcgacttattttttctctcctatgccaccccaggtggggagggagggaggtttcagactccagtttctcccttgcccttttattcccaagcctccttggccccagtataagtgttgggaactctctgccagcttcctgagttctgcctaaagatggccccccagcactggttggggacaagggccaaattggtgaccaccagtcatgcctaggacctggggcccaaaagccgggcaacctctggctacaggggccattgggtgccctcccagttgagaggggccgctgtttcgccttgtccgtcagtgccagtgcctgtgccagaggtggcgaggtgagtcctccagagcttcctggccgggccctcctcctgcctgttctggctcctctgctcccacgctagctgtcccttttctgattctggtggatcctccctcccctaattaaagtctctttttgcccctttggggctgcatgaggtc

SEQ ID NO: 2467 - DNA, 1692 bp, Homo sapiens
  source 1..1692: mol_type = genomic DNA
gggagacgctgcgcgcggggctagcgggcggcggagcggacggcgacggggcgctctcgggctgccggcggggccgagcgccgcgcgtcccgagcatggcaggctccctgcctccctgcgtggtggactgtggcaccgggtattgccatcagagagtcagcaaaggtagttgaccaagctcaaaggagagtgttgaggggagttgatgaccttgactttttcataggagatgaagccatcgataaacctacatatgctacaaagtggccgatacgacatggaatcattgaagactgggatcttatggaaaggttcatggagcaagtggtttttaaatatcttcgagctgaacctgaggaccattattttttaatgacagaacctccactcaatacaccagaaaacagagagtatcttgcagaaattatgtttgaatcatttaacgtaccaggactctacattgcagttcaggcagtgctggccttggcggcatcttggacatctcgacaagtgggtgaacgtacgttaacggggatagtcattgacagcggagatggagtcacccatgttatcccagtggcagaaggttatgtaattggaagctgcatcaaacacatcccgattgcaggtagagatattacgtatttcattcaacagctgctaagggagagggaggtgggaatccctcctgagcagtcactggagaccgcaaaagccattaaggagaaatactgttacatttgccccgatatagtcaaggaatttgccaagtatgatgtggatccccggaagtggatcaaacagtacacgggtatcaatgcgatcaaccagaagaagtttgttatagacgttggttacgaaagattcctgggacctgaaatattctttcacccggagtttgccaacccagactttatggagtccatctcagatgttgttgatgaagtaatacagaactgccccatcgatgtgcggcgcccgctgtataagaatgtcgtactctcaggaggctccaccatgttcagggatttcggacgccgactgcagagggatttgaagagagtggtggatgctaggctgaggctcagcgaggagctcagcggcgggaggatcaagccgaagcctgtggaggtccaggtggtcacgcatcacatgcagcgctacgccgtgtggttcggaggctccatgctggcctcgactcccgagttctttcaggtctgccacaccaagaaggactatgaagagtacgggcccagcatctgccgccacaaccccgtctttggagtcatgtcctagtgtctgcctgaacgcgtcgttcgatggtgtcacgttggggaacaagtgtccttcagaacccagagaaggccgccgttctgtaaatagcgacgtcggtgttgctgcccagcagcgtgcttgcattgccggtgcatgaggcgcggcgcgggcccttcagtaaaagccatttatccgtgtgccgaccgctgtctgccagcctcctccttctcccgccctcctcaccctcgctctccctcctcctcctcctccgagctgctagctgacaaatacaattctgaaggaatccaaatgtgactttgaaaattgttagagaaaacaacattagaaaatggcgcaaaatcgttaggtcccaggagagaatgtgggggcgcaaacccttttcctcccagcctattt

SEQ ID NO: 2468 - DNA, 3760 bp, Homo sapiens
  source 1..3760: mol_type = genomic DNA
cacaactgtctctactgccaaggtgctaatgccgaacccctgtgggatctctggtccaaggaaacatctgcacacaggccagggatggcgcttagcttcatctgtgctgcaaactctcatcagtaggcttgctggctctgtgaccttactagctgaactccttaatctctctgcacttcatttttctagtctataaaatggagataacaacagcacctacctcagaagactgttatgaagactctctctccagatcggattcaaccgcacatcatgacagatgttccggctacatttacccaggctgagtgtaatggggataaaccacctgaaaacggtcaacaaacaatcactaaaatcagtgaggaattgactgatgtggacagccccctgccacactacagggtagaacccagtctggaaggtgcactcaccaaaggaagtcaggaggaaagaagaaaattacaagggaacatgctgctcaactcatccatggaggacaaaatgctaaaagaaaacccagaagagaaactctttattgttcataaggctatcacagatctttctctccaagaaactagtgctgatgaaatgacattcagagaagggcatcagtgggagaagattcctctgagtggcagtaaccaggaaataagaagacagaaggagaggattactgagcagcctctcaaagaggaagaagatgaggacaggaagaacaaaggtcaccaggcagctgaaattgaatggctgggatttcgaaaacctagccaagctgacatgttacattctaaacatgatgaggagcagaaggtttgggatgaagaaattgatgatgatgatgatgataattgcaataatgatgaagatgaagttcgagtgatagaatttaagaaaaaacatgaagaggtttctcaatttaaagaggaaggtgatgcaagtgaggactccccactgagcagtgccagttcccaagctgtgacacctgatgagcagccaaccttagggaagaagagtgatatctccagaaatgcttattccagatacaatacaatatcctatcggaaaatcagaaagggaaataccaagcaaagaattgatgaattcgagtctatgatgcatttataaactaactggaactgagaaattctcatgcccactaaaggaaaagctaattctattgccccagggtgcatatttctatgccttatttgagttatcacttggagggaggtggaagttgactctctttttcactgtagaataatgtggaaataaccctagataaaaattcagtctgataacctcaaatcaaaaagctttaaataaattcttgggcatttatcttttaaaacttcactaatatagcattgtgtgataagcactaagcagtcagtcccctgggggaatctggcataattcggctataaatgtagcaatgcttggaaaggtagtcatcaaatgagactatttgaggggactatttgaaatgattctggtatttcttttggtatctttcttcctgtacattggagtgatggaaagtctggtattaaaacctctcttacttttaaacttgattttgcagactctggcaataagccttccaaaattctgtgccttttctattatcaccaaacaatatgttaagtggctttccttggcatctacagagaaaacattctatagccctccttcctaggtgttaccattcactgaatcttctctcagagggagatgagcaattgtcagtcaggataattctgtttgctaaatgttgcctttatgctttcaaactgaattaaacccattgtgaggttgacactgggaggggctagaagattggtgggcagcagactaaagagttatgttggatagttttatttctgtggctgaaaataaaatcttgtctagcacagttaaagtcattaaaaataaaaatgacagctttagcacaattttaagaaaatgcccctctctattaccacattttctcttattaacagtatctcagaataattttctttccttagaaacctgagagaatgctagtcataactgtactagttactatgaaaatggaaataattatcttagaatattttcaaagtagagcgtgagcatgtatttttagtgggagagctctgatagttgttgggaatatataatttactggacctcagcccaaatcaagatgcttaaaattgtacttgtggagcttcactcaaaccaatgtgtcaaataacgtattgaatatttatgaaaagagagactatatttatattcttagatagtttgttccacaatttttcatttcatgcttccatatatattaccctgaactttctatcaccacagataaagattttgttttgccctgcaaataaaaagacaattccttattgtctgaatgtaatacagtcttcattgtactattcaaccctttgtttctttctttttcattttgtgaaaaactccatgttagtcctcttagatgactgcttatttatgtgtaacataaatcccacatattctaatgacaacttctttaatccttccgggtcatatattatatttccatagtatcacatactattatttagttgtttacaagactccaatttgaattcaggattacagtgctcctttcattctttcaaacagataacataaaagttctgttaccctcattctatacaacctatggatttcatgtgttacaatatcagtttccagaataaagtgagggaaatcaggtctttattgataaagttagggagaagattgatgcaataggacaatttccaatttaatttagatcctctaatctttctacatggacaagctgttttcttttctaggttactgataacccctacaattttcgacttaacttcaaaacacagtattgtgttatctatcacataacaggaccatgtttttaacctaccatcaagagcctgtattttgagttattccaacagagatgatggattcctgtagaactagaggtgggtgacctatggttatgtggcacggcaaagcaagtacctcttaagggactctaatatatgctaacgctggtcctcttagctctgtgctctcaccagacaatgaatgaactatgaaagatttagtcaacagaaactattttagggtatgtttagttggtaaatgcttcatgttcatggatgacacaatgtttttgcaaaaaaaccctgaaactattctttggcattggtgtccatggccctataccgccatcttacacgaaagccacagagttgaaagccacagagttgaaagccacagagttaagtgacctcaggtaacataatggtgatggttggccatttgagtctttgtaacctaggaaagacaaaggtctgattcagattgcatgggggatttttaacatatttgaaactcagggggaacatgattaagaacacaaactggtagctacacatgaaggtttacttgagcttttgtgattcaaagttcaggggtggtaaggactctggtaccagggaagagggagaattaatttattgtgcaaatgctggtatttcttacatgattttttgttttcctctgttgctagataaatagaaactaataatagctctatttctctgccaatataaaatctacctttcatataatgctacattgaaggcacagaatttgctaccatctctctctccccctacctaccaaactatccacaatttaaataaagaactgctgtgtctgactt

SEQ ID NO: 2469 - DNA, 1354 bp, Homo sapiens
  source 1..1354: mol_type = genomic DNA
ggtaaccaggagccgacaacaactcctgacgcaatggttcagccttttactaccatcccatttccaccacctccgcagaatggaattcccacagagtatggggtgccacacactcaagactatgccggccagaccggtgagcataacctgacactctacggaagtacgcaagcccacggggagcagagcagcaactcacccagcacacaaaatggatctcttacgcagacagaaggtggagcacagacagacggccagcagtcacagacacaaagtagtgaaaattcagagagtaaatctaccccgaaacggctgcatgtctctaatattcctttccgcttccgggaccctgacctccggcagatgtttgggcagtttggcaaaatcctagatgtagaaataatctttaatgaacgtggctctaagggattcgggttcgtaactttcgagaatagtgctgatgcagacagggccagggagaaattacacggcaccgtggtagagggccgtaaaatcgaggtgaataatgctacagcacgtgtaatgaccaataagaagatggtcacaccatatgcaaatggttggaaattaagcccagtagttggagctgtatatggtccggagttatatgcagcatccagctttcaagcagatgtgtccctaggcaatgatgcagcagtgcccctatcaggaagagggggtatcaacacttacattcctttaatcattcctggcttcccttaccctactgcagccaccacggcagccgctttcagaggagcccatttgaggggcagagggcggacagtatatggtgcagtccgagcggtacctccaacagccatccccgcctatccaggtgtggtttaccaggacggattttacggtgctgacctctatggtggatatgcagcctacagatatgcacagcctgctactgcaaccgcagccaccgctgctgcagccgctgcagccgcttacagtgacggttatggcagggtgtacacagccgacccctaccatgcccttgcccctgccgctagctatggagttggcgctgtggcgagtttataccgaggtggctacagccgatttgccccctactgaagtgacgtgagacccctgcaaatgggacagccccccagttcatgaggcctggctattgcaatatttactagtagaggaactctatagcaagatgaagaggaaaaacaaacaaacaaacaaaaaaaaacacaaaaaaagaaagaatacttttttatacctcactatgttctttgaatatgtatttttcctttaaatttctgcctttaattcttttgttccaaagattgtgcatttttttctttttttt

SEQ ID NO: 2470 - DNA, 759 bp, Homo sapiens
  source 1..759: mol_type = genomic DNA
gagagactgccagagaggaagagaaaagaaaggaagaaacattagaaagaaaaaggaaggaaaacggtataaagagagatcaattacccacccttaaatagctagattggggggggaggggggtggaaaagaaagctgtggaggtgtgccccagcacggctgctttgaaaggtttatcatctatccgtttggtttatggagaaaaagaaaatggtaactcagctggaaggctgaagtctttcacctgagctgctgccagttcgctcttctgttcctgggtggttgggagaagagaagagggagggtattttatgctttaattaaagacagataagagagcagggtaaccaggagccgacaacaactcctgacgcaatggttcagccttttactaccatcccatttccaccacctccgcagaatggaattcccacagagtatggggtgccacacactcaagactatgccggccagaccggtgagcataacctgacactctacggaagtacgcaagcccacggggagcagagcagcaactcacccagcacacaaaatggatctcttacgacagaaggtggagcacagacagacggccagcagtcacagacacaaagtagtgaaaattcagagagtaaatctaccccgaaacggctgcatgtctctaatattcctttccgcttccgggaccctgacctccggcagatgtttgggtttggcaaaatcctagatgtagaaataatctttaatgaacgtggctct

SEQ ID NO: 2471 - DNA, 1507 bp, Homo sapiens
  source 1..1507: mol_type = genomic DNA
agaaaaacagtccgcgacagctaggcgcgtgagaccggccgcccgcagggctgctctggccgggacccgctggccgggagacgcgaacctgccggaccaccgcgcggggacgacggcggccatgagctcgcggaagctgagcgggccgaaaggcaggaggctcaggtctcccatgtccgtatgcaggggatcctcttactggtctttgccaagtatcagcatttgccctatatccagattctgtctactaaatccacccccactggcctgtttgggtactgggggaacaaaggtggagtcaacatctgcctgaagctttatggctactatgtcagcatcatcaactgccacctgcctccccacatttccaacaattaccagcggctggagcactttgaccggatcctggagatgcagaattgtgaggggcgagacatcccaaacatcctggaccacgacctcattatctggtttggagacatgaactttcggatcgaggactttgggttgcactttgttcgggaatccattaaaaatcggtgctacggtggcctgtgggagaaggaccagctcagcattgccaagaaacatgacccgctgctccgggagttccaggagggccgcctactcttcccgcccacctacaagtttgataggaactccaacgactatgacaccagtgagaaaaaacgcaagcctgcatggaccgatcgcatcctgtggaggctgaagcggcagccctgtgctggccccgacactcccataccgccggcgtcacacttctccttgtctctgaggggctacagcagccacatgacgtacggcatcagcgaccacaagcctgtctccggcacgttcgacttggagctgaagccattggtgtctgctccgctgatcgtcctgatgcccgaggacctgtggaccgtggaaaatgacatgatggtcagctactcttcaacctcggacttccccagcagcccgtgggactggattggactgtacaaggtggggctgcgggacgttaatgactacgtgtcctatgcctgggtcggggacagcaaggtctcctgcagcgacaacctgaaccaggtttacatcgacatcagcaatatccctaccactgaagatgagtttctcctctgttactacagcaacagtctgcgttctgtggtggggataagcagacccttccagatcccgcctggctccttgagggaggacccactgggtgaagcacagccacagatctgagccaggatgggagtgaatcccaggcggaggccagagctggcagccagctctgcctttccactgccgggagtgctgggggcccagcctggccccctgaagagacagccaagtgtcgtccacatactcctcccagagtgagctctaaccaggctcatttgctctctccactactcatctctggaattagccgcttaaatacaggtttttgttgctgagatgtgagtgaaaccagctagtgtgtcaacagtgaagacct

SEQ ID NO: 2472 - DNA, 2738 bp, Homo sapiens
  source 1..2738: mol_type = genomic DNA
aagtggcaagatggctcccctgcatgtctccggctgatcgctgccgctccgccaatacaatagagccagccactaccagcagcctggccctcttcctccttctccagagagaccaatccagccgaactcggggtttgccgtgaggacttaacgcttatctcttaaaagccagatctgttttagcctccccgcaccaccaccacctccccttccatttaccattttttggatccccggttgctacatctcaattttctctctctggatcgggtggctggggaggaggtggtgggatcttggaacaaggaaggtgtggttttttttctttattttttttaggattttttttgtttggtttttgttatttcttccattccagaaagggataaacagcacttccagggggagaaaaaaaatcatgttatcagaaagcaaagaaggtgaggagaaggaggaagtgaccatggacacaagtgaaaacagacctgaaaatgatgttccagaacctcccatgcctattgcagaccaagtcagcaatgatgaccgcccggagggcagtgttgaagatgaggagaagaaagagagctcgctgcccaaatcattcaagaggaagatctccgttgtctcagctaccaagggggtgccagctggaaacagtgacacagaggggggccagcctggtcggaaacgacgctggggagccagcacagccaccacacagaagaaaccttccatcagtatcaccactgaatcactaaagagcctcatccccgacatcaaacccctggcggggcaggaggctgttgtggatcttcatgctgatgactctcgcatctctgaggatgagacagagcgtaatggcgatgatgggacccatgacaaggggctgaaaatatgccggacagtcactcaggtagtacctgcagagggccaggagaatgggcagagggaagaagaggaagaagagaaggaacctgaagcagaacctcctgtacctccccaggtgtcagtagaggtggccttgcccccacctgcagagcatgaagtaaagaaagtgactttaggagataccttaactcgacgttccattagccagcagaagtccggagtttccattaccattgatgacccagtccgaactgcccaggtgccctccccaccccggggcaagattagcaacattgtccatatctccaatttggtccgtcctttcactttaggccagctaaaggagttgttggggcgcacaggaaccttggtggaagaggccttctggattgacaagatcaaatctcattgctttgtaacgtactcaacagtagaggaagctgttgccacccgcacagctctgcacggggtcaaatggccccagtccaatcccaaattcctttgtgctgactatgccgagcaagatgagctggattatcaccgaggcctcttggtggaccgtccctctgaaactaagacagaggagcagggaataccacggcccctgcaccccccacccccacccccggtccagccaccacagcacccccgggcagagcagcgggagcaggaacgggcagtgcgggaacagtgggcagaacgggaacgggaaatggagcggcgggagcggactcgatcagagcgtgaatgggatcgggacaaagttcgagaagggccccgttcccgatcaaggtcccgtgaccgccgccgcaaggaacgtgcgaagtctaaagaaaagaagagtgagaagaaagagaaagcccaggaggaaccacctgccaagctgctggatgaccttttccgaaagaccaaggcagctccctgcatctattggctcccactgactgacagccagatcgttcagaaagaggcagagcgggccgaacgggccaaggagcgggagaagcggcgaaaggagcaagaagaagaagagcaaaaggagcgggagaaggaagccgagcgggaacggaaccgacagctggagcgagagaaacgtcgggagcacagtcgggagagggacagggagagagagagagaaagggagcgggacaggggggaccgagatcgggatagggaaagggaccgagaacgaggcagggaaagggatcgcagggacaccaagcgccacagcagaagccggagtcggagcacacctgtgcgggaccggggtgggcgccgctagctgggaaaacactagagctgcaggtaccagccactcggccccagggggttatggccacagagggataggcacagtctccaccaccctggagccaagggtctttcacatcacctatccctacatacataccaaatggaaaagtggccatccttttccccccaaacacacccccttaacctatctcttgggacttagcccgaccctccctctcatttcccattaagtctgagaggcaagagctaggttaggcaaggaggtggttggccagagatggggaacagccaggtgccccagtcctctgatttttcctccatcctgcttaccacctccctgggtacttacagccttctcttgggaacagccggggccaggactgggtcacctatgagctgaatcagcatctcctcctgagtcccagggcccctgcagttcccagtctcttctgtcctgcagcccttgcctctttcccacaggttccactttatatccaccttttccttttgttcaatttttatttttattttttttattattaaatgatgtggtctatggaaaaaaaaataaaaat

SEQ ID NO: 2473 - DNA, 1792 bp, Homo sapiens
  source 1..1792: mol_type = genomic DNA
gctgaggacggggcggggcctcgcgctaacggtcgcgcggccgtcgcacctgcacgaggctgtggcccgagcgtcctgtggagaagccgcgaagcgcgggcgacccgggggtcgggcgggccaggtccgcgaggccgcggcggcagctgtgcaggcccggggagcagccggccgggcgagcctcggattaaaaaaatggcaaactcctttgcagcgaggattttcactaccctttcagatctgcagacaaatatggctaatctgaaagttatcggtatagttattgggaaaacagatgtcaaaggctttccagacagaaaaaatattggatcagaaaggtacactttcagcttcaccattcgggattcaccagcacattttgtaaatgcagcttcctggggcaatgaagattacatcaagtctctttctgacagctttagggttggtgactgtgtgataattgaaaatcctctgatccaaagaaaggaaatagaaagagaagaaaaattcagccctgcaactcctagcaactgtaaactgttgctcagtgagaatcactcaacagtaaaagtttgttccagttatgaagtggacacaaagttactttctttgatacatttacctgttaaagagtctcatgattattattcactgggtgacattgttgcaaatggacacagtcttaatgggaggattattaacgtgcttgcagctgtgaaatcggttggagagccaaaatactttacaacttcagaccggagaaaaggccagaggtgtgaagttagactctatgatgaaacagagtcgtcttttgcgatgacatgttgggataatgaatccattctacttgcacagagctggatgccacgagaaacagtaatatttgcctcagatgtaagaataaattttgacaaatttcggaactgcatgacagcaactgtaatctcaaaaaccattattacaactaatccagatataccagaagctaacattctgctgaattttatacgagaaaataaagaaacgaatgttctggatgatgaaattgacagttatttcaaagaatccataaatttaagtacaatagttgatgtctacacagttgaacaattaaagggaaaagctttgaagaatgaaggaaaagctgatccttcctatggcatcctttatgcctacatttccacactcaacattgatgatgaaactacaaaagtagttcgaaatagatgttccagctgtggttatattgtaaatgaagcatctaacatgtgcacaacttgcaacaaaaactccttggactttaaatctgtctttctcagtttccatgtgctgattgatctgactgatcacacaggcacccttcattcctgtagtctcacaggaagtgttgctgaggagactttgggctgcacgttcgttctatcacacagagcaaggagtggattgaaaattagtgtactctcgtgcaagcttgcagatcctactgaggcaagcagaaacttgtctggacaaaaacatgtttaaaacggtctatcattttgaactctggaaaagtataagagttttaactccctttaaaatggaatattaatttgaaaattatggggaaaattgcattttgtttacatgtggtgaacatgtttctagaaattgttatggtggaggtggtctgggtgagtctgaaggcctctctcatctgacctcccttcttagaaggcctcctactgtctttgccttgtctcctcccaagttggaaaatgtttacatgaattaataaacagatttaatcttc

SEQ ID NO: 2474 - DNA, 969 bp, Homo sapiens
  source 1..969: mol_type = genomic DNA
aaggtggcttgggagggaccagttttcctagatgcaggagacagcgtccatagtttcagttcgaagcaactggtggcaaaaggttagcatttaagatggcagggacagcgcgccatgaccgagagatggcgatccaggccaagaaaaagctcaccacggccaccgaccccattgaaagactccgactgcagtgcctggccaggggctctgctgggatcaaaggacttggcagagtgtttagaattatggatgacgataataatcgaacccttgattttaaagaatttatgaaagggttaaatgattatgctgtggtcatggaaaaagaagaggtggaagaacttttccggaggtttgataaagatggaaatggaacaatagacttcaatgaatttcttctcacattaagacctccaatgtccagagccagaaaagaggtaatcatgcaagcttttagaaagttagacaagactggagatggtgttataacaatcgaagaccttcgtgaagtatataatgcaaaacaccacccaaagtaccagaatggggaatggagtgaggaacaagtatttaggaaatttctggataactttgattcaccctatgacaaagatggattggtgacccctgaggagttcatgaactactatgcaggtgtgagcgcatccattgacactgatgtgtacttcatcatcatgatgagaaccgcctggaagctttaagcacatgacctggggaccaggccctgggacagccatgtggctccaaatgactaaatgtcagctcaaaaaccagaatcgtatttgatttcacactcatcctaatgtttttttctgtgtcaaaatattgcattttctggggccaaaaaacaggcagaaataaaagacattgagtagccaactgtgagtttgccttgcctaagactgtttcctttgttctaaaataggacttaaataaaatgagctctgt

SEQ ID NO: 2475 - DNA, 1004 bp, Homo sapiens
  source 1..1004: mol_type = genomic DNA
gagaaaaggcagaaccagagtagagattgacagtgagctgagccaatcaggctgtgaatctgcagcagtgatcccaggtcctccaattaatactaagagagtggaccagggcccctgaggaagacagatggcagggacagcgcgccatgaccgagagatggcgatccaggccaagaaaaagctcaccacggccaccgaccccattgaaagactccgactgcagtgcctggccaggggctctgctgggatcaaaggacttggcagagtgtttagaattatggatgacgataataatcgaacccttgattttaaagaatttatgaaagggttaaatgattatgctgtggtcatggaaaaagaagaggtggaagaacttttccggaggtttgataaagatggaaatggaacaatagacttcaatgaatttcttctcacattaagacctccaatgtccagagccagaaaagaggtaatcatgcaagcttttagaaagttagacaagactggagatggtgttataacaatcgaagaccttcgtgaagtatataatgcaaaacaccacccaaagtaccagaatggggaatggagtgaggaacaagtatttaggaaatttctggataactttgattcaccctatgacaaagatggattggtgacccctgaggagttcatgaactactatgcaggtgtgagcgcatccattgacactgatgtgtacttcatcatcatgatgagaaccgcctggaagctttaagcacatgacctggggaccaggccctgggacagccatgtggctccaaatgactaaatgtcagctcaaaaaccagaatcgtatttgatttcacactcatcctaatgtttttttctgtgtcaaaatattgcattttctggggccaaaaaacaggcagaaataaaagacattgagtagccaactgtgagtttgccttgcctaagactgtttcctttgttctaaaataggacttaaataaaatgagctctgtaaa

SEQ ID NO: 2476 - DNA, 1990 bp, Homo sapiens
  source 1..1990: mol_type = genomic DNA
gtccttcccaagaccacacccaggtccagtcattccctaggacttggcagagagctgtactcacagccaagatcacagcaaaatcagcaaagggaaaaggcatgcagagtgaagtccagaggcaaccagacagaagcatccagaatcctctcacagtggggtcacacaccccatgcttaactcccccaacaatgagttgtaacaacagtcaggtgtggtggtgtgtgcctgtagtcccagctacttgggagcctgaggcaggaggatcacttgagtccagcagttcaagactgcagtgagctatgatcataccactgcactccagcctgagtgacagagtgaaactctgtctctaaaatagggctcacctgcttgaggaaacaggaactgcctcggggcagccagccccgccccattgacgtgcagaccttgaatcgaaacccaggctcctgcaggcactggcacagctacagcgagggcctcggccatccaagggtctcccaggccctggtcaccttccaccagcagaagccaattgagccgcgcagggagctgctgacacagccctgcaggcagaaggatcccgcaaacgtggattacgaggatctcttcctctactccaacgcagtggccgaggaagctgcctgcccggtgtctgcccctgaggaggcctccccaaagccagtcctgtgtcaccaatcaaaggaaaggaagccgtcagcagagatgaacagaataaccaccaaggaagccacttcctcctgccccccaaaatcccctcttggagagacccgccagaaactctggaggagcctcaaaatgctccccgagagaggccagagggtccggcagcagaaaagccacctcgccactgtgaacttgtcgtcactcttggatgtccggagatccacggtgatctcaggccctgggaccggaaaaggcagccaagatcactcaggggatcccacctcgggggacagaggctacacggatccctgtgtggccacatctctcaaaagcccctcacagccccaggcaccaaaagacagaaaggtccccaccaggaaggccgagaggtcggtcagctgcattgaggtgaccccaggggacaggagttggcaccaaatggtagtgagagccctatcctcccaggagtccaagccagagcaccagggcttggcagagcctgagaacgaccagctcccggaggagtaccaacaaccgccaccctttgcccctgggtactgctagagaacaggtccaccctggctctgggactcgctgccaggggctgccacactcctgaatgccttaacatttcttccatggccccacaccatggcatccgggggtcttcgggaacccgggaaatggaataaagatgtttttggggtctgttcctgcactcacccatggggtgagctggttattttagcaacaatcatcagagtgacgctgatggtttggggcaccagctatacatcagccccagtgccagaccttctattcattattttacgcctcagagcaaggccctcagggagggtcatcctccatgttttgaagaagagactgaggttcagagaggataagaggcgtgaccaaggccacagagctatgggtgtcagcaccaggatttgaagccaggtgaatccgagcccttttcccatatcatctgtttgttctgttgtctaaaagcacactgcaagccgggctcagtggctcatgcctgtagtcccagcactctgtggggccgaggcaggcagatcgcttgaggtcaggagttcgagaccagcctggccaacatggtgaaaccccgtctatactaaaaaattcaaaaattacccggacgtggtggcgcatgcctgtaatcccagctacttgggagcctgaggcgggagaattgcttgaacccgggaggcagaggttgcagtgagccgagatcgcatcactgcagtccagcctggatgacagagtgagactccatctc

SEQ ID NO: 2477 - DNA, 2114 bp, Homo sapiens
  source 1..2114: mol_type = genomic DNA
gtgtgtggaggggaccctgtggttagcagcagctatcgcagcgtcggatgttcagagcagcagaagccggcgtcgtcggatgttgtgttgcccgccaccatgagctacacaggctttgtccagggatctgaaaccactttgcagtcgacatactcggataccagcgctcagcccacctgtgattatggatatggaacttggaactctgggacaaatagaggctacgagggctatggctatggctatggctatggccaggataacaccaccaactatgggtatggtatggccacttcacactcttgggaaatgcctagctctgacacaaatgcaaacactagtgcctcgggtagcgccagtgccgattccgttttatccagaattaaccagcgcttagatatggtgccgcatttggagacagacatgatgcaaggaggcgtgtacggctcaggtggagaaaggtatgactcttatgagtcctgcgactcgagggccgtcctgagtgagcgcgacctgtaccggtcaggctatgactacagcgagcttgaccctgagatggaaatggcctatgagggccaatacgatgcctaccgcgaccagttccgcatgcgtggcaacgacaccttcggtcccagggcacagggctgggcccgggatgcccggagcggccggccaatggcctcaggctatgggcgcatgtgggaagaccccatgggggcccggggccagtgcatgtctggtgcctctcggctgccctccctcttctcccagaacatcatccccgagtacggcatgttccagggcatgcgaggtgggggcgccttcccgggcggctcccgctttggtttcgggtttggcaatggcatgaagcagatgaggcggacctggaagacctggaccacagccgacttccgaaccaagaagaagaagagaaagcagggcggcagtcctgatgagccagatagcaaagccacccgcacggactgctcggacaacagcgactcagacaatgatgagggcaccgagggggaagccacagagggccttgaaggcaccgaggctgtggagaagggctccagagtggacggagaggatgaggagggaaaagaggatgggagagaagaaggcaaagaggatccagagaagggggccctaaccacccaggatgaaaatggccagaccaagcgcaagttgcaggcaggcaagaagagtcaggacaagcagaaaaagcggcagcgagaccgcatggtggaaaggatccagtttgtgtgttctctgtgcaaataccggaccttctatgaggacgagatggccagccatcttgacagcaagttccacaaggaacactttaagtacgtaggcaccaagctccctaagcagacggctgactttctgcaggagtacgtcactaacaagaccaagaagacagaggagctccgaaaaaccgtggaggaccttgatggcctcatccaccaaatctacagagaccaggatctgacccaggaaattgccatggagcattttgtgaagaaggtggaggcagcccattgtgcagcctgcgacctcttcattcccatgcagtttgggatcatccagaagcatctgaagaccatggatcacaaccggaaccgcaggctcatgatggagcagtccaagaagtcctccctcatggtggcccgcagtattctcaacaacaagctcatcagcaagaagctggagcgctacctgaagggcgagaaccctttcaccgacagccccgaggaggagaaggagcaggaggaggctgagggcggtgccctggacgagggggcgcagggcgaagcggcagggatctcggagggcgcagagggcgtgccggcgcagcctcccgtgcccccagagccagcccccggggccgtgtcgccgccaccgccgccgcccccagaggaggaggaggagggcgccgtgcccttgctgggaggggcgctgcaacgccagatccgcggcatcccgggcctcgacgtggaggacgacgaggagggcggcgggggcgccccgtgacccgagctcggggcgggcggagcccgcgtggccgaagctggaaaccaaacctaataaagttttcccatcccacc

SEQ ID NO: 2478 - DNA, 1907 bp, Homo sapiens
  source 1..1907: mol_type = genomic DNA
ggcgatggcggtcgggggtgctggtgggagccgcgtgtccagcgggagggacctgaattgcgtccccgaaatagctgacacactaggggctgtggccaagcaggggtgagggccggacctccacgagcggaatgcggggtccgaactcggggacggagaagggcagactagtcatcccggagaagcaggggtttgatttcctctgcatgcctgtcttccatccgcgtttcaagagggagttcattcaggaacctgctaagaatcggcccggtccccagacacgatcagacctactgctgtcaggaagggactggaatacgctaattgtgggaaagctttctccatggattcgtccagactcaaaagtggagaagattcgcaggaactccgaggcgttggaggtgcagttcatcatcacaggcaccaaccaccactcagagaaggagttctgctcctacctccaatacctggaatacttaagccagaaccgtcctccacctaatgcctatgaactctttgccaagggctatgaagactatctgcagtccccgcttcagccactgatggacaatctggaatctcagacatatgaagtgtttgaaaaggaccccatcaaatactctcagtaccagcaggccatctataaatgtctgctagaccgagtaccagaagaggagaaggataccaatgtccaggtactgatggtgctgggagcaggacggggacccctggtgaacgcttccctgcgggcagccaagcaggccgaccggcggataaagctgtatgctgtggagaaaaacccaaatgccgtggtgacgctagagaactggcagtttgaagaatggggaagccaagtgaccgtagtctcatcagacatgagggaatgggtggctccagagaaagcagacatcattgtcagtgagcttctgggctcatttgctgacaatgaattgtcgcctgagtgcctggatggagcccagcacttcctaaaagatgatggtgtgagcatccccggggagtacacttcctttctggctcccatctcttcctccaagctgtacaatgaggtccgagcctgtagggagaaggaccgtgaccctgaggcccagtttgagatgccttatgtggtacggctgcacaacttccaccagctctctgcaccccagccctgtttcaccttcagccatcccaacagagatcctatgattgacaacaaccgctattgcaccttggaatttcctgtggaggtgaacacagtactacatggctttgccggctactttgagactgtgctttatcaggacatcactctgagtatccgtccagagactcactctcctgggatgttctcatggtttcccatcctcttccctattaagcagcccataacggtacgtgaaggccaaaccatctgtgtgcgtttctggcgatgcagcaattccaagaaggtgtggtatgagtgggctgtgacagcaccagtctgttctgctattcataaccccacaggccgctcatataccattggcctctagccctgcgtgccaagtgtccagagccttggaagcagcttcaggttctgctcctgtagtacagaaggtgcagtacatctatgggctgtgattccccttgcccatcagagaggagcatttcaatctgctttcctgccttacatcaaggtgggcaagggattataattaattgcagggctcaagccaccaatctatgaagacctcaggccagggggtgaggaattagtgctggatttgaagctacgcactcagcctcaagaactccctggaatatccctgagaacatggggtttgaacggattttcagcctttttctgttcttgttttgatggttttgtgtaagaggaaatacaaataaagttatagccctttactgca

SEQ ID NO: 2479 - DNA, 2418 bp, Homo sapiens
  source 1..2418: mol_type = genomic DNA
agtatcaaggaatcccggcgtggacagcgcgaggagaaagatggcggcgatggcggtcgggggtgctggtgggagccgcgtgtccagcgggagggacctgaattgcgtccccgaaatagctgacacactaggggctgtggccaagcaggggtgagggccggacctccacgagcggaatgcggggtccgaactcggggacggagaagggcagactagtcatcccggagaagcaggggtttgatttcctctgcatgcctgtcttccatccgcgtttcaagagggagttcattcaggaacctgctaagaatcggcccggtccccagacacgatcagacctactgctgtcaggaagggactggaatacgctaattgtgggaaagctttctccatggattcgtccagactcaaaagtggagaagattcgcaggaactccgaggcggccatgttacaggagctgaattttggtgcatatttgggtcttccagctttcctgctgccccttaatcaggaagataacaccaacctggccagagttttgaccaaccacatccacactggccatcactcttccatgttctggatgcgggtacccttggtggcaccagaggacctgagagatgatataattgagaatgcaccaactacacacacagaggagtacagtggggaggagaaaacgtggatgtggtggcacaacttccggactttgtgtgactatagtaagaggattgcagtggctcttgaaattggggctgacctcccatctaatcatgtcattgatcgctggcttggggagcccatcaaagcagccattctccccactagcattttcctgaccaataagaagggatttcctgttctttctaagatgcaccagaggctcatcttccggctcctcaagttggaggtgcagttcatcatcacaggcaccaaccaccactcagagaaggagttctgctcctacctccaatacctggaatacttaagccagaaccgtcctccacctaatgcctatgaactctttgccaagggctatgaagactatctgcagtccccgcttcagccactgatggacaatctggaatctcagacatatgaagtgtttgaaaaggaccccatcaaatactctcagtaccagcaggccatctataaatgtctgctagaccgagtaccagaagaggagaaggataccaatgtccaggtactgatggtgctgggagcaggacggggacccctggtgaacgcttccctgcgggcagccaagcaggccgaccggcggataaagctgtatgctgtggagaaaaacccaaatgccgtggtgacgctagagaactggcagtttgaagaatggggaagccaagtgaccgtagtctcatcagacatgagggaatgggtggctccagagaaagcagacatcattgtcagtgagcttctgggctcatttgctgacaatgaattgtcgcctgagtgcctggatggagcccagcacttcctaaaagatgatggtgtgagcatccccggggagtacacttcctttctggctcccatctcttcctccaagctgtacaatgaggtccgagcctgtagggagaaggaccgtgaccctgaggcccagtttgagatgccttatgtggtacggctgcacaacttccaccagctctctgcaccccagccctgtttcaccttcagccatcccaacagagatcctatgattgacaacaaccgctattgcaccttggaatttcctgtggaggtgaacacagtactacatggctttgccggctactttgagactgtgctttatcaggacatcactctgagtatccgtccagagactcactctcctgggatgttctcatggtttcccatcctcttccctattaagcagcccataacggtacgtgaaggccaaaccatctgtgtgcgtttctggcgatgcagcaattccaagaaggtgtggtatgagtgggctgtgacagcaccagtctgttctgctattcataaccccacaggccgctcatataccattggcctctagccctgcgtgccaagtgtccagagccttggaagcagcttcaggttctgctcctgtagtacagaaggtgcagtacatctatgggctgtgattccccttgcccatcagagaggagcatttcaatctgctttcctgccttacatcaaggtgggcaagggattataattaattgcagggctcaagccaccaatctatgaagacctcaggccagggggtgaggaattagtgctggatttgaagctacgcactcagcctcaagaactccctggaatatccctgagaacatggggtttgaacggattttcagcctttttctgttcttgttttgatggttttgtgtaagaggaaatacaaataaagttatagccctttactgcacgac

SEQ ID NO: 2480 - DNA, 2279 bp, Homo sapiens
  source 1..2279: mol_type = genomic DNA
gactgaaaatgccgtcggtttcgaaagcggcggcagcggcgctgagcgggtcccccccgcagactgagaagccgacccactacaggtacctgaaggagttcaggacggagcagtgccccctgttttcacagcacaagtgcgcgcagcaccggccgttcacctgcttccactggcacttcctcaaccagcggcgccgcaggcccctccgcaggcgcgacggcaccttcaactacagccccgacgtgtactgctccaagtacaacgaagccaccggcgtgtgccccgacggcgacgagtcacttctcggcgtcctctatcctctgtgggcaccccctccggtgcctgcccccgtgggtgcccccactgtgcaccctttcctagcccggtggttctcgcacgttccctgggaaccagccggcagtgcagatccacgggcctcgtccacaccagctggggggaccacatgggccacgggcctcctaggtgattttgatgcatgtggctcgcagtctcgagaatgtgttaagggggtctggtggaccctccttgggttcaggtgtccctacctgcaccggacgacgggggacacagaacgcaagtaccacctgcgttactacaaaacaggaacctgcatccacgagacagacgcacgtggccactgcgtgaagaatgggctgcactgtgccttcgcgcacggccccctggacctgcggccgcccgtgtgtgacgtcagggagctgcaggcccaggaagccttgcagaacggccagctgggcggcggggaaggggtcccggatctgcagcctggggtcttggccagccaggccatgattgagaagatcctgagcgaggacccccggtggcaagcattgcttccagtcgcgctgctcaggcaccgtgtggcccatttttcagatgccaacttcgtgctgggcagctacaagacggagcagtgcccgaagccgccacgcctgtgccgccagggctatgcgtgcccacactaccacaatagccgggacaggcggcgcaacccccggcggttccagtacaggtccacgccctgccccagtgtgaagcacggggatgagtggggggaaccctcacgctgcgatggcggcgacggctgccagtattgccactcccgcacggagcagcagttccatcccgaggggcctgtcgggagtccggtgtccggggcgttttctgtgttcagtcacgcaggcctggttgcagaccccagtctctggtacccagctgagtggagctggcaccacgtgggccacagccgcaccataaatcctgagggagataaaccctcccgcctgggccccgccccagaaaatatcaagcggggaaatgactttgcctgtgatgggagggcagatgctgcgggaatggccccacatgtgtgcgtgttccctatctacaaatctacaaaatgcaacgacatgcgccaaaccgggtactgcccgcgcggccccttctgtgcctttgcacacgttgagaagagcctggggatggtgaatgaatggggctgtcacgacctccacctcacgagtccttcctccacgggcagcggccagccgggaaatgccaagcggagagactcgccggccgagggtggccctaggggcagcgagcaagacagcaagcagggggtgcgcgctcacggtgtttatgtctttgaacagaaccacctggccgtgtttgcagcggtccacccgccggcccccagcgtgagctccagcgtggcgtccagcctggcgtccagcgccggctccggcagctcctcccccactgcgctgcccgcgccccccgcccgtgccctcccgctcggccccgccagcagcactgtggaggccgtcctcgccctggagcccaccccttcctctcctacatcctctgctgtgcagggtgtggcgggggagctgggcatgggatcaggaggacagggctgctggagccacgtggtgggggccctcgctgcagtccctgcctggacacactctggggacttggagtgggaccccagcaccatcaggacccgcgtcaatgtgggcggcggcccggcggccagacccgcaatgactcttgcccgagagccgcagcttctggtcgttggtggttgccccacacggaactgctcaggcccagctgcaagcccccagcaactcctagacgatgccggccaaggaggccgaggagagagagactcttcccagcggccacttaggccacagaccacacatcggcaggacactagaccagtcccatcctga

SEQ ID NO: 2481 - DNA, 2180 bp, Homo sapiens
  source 1..2180: mol_type = genomic DNA
tttgaatccccggcggcggcgcggggcggccgcggaccgtgagtcagcattggcggcggccccagcgcgtggcagccgtgcgccgccaaggtgcgggtctcgttactcggcggtcaggagcgggccctcccttaggtgcgccccccgccaggttctgcgttagacctgcatcttagcaatgtgaatattgcatccctagagaaggacctggaagagcaagacggccacgacctgggagcagcaggtcccaggtcgctggccggctctgcacctgtcgccatccccggctccctgcccagagcaccatcgctacactcgccatcctctgcgtccacctcgccgctcggttcgctgtcccagcccctcccagggccggtgggctcctcagccatgacgcctccccagcagccgccacccctgcgttcagagccgggcacactgggctctgcagcctcatcctacagccccctaggtttgaacggtgtccccgggagcatctgggactttgtttccggcagcttctcccccagcccctcccccatcctgagtgccggccccccatcctcttcgagtgcaagtccaaacggagctgagctggcccgggtcaggcggcagctggacgaggccaagaggaagatccggcagtgggaggagtcctggcagcaggtgaagcaggtctgcgatgcctggcagcgagaggcgcaggaggccaaggagcgtgcccgtgtggccgatagcgaccggcagctggcgctgcagaagaaggaggaggtggaggcacaggtgatcttccagctccgcgccaagcagtgtgtggcctgccgggagcgggcccacggtgctgtcctgcggccctgtcagcaccacatcctctgtgagccgtgtgcggccaccgcacctgagtgcccctactgcaagggccagcccctgcagtggtgacctcagcggggacagccacctcctgctgggcaccctggctccagcgctcctcctgaccacggacatgtcgtcactcgcttctggtgccaccgacgtgaggaccgaggctgggagcccttcctgttacacgttatcatgaggctgggagccccgcctgcgcttggcctgacagcctttcctgtcacacgttgtcacctatctagtcctaccgacggtttcaaggtattttcctcaaaaaccttaaatgcaaacccacagaacccgcctgcctgtccctgaggggcctggtgcctccgggatccacgcggcgctgtgatcacagcagtttgtggtcctgacactactgtgactaggccactgggagctggggtctttcaaagcactttgtaaaccgaggaatttagttagaggttataaattgctctaagctgctttctgtttttttttaatatgcgataatatgaagctttatatgtgtactgtgaacttaaatatttcatatcagtttattgtcaattcatagtatgctaaatatattagatttcatattctgaaactagtacttatgaaatgagtgtttatctagtagtaagacctaggatttttacattttccaattaagtgcaaatagtatttataagcagagtgattatggattgagatgtttttaacttgatggaaggagctagttttcctgagcctgtgtgtgcaccaggcactggggctgatgttccagcctcgtggcgtgggagcaggagagctccgtcctgcatttctgtggtccgtggccgctgtttctgtgcgcctgcgcctcggagagcaagtgaaggagcatcatgggttttgttttctcccttaaccctctgaaagacagtttgatactaacaaaaaacgcagcagaggggatccgacgtcagagcttttagaattacttttttaagcagctgtcttctggctgggtgcggtggctcatgcctgtgatcccagcactttgggaggcgggtggatcacctaaggtcaggagttcaagaccagcctggccaacatggtgcaaccccgtcttagtaaaaatacaaaaattggcctggcgtgagagcgggcacctgtagtcccagctactcgggaggctgaggcaggagaatcgcttgaacctgggaggcagaggttgcagtgagccgagatcgcgccaccgcactccagcccgggtgacagagcgagactctggctcaaaaaaaaaaaaa

SEQ ID NO: 2482 - DNA, 500 bp, Homo sapiens
  source 1..500: mol_type = genomic DNA
gaggcctgcgcgtgcggtctgcagttcggccgcttcctcttggcgggtgggctgcagctatggagggcgagcctccacctgtggaggagcggcggcggctgcaggaggagctgaacgagttcgtggagagcggctgccggacgttggaggaggtgaccgcgtccctgggctgggacctagatagtctggatcccggggaagaggaggcggcggaggatgaagttgtgatatgtccatacgattccaatcatcacatgcctaaatcatctttggcaaagcacatggcatcttgtagattgaggaaaatgggctataccaaagaagaagaggatgaaatgtataatcctgagtttttctatgaaaatgtgaagataccttcgattactttgaataaggactcacaattccagataattaaacaagctagaactgcagttgggaaagacagtgattgttataatcaaataattggggtgagtataaagaggaattataaaatt

SEQ ID NO: 2483 - DNA, 776 bp, Homo sapiens
  source 1..776: mol_type = genomic DNA
atggggacctttgacctgtggacagattacctgggtttggcacacctggttagggctctgagtgggaaagagggtcctgaaaccaggctgagcccccagccagagccagagccaatgctggagccggatcagaagcgcagcctggagtcctcgccagctcccgaacgcctgtgctctttctgcaaacacaacggcgagtcccgggccatctaccagtcccacgtgctgaaggacgaggctggcagggtgctgtgtcccatcctgcgggactacgtgtgtccccagtgcggcgccacacgtgagcgcgcccacacccgacgcttctgcccacttactggccagggctacacctccgtctacagccacaccacccgaaactcggcaggcaagaagctggtccggcctgacaaggcgaagacacaggacacaggccaccgccgaggaggaggaggaggagcaggtttcagaggtgccgggaagtctgagccttcgccctcctgctctccctccatgtccacctaggaggctgcctacacctgggcaagggcacccgggctcggctggatttccaggaagacccaccctatgacgactgcccccactcccagaccctccccccagcctgggattgagccctggggatgacccggggttggcaagggaagagctgaaatcgccctgtccttggggaccccaccctttgtgccatctgccgtttccctagtgctgggcatccagtcagccctcaataaatgcttatgaatggatcaacaaca

SEQ ID NO: 2484 - DNA, 3055 bp, Homo sapiens
  source 1..3055: mol_type = genomic DNA
atgtccgctttctgcctgggcttggtcggccgcgcttcagcacccgccgagccggacagcgcctgctgcatggagctgcccgccgcggccggggacgcagtccggagtcccgccgccgccgccgccctcatcttccccgggggctccggggagctagaactggcgttagaggaggagctggcgctgctggcggccggggagcggccgtccgaccccggggaacaccctcaggccgagcctgggtctctggccgagggggccggaccgcagccgccgccctcccaggaccccgagctgctgtcggtgatccgacagaaggagaaggatctggtgttggcggcccggctgggtaaggcgctgctcgagaggaaccaggacatgagccggcagtacgagcagatgcataaggagctgacagacaagctcgagcacttagagcaagagaaacatgaattgagaagacgatttgagaaccgagaaggggagtgggaaggccgagtgtcagagctggagagtgatgtgaagcagctacaggatgagttggagaggcagcagattcatctgcgggaagcagatcgagaaaaatcacgggctgtccaggaactgtcggaacagaaccaaaggctattggatcagctcagcagggcatcagaagttgagagacaactctccatgcaggtccacgccctcagagaagactttcgggagaaaaactcatcaaccaaccagcacattatccggctggagagccttcaggccgagatcaagatgctgtcagatcggaaacgggagctggagcatcgtctcagcgctactttagaggaaaatgacctgctccaagggaccgtggaggagctacaggaccgggtgctaatcctggagaggcagggccatgacaaggacctacagctgcaccaaagccagctggagcttcaggaggtgcgtctctcctgccgacagctgcaggtgaaggtggaagaactcactgaggagaggagtctgcagagctctgccgccaccagcacatccctcctgtcagagatcgagcagagcatggaggctgaggagctggagcaggagcgagagcagctgagactgcagctctgggaagcctactgccaggttcgctatctgtgctcacaccttcgaggcaatgacagtgctgactcagccgtctccacggactcctccatggacgagtcttcagaaacctcgtccgccaaggatgtgccagccggcagcttgcgcactgccctcaatgagctcaagagactgatacagagcattgtggatggcatggagcccacggtgacactgctgagtgtggagatgactgccctaaaagaggagagagaccgactcagagtcacttctgaggacaaggagccaaaggagcagcttcagaaggccatcagggaccgcgacgaggccattgcaaagaagaatgctgtggagctggaacttgccaagtgcaggatggatatgatgtctctgaacagccagttgctggatgccattcagcagaaactgaacctctcgcagcagctggaagcttggcaggatgacatgcacagggtcattgaccggcagctgatggacacgcacctgaaagaacggagccagccggctgctgccctctgcaggggccacagcgctgggcggggggatgagcccagcatcgctgaaggcaaacgactcttctcattcttcaggaaaatttaagttgggaggagtcaggccaccaaagatgggtggactggaggcagctggaaaggcggtgcaggcaaggcctcccctgcagcttgcacctcagcagctgccctgcccctcatgctagggccccatgggtccgggagggcctgctccctttcgtcggtggggatggagacctagaggtgggggcctgccttggccactgaaggcttcccttggcccaccgcctggccaagcccacgcctgggcttctccaggaccacgtgcttgagcagggttaggccacctcccagaggggccccttggtgttgggctttgcagctcacacccaacagatcgcagcccacccccaggcactgctgcctccttgattttagcaaatggggaacagaaggaatggaggcccttctctgcatgcctcaggaggcctgagccccaggggcctagacctgtgggggcagcgggccaggcctgagcctccattccttccccagcccctggcccagggtcaaaggagagatggcagcccctcccccgcatgcatgcacctcagctggcaggaggccaagcctctggccgcagggtctaagagccggggcttacccaagctcagctgaggccacccgagccccagggaggaagaaggccctgtccccctgtcgccactgctctccctcccagccttcagtctctgccccttagcagggcctggccaggcagagtgttatcaccagtcatctgcaggctttagccatccagccctttcccctgctcagggctggggttggacggggtctcctcctcccacagctccctcctccacccctcacatacatacataatttcttggcctagccaaacaagtccaggccactgaatggcaccagaggggtctgtggtcagccaccccaccttgagggcagcacaggcaccacggggtggaggggagggggaggctgccggaagcctccagatgctgcctgcctgcctgcagaagcctgcagtggctgctgctcctgcctctgcagccgcccctcctcctccacccaggccccaactcagaggctccgcggcccggccagccctcagctgctcacaaccgattcagtctccctccctccctcacgtggggaaagcacagcagggatgcgcggcaagaatgtacctgtagatgtgtacataccacagtgctgtaattttgtatgtagcaatcatgtaaatacatgtatggattttataatatacatatataaaaatctataaaggcatatttttagaaaaacagcacaccactgcttcttttgaaaatagtctgaataagaataaaatgaatttctacaga

SEQ ID NO: 2485 - DNA, 4487 bp, Homo sapiens
  source 1..4487: mol_type = genomic DNA
caggaaactccagcacctcctagaacatcttttgtggaatggcacctcatgggggcccttggatcatgtaccccttgtattcaacagtaaacatcttcctataatcattgcttcattaacgataatgtttatcatttaaaagtgcctgtgtgaagtcacttttgctggaaaactgcagcttgggagctttctttgtattcacatcccactcttctgtcaagtacactttaccctgaccttatgagtggatgaagatacctcagttgtctgactttgccaattgcttaatttcagaatttaaaaaggggaaagaaaaacatcctgctaaaatatgaacatctgagtgtcttattttccaacatcgtcaatagctgtgagcgtcagcattaaatattctcccaaggagtgccatgatattgaagtcactttattaataacagctgtatctgcaaaacagtcaagagactcggacgttgaaagccagagatgacactgagcatgcttttattgcggcctaccatctttaagtgggacatattgattgatgagtgattgcctgtccatacactctctcatcatcctgttccttggattggacttcactaagcaatttatcactcaccttcagacttacatgtgggagttttcacaacagtagttttggaatcattagaacttggattgatttcatcatttaacagaaacaaacagcccaaattactttatcaccatggctttgaacgttgccccagtcagagatacaaaatggctgacattagaagtctgcagacagtttcaaagaggaacatgctcacgctctgatgaagaatgcaaatttgctcatccccccaaaagttgtcaggttgaaaatggaagagtaattgcctgctttgattccctaaagggccgttgttcgagagagaactgcaagtatcttcaccctccgacacacttaaaaactcaactagaaattaatggaaggaacaatttgattcagcaaaaaactgcagcagcaatgcttgcccagcagatgcaatttatgtttccaggaacaccacttcatccagtgcccactttccctgtaggtcccgcgatagggacaaatacggctattagctttgctccttacctagcacctgtaacccctggagttgggttggtcccaacggaaattctgcccaccacgcctgttattgttcccggaagtccaccggtcactgtcccgggctcaactgcaactcagaaacttctcaggactgacaaactggaggtatgcagggagttccagcgaggaaactgtgcccggggagagaccgactgccgctttgcacaccccgcagacagcaccatgatcgacacaagtgacaacaccgtaaccgtttgtatggattacataaaggggcgttgcatgagggagaaatgcaaatattttcaccctcctgcacacttgcaggccaaaatcaaagctgcgcagcaccaagccaaccaagctgcggtggccgcccaggcagccgcggccgcggccacagtcatggcctttccccctggtgctcttcatcctttaccaaagagacaagcacttgaaaaaagcaatggtaccagcgcggtctttaaccccagcgtcttgcactaccagcaggctctcaccagcgcacagttgcagcaacacgccgcgttcattccaacagataattctgaaataatcagcagaaacggaatggaatgccaagaatctgcattgagaataactaaacattgttactgtacatactatcctgtttcctcctcaatagaattgccacaaactgcatgctaaataaagatgtagttcttctggacagaccacaactctaagaagctagtgctgctatctcatatatgagtattaaatatggtatgcttagtatattccaacctaagatagttaactacctgagaccagctgtgatgtttaaagacataaaggataaagtttacttttaaagggtttctaaacatagtttctgtcctaggaatattgtcttatctccataactatagctgatgcagaaagtccagccagtttactcatttcgattcagaatatttcaaatttagcaataaacaattagcattagttaaaaaagaaacatattccaagggcaggttcgattctagctctaattactgtcatgtcatttacccactggatcaaagggtatgtttcacttcttgacaatataaatgctgcagcaaagatgagaggtgaagtaaaaccgatacctgtcctgcaggtctaaaatttgaatggaaattcaagcacaagtactggggacacatcaaagtgtggtgtttggtttgcctggagatgccacgttgaatcatgtgattctagattaacattaaatagattgaaaaagaaactttgcacggtatgagcttcataccccaccaaacaaagtcttgaaggtattattttacaagtatatttttaaagttgttttataagagagactttgtagaagtgcctagattttgccagacttcatccagcttgacaagattgagaggcccatgccaacagtctaatctaagagattagtctttcaaactcaccatccagttgcctgttacagaataactcttcttaactaaaaacctagtcaaacaaggaagctgtaggtgaggagatctgtataatattctaatttaagtaagtttgagtttagtcactgcaaatttgactgtgactttaatctaaattactatgtaaacaaaaagtagatagtttcactttttaaaaaatccattactgttttgcatttcaaaagttggattaaagggttgtaactgactacagcatggaaaaaaatagttcttttaattctttcaccttaaagcatattttatgtctcaaaagtataaaaaactttaatacaagtacatacatattatatatacacatacatatatatactatatatggatgaaacatattttaatgttgtttacttttttaaatacttggttgatcttcaaggtaatagcgatacaattaaattttgttcagaaagtttgttttaaagtttattttaagcactatcgtaccaaatatttcatatttcacattttatatgttgcacatagcctatacagtacctacatagtttttaaattattgtttaaaaaacaaaacagctgttataaatgaatattatgtgtaattgtttcaaacatccattttctttgtgaacatattagtgattgaagtattttgacttttgagattgaatgtaaaatattttaaatttgggatcatcgcctgttctgaaaactagatgcaccaaccgtatcattatttgtttgaggaaaaaaagaaatctgcattttaattcatgttggtcaaagtcgaattactatctatttatcttatatcgtagatctgataaccctatctaaaagaaagtcacacgctaaatgtattcttacatagtgcttgtatcgttgcatttgttttaatttgtggaaaagtattgtatctaacttgtattactttggtagtttcatctttatgtattattgatatttgtaattttctcaactataacaatgtagttacgctacaacttgcctaaaacattcaaacttgttttcttttttctgtttttttctttgttaattcatttaaactcattgaaaacatagtatacattactaaaaggtaaattatgggaatcactgaaatatttttgtagattaattgttgtaacattgtctttcttttttttcttttgtttcatgattttgatttttaaaattattagcacacaactattttcagccctttaataatggagcatcaaaaacatcacctgtaaccccaagcaaatatagaagactgtattttttactatgatatccattttccagaattgtgattacaatatgcaaagagtcataaatatgccatttacaataaggaggaggcaaggcaaatgcatagatgtacaaatatatgtacaacagattttgctttttatttatttataatgtaattttatagaataattctgggatttgagaggatctaaaactatttttctgtataaatattatttgccaaaagtttgtttatattcagaagtctgactatgatgaataaatcttaaatgctttgtttaattaaaaaacaaaaatcaccaatatccaagacatgaagatatcagttcaacaaatactgtagttaagagactaactctccacttgtatgggaactacatttcactcttggttttcaggatataacagcacttcaccgaaatattctttcagccataccactggtaacatttctactaaatctttctgtaacacttaaagaattccctcattcattaccttacagtgtaaacaggagtctaatttgtatcaatactatgttttggttgtaatattcagttcactcacccaatgtacaaccaatgaaataaaagaagcatttaaaagga

SEQ ID NO: 2486 - DNA, 3702 bp, Homo sapiens
  source 1..3702: mol_type = genomic DNA
aggaaatttcggggaaccaaaaaaggctggaagaacatgaagatggagcagtcataaaccacccactcaaggaccatctccttcaggaccatccacacgagactcagattgtctgaattgagctatcgcaacttaatgctaaaagctccttaaagctacagatttatgacatagttccttccaaaatattacatcataaatcattgagaagattaaaaaaaaacacttgaagaaattgtagttttaaacatctctgcatatattttggatagctactaggttactttaactgtcattaaggagcacagacttactgaagctttactggacagaatcctgggaaatcgatatcattataaggttatatttcccagttagcgggtgaagggctggagaccttattgcagtcatggctttcacaaattacagcagtctgaatcgagctcagctaacctttgaatatctgcacacaaattcaaccactcacgaattcttgtttggtgcccttgctgaactggttgataatgcaagagatgctgatgccaccagaatagatatttatgcagaaagacgagaggaccttcgaggaggatttatgctttgctttttggatgatggagcaggaatggatccaagtgatgctgccagtgtgatccagtttgggaagtcggccaagcgaacacctgagtctactcagattgggcagtacgggaatgggttaaaatcgggctcaatgcgcattgggaaggattttatcctgttcaccaagaaggaagacaccatgacctgcctcttcctgtctcgcacgtttcatgaggaagaaggcattgatgaagtgatagtcccactgcccacctggaatgctcggacccgggaacctgtcacagacaatgtagagaaatttgccattgagacagaactcatctataagtactctccattccgcactgaggaggaagtgatgacccagtttatgaagattcctggggacagcggaacattggtgatcatcttcaatctcaaactcatggataatggagagccagaactagacataatctcaaatccaagagatatccagatggcagagacgtccccagagggcacgaagccagagcggcgctcgttccgtgcctatgccgctgtgctctatattgatccccggatgaggatcttcatccatgggcacaaggtgcagaccaagaggctctcctgctgcctgtacaagcccaggatgtacaagtacacgtcaagccgtttcaagacccgtgcggagcaggaggtgaagaaagcagagcacgtagcaaggattgctgaagagaaggcgcgggaggcagagagcaaagctcggacattagaagtacgcctaggtggagacctcacgcgggactccagggtgatgttgcgacaggtccagaacagagccatcactctgcgcagagaagccgatgtcaagaagaggatcaaggaggccaagcagcgagcacttaaagaacctaaggaactgaattttgtttttggtgtcaacattgaacaccgggatctggatggcatgttcatctacaactgtagccgactgatcaaaatgtatgagaaagtgggcccacagctggaagggggcatggcatgtggcggggttgttggggttgttgatgtgccctacctggtcctggagcctacacacaacaaacaggactttgctgatgccaaggagtaccggcacctgctccgagcaatgggggagcacctggcgcagtattggaaggatattgccatcgcccagaggggaatcatcaagttctgggatgagtttggctacctctctgccaactggaaccagcccccatccagtgagctgcgttacaaacgccggagagctatggaaatccccaccaccatccagtgcgatttgtgtctgaaatggagaaccctccccttccagctgagttctgtggaaaaagattaccctgacacctgggtttgctccatgaaccctgatcctgaacaggaccggtgtgaggcttctgaacaaaagcagaaggttcccctgggaacattcagaaaggacatgaagacgcaggaagagaagcagaaacaactgacagagaaaattcgccagcagcaggagaagctggaggcccttcagaaaaccacacccatccgctcccaagcagacctgaagaaattgcccttggaagtgaccaccagaccttccactgaggaacctgtgcgtagacctcagcgtcctcggtcgccccctttacctgctgtgatcaggaacgcccccagcagacccccttctttgccaactcctagaccagccagccagccccgaaaggctcctgtcatcagcagtaccccaaagctccctgctttggcagcccgggaggaggccagcacatctaggctgctccagccacctgaggcaccccgaaagcctgccaacactctcgtcaagactgcatcccgacctgcccctctggtgcagcaactgtcaccatctttactgcccaactccaagagccctcgggaggttccttctcccaaagtcatcaagactccagtggtgaagaagacagagtcacccatcaaactctccccggctacccctagtcggaagcggagtgtcgcagtttctgatgaggaagaagttgaggaggaagctgagaggaggaaggagaggtgcaagcggggcagatttgttgtgaaggaggaaaagaaggactcgaatgagctctcagacagtgctggggaagaggactcggctgacctcaagagagctcagaaagataaagggctgcacgtggaggtgcgtgtgaacagggagtggtacacgggccgtgtcacagccgtggaggtgggcaagcatgtggtgcggtggaaggtgaagtttgactacgtgcccacagacacgacaccaagagaccgctgggtggagaaaggcagtgaggatgtgcggctgatgaaacccccttctccggaacatcagagccttgatacacaacaggagggcggggaggaggaggtgggccctgtggcccagcaggccatagctgtcgcagagccctccacttccgaatgcctccgcattgagcctgacaccactgccctgagcaccaatcacgagaccatcgacctgcttgtccagatcctccggaattgtttacggtacttcctgcctccaagtttccccatctccaagaagcagctgagtgctatgaattcagatgagctaatatcttttcctctgaaggagtacttcaagcaatatgaagtagggctccaaaacctgtgcaattcctaccagagccgtgctgactcccgggccaaggcctccgaggaaagcctgcgcacctccgagaggaagctccgcgagacggaggagaagctgcagaagctgaggaccaacatcgtggcactcctgcaaaaggtgcaggaggacatagacatcaacacagatgatgagctggacgcctacattgaggacctcatcaccaagggggactgaaggcaggagagagagcagctcccctgcccacctgcccctcaaccctgtagctgcagggggaggggacttcattcatgggttggtggtcgcaccttggtttgacttacacgggacatttgtgtttttggaggaaaagataccctgattctttgaatcttccttaagtttataaatatttattttttaaaagaaga

SEQ ID NO: 2487 - DNA, 6333 bp, Homo sapiens
  source 1..6333: mol_type = genomic DNA
agtgctgagcgaaccggaagtcggtccgcggcgttttctgcccgcggtgcgcagcgctgagtgtcgcggcagcagcctgtgcttgcgcctcaagtctttccgaggggccagtgggcagcgcgggcctcggggtcctggggcgagacgcttgttctaaagacgaaggggaactccctagtgctacaggctgtttcaggaagccaattaattttgtacacataatacttaattaccttctaataattggagcagaagatgaacccaactaatcctttcagtgggcagcagcctagtgctttttcggcgtcttctagtaatgtaggaacacttccatctaagccgccatttcgatttggtcaaccttctctttttggacaaaacagtaccttatctgggaagagctcgggattttcacaggtatccagctttccagcgtcttctggagtaagtcattcctcttcagtgcaaacattagggttcacccaaacctcaagtgttggacccttttctggacttgagcacacttccacctttgtggctacctctgggccttcaagttcatctgtgctgggaaacacaggatttagttttaaatcacccaccagtgttggggctttcccaagcacttctgcttttggacaagaagctggagaaatagtgaactctggttttgggaaaacagaattcagctttaaacctctggaaaatgcagtgttcaaaccaatactgggggctgaatctgagccagagaaaacccagagccaaattgcttctgggttttttacattttcccacccaattagtagtgcacctggaggcctggcccctttctcttttcctcaagtaacaagtagttcagctaccacttcaaattttaccttttcaaaacctgttagtagtaataattcattatctgcctttacccctgctttgtcaaaccaaaatgtagaggaagagaagagaggacctaagtcaatatttggaagttctaataatagcttcagtagcttccctgtatcatctgcggttttgggcgaacctttccaggctagcaaagcaggtgtcaggcaggggtgtgaagaagctgtttcccaggtggaaccacttcccagcctaatgaaaggactgaaaaggaaggaggaccaggatcgctccccaaggagacatggccacgagccagcagaagattcggatcctctgtcccggggcgatcatcctccagacaaacgacctgtccgcctgaatcgaccccggggaggtactttatttggtcggacgatacaggatgttttcaaaagcaataaggaagtaggtcgtctgggcaacaaggaggccaaaaaggaaactggctttgttgagtctgcagaaagtgaccacatggctatcccaggagggaatcagtctgtcctggcaccttcccggattccaggtgtgaataaagaggaagaaactgaaagtagagagaagaaagaagattctctaagaggaactccggcgcgtcagagtaacagaagcgagagcacagacagtcttgggggcttgtctccctctgaagtcacagccatccagtgcaagaacatccctgactacctcaacgacaggaccattctggagaaccattttggcaaaattgctaaagtgcagcgcatctttaccaggcgcagcaaaaagcttgcagtggtacatttctttgatcatgcatctgcagccctggctagaaagaaggggaaaagtttgcataaagacatggctatcttttggcacaggaagaaaataagccccaataagaaacccttttccctgaaggagaagaaaccaggtgacggtgaagtcagcccgagcacagaggatgcaccctttcagcactctcctcttggcaaggccgcagggaggactggtgctagcagcctcctgaataaaagctctccagtgaagaagccaagtcttctaaaggcccaccaattcgagggagactcttttgactcagcctccgagggctccgagggcctcgggccatgtgtgctctccctcagtaccctgataggcactgtggctgagacatccaaggagaagtaccgcctgcttgaccagagagacaggatcatgcggcaagctcgggtgaagagaaccgatctggacaaagcgaggacttttgttggcacctgcctggatatgtgtcctgagaaggagaggtacatgcgggagacccgtagccagctgagcgtgttcgaagtggtcccagggactgaccaggtggaccacgcagcagctgtgaaagagtacagtcggtcctcggcggatcaggaggagcccctgccccacgagctgcggcccttgccagtgctcagcaggaccatggactacctggtgacccagatcatggaccagaaggagggcagcctgcgggattggtatgacttcgtgtggaaccgcacgcgtggcatacggaaggatatcacgcagcagcacctctgtgaccccctgacggtgtccctgattgagaagtgcacccggtttcacatccactgtgcccacttcatgtgtgaggagcccatgtcctcctttgatgccaagatcaataatgagaacatgaccaagtgcctgcagagcctgaaggagatgtaccaggacctgagaaacaagggtgtcttctgtgccagcgaagcggagttccagggctacaatgttctgctcagtctcaacaagggagacatcctaagagaagtacaacagttccatcctgctgttagaaactcatctgaggtgaaatttgctgttcaggcttttgctgcattgaacagtaataattttgtgagatttttcaaactggtccagtcagcttcttacctgaacgcttgtcttttacactgttacttcagtcagatccgcaaggatgctctccgggcgctcaactttgcgtacacggtgagcacacagcgatctaccatctttcccctggatggtgtggtgcgcatgctgctgttcagagactgtgaagaggccaccgacttcctcacctgccacggcctcaccgtttccgacggctgtgtggagctgaaccggtctgcattcctggaaccagagggattatccaagaccaggaagtcggtgtttattactaggaagctgacggtgtcagtcggggaaattgtgaacggagggccattgccccccgtccctcgtcatacccctgtgtgcagcttcaactcccagaacaagtacatcggggagagcctggccgcggagctgcccgtcagcacccagagacccggctccgacacagtgggcggagggagaggagaggagtgtggtgtagagccggatgcacccctgtccagtctcccacagtctctaccagcccctgcgccctcaccagtgcctctgcctcctgtcctggcactgaccccgtctgtggcgcccagcctcttccagctgtctgtgcagcctgaaccaccgcctccagagcccgtgcccatgtactctgacgaggacctggcgcaggtggtggacgagctcatccaggaggccctgcagagggactgtgaggaagttggctctgcgggtgctgcctacgcagctgccgccctgggtgtttctaatgctgctatggaggatttgttaacagctgcaaccacgggcattttgaggcacattgcagctgaagaagtgtctaaggaaagagagcgaagggagcaggagaggcagcgggctgaagaggaaaggttgaaacaagagagagagctggtgttaagtgagctgagccagggcctggccgtggagctgatggaacgcgtgatgatggagtttgtgagggaaacctgctcccaggagttgaagaatgcagtagagacagaccagagggtccgtgtggcccgttgctgtgaggatgtctgtgcccacttagtggacttgtttctcgtggaggaaatcttccagactgcaaaggagaccctccaggagcttcagtgcttctgcaagtatctacagcggtggagggaagctgtcacagcccgcaagaaactgaggcgccaaatgcgggctttccctgctgcgccctgctgcgtggacgtgagcgaccggctgagggcgctggcgcccagcgcagagtgccccattgctgaagagaacctggccaggggcctcctggacctgggccatgcagggagattgggcatctcctgcaccaggttaaggcggctcagaaacaagacagctcaccagatgaaggttcagcacttctaccagcagctgctgagtgatgtggcatgggcgtctctggacctgccatccctcgtggctgagcacctccctgggaggcaggagcatgtgttttggaagctggtgctggtgttgccggatgtagaggagcagtccccagagagttgtggcagaattctagcaaattggttaaaagtcaagttcatgggagatgaaggctcagtggatgacacatccagcgatgctggtgggattcagacgctttcgcttttcaactcacttagcagcaaaggggatcagatgatttctgttaacgtgtgtataaaggtggcccatggcgccctcagtgatggtgccattgatgctgtggagacacagaaggacctcctgggagccagtgggctcatgctgctgcttccccccaaaatgaagagtgaggacatggcagaggaggacgtgtactggctgtcggccttgctgcagctcaagcagctcctgcaggctaagcccttccagcctgcgcttcctctggtggttcttgtgcctagcccaggaggggacgccgttgagaaggaagtagaagatggtctgatgctacaggacttggtttcagctaagctgatttcagattacactgttaccgagatccctgataccattaatgatctacaaggttcaactaaggttttgcaagcagtgcagtggctggtttcccactgcccccattcccttgacctctgctgccagactctcattcagtacgtcgaagacgggattggccatgagtttagtggccgctttttccatgacagaagagagaggcgtctgggcggtcttgcttctcaggagcctggcgccatcattgagctgtttaacagtgtgctgcagttcctggcttctgtggtgtcctctgaacagctgtgtgacctgtcctggcctgtcactgagtttgctgaggcagggggcagccggctgcttcctcacctgcactggaatgccccagagcacctggcctggctgaagcaggctgtgctcgggttccagcttccgcagatggaccttccacccctgggggccccctggctccccgtgtgctccatggttgtccagtacgcctcccagatccccagctcacgccagacacagcctgtcctccagtcccaggtggagaacctgctccacagaacctactgtaggtggaagagcaagagtccctccccagtccatggggcaggcccctcggtcatggagatcccatgggatgatcttatcgccttgtgtatcaaccacaagctgagagactggacgcccccccggcttcctgttacatcagaggcgctgagtgaagatggtcagatatgtgtgtatttttttaaaaacgatttgaaaaaatatgatgttcctttgtcgtgggaacaagccaggttgcagacgcagaaggagctacagctgagagagggacgtttggcaataaagccttttcatccttctgcaaacaattttcccataccattgcttcacatgcaccgtaactggaagaggagcacagagtgtgctcaagaggggaggattcccagcacagaggatctgatgcgaggagcttctgctgaggagctcttggcgcagtgtttgtcgagcagtctgctgctggagaaagaagagaacaagaggtttgaagatcagcttcagcaatggttgtctgaagactcaggagcatttacggatttaacttcccttcccctctatcttcctcagactctagtgtctctttctcacactattgaacctgtgatgaaaacatctgtaactactagcccacagagtgacatgatgagggagcaactgcagctgtcagaggcgacaggaacgtgtctaggcgaacgactaaagcacctggaaaggctgatccggagttcaagggaagaggaagttgcctctgagctccatctctctgcgctgctagacatggtggacatttgagcagcctgacctgtggggagggggtctctcccgaagagtttctgtttttactcaaaataatgttattctcagatgcttgatgcactgttggaaatgtgattaatttaatcatgcagataaaccatttaaatgtca

SEQ ID NO: 2488 - DNA, 1030 bp, Homo sapiens
  source 1..1030: mol_type = genomic DNA
ggagcccggagctgcagccaccggggagccaggtaccttccgcgagacgtcgaggggcgagtcctagtctcttttctccgcactggaagacttgaacacttccttctctggtctctgtcacccaggctggagtgtagtggcgcaatctcagctggctggagccttgacctccttgggctcaagctatcctcccacctcagcctctcaaatagctgggactacaggcagcaaagcacctgctctgagtggccatggggaagcgatacttctgtgactactgcgaccgctccttccaggacaacctccacaaccgcaagaagcacctgaacgggctgcagcacctcaaggccaagaaggtctggtacgacatgttccgagatgcagctgccatcttgctggatgagcagaacaagcggccctgcaggaagtttctactgacaggccagtgcgactttggctccaactgcagattttcccacatgtcagagcgagacctgcaggagctgagcatccaggtggaggaggagaggcgagccagggagtggctactagatgctcctgagctccccgagggccatctggaggactggctggagaagagagccaagcggctgagctcagccccaagtagcagggctgaacccatcagaaccactgtcttccagtaccccgtgggctggccaccagttcaggagctgcctccatccctgcgggcacccccacctggggggtggcctctgcagcccagagtccagtggggctgagccccttgcccccgactgacccccacgtggtcacttttctcatcagtcacaataggaagccaagcccggttcctgctacgccccatggaggctccgagaccatctgcccagcctcactgaggctcaggacacggccacaccaagtgcagccctcgtcctgggtctgcaccgggcagctctcccctcactctcctccacctgcccccctgcttcttaagaagatgggggagaaaacttccaaatgtttataaagaaagtctgtcacc

SEQ ID NO: 2489 - DNA, 410 bp, Homo sapiens
  source 1..410: mol_type = genomic DNA
cagacatcaccatcctcctccccagtaccagcccagccacacgccaccatgtgccacaccagctgctccccagcctgccagccaacctgctgcatacacagcccctgccaggcatcctgctatgtgcccgtgagctgccagtcctccgtgtgcatgcccgtgagctgcacgcgcattgtgtgcgtggctccctcctgccagccctccgtgtgcgtgcccgtgagctgcaggcccatcatatatgtgactccctcttgccaatcttcggggtgctgccagcccccctgcaccactgccctctgcagacccatctcctgcagcaccccttcctgctgctgaccagctgctcctggtacacgggggtacacacctgtatccctccgtgaataagcatctggtggacccccaga

SEQ ID NO: 2490 - DNA, 1255 bp, Homo sapiens
  source 1..1255: mol_type = genomic DNA
tcacacactcacttacacctcccccagctcacctcctccccaccccagcatggccgcgtccaccatgtccatccgctccagcgcttactccgactcctggcaggtggacgactgcccagagagctgctgtgagcccccctgctgcgccaccagctgctgcgccccggccccctgcctgaccctggtctgcaccccagtgagccgtgtatccagcccctgctgccaggtgacctgtgagcccagcccctgccaatcaggctgcaccagctcctgcacgccctcgtgctgccagcagtctagctgccagccggcttactgcacctcctccccctgccagcaggcctgctgcgtgcccgtctgctgcaagcctgtgtgctgcgtgcccgtctgctgtggggcttcttcgtgctgccaacagtctagctaccagccagcttgctgtgcctcttcctcctgccagccggcctgctgtgtgcccgtctgctgcaaacctgtgtgctgtgcgcccacctgctctgaggattcctattcatgctgccaacagtctagctgccagccagcttgctgcacttcctccccctgccagcagtcctactgtgtgcctgtctgctgtaagcctgtctgctgcaaacccatctgctgtgtgcctgtctgctctggggcttcctctttgtgctgccagcagtctggctgccagccggcttgctgcaccacctcctgctgcagaccctcctcctctgtgtccctcctctgccgccctgtgtgcaggcccgcctgctgcgtgcccgtctcctcctgctgtgcccccacctcctcccgccagcccagctattgccgccaggcctcctgtgtgtcccttctctgccgccctgtgtgctcccgcccggcctgctacagcttctcctcaggccagaagtccagctgctgacggtcatgtcccccagggccagccgggctcaggccccacctccctgccagtccttggacctcccagcccacccagcctcagcacagctcaacacagaaggagcagccccagccacagccgcccagccccggggtctcagatgctcactggctcctccctgacctcccccccgggcaggcgagccctggcttctcctcacggtgcttcctggctgcagaccacaaccctccgctggtcgctggttggggacgggccctcctgacccgggtctcacccccagcagcgtcaccctctgcccctgagcaccaataaagcgtctgcggcccc

SEQ ID NO: 2491 - DNA, 5817 bp, Homo sapiens
  source 1..5817: mol_type = genomic DNA
ctccgcacccgctccccgctcgggccgaggcgccgcggccgcgcgcccctcctggaggaggaggaggaaggaggcgggaggaggagttgccgagaggagaaggcgagcgcggcagtcgcgccggcgctgggcgaggaagcggagccgggccgcctccggaaaatggctccaaaggttaaatgaagcaggaaaaatacatagatgcagccttgcagcctctccagatgtttggggataatattccagatagaaatattgatcccttggattaggtaactagtcataatgaagaaaattagtcttaaaaccttacggaaatcttttaacttgaataaaagtaaagaagaaactgatttcatggtagtacaacaaccatcgctagccagtgactttggaaaagatgattccttatttggtagctgctatggtaaagatatggccagctgcgatatcaacggtgaagatgaaaaaggcggaaaaaacagatcaaaaagcgagagcctgatgggtacgctaaaaaggcggctttctgcaaaacagaagtcaaaaggcaaggcgggcacaccctctgggagctctgccgacgaggacaccttctcctcctcctcagcacccatagtctttaaagacgtgagagctcagaggccgataaggtccacgtcgctccgcagccatcactacagtcccgcgccgtggcctctgcggcccacaaactccgaggagacctgcatcaagatggaggtgagagtcaaggccttggttcactcttccagcccgagtccagccctgaatggcgtccggaaggatttccacgacctccagtctgagaccacgtgccaggagcaagccaattcactgaagagctcggcttctcataatggagacctgcatcttcacctggatgaacatgtgcctgtcgttattggacttatgcctcaggactacattcagtatactgtgcctttagatgaggggatgtatcctttggaaggatcacggagctattgtctggacagctcttctcccatggaagtctctgcggttcctcctcaagtgggagggcgcgctttccccgaggatgagagtcaggtagaccaggacctagttgtcgccccagagatcttcgtggatcagtccgtgaatggcttgttgattggcaccacgggagtcatgttgcagagcccgagagcgggtcacgatgatgtccctccactctcaccattgctacctccaatgcagaataatcaaatccaaaggaacttcagtggactcactggcacagaagcccacgtggctgaaagtatgcgctgtcatttgaattttgatccgaactctgctcctggggttgcaagagtttatgactcagtgcaaagtagtggtcccatggttgtgacaagccttacagaggagctgaaaaaacttgcaaagcaaggatggtactggggaccaatcacacgttgggaggcagaagggaagctagcaaacgtgccagatggttcttttcttgttcgggacagttctgacgaccgttaccttttaagcttgagctttcgctcccatggtaaaacacttcacactagaattgagcactcaaatggtaggtttagcttttatgaacagccagatgtggaaggacatacgtccatagttgatctaattgagcattcaatcagggactctgaaaatggagctttttgttattcaaggtctcggctgcctggatctgcaacttaccccgtcagactgaccaacccagtgtcccggttcatgcaggtgcgctcgttgcagtacctgtgtcgttttgttatacgtcagtataccagaatagacttaattcagaaactgcctttgccaaacaaaatgaaggattatttacaggagaagcactactgaaagattgagaaccctgcatcttgcactttgggaataagaacaagagattgaaatacagtttacaaactttcattgccatcaaaatcttttgctgccataactatttcagttttatgtgtaaaagagtcatcagtttgtttaggggtggggaagtgtcagcaaggtgtcttgggtttattttggttctttaaaaaagggaagtcttgaggttttagaggtgtgaattatgtttcatcaatgtgcagaataatcacaatgtgaattatcaaattctcctcaatgccccccccgcccagtcctttgctgctatccactgtgatttttatgcattaaaagcacatttcatgtgtattcaaccctaagtaaagttgaatgaaacttaacagaatggaaattgctatgtctttttaaatggtccattttcaaaagacagtgttgaataaacatacctgtgtgataaaacacagaatttacatatacactgaagatgagtttttaatctcttactttaaaaagatttatttagaatcgtgaattgacataatcttgggtaatggaacggagatctgcaacatatcttttaacaacacttttttctaaattatttctaaggttgtgctaattcttttggttgtgaaaagttgaatttttctgttgccttcgttttcatcttctagtttgtctattttaataaatggccttacattaaaaaattgtaaagaaatgtataccaccaatttagaaattgttgccttttctgtaattaaactcgggtacaaattggcataacatgaaaacctatggaactagaattattattaaagaaatattagatgatcatagcttcctgtgatagcatttttttgtgtgttacctatccttttggtaaaatgttttatctgtgatttctttagcttagtcaacattttcttgggtgaacttgattgtcaactaattttcataaatggactggattctcttgcaacattaatgtttataaaaagttttaaattgatttgaatagaaagaaaacattgttttaaagttggatttatatttttcttctatgtagttactataaaagtgtgctggatttgaccaatccttacccccactataaagagaacccgtgatgactttagtttaaaaattgtggaaattgtggagcaatttttctcacaatgtgagaaaaattctaaaccatattagataatgtggaagtcatattgtctatcatatatactgccatttaaaaataggtttttaaaatttagctaagtcttaagtaatttgccgttgctaataattttatctccttgagtcggttgttggggagagatgttatattcaataatttttagttattttgtaatgcagagtgtttattcatttcacagttctgcaatggatgtagtattttgggattgccctgtccagaaaattttcagctacacacctttaaaggaaaatgtttctatctcagatgaaacatgtaatttgggatggttcttcctttgtcacttaaaggaagagataggaaaagtctcttacccactttaaacatgagggtaaaggtttaggtcaaacttactggctttgtcattcaagcatatctgaatcctcacttttttctctttgctttttagggtcagaactgagatattaccaagaaaaggcacaatgccataatattatggtgttatggtattttgacttaaaggggaaaaggtacttaattttggtgggatgttgattgtaccttgttaaaaagactctcattttctcatatgttttctcctaataagatggaatatggagtatactgtaataatataagtgttcattataagctatttggattaagaactattgcagagttgtaagcttgttatcaaattaatgcaagacatttaaactatttttttgcaaaactatttatttttaaaacaacttaaagtatatctagggtgagttaaaagtccctgtgcatctatattagatggcaggttttgtcacagagtcactgtgtattaataataaatgttgaaatggcttctccgtgtctccagaagcatttacatgtcctccttgtgagatcatggtgcacagaggtctttggactgccctgaacccgtcttatgtggacataacctattcccttcgttttctcatcatgccatgtgtttaagatctacccgcttagtgtcaagattattgagattttcatctaaatgtttttaaaattgtattttgtgttttagtggaggacagtcttgatactgttctaattcagaaagccaaattttgatgcgcttttgtatattcataatatatactttaatatgccctattctaatctagtttgaaattgttagattctgatagtataatgataaaatcaaactatttgccaaaaagttaaatttacaagcagaaagatgttttgcgatattttctacttttgtgtagaaagataaccatttggggtaggcagcacaacagaatgtgaaagattggctttatatgatactaacacagtccagttaaaagtggaaacagggaaaagagagagagaaaactcatcatttagtttggtctagacacaatttggttaaattttaggattctattggcagttaacatagatgacatggacacagcctatgagtgctttttaaatacgtgcttctaaaaatctgagctcaaagcaagaaaaagaaaacaggaaagctgtatccatttgccataatagatgaatcagaattgttttctattaaatatttcatcacgaaatatgatggaggccagaagctatttttaggcttactataacactattatgcatttttataaataagaagaaggctgtagaaagtacttgaaaaatatctaattctctttctgtctaaggaaaactctttctacttggtgcaataatctgaaaatttagaaggtcaaaatatgtcacaggaaatgatcatagacctaaaaatagtttttaaggaaaccagctacacggggcaaccaaccatcttgctgttgaagaaaacagttccaaaaggctaaatcattggcataaaggaaacaaaacccaaagtatgcgttgtaattcttgagccagtattactgaaacaggataaaagttataaaatctaacataggttaatgcaatgtctctgctagtgctacaagtctaaaatatctttgtaacaatgctttcagaaatgccagttttaattacatttcacattgtatatgagagatactgctttatgaatgaatcggaataatacattttcatttaaatcttaattgcttttcattaaatgcgaagtcttaatttcaaaatgaaatcacactaccagcaatagacagttttcttgaaaactctaataaggaacaatagccagttccgtaaataactttaaaattctaaaagtgttggtacactagcaatcacaaatatggtttcttttaatacttttttaatcctgtaaagaagggtttttataaacattctttttattaatcagtcataacatggcgaagtgtgtagttgctgtttctgaaaagtgatccaaactctacatccagagattatgaaaaattcttatagaattttgtaacaagtatttacatgttgggtgaaagaaatttcatagtcgttggagtgccatgaaattaatacttgcaattcagattgcggtagtttacactttttctgtatgtttcaaatcaggtgtgtaccatttgtactgagaacaccacagaatgaattatccaaagtccattgattttaatacgtgttttggtttgtaaacaaattatagtaatttcttgcacatttttggaaattaattgtataagaatttatgtatctgcttctagatacagtgtgtaaataaaaaatttcgttcacaagac

SEQ ID NO: 2492 - DNA, 3361 bp, Homo sapiens
  source 1..3361: mol_type = genomic DNA
ctgccggactgacgggcggccgggcggtgcgcggcggcggtggcggcggggaagatggcggcgtcctccctggaacagaagctgtcccgcctggaagcaaagctgaagcaggagaaccgggaggcccggcggaggatcgacctcaacctggatatcagcccccagcggcccaggcccaccctgcagctcccgctggccaacgatgggggcagccgctcgccatcctcagagagctccccgcagcaccccacgccccccgcccggccccgccacatgctggggctcccgtcaaccctgttcacaccccgcagcatggagagcattgagattgaccagaagctgcaggagatcatgaagcagacgggctacctgaccatcgggggccagcgctaccaggcagaaatcaacgacctggagaacttgggcgagatgggcagcggcacctgcggccaggtgtggaagatgcgcttccggaagaccggccacgtcattgccgttaagcaaatgcggcgctccgggaacaaggaggagaacaagcgcatcctcatggacctggatgtggtgctgaagagccacgactgcccctacatcgtgcagtgctttgggacgttcatcaccaacacggacgtcttcatcgccatggagctcatgggcacctgcgctgagaagctcaagaagcggatgcagggccccatccccgagcgcattctgggcaagatgacagtggcgattgtgaaggcgctgtactacctgaaggagaagcacggtgtcatccaccgcgacgtcaagccctccaacatcctgctggacgagcggggccagatcaagctctgcgacttcggcatcagcggccgcctggtggactccaaagccaagacgcggagcgccggctgtgccgcctacatggcacccgagcgcattgaccccccagaccccaccaagccggactatgacatccgggccgacgtatggagcctgggcatctcgttggtggagctggcaacaggacagtttccctacaagaactgcaagacggactttgaggtcctcaccaaagtcctacaggaagagcccccgcttctgcccggacacatgggcttctcgggggacttccagtccttcgtcaaagactgccttactaaagatcacaggaagagaccaaagtataataagctacttgaacacagcttcatcaagcgctacgagacgctggaggtggacgtggcgtcctggttcaaggatgtcatggcgaagactgagtcaccgcggactagcggcgtcctgagccagccccacctgcccttcttcaggtagctgcttggcggcggccagccccacagggggccaggggcatggccacaggcccccctccccacttggccacccagctgcctgccaggggagacctgggacctggacggccacctaggactgaggacagagagtggggggtgcccacccaccccccccgccccgggcctaccaagcccccgcccttcccaccccggggtcagccggccgtgtgcgtcccccgacagacactgtgaacggaagacagcaggccgcgatcagagtcgctgttcattcagccgcagcctctgggccggggcggcccccaggggccaggagagagccctggagtcccgcagccaccatgcacgctcccagcgtgctgtgtccttcgccactcccacgcgcccgttcctcttccgtcgccctctgtcccctgctctacctctctgtccttgtctggctctcccgtcaccctccctgcctctgtctctcttctggcctgagcctgggcccagccacctcctgacgggtcccctgggtctgcataggtctcccatggcgcaatgagtcagtggcccccagccaggcagtgtgggcattgccactgcggctggacggggctgcgcgctcgcgctctctctctctctctctctctctctttgatctcagggggtcctttttggagtttattgtattttattgtacttggtggggtgtttggggtgggggcggaggagagcttgttctcgtggggttgtcggtaccttcagaaacttttaccaaagtcacgattagctgcttgtggtggggccccaaccgccctcgggcactggggagctgggctggggctgctgctctggggtctccgggggccacagcttggggtgagttgaagacctcaggggatgtggaggggtctgcggggccctggccgcacaggatggccttcagggaaggtggtcttggggcatggtgcagagcaggtgaccggagggaatcggtgacggagcggggccaagggaggggtccggagggagtcagggatggagggcagagggagtggatgtgggggtttgaggacgtgtgacaagctccagcaggggtgggggccgggctgagggtgggggtgcgaggtggtcactcccatcgtgcccctggccgtccctccactcacccacacctggcccagtccacgttgaggtccaggactgggaaggaccgggtgagtgcaccggggacccaggccaggtgccccccggagcctgctggggtggccagagcaggagggggtgtgtttcctttttgtgggtgttgcatgcaaatcaagtggacaagaaaaaataacaaaacaaaaaacaagaaaaaaaaaacacaaaaccccgtaaaatcacaaagaaaatccaacaccaaaggcgcagaagccggctggccgtggtgggggcagcgtaggcgtagcatccctctcctctcacttagcctgttgactcttgttattatcatgatattcacaaaacgccgcatgtttaaaaagtcatagatgtcatcttctctctgcccccagggaggaaagccaccttctcttgccccttggcccctttgtcaggggccaggggtctgccgggtgggggtgccaacaggcctggccctttcctcccctgcatccagccatgggggcctctgcgattgccggaaggttgcatggctggtcccagggccagcacaggcccgaggccgggctgcctggttttatttttatttaactttattttctgttttatgagtgtgtgtccgcccacccccacccccttcagtgttaagtggggagccctgggggagtctctcctgcctcccagcctctcccaagacctcccccctcgtcaccagccatccctctggaccaggcagagggcggaccgggtgggcaggggcctgagggtggctcgggccagcccaccagccaatggacccctcctcaggccgccagtgtcgccctgcccctttttaaaacaaaatgccctcgtttgtaaacccttagacgcttgagaataaaccccttccttttcttcca

SEQ ID NO: 2493 - DNA, 2224 bp, Homo sapiens
  source 1..2224: mol_type = genomic DNA
agaccagaaacggaagagagcgcgggggatgtgtttggcgtggggcgcactgttcagttgctctcctggatggctttatgtctccgcggtgtttcctagagtctcggcgtttctacctcttcgcaccctttcctgccaccctttgtcccctggaagcccggagacatcagcggctgcaattttgctactcgctgctcggcgtggaactgtcaggacaaaaaataatatccaaagatattttggcactaacggcgctatctgtagcaagaaagttgagcagtgtgaactgttgagacttccaaggagacttcagacaaccaagacagtgtaaaggaaaacagagaaaaagacttgttagacattattaagggcacgaaagttgaattgagcacagtaaatgtacaaacaacaaagccacccaacagaagttcacttaaaagctacaactggcgggcctcaaagagctttaggacatgctccaaagaagagaaatgagcccctgagtcctgagttggtggcagctgcatctgctgctctgttttgacaagcaaacaagccagaactgctcaggcagctccgtagcatgaggaagagtcaggggcacagagagatggagagagacctagttaggaaaaatatattcagggggaagagatgtaatagatttcacattatggcagttactaaagaagcacgtgaacagacacatcaccttcactttgggatatggaatttgataagcagttagccacagaatatgaacaaccccttgagaatgagattgaagaactgatccaggggacaaaagaggggaaactgagagttcccaattaataatgaagcagcttcatatctaagatctctggtggactttttctgcccgtggacgccgctgaagaagcatcgttaaagtctctcttcaccttgccgtcatgtctaagtcagcgtctccaaaagagcccgaacagctgaggaagctcttcattggagggttgagctttgaaacaactgatgagagcctgaggagccattttgagcaatggggaacgctcacagactgtgtggtaatgagagatccaaacaccaagcgctccaggggctttgggtttgtcacatatgccactgtggaggaggtggatgcagctatgaatacaacgccacacaaggtggatggaagagttgtggaaccaaagagagctgtctccagagaagattctcaaagaccaggtgcccacttaactgtgaaaaagatatttgttggtggcattaaagaagacactgaagaacatcacctaagagattattttgaacagtatggaaaaattgaagtaattgaaatcatgactgaccgaggcagtggcaagaaaaggggctttgcctttgtaacctttgacgaccatgactccgtggataagattgtcattcagaaataccatactgtgaagggccacaactgtgaagttagaaaagccctgccaaagcaagagatggctagtgcttcatccagccaaagaggtcgaaggggttctggaaactttggtggtggtcgtggagatggtttcggtgggaatgacaactttggtcgtggaggaaacttcagtggtcgtggtggctttggtggcagctgtggtggtggtggatatggtggcagtggggatggctataatggatttggtaatgatggaagcaattttggaggtggtggaagctacaatgattttggcaattacaacaatcagtcttcaaattttggacccatgaagggaggaaattttggaggcagaagctctggcccctatggcggtggaggccaatactttgcaaaaccacaaaaccaaggtggctatggcgtttccagcagcagcagtagctatggcagtggcagaagattttaattaggaaacaaagcttagcaggagaggagagccagagaagtgacagggaagctacaggttacaacagatttgtgaactcagccaagcacagtggtggcagggcctagctgctacaaagaagacatgttttagacaaatactcatgtgtatgggcaaaaaactcgaggactgtatttgtgactaattgtataacaggttattttagtttctgttctgtggaaagtgtaaagcattccaacaaagtgttttaatgtagatttttttttttgcacccatgctgttgattgctaaatgtaatagtctgattgtgacgctgaataaatgtctct

SEQ ID NO: 2494 - DNA, 2202 bp, Homo sapiens
  source 1..2202: mol_type = genomic DNA
cagggcactgaggagggagttgcgcgcgcgaggcgagggcgatggggccaagaagaaccggggcgatagcgcggcagcggtgacagctgggacccgccgcggtcgggctgccccctcccctcgccccgaccgctcccctgctggtgagggcctgcggaggcggcggcggcggcgcccttggtggcagtggtggcggcggagcagcctcccgggatcgtgtccggagctcgaggagagggtggtgcccggcgagctatgcacgggggcggcggcgtctcctcctgttccgcctcctcagtctcctcggtctcgcagaatccgccggcggcggcggcgccaggacatggagctcgagaacatcgtggccaactcgctgctgctgaaagcgcgtcaaggaggatatggcaaaaaaagtggtcgtagtaaaaaatggaaggagatactgacactgcctcctgtcagccagtgcagtgagcttagacattccattgaaaaggattatagcagtctttgtgacaagcaaccgataggaagacgtctcttcaggcagttctgtgataccaaacccactctaaagaggcacattgaattcttggatgcagtggcagaatatgaagttgccgatgatgaggaccgaagtgattgtggactgtcaatcttagatagattcttcaatgataagttggcagcccctttaccagaaatacctccagatgttgtgacagaatgtagattgggactgaaggaggagaacccttccaaaaaagcctttgaggaatgtactagagttgcccataactacctaagaggggaaccatttgaagaataccaagaaagctcatatttttctcagtttttacaatggaaatggctggaaaggcaacccgtaacaaagaacacatttagacattacagagttctaggaaaaggcggatttggagaggtttgcgcctgtcaagtgcgagccacaggaaaaatgtatgcctgcaaaaagctacaaaaaaaaagaataaagaagaggaaaggtgaagctatggctctaaatgagaaaagaattctggagaaagtgcaaagtagattcgtagttagtttagcctacgcttatgaaaccaaagatgccttgtgcttggtgctcaccattatgaatggaggggatttgaagtttcacatttacaacctgggcaatcccggctttgatgagcagagagccgttttctatgctgcagagctgtgttgcggcttggaagatttacagagggaaagaattgtatacagagacttgaagcctgagaatattctccttgatgatcgtggacacatccggatttcagacctcggtttggccacagagatcccagaaggacagagggttcgaggaagagttggaacagtcggctacatggcacctgaagttgtcaataatgaaaagtatacgtttagtcccgattggtggggacttggctgtctgatctatgaaatgattcagggacattctccattcaaaaaatacaaagagaaagtcaaatgggaggaggtcgatcaaagaatcaagaatgataccgaggagtattctgagaagttttcagaggatgccaaatctatctgcaggatgttactcaccaagaatccaagcaagcggctgggctgcaggggcgagggagcggctggggtgaagcagcaccccgtgttcaaggacatcaacttcaggaggctggaggcaaacatgctggagccccctttctgtcctgatcctcatgccgtttactgtaaggacgtcctggatatcgagcagttctcggtggtgaaagggatctacctggacaccgcagatgaagacttctatgctcggtttgctaccgggtgtgtctccatcccctggcagaatgagatgatcgaatctgggtgtttcaaagacatcaacaaaagtgaaagtgaggaagctttgccattagatctagacaagaacatacataccccggtttccagaccaaacagaggcttcttctatagactcttcagaagagggggctgcctgaccatggtccccagtgagaaggaagtggaacccaagcaatgctgagcaccccggtgcggaccacagagcagaccctggcgccaggaaggagcatgtgttagcgtctcgtcccacctggaattgtaataaatacatctaaataaaacatgccttgggagtgtacagac

SEQ ID NO: 2495 - DNA, 3379 bp, Homo sapiens
  source 1..3379: mol_type = genomic DNA
agccggcctacaagcttcccccgcccctgagctgtttaaatatgctaatgaaaggatagggcctgaccagtagaacggcgaggcggtgtatcacgtggctcggggacgtgtcaggggcggagcctccgcagcccctgcccgagttaaaaccggagtgtgagagagaaaagcgcttcagtagcgagaggggctgagaaagtggtgacaccgccgggacacgtctgcctctatgaaccagcgcagccatctgggcaccacctacctggacacggccaaaggcgcggtagagaccttcatgaagctccgtgcccgggaccctgccagcagaggagacaggtatatgctggtcactttcgaagagccgccctatgctatcaaggctggatggaaagaaaaccatgcaacgtttatgaatgaattgaaaaaccttcaggctgaaggacttacgactcttggccaatccctaaggacagcttttgatttattaaatttaaatagattagtaactggcatagacaactatgggcagggaagaaacccttttttcttggagccagcaataattatcacaattactgatgggagcaagttgactaccaccagtggagtccaggatgagcttcatttacctcttaattctcctttgcctggaagtgaattgaccaaggaaccttttcgttgggatcagagactctttgcattagtgttgcggttgcctggcaccatgtcagtagaatcagaacagttgacaggtgtgcctttagatgactctgcaatcacaccaatgtgtgaagtgacaggcggccgttcatattctgtgtgttctccaagaatgcttaatcagtgtctggagtccttggtgcagaaagtacaaagtggggtggtaataaactttgaaaaagcaggaccagatccttcccctgtagaagatgggcagccagatatatcaaggccttttggatctcagccttggcatagctgtcacaaactcatatatgtcagaccaaatcctaaaactggggttcctataggtcattggcctgttccagagtctttttggccagatcaaaattcgccaacactaccacctcgtacatctcatcctgtagtgaagttttcctgtacagactgtgaaccaatggttattgataaacttccttttgacaaatatgagttggaaccttcaccactgactcaatttatcctggaaaggaaatctcctcaaacatgttggcaggtgtacgtgagcaatagtgcaaaatacagtgaacttggtcatccttttggttacttgaaagccagtacagcactgaactgtgtcaacttatttgtgatgccttacaattatccagtccttcttcccctcttagatgacttgtttaaagtgcataaagcaaaaccaacattgaagtggagacagtcatttgaaagttatttgaagacaatgcctccctactatcttgggcccttgaagaaagctgttaggatgatgggagcacctaacctaatagcagacagtatggaatatggacttagttacagtgtcatttcatacctcaaaaaactgagtcaacaggccaaaatagaatctgatcgagtcattggatctgtaggcaaaaaagtagtacaggagactggaataaaagtccggagccgatcacatggtttatcaatggcatataggaaagattttcaacaactcctccagggaatttcagaggatgtccctcacagactgctagaccttaatatgaaggaatacactgggttccaagttgctttgctgaataaggatttgaagccacagacatttagaaatgcttatgacataccaagacgaaatcttttggatcacttaacaagaatgagatctaatcttttgaagagcactcgcagatttctgaaaggacaggacgaagatcaagtgcacagtgttcctatagcacaaatggggaactaccaggaatacctcaagcaagtaccttctccactaagagaacttgatcctgatcagccacgaaggttgcatacatttggcaacccctttaagctggataagaagggtatgatgatagatgaagcagatgaatttgtggctggacctcaaaataaacataaacgacccggagaaccaaatatgcaagggatccctaaaagacgtcggtgtatgtctccactactaagaggcagacagcagaatcctgttgtaaacaatcatattgggggaaaaggaccacctgcacctacaactcaagcacagccagatcttattaaacctcttcctcttcataaaatttcagaaaccactaatgattcgataatacatgatgtggttgaaaatcatgttgcagaccaactttcatcagacattacaccaaatgctatggatacggaattttcagcatcttctccagccagtttactggaacggccaaccaatcatatggaggctcttggtcatgaccatttaggaaccaatgacctcactgttggtggatttttagaaaatcatgaggagccaagagataaagaacaatgtgctgaagagaacataccagcatcttcactcaacaaaggaaagaaattgatgcattgcagaagccatgaagaggtcaatactgaactaaaagcacaaataatgaaagagatccgaaagccaggaagaaaatatgaaagaatcttcactttactgaagcatgtgcaaggcagtttacaaacaagactaatatttttacaaaatgtcattaaagaagcatcaaggtttaaaaaacgaatgctaatagaacaactggagaacttcttggatgaaattcatcgaagagccaatcagatcaaccatattaatagcaattaaaagaaaatagaatgtggccacttatttcactatcttcttcaaatacaaagtaaatacaagactgttgtgatcttgcattcattttctgacatgcattgttggctatttgaaatactaaaagcaaatctacagatcctttttccatcattttacagtgaccttttcttcattttggtttatttttgtaatgtgaaaagtatcactctaaaaaacatttttaatttaacaaactaaaaatattcctccaaatctcttgcttgtcattgactcttgcgtgtcaatttccctcaggttctattttcttaaaccaacctttaaaattgtcacctctgttaaggttgaactttgccaaaaaaaaaagaagttactttgtaatttttggggaaaaaagcacatacattaaaactaggtaatgttttgtatatacagttattttggatatattattgtaagttgtacaaatgtattttgaagaatatttaagaaaagcacttttgttattccatcaataaatgctctatttta

SEQ ID NO: 2496 - DNA, 2734 bp, Homo sapiens
  source 1..2734: mol_type = genomic DNA
aactgttgtggctgccgcattgctcccgccgggctgtagctgagcgcggagcccgtggggaccggtgaggctggctgctggctctaccaggttctgtgctggcatcctgagcactgccaggcacttgaccattgagcagaagatggcagactactcaaacaaactctactatcagttagagcaagaaacagggatccaaacaggttacacaaggacaggctcaatctttctggcccaaactcaggaccgactgatctccctgaagcgcatcaacgcagggctgaatgttataggtatcccttctgagatcatctcccccaagaaagtggccgagcttcaccatctcctcaacgtgcacgacctggtgggggccatgcatgttcccgaggatgcagtggtgtcttccgctgacgtggctcttgccctggcaagtgctgcctcccaaaatggtgttcagatctatgaccggacatctgttcttcatgtaatggtcaaaaaaggtcaagttactggagtggagaccgataaaggacagattgaatgccagtattttgtcaactgtgctggccagtgggcatacgagctgggtctgtccaacgaggagccggttagtatcccgctacatgcctgcgaacacttctacctcctgactcgccccttggagacccctctgcagagcagcacaccaactattgtggatgctgatggaagaatttatattcggaactggcagggtggcatcctgtctgggggctttgagaagaacccgaaaccaattttcactgagggcaagaaccagctggagattcagaatctacaggaagactgggatcactttgagcctctgttgagttcccttctgaggaggatgccagaattagagactctggagatcatgaagttggtgaactgcccagagaccttcacaccagacatgaggtgcatcatgggcgagtctcctgcagtgcagggctactttgtcctggcaggaatgaactctgctggcctttcatttggtggaggagccggaaagtaccttgccgaatggatggtacatggttatccctcagaaaacgtttgggaattggacctgaaacgttttggagccctccagagcagccgcacctttctgcgccaccgggtcatggaagtcatgcctttgatgtatgatctgaaggttccccgctgggacttccagaccggtaggcagttacgcacctctcctctctacgaccggctggatgcacagggagccaggtggatggagaaacatggatttgagaggccaaagtactttgttccccccgacaaggacctcctggcattggagcagagcaagactttctataagccagattggtttgacatcgtggagtctgaagtcaagtgctgtaaggaagctgtgtgtgtcattgacatgtcctctttcacaaagtttgagataacatccactggggatcaggcattagaagttctacagtacctcttctccaatgacctggatgtgcctgtgggccacattgtgcatactggcatgctcaacgagggtggagggtatgaaaatgactgcagcatagcacgactgaacaagcgcagtttcttcatgatctctccaaccgaccagcaggtccactgttgggcctggcttaagaaacacatgccgaaagacagcaacctgctcctggaggacgtcacctggaagtacacagccctcaatctgattggccctcgagctgtggatgtgctgtctgagttgtcctatgcccctatgactccagaccacttcccaagcctcttttgcaaggagatgagtgtgggctatgcaaatgggatccgggtgatgagcatgacgcacacaggagagccaggattcatgctctacatccccatagagtacgccctgcatgtatacaatgaagtgatgagtgttggccagaaatacggaatccggaatgctgggtattacgctcttcgcagtctccgaattgagaagttttttgccttctggggtcaggatataaataacctcaccacgcccctggaatgtggacgagagtctcgggtgaaattagagaagggcatggatttcattggtcgcgacgccctcctgcagcagaagcagaatggagtgtataaacgcctcaccatgttcatcctggacgaccatgattcagacctagacctttggccttggtggggagagcccatttaccggaatgggcagtatgttggcaagaccaccagcagtgcctacagctacagcctggagcgccacgtttgcctgggctttgtgcacaatttttctgaggacacgggggaagagcaagtggtgacagcagatttcatcaaccggggagagtatgagattgacatcgcgggataccgcttccaggccaaggccaagctctaccctgtcgcctccctcttcacccagaagcgccgaaaggatgacatggagctgagtgacttacatgggaagtgatgccaccagggcagcctcacctcctccccatcatcttgtcctagagtgggcgtcaccttggagcttctcttccttccgcctctgttcctcttctggagcctttgcctcccatctcttatctccttgatataattttgaacttgacctactttaaacttttttgctctgcagccttccttgcccttccacctcctcctcctaatattcactctgggctcttcttcccttcccacccctcactcagcttctcgt

SEQ ID NO: 2497 - DNA, 3998 bp, Homo sapiens
  source 1..3998: mol_type = genomic DNA
cctgcgagattctgtgccccttgtcgggccgcttgtttggctgctgccgtcacctcatggcgacgcgggtagaggaggcagcgcggggaagaggcggcggcgccgaagaggcgactgaggccggacggggcggacggcgacgcagcccgcggcagaagctggaggagagcaggagtgttcagaagcaaatgaagatcctgcagaagaagcaagcccagattgtgaaagagaaagttcacttgcagagtgaacatagcaaggctatcttggcaagaagcaagctagaatctctttgcagagaacttcagcgtcacaataagacgttaaaggaggaaaatatgcagcaggcacgagaggaagaagaacgacgtaaagaagcaactgcacatttccagattaccttaaatgaaattcaagcccagctggagcagcatgacatccacaacgccaaactccgacaggaaaacattgagctgggggagaagctaaagaagctcatcgaacagtacgcactgagggaagagcacattgataaggtgttcaaacataaggaactgcaacagcagctcgtggatgccaaactgcagcaaacgacacaactgataaaagaagctgatgaaaaacatcagagagagagagagtttttattaaaagaagcgacagaatcgaggcacaaatacgaacaaatgaaacagcaagaagtacaactaaaacagcagctttctctttatatggataagtttgaagaattccagactaccatggcaaaaagcaatgaactgtttacaaccttcagacaggaaatggaaaagatgacaaagaaaattaaaaaactggaaaaagaaacaataatttggcgtaccaaatgggaaaacaataataaagcacttctgcaaatggctgaagagaaaacagtccgtgataaagagtacaaggcccttcaaataaaactggaacggttagagaagctgtgcagggctcttcagacagaaaggaatgagctcaatgagaaggtggaagtcctgaaagagcaggtatccatcaaagcggccatcaaagcggcgaacagggatttagcaacacctgtgatgcagccctgtactgccctggattctcacaaggagctgaacacttcctcgaaaagagccctgggagcgcacctggaggctgagcccaagagtcagagaagcgctgtgcaaaagcccccgtccacaggctctgctccggccatcgagtcggttgactaagatgaggtgtgatcactgtattgagagatatattttgtgtataactttctctgttagtagttaactattggttttgtggtgaaaattttcttactttttctaccatatctgtattttcttagaactactggacttatgtggtacaggaggctgcttagcagttttgaatagtttaatctataaattttcctcagctgtgttgcacatcagcctcgttctccctccactggaatgcatgtgttcattgccttgtcctttctctccctgctccttgcacattatcatcctaatgaaaatttcactgacagggccgaccattacaagggaactttgttctgacgatggttccttgatgtgaaaacaatattaatttaaacgtcttagcccccccccccataatattattcagaaaaacaaaataccaaggcgattagttttgtctaataacccatttaaatgccaagtaaaaataaaactcctagtgttgggtcagaagcatatttgattgaaattagctttttgaaaacatttatatctcgggacaaattgagatggccacatgcctagaatcctaagtttcggcagaatatgtatataaagatgtcacttgtggacaaaatagtacatagaggcaaatcactagacaaataagcttagtgtttacgtgactgaacagtcatcctgctttggtttcaggtgtgggatttggaccatgaggggctcccgtagaggatggcggtttgtgtttgattctgatttgggatttcagtacatattctccacttcccatagaaggccacttattctttgaaaactggtgttcatgtttgccgttcaatgaagtcccttgtcaaagacaaggacggtcaattcacgtgtcactttcactaggcagaagtttctccaataccttctggctacttgaaagttactacaaaaattccaccagcaaagtactccaggtttttcaaaagggaattttcattatggatcagtaccaaccgaaattgattttcatttccaaaacaaacactggcaccaacatttttactttgggaagacttggcagagtgttagtcatgatctgttacttacgtgttcagtctgttttctcacccccttcttagttaccatctcttttttaagaagaaaaaagaaaagccacagtattatcaaggtctctacacttggactgggggaaaatttgaaattaagcacataacttttgaattagttctttgtttcaatgttgaatgtggcgcagttatgcagatgattaatcaggctgcactgatggaagttttgactttgtccctggtataatttgcattgaaatgctttatgaaataaaaggttctactagaactgatgttagcacattccactgagcaaaactatcagactgacacttgttaaattgcttactggactgaataaactctgttttgtccagttaaaagggttttctctttgttacaagtgttatttgtaaagtcctgtcacattcatggtcgaaactgggttgaaagaattgaaaattgtccaacagatagatagataggaaaccgcctggagtggaggagggttgtatctaagcctccactatcagtcatgttaattcaaggggccacagtggaggaaaataaatccacaaagtagattatctaattaccatcaaaatgagtcagaagcaaaaaacaccaccctccaacagcctcttaggagtacaccctgttctgctactaaaatactagactcatttccctggtggtgggggggaatgcaggtatagatcagaaatataatccaccttaaaattagtactaatgatcacattatttcacaagaactctgctggatgtacagctcttaacattttattaagccatttgtgtagcccaccacgtttctttgtggtgcttgtcctgtgtggaagattgtaaatcttgggcctgttgcatacttccaagggctttaaagcaatgtgattaacagtacttggcctgctgcttttggcttactttgtatttttagctagatgctattatagtgttgaaaggatatggattctgtctgggatgcatttgttgtcctttcagaacccttcctcccattaccctgtgaataaaaacaaatgggaccccctgagaaggacatcttcctacagtgatcacctcaccagcccagtgttgtggctttgtagcgcaccccgtatctaccatattctagaacactgtaatgctactaggctggcccagaaaaggtttaaatgttgaattcacttaaattgcaattgttgcaccatcatggaatcgtgatgtgtattatttatattggcggtggactccaaggtgtagagaaaacttgggtcttgggtaatatggaccatttcatcctcagacttgttaggagtacatttcttggtcttgagaccagtatttttcagttatgtatgcaactgcctttattacacctggttatcacaattcaattctcaggtgttgcagaaaaatctacctctttcagactgtagatggaaataactgtgaaaaaaatgatgcagatatcttctagtttgtgctaaacacactgctttatttttacagcccacgtctttcatgaggatacgaattgttaagaggcagtctcgttttgcttttcaaagacattttgtagagatttttcactaatgtgaatctgattttatctacttgattctgtatagattaagtaaatatgtatgataaactt

SEQ ID NO: 2498 - DNA, 2100 bp, Homo sapiens
  source 1..2100: mol_type = genomic DNA
ggctgctgggctggcggggcgcaggccgcgggacccgagcccggggaagcgagagagcggaggcgccgaggatccgattcactccctggggagacctatgggccgaagccgtgtaaatgcgttttaagaggcctcggctccgcaactgccactcctcctcggggtgttgcacaagtttcgaggtcaccggcgaccccccctagcagcgcgcctggctctggcccccgcgaaggaggacggagtttgtgtgttgcatactttctaaggcggcggctgcagcagcggctccatccagcccgtcagctcctcctgcaaggcatggctggctacctgagtgaatcggactttgtgatggtggaggagggcttcagtacccgagacctgctgaaggaactcactctgggggcctcacaggccaccacggacgaggtagctgccttcttcgtggctgacctgggtgccatagtgaggaagcacttttgctttctgaagtgcctgccacgagtccggcccttttatgctgtcaagtgcaacagcagcccaggtgtgctgaaggttctggcccagctggggctgggctttagctgtgccaacaaggcagagatggagttggtccagcatattggaatccctgccagtaagatcatctgcgccaacccctgtaagcaaattgcacagatcaaatatgctgccaagcatgggatccagctgctgagctttgacaatgagatggagctggcaaaggtggtaaagagccaccccagtgccaagatggttctgtgcattgctaccgatgactcccactccctgagctgcctgagcctaaagtttggagtgtcactgaaatcctgcagacacctgcttgaaaatgcgaagaagcaccatgtggaggtggtgggtgtgagttttcacattggcagtggctgtcctgaccctcaggcctatgctcagtccatcgcagacgcccggctcgtgtttgaaatgggcaccgagctgggtcacaagatgcacgttctggaccttggtggtggcttccctggcacagaaggggccaaagtgagatttgaagagattgcttccgtgatcaactcagccttggacctgtacttcccagagggctgtggcgtggacatctttgctgagctggggcgctactacgtgacctcggccttcactgtggcagtcagcatcattgccaagaaggaggttctgctagaccagcctggcagggaggccccactaccaccccctcacattgctacttgtgctgcctctgaaccctcccctcctgcagaggaaaatggttccacctccaagaccatcgtgtaccaccttgatgagggcgtgtatgggatcttcaactcagtcctgtttgacaacatctgccctacccccatcctgcagaagaaaccatccacggagcagcccctgtacagcagcagcctgtggggcccggcggttgatggctgtgattgcgtggctgagggcctgtggctgccgcaactacacgtaggggactggctggtctttgacaacatgggcgcctacactgtgggcatgggttcccccttttgggggacccaggcctgccacatcacctatgccatgtcccgggtggcctgggaagcgctgcgaaggcagctgatggctgcagaacaggaggatgacgtggagggtgtgtgcaagcctctgtcctgcggctgggagatcacagacaccctgtgcgtgggccctgtcttcaccccagcgagcatcatgtgagtgggcctcgttccccccggagaatcccagcggggcctcagagatgcatctgggagaggtggggaagatggcaggcaagggtacccttggccaggactctggtgcccaccctgccacccccgcgctccacctgcagtgtttctgccctgtaaataggaccagtcttacactcgctgtagttcaagtatgcaacataaatcctgttccttccagctgtgtctgcctcctctgcagtgcaaggggcctggtcagccaggtgtgggggtgttcttggggtctcctttggtctccttcccacctttgtaaatataatgcaaataaataaatatttaggttttt

SEQ ID NO: 2499 - DNA, 3824 bp, Homo sapiens
  source 1..3824: mol_type = genomic DNA
gcttttgctcggacctggagtaatgagagtggacgtttgattccaacaggatggcccatttctccagcgaggaccaggcgatgctgcaggcgatgctgaggcggttgttccagagcgtgaaggagaaaatcacgggtgccccttccctggagtgtgccgaagagattcttttacatctggaggaaactgatgaaaattttcacaactatgaatttgtgaaatacctcaggcagcatataggcaacactttgggttctatgattgaagaagaaatggaaaaatgcacatctgatcggaatcagggtgaagaatgcggctatgatacagttgtacagcaggtcactaaaagaactcaagaatctaaagagtacaaagaaatgatgcattacctgaagaacattatgatagctgtggtcgagtctatgattaacaagtttgaagaagatgagacacgaaatcaagaaaggcagaaaaaaatccaaaaggagaaaagccatagttaccgcacagacaattgctctgatagtgattcatcattgaatcagagttacaaattttgtcaaggaaaattacaattgattttagaccagttggatcctgggcaacctaaagaggtgagatatgaagccttgcaaacattatgttcagctcctccatctgatgtcctcaactgtgaaaattggactactctctgcgaaaaactgaccgtgtctctttcagatcctgatcctgtgtttagtgaccggattttaaaattctgtgcacagacatttttgctttctccattacatatgaccaaggaaatttatacaagcttagctaagtatttggagtcatactttctttctagggaaaatcatattcctactctttcagctggtgtagatataactaatcctaatatgactcgcttacttaaaaaggttcgtcttctaaatgaatatcagaaagaagctccatctttctggattcgtcatccagagaagtatatggaagaaattgtggagagtactttgtccttgttaacagttaaacataatcaaagccatgttgtctcacaaaagattttggatccgatctacttttttgcattagttgataccaaggctgtgtggttcaaaaagtggatgcatgcacattatagcagaactacagtattaagacttcttgaaacgaaatataagtctctggtaactacagccattcaacagtgtgttcagtactttgaaatgtgtaagactaggaaagctgatgaaactttgggacattcaaagcattgcagaaacaagcagaaaactttctactacttaggacaagaattacaatatatttatttcattcactcactgtgccttttaggaagattattgatctataaacaaggcagaaaactatttcctattaagctgaagaataaaaaaggtttggtatccctcatagatctgcttgttctttttacccaacttatctattactcaccaagttgtccaaagatgacatcagctgcccattcagagaattactctcctgcaagtatggtgactgaagttctgtggatactcagtgatcaaaaagaatgtgcagtggaatgcttatataacaacattgtaatagagacacttcttcagcctattcacaatttaatgaaaggaaatgaggcatctccaaattgctctgagacagctttaattcatatagctggtattttggcaagaattgcatctgtagaagaagggcttattttactcctttatggagcaaatatgaactcttctgaagaaagtcctacaggtgctcatataattgcccagttttcgaaaaaacttctcgatgaagatatttctatattttctggatcagaaatgttgcctgtggttaaaggagcttttatttctgtgtgtcgtcacatatatagtacatgtgaaggtttgcaggtgttaatcacttataatttgcatgaatctatagcaaaggcatggaaaaagacaagtttgctatcagaaagaattcctactccagtagagggttctgattctgtttcttcagtaagccaggaatcccaaaacattatggcttgggaagataatttgttagatgatttactacattttgctgccacccccaaaggattactacttcttcaaagaacaggtgctatcaatgaatgtgtgacatttatattcaatcgatatgcaaaaaaattacaggtcagcaggcataaaaaatttggctatggagttttggttacacgagtggcatcaacagcagcaggtggcattgcactaaaaaagtcagggtttattaatgaacttataactgaattatggtccaatctggaatatggaagagatgatgttagggtaacccatcccagaactactccagtggatcctattgaccgaagctgtcaaaagtcttttttagcactggtgaacttgttatcctatcctgctatttatgagcttgtaaggaatcaagatcttcctaataaaacagaatattctcttcgtgaagtcccaacatgtgttattgatattattgatagacttataattttgaattctgaagctaagattcgttctttattcaactatgaacaatcacatatctttggtctaagggactttataattgatggcttatcagtggagagaaatcatgttcttgttagaataaatcttgttggtgggccattggaacggattttgcctccgaggttactcgaaaagagtgataatccatatccttggccaatgttttcatcatatccattgccaaactgctatctgtcagacattacaagaaatgctggtataaaacaagacaatgatcttgacaagcttttattatgcctcaaaatatctgataaacaaactgaatggatagaaaactgccaaagacaattttgcaaaatgatgaaagccaaacctgatataatcagtggagaggccttaatagaattacttgaaaaatttgtgcttcatctcactgaaagcccatctgaatgctacttcccttcagtggagtatacagctactgatgcaaatgtgaagaatgaaagtctttcatctgtgcagcagcttggcattaaaatgactgtcaggtatggcaaattcctcagtctcttaaaagatggtgcagaaaatgatcttacctgggttttaaagcattgtgagagattcctgaaacagcagcaaacttccataaaatcttctcttctctgcctgcaagggaattatgctggccatgactggtttgtatcttctctgttcatgataatgttgggagacaaagaaaaaacattccaatttcttcatcaattctccaggcttctgacttctgcttttctttggttgccaaggctacatatttctagttaccttcctaatgacactgtagaatctggcatccatccagtatatttttgcagcacccattatattgaaatgctactgaaggctgagttgcctcttgtgttttcagcttttcacatgtctggttttgcaccatcacagatttgcctgcaatggataacccagtgtttttggaattacttagattggatagaaatctgccattatattgctacttgtgttttccttggtcctgattatcaagtgtatatctgtatagctgtattcaaacatttacagcaagacattctacagcacactcagactcaagatctgcaagttttcctaaaagaagaagcactgcatgggtttcgagtgagtgattattttgaatacatggaaattttggaacaaaactaccgaacagtgctgctgagagacatgcggaacattagactgcagagcacatag

SEQ ID NO: 2500 - DNA, 1073 bp, Homo sapiens
  source 1..1073: mol_type = genomic DNA
aagatggcgactccctatgttactgacgagaccggcggcaagtatatcgcgtcaacacagcgacctgacgggacctggcgcaagcagcggagggtgaaagaaggatatgtgccccaggaggaggtcccagtatatgaaaacaagtatgtgaagtttttcaagagtaaaccagagttgcccccagggctaagccctgaggccactgctcctgtcaccccatccaggcctgaaggtggtgaaccaggcctctccaagacagccaaacgtaacctgaagcgaaaggagaagaggcggcagcagcaagagaaaggagaggcagaggccttgagcaggactcttgataaggtgtccctggaagagacagcccaactccccagtgctccacagggctctcgggcagcccccacagctgcatctgaccagcctgactcagctgccaccactgagaaagccaagaagataaagaacctaaagaagaaactccggcaggtggaagagctgcagcagcggatccaggctggggaagtcagccagcctagcaaagagcagctagaaaagctagcaaggaggagggcgctagaagaggagttagaggacttggagttaggcctctgaggcctttggggaatagggaatggactgcagaacaaaccgtggggctctctggggtctgggggaatacgggcaacagcagtcaggaggggtaccccccatactggcttacttccacctcctgcggcccagctctgtcctccagagcctagcgtctccctcaatccttcccttttcttcccaacttctactttttggactttccccctcccattcccagtgttcaaaatctcagtgactaccccaggtacctttgctgctgatttgggtgtcttgtttaaaagaaaatcaggtgggtgggaatctcttggagaactgaggctgagggtagagggagtatgcccaagtcttggagtcttggttcctgttcgcggtgtttatgggttatttccctctccatccctcattttttttttttttttaaaaaaagcaaaaatgagaataaacacaagtagacatgt

SEQ ID NO: 2501 - DNA, 1119 bp, Homo sapiens
  source 1..1119: mol_type = genomic DNA
cagtcgccccggcaacagccgcctccctcgcgtcccccactccccctctgtctctccaaggaaaactaggcccctgcgcggccaacgcccaggatccgcaagctgcgcgcccacgagtttcagcacccatttggactttcacaatcagagatggcagcggtaaaggcatcaacatcgaaagctaccaggccttggtattctcatccggtatatgcaagatactggcaacattatcatcaagcaatggcttggatgcaaagccatcacaatgcctacaggaaggccgtggaatcctgtttcaatcttccatggtacttaccttctgcgcttcttccccaaagctcttacgataatgaggctgcgtatcctcagtccttctatgaccatcatgtggcctggcaggactacccctgcagttcttcacatttcagaagatctgggcagcatccacgttacagcagtaggatccaggcatccacaaaagaagaccaagctttgtccaaagaggaagagatggagactgagtcagatgcagaggtagaatgtgacctgagcaatatggaaatcactgaagagctccgccagtactttgcagagaccgagaggcatagagaagaacgacggcggcagcagcagctggatgcagagcgcctggacagctatgtgaacgctgaccacgacctgtactgcaacacccgccggtcggtagaagccccaactgagaggcctggtgagcggcgccaggccgagatgaagcgtttgtacggggacagtgctgccaagatccaagccatggaggccgcggtgcagctgagctttgacaagcactgtgaccgaaagcagcccaagtactggccggtcatccccctgaagttctgagctcagggcacagggtacccagcctctccttcttccttttgggtacacgctctttatctctccttctgtacatttcttagggaaaggggactttgtactggggtacaggcatgttcaccacagtcccagtgggcctgtcacggggtggatgtactatgccagccacttggaggtctgcaggacatgttctgttgccaacatgataaattttctcctgacataaaataattttgcatatac

SEQ ID NO: 2502 - DNA, 2160 bp, Homo sapiens
  source 1..2160: mol_type = genomic DNA
ggccgggttgccagattacgggaaagccatttaagaagttcctggaataatattagtcagagtaatataggatctgcaggaagtgtctcaagatagttggaaaagaagaatttctagactcttcatcaagatcttcatttatacagctgttaaatccaaggctactttggtgaaagcatgaataaaaatacatctactgtagtatcacccagtctacttgaaaagatggtcgtttgaagccaggagatcaacttgtctcagtcaacaaggaatctatgattggtgtatcatttgaagaagcaaaaagcataattaccggagccaagttgagtactaggttagaatctgcttgggagatagcattcataagacaaaaatccgacaacattcagccagaaaatctgtcatgtacatcacttatagaagcttcaggagaatatggacctcaagcctcaacattaagtcttttttcttctcctcctgaaatactaatcccaaagacctcatccactcccaaaacaaataatgacattttatcttcttgtgagataaaaactggatacaacaaaacagtacagattccaattacttcagaaaacagtactgtgggtttgtctaatacagatgttgcttctgcctggactgaaaattatgggctacaagaaaagatctccctaaatccctctgttcgctttaaggcagagaaactggaaatggctctaaattatcttggtattcagcccacaaaggaacaacaccaagccctgagacagcaagtacaagcagactcaaaagggacagtgtcttttggagattttgtccaggttgccagaaacttgttttgcttgcagttggatgaagtaaatgttggtgcacatgaaatttccaatatattagattcacagcttcttccttgtgattcttcagaagcagatgaaatggaaaggctcaagtgtgaaagagatgatgccttgaaagaagtaaatacacttaagtggccagggcagaattagatgaagagccaataaagcaagtcgtggcaattttggatcctgtgagttctttgggaaatacattttttttcatgtgcagggctattcttaagggacatcatgttttgctaacgtaatttggaattaatattattttagagaggaaaaaaacacacatatcccaaatatactgtaacatttttcttctctttttttgtttgtttggttttttgattcttgtttttgttttgtgtttttgagacagggtcgcactctgtcgcccaggctggagtgcaatactgcaatcacgtctcactgcagcctcaacctcctgggttcaagtgattctcccacctcaacctcccaagtaactgggacaacatgtccatgccaccatgctcaactaatttttttttaaatttttattttgtagagatggtgtctcactattttgttcagactggtctcaaacacctgggctcaaatgacccacctacctcagcctctcaaagtgctgggattacaggtgtgagccaccatgtctggccttgattctctttatgtggtttcattctgtttttagaagaatattacatttaaattatatcctaatttttatagaaagctatattttccaaatctttaggaaaagcaacataactacttgatttaccactaattcgtcataggcacatatttttaaaattattttattaaataaggtatagtatattgataattatttaatttttattaaatagaaaatatttacaccaaaaggaaagaaaatttgttttgctaccttagtttttataatctcaacctctagaggaagccattgttgcaaatatattatttatcttttcatagatttttctctacacagaaaattatattttttaaaaataggcagggcatgatggctgacacctttaatcgcagtactttgggaggctgaggcaagaggattacttgagctcaggagtttaacatcagcctgggcaacatagcaggaccccatctctactatttaaaacataaaaacaaaaataaataaatatatgtatatgtggggacagggagtatgtgagaaatttctgtactttcccttcaattttgctatgaatccaaaactgcttcaaaaaataataaagccttaaaaaatttt

SEQ ID NO: 2503 - DNA, 1234 bp, Homo sapiens
  source 1..1234: mol_type = genomic DNA
attgtgggttgctgggcggcccggtctcggagaagaggggagagtggcgggccgctgaataagcttccaaaatgatggattctcagctggtagctggtgttgcattcaagaagactttctcttacgctgggtttgaaatgcaacccaaaaagtaccacaatcccaagattgcccttttgaatgtcgagctcgagttgaaagctgagaaagacaatgctgagataagagtccacacagttgaggattatcaggcaattgttgatgctgagtggaacattctctatgacaagttagagaagatccatcattctggagccaaagttgtcttgtccaaactccccattggggatgtggccacccagtactttgctgacagggacatgttctgtgctggccgagtacctgaggaggatctgaagaggacaatgatggcctgtggaggctcaatccagaccagtgtgaatgctctgtcagcagatgtgctgggtcgatgccaggtgtttgaagagacccagattggaggcgagaggtacaatttttttactggctgccccaaggccaagacatgcaccttcattctccgtggcggcgccgagcagtttatggaggagacagagcggtccctgcatgatgccatcatgatcgtcaggagggccatcaagaatgattcagtggtggctggtggcggggccattgagatggaactctccaagtacctgcgggattactcaaggactattccaggaaaacagcagctgttgattggggcatatgccaaggccttggagattatcccacgccagctgtgtgacaatgctggctttgatgccacaaacattctcaacaagctgcgggctcggcatgcccaggggggtacatggtatggagtagacatcaacaacgaggacattgctgacaactttgaagctttcgtgtgggagccagctatggtgcggatcaatgcgctgacagcagcctctgaggctgcgtgcctgatcgtgtctgtagatgaaaccatcaagaacccccgctcgactgtggatgctcccacagcagcaggccggggccgtggtcgtggccgcccccactgagaggcaccccacccatcacatggctggctggctgctgggtgcacttaccctccttggcttggttacttcattttacaaggaaggggtagtaattggcccactctcttcttactggaggctatttaaataaaatgtaagacttc

SEQ ID NO: 2504 - DNA, 2914 bp, Homo sapiens
  source 1..2914: mol_type = genomic DNA
agcctgcgcttcggaagcatggatgtgcgcctgcgctgcgctagggcgcggcgggcggtttgaattttgcttacagagtcccgtctcaccatcctgggcttccaacggagactgcggtatccgcagctggagacccagcggcgagtagccttttgctcccggacggacttgaggttggagtctgtgtgttggggaccctgcctttggaagcgcccgagaggcttaaaggatggcctcgtcagatctggaacaattatgctctcatgttaatgaaaagattggcaatattaagaaaaccttatcattaagaaactgtggccaggaacctaccttgaaaactgtattaaataaaataggagatgagatcattgtaataaatgaacttctaaataaattggaattggaaattcagtatcaagaacaaaccaacaattcactcaaggaactctgtgaatctcttgaagaagattacaaagacatagaacatcttaaagaaaacgttccttcccatttgcctcaagtaacagtaacccagagctgtgttaagggatcagatcttgatcctgaagaaccaatcaaagttgaagaacctgaacccgtaaagaagcctcccaaagagcaaagaagtattaaggaaatgccatttataacttgtgatgagttcaatggtgttccttcgtacatgaaatcccgcttaacctataatcaaattaatgatgttattaaagaaatcaacaaggcagtaattagtaaatataaaatcctacatcagccaaaaaagtctatgaattctgtgaccagaaatctctatcacagatttattgatgaagaaacgaaggataccaaaggtcgttattttatagtggaagctgacataaaggagttcacaactttgaaagctgacaagaagtttcacgtgttactgaatattttacgacactgccggaggctatcagaggtccgagggggaggacttactcgttatgttataacctgagtcccttgtgaacttttgaacataccaacagggtatagagtatagaggctatttctataattttcttatatataatttttttaacttttaatcttttttgtttccttttttttttttttgagacaggatcttgctttgtcacccaggggcttgctttgtcacgcaggctagagtgcagtggcgcaaacatggctcactgcagcctcaacctcccaggctcaagtgatcctcccacctcagccccctgaatggctgggactacaagcgtgcgccaccatgcctggctaatttttgtattttttggagagatggggtttcaccatgttgcctaggctggtcttgagctcctgagctcaaacaatccaccctcctcagcctcccaaagtgctgggattacaggcttgagccaccacacctgacctattcttgtttcttataaaaataaaacttttttggataaagcttatttcttgtttttttctttttctttttttttttttttgagacagtctcgctctttcacccaggccggactgcagcggcgctatctcggctcactgcaaactctgcctcccaggttcacgccatcctcctgcctcagcctcctgagtagctgggactacaggcacctgccaccacgcccagctaattttttgtatttttagtagagatggggtttcaccgtgttagccaggatggtctcgatctcctgacctcatgatccgcccacctcggcctcccaaagtgctgggattacaggcgtgagccaccgcgcccggccaacttatatattttcaagattcacctcctctcaccaaatatttaactacctgctgaatacgcctctgtactaggcacataatggaactaaaaaatgctcatgtccagtttttgtgttgagtgaacaatgctgcagaccctaataagattgggtacagatcggcatgcgcctgtagtcccagctactcaggagaattgcttgaacctaggaggtggaggttgcagtgagccgagatcgtgccactgcactccagtctgggcaacagagcgagactccatctcagaaaaaaagaaaaaaagactgggtacagatgtgatattggaagaaaaagatcaagctgatgaggttaggatacccaggccctttggacttaaagatcactagtgtctaaattccatcgatggcatttcagtctataggtaaacttcctggaagctggatttggagacagtttatcatctgattattgggctttcgtataggtccttagggagcagcttacctgaaatgcatttagtgtacaccagtctgtaaacttcaacctgtaatgaaagtgtaataaatgtacattgagttgatgtgataatgtgatataataagaaatatatatttgatcttcctatctagttccttgttcagagctcctaaaacccttgtaatttccaaagtgatggagtacatcttttgttctagtatttggtctttgaccccagttcctgacacaaagctcctaaattcctttaaatttcccagtgataggagaattttttgttctaatgaggtcactcttgatgggcacctggataactcaggatgggggctgctcacaaagaccacatcatgattggaagtttcaaactttcagtctcccacctccagagaggggagaggggctggagatttgtgtcaataatccatcaggcctatgtcaacaagacataatccgttaactatggagttcagggagcttcagggttggcaaacattttgatgtgccaggaaggtgacgcactccagctttatgaagtcagcaagtcctgtgctcaggatgcttctggaccttgccccaggtaccccttcatgtggctgttgttcatctgtatcctttgtagtagccttaaaataaactgttaaac

SEQ ID NO: 2505 - DNA, 1241 bp, Homo sapiens
  source 1..1241: mol_type = genomic DNA
atttctgctgttttcttctagttgtttcacagtttatttttctcagaagaatcttcagaaaacaagaaacatcatcccatttgaggactgctgtgagacacacagttttcaggatgacacacagaatgctgagttccaagtgatctgtcacctgacaatcgactggatgagtaagattacaagtctttgaaattaaatgacacactaaattaactgaagacaagaggaggaggaaagactggattggctaaactctaacacagagaaagaataaaagtgcattccaccttttatacagatattttcccacaattagctaacttgataattgcctatctattaagataaacaataacaaggaaatagcttttatgtggtgacaacagctcctcagctgagtataaaagtggacatgggataaggagattcccacattcgaaaaactcactgtcttggaaacctacctagaacctccaccctctgacaccatggttaactcttgttgtggctctgtctgctctgaccagggctgtgatcaaggcctctgccaagagacctgctgccgccccagctgctgccagaccacctgttgctgccccagctgtgttgtatccagctgctgccgcccatcctgctctcagactacctgctgccagaccacttgctgtcgccccagctgctgccacccagtctgttgtcagaccacctgccgccccagctgtggtgtgtccagctgctgccgcccactctgctgtcagaccacctgccaccccagctgtggtatgtccagctgctgccgtccactctgttgtcagaccacctgccgccccagctgtggtgtgtccagctgctgccgtccactctgctgtcagaccacctgctgccgtgcaacttgctgccgccccagctgctgtggatcctcttgttgaacctcatattggactatcaaccatgagccagtcaccatcccatgatatgaaagtgtcatttatatcaacttgtccatgtgttaaatggccatcagctttattatcctgttattccactaagtaactggtgaaagggcatccatctacatttaataccactcatttttcccatggatctcttcccagcagcattcagacctcagatgcatgatgcagttagactaagcctctaagtttctgactgttatgcttgatttgaccttcaaaattacatattaactgttcttcaataaatattatcttaatatcagt

SEQ ID NO: 2506 - DNA, 1683 bp, Homo sapiens
  source 1..1683: mol_type = genomic DNA
ctgaaggtctggtgatagctgggtgcaggaatattgtgcaggagggctatgtgtcctggaccatgaagaaggatgacttctgactgctcctccacacactgctctcctgagtcctgtggcacggcttccggttgtgcacctgcctcaagctgctccgtggaaacagcttgtctccccggtacctgtgctacatcccgatgtcagactccaagcttcctatccaggtctcgcgggctgactggttgcctcctgccatgctactttactgggagttgtaatagtccctgcttggtggggaactgtgcctggtgtgaggatggggtgttcactagcaatgagaaggagacgatgcagttcctgaatgacagactcgccagctatctggagaaggtgcgcagcctggaggagaccaacgcagagctggaatccaggatccaagaacaatgtgaacaggatatcccaatggtgtgcccggattatcagcgttacttcaacaccattgaagatctccaacaaaagatcttatgcacgaaagcagagaattctagacttgctgtacagcttgacaactgcaaactggccactgatgactttaagtcaaagtacgagagtgaactgtcccttcgccagctgttagaggctgacatcagcagcctgcatgggatcctggaggaactgaccctgtgcaaatctgatctggaggcccatgtggagtctctgaaggaagatctcctttgccttaagaaaaaccatgaagaggaagtcaacttgcttcgtgaacagcttggcgaccgcctcagtgtggagctggacactgcccccacccttgacctcaacagggtcctggatgagatgcgctgtcagtgtgaaacggtgcttgccaacaatcgcagagaagctgaagaatggttggctgttcagacagaagagctgaatcagcagcaactgtccagcgcggagcagctgcagggctgccagatggagatcttggaactgaaacgcacagccagtgctctggaaattgagctccaagcacagcaaagcctgacagaatctctggaatgcaccgtggcagaaaccgaggcccagtacagctcccagctggcccaaattcagtgtctgatcgataacctggagaaccagctggccgagatccgctgcgacctggagcgacagaaccaggagtaccaggtgctcctggacgtgaaggcccggctggagggtgagatcaacacgtactggggcctgctggacagcgaggacagcaggctttcctgtagcccatgttcgaccacatgcacctcgagcaacacttgtgagccatgctcagcctatgtcatctgcactgttgaaaactgctgcttgtgaatgttaaggacagcaggtagaggaatcaaagccagcagcatcctagaaaggagatggggcttcaaccagggacatccaaaccggaagcacaaatccaggaggctctcatatcctggaattgccctccaggtatcctcagtctttctgctttactatttcctctccttccggcttatttgtggtatactggaagcccataaagcattcttgctcatctccaaataaaacgtgttttattcctttagcgtggtaaatatagctctatggctgattactgttgatagaatattcattttatggcaaggaaatcatcta

SEQ ID NO: 2507 - DNA, 1021 bp, Homo sapiens
  source 1..1021: mol_type = genomic DNA
tgctcctctacctgctctactctcaatccgccagaatcatgggctgctgtggctgttctggaggctgtggctctggctgtgggggctgtggctccggcagtgggggctgtggctctggctgtgggggctgtggctccagctgctgtgtgcccatttgctgctgcaagcctgtgtgctgctgtgtgccagcctgttcctgctccagctgtggctcctgtgggggctccaaagggggctgtggctcttgtgggagctccaagggtgggtgtggttcttgtggctgctcccagtccaactgctgtaagccctgctgctcctcctcaggctgtgggtcattctgctgccagtccagctgctccaaaccctgctgctgccaatccagctgctgccagtccagctgctgcaagccctgctgctgccaatccagctgctgccagtctagctgcttcaagccctgctgctgccagtccagctgctgtgtccccgtgtgctgccagtgtaagatctgaggctctggacccagaccttcaggtttctcctctttggtgaaagcatttcttatggtttctctgaatcagttcatcccacacatcatcctgaggcacctgcacctgctctagctcatcatccatgcatgcacctctttccatggctcggctctcctctaggccctgccttcagcttcctcactccggaaacatgtgtttccttgatgcaggaggtgttcttccctggacgccatggtgttccctgcacttgggtgtggaccatcttcttcttctccctgggctgactgagatgctaggtctgaccccacaaggccaggccgacattcctgagtgatcactaagaaccagtttctcaaccaccactgggattctgggtcctcctgggctgctgcctgttctcctgtgacccacctgtgagcaagaaggtctccttccttcctgttgtctccatctatttaaaaaaaaaatgaatgaatttccttgcaataaagcctctcatgtctgtaaaccaa

SEQ ID NO: 2508 - DNA, 1058 bp, Homo sapiens
  source 1..1058: mol_type = genomic DNA
gatccaccctcaatctaccagaatcatgggctgctgtggctgctccggaggctgtggctccggctgtgggggttgtggctccggctgtgggggctgtggctccggctgtgggggctatggctctggctgtgggggctgtggctccagctgctgtgtgcccgtctgctgctgcaagcccgtgtgctgctgtgtgccagcctgttcctgctccagctgtggctcctgtgggggctccaagggggactgtggctcttgtgggggctccaaagggggctgtggttcctgtgggggctccaaggggggctgtggctcctgtgggggctccaaggggggctgtggttcttgtgggggctccaaggggggctgtggctcctgtgggggctccaaaggtggctgtggttcctgtgggggctccaaggggggctgtggttcttgtggctgctcccagtgcaattgctgtaagccctgctgctgctcctcaggctgtggatcctgctgccagtccagctgctgcaatccctgctgctgccagtccagctgctgtgtccccgtgtgctgccagtctagctgctgcaagccctgctgctgtcagtccagctgctgtgtccccgtgtgctgccagtgtaagatctgaggctctgaacccagaccttcaggtttcacctgtttggtgaaagcatttgttatgatttccctgaattaattcatcccacgcatcctccctgaggcacctgccccttctccagctcatcatccatgcacgcacctccttccatggctcagctctccactgggccctgccttcagcctcctcactccggaaatgcatgtttccttgatgcaggaggtggccttgcctggacgcgggcacccagccaactgccatggtgttccctgcacttgggtgtggaccatcttcttcttctccctcggctgactgagatgcaaggtctgaccccacaaggccaggccaatgttgctcagtgatcactaagaaccagcttctcaaccaccattgggaccctggatcctccagggccgctcgctgcctgttctcc

SEQ ID NO: 2509 - DNA, 898 bp, Homo sapiens
  source 1..898: mol_type = genomic DNA
cctctacctgctccaccctcaatccaccagaaccatgggctgctgtggctgttccgaaggctgtggctccggctgtgggggctgtggctccggctgtgggggctgtggctctggctgtgggggatgtggctccagctgctgtgtgcccgtctgctgctgcaagcccgtgtgctgctgtgtgccagcctgttcctgctccagctgtggctcctgtgggggctccaagggaggctgtggctcctgtgggggctccaaggggggctgtggctcttgtgggggttctaaggggggctgtggttcttgtggctgctcccagtgcagctgctataagccctgctgctgctcctcaggctgtgggtcatcctgctgccagtccagctgctgtaagccctgctgctgccagtccagctgctgtaagccctgctgctgttcctcaggctgtgggtcatcctgctgccagtccagttgctgcaatccctgctgctcccagtctagctgctgtgtccccgtgtgctgccagtgtaagatctgaggctctggactcaggtctcatgtgagtcctgctaaccccattttccgaagctgtgacctgtccttcatcgttgagccccaaaccactgctcagggtccattcctcactataagatgaagccatatctgcctgccttttcctaaggagagtccaccctaattaatgtccattccctcctaacaaattctcttcccaagtcaactgcaactgcggctgaatcacccctcacccgctagccttgcctttgcttgtgtattcagaggcctgagctcctgaacccacttgaagtcctgtcttttccagctggagcagctgggcatgagtgtcccacctgcaacaaggtgggcgtttaagaggcttccttgg

SEQ ID NO: 2510 - DNA, 5060 bp, Homo sapiens
  source 1..5060: mol_type = genomic DNA
cgggagcccaggcgggcaggccgctggggtcggggctgcacgtacgagagccgggacgcccgggttcagagcgaaggaggaggcatggcttcggtgttcatgtgtggcgtggaggacctgctgttcagcggcagccgcttcgtatggaacttgaccgtgtccacgctgcggagatggtacacggagaggctgcgggcttgccaccaggtgctgcggacgtggtgcgggctgcaggacgtgtaccagatgacagaaggcaggcactgccaggtgcacctcctggatgataggagactggagctgctggttcagcccaaacttctagcaagagagttgctggacctagtggcttcacatttcaacctgaaagaaaaggagtattttggaataacattcatagatgacacaggtcagcagaactggctgcagttagatcaccgagttcttgaccacgatttgcccaagaaaccaggcccaaccattttgcactttgctgtgaggttttacattgagagcatatcgtttttaaaggataaaaccaccgtggagctgtttttcctgaatgcaaaggcctgtgtgcacaaggggcaaatcgaagtagagagcgaaaccatcttcaagttagcagcgtttattttacaggaagccaagggagattataccagtgatgaaaatgccaggaaagatttaaagacattaccagcctttccaaccaaaactcttcaggagcatccatcccttgcctactgtgaggacagggtaattgagcattatttgaaaatcaaaggtctcactcgaggtcaagctgtggttcagtatatgaaaatagtagaagctctaccgacttacggtgtccattattatgcagtaaaggataagcaaggacttccttggtggcttggaataagctataagggaattggccaatatgatatacaagacaaggtgaagcctcggaagttattccaatggaaacagctggagaacttatatttccgtgagaaaaaatttgctgttgaagttcatgatccacgaaggatttcagtttcaagaagaacctttgggcaaagtggcttgtttgtgcaaacatggtatgctaactcttctctcatcaagtccatttgggtaatggcaattagtcagcatcagttttacttggaccggaagcaaagcaaagcaaaaattccttcagccaggagtttagatgagattgcaatggatttgacagagacaggaacacaaagggcctccaagctggtgacactggagacgaaaagtcagttcatcatggcaagtaatggcagtttaatctcctcaggttctcaagactcagaagttagtgaagagcaaaagagagaaaaaatccttgaactaaagaagaaggagaaactattacaagaaaaacttctgaaaaaagttgaggagcttaagaagatctgtctgcgggaggctgagctcacaggcaaaatgccaaaggagtatcccctgaacataggcgagaagcctcctcaggtcagaagacgtgtgggtactgcgttcaaattagatgacaacttgctgccgagtgaagaagatcctgctttgcaagaactggagagtaattttctaatacaacaaaagctggtggaagctgcaaagaaacttgccaatgagccagacctttgtaaaactgtgaagaaaaagcgaaagcaagattacacagatgcgatgaaaaagcttcaggagattgaaaatgcaataaacgaataccgaattaggtgtggaaagaaacccagccagaaagcaacagtgttaccagaagacataatcccctcagagagtagctctttgtctgacaccaccacctatgatgatcccagtgatgccttcacttttcctgggcagcgatcaagttcagtacctcattctccaagaattcttccccccaagtctcttggtattgagcgaatccatttcagaaagtcgtccatcaatgaacagtttgtggataccaggcagtccagagaaatgctgtccacacacagcagcccttacaaaactctggagaggcggccccagggaggacgaagcatgcccaccacgccagttcttacccgaaacgcctacagcagcagccacttggaacccgaatcttcatctcagcactgccgccagcggagtggaagcctggagtcccagtcccacctgctctccgagatggacagcgataagccatttttctccctctccaaatcccaaagaagcagcagcacagaaatcctcgatgacgggtcttcttatacaagccaatcaagcacagagtattactgtgtgacaccagttaccggcccctattacaccacccagaccctggacactcgcaccaggggtcggaggaggtcaaagaaacagaatgtttctacttcaaattcaggaagcatgcccaacctagcacaaaaggatagtttgaggaatggtgtttactcaaagagtcaggagccaccgtcttccagttactacattgccgggtacacaccctatgcagagtgtgacttttattacagtggtggttatgtctatgagaatgacaccgagggacagtatagtgtcaacccttcctaccggtcctcagcccactatggatatgagcgccagagggactacagcagatcctttcacgaagatgaggtcgaccgggtaccccataacccatatgcaactctccggctgccaaggaaggctgctgcaaaatcggagcacatcaccaaaaacatccacaaggccttagttgccgagcacttgcgtggctggtaccagcgggcctctgggcagaaggatcagggacacagcccgcagaccagctttgactcagacaggggatcacagagatgcctggggtttgcggggctgcaagtaccttgttctccaagcagtcgtgcatcctcgtactcttcagtgtcttctacaaatgcttctgggaactggaggacccagttaaccatagggctgtcggattacgagactccagcacattcttcttacaccagctgctatggcaatgtctataatcctttaccctctccaagcagacaatacacagaaatcagtcaactggatggtacagatggaaaccagctggaagacaacctggagagtagtgagcagagactcttttggcatgaagattcaaagcctggaacattagtctgaactgcagttggacctcctgaccaagcactgcgttctcacactagtgtgccttgcaaattgtatttgtcttccgagaggatgttcgttttagaaacctaaagacatcaaaggttgaagagaagacttagttgccctggaagtgaatcagtgaatcacacaccaagccccacaaagcccctaaaggaggatttggcctttcaaactctaggcactaacgtaactgtagggtctgcccacatgttgaagtattgccaagagaggactcagtgtgaagccttcatcaatagcaagcactttttaagggagtaaaagttgttaaaggcaaacctcaaaaacatgaaagggcattcaggatgtcccatggcaataagaacaggggaaatctcagagcacaattcagcaggatgagagaaggggaaccagaagctccggagtcattgctcacttcagagtttgaattcgtgagctgacaaagagtaacatgctctttctacacagacatggacaatttagacagtattggaaaattacttgaagctggattttcatgaagttctgaatgagtgtaaatgttttttaggatactataaagagtgatgtttttcataagcaccataaaatgggttctggaaaaactgattaccttagcatcctgtaatataacttatggtagcagattggggaaaatgaagcagcccactgaataattgacaaagtctgcttggagaacattctaaggtacaatatcatggagctcctttttcctttctccactaattgcgtgatgagctattgttctggctgttaattctccaactcggctgtcatttgaagtggcagacttaatatggaaagtttttataattatgagtttgaaaaagcattttaagatgatacagaaagtatccaaaacaacagaaaaaaaaagccacgtcattttagatgaattgcgtgccttaaaatggtgaacgttagaaaattaaacaagtctggattccacaagtagttccaagtcaccaagtgacaaaaacaaggttaacattaaaaaagaaaaacaacaacaacgacaaaaagctccaagctgcagtggatttaattatgaggctaaaactacctcatactttccttggaagaactaattagctatggtttattgtagggttttgtttgtttgttttttaaagcaaatgatttccatattccagattgatcttttttgtcatctttgcttcaaaattacataaaaggtgctcctttcccccttcttttatacaagtttcttgttcatattgtgaatagaaaagtttctgaacaacttttttggaacattttctatctatattccaaagcatgtaatatatacataaaaacgatttgttaaactggtccttagtcatttgtataattagaaatgaagtttgggaaaaaattttggaaaaaagacaagcaaaaaaaaataacttattccttttttgcatatttgtatagccttctagaatcagaaataacctttttgcatattcttttattgttctgacttttcaagacctattatttttttacataggtcaataaacaaaaggtgtgctactgaaaatgtttacgttttcttccatttatgtcaggggttcatgtgaagcaggtcgcagtgctctacttcaagtaatcatattgggcaaggcttcggatttttatttatagtattaccgtattttattaattccgggatgtacatttttaaatatttacattaaaaacatggttcatctttttattgatggcatattctacttgaattggcagttttttcttaatagtacattaaaaataatgctgtgtcttacaataaagttgccttagaattgatgaaa

SEQ ID NO: 2511 - DNA, 1604 bp, Homo sapiens
  source 1..1604: mol_type = genomic DNA
cggcgcgatgaccacgctacgggcctttacctgcgacgacctgttccgcttcaacaacatgtgagtgacacgcgcctagggccagccgctcttggccgggcctcgcttcccggccccgccagctccggccccagccgcgccttcccggccggaccccaagcccggacggggacccgcgagaaccaccccccgccggccaacgtgggcgcctccctggggccacagggtccagggagaggtgggcctggagtcgacgcacgccggccttggcgaccttggccgaggtgctcaaactttgtctctggaccctgcgagctggcaggttctggggcagcgctcgggcctccgctcgtggtcgctgtcaggaggcgctggggtgatggggcgagctggagacgcggcctggagcccacgacctgggcttctcgccctgccctactgcttgctggttcgtggccgggccgcgcctcttctgggcagagggcaccgccgacggccaggccgcagagggggcttgcgaggatcggaagctggtcagcagctgttgggatgtgtacatcgtgaagcccacctggtggccgtggttaaattgtatccaaatgaaatgacactgatcactgcgtcccctgcagcagatgctgtctcagtcatgtaacttggatccacttacagaaacttatgggattcctttctacctacaatacctcgcccactggccagagtatttcattgttgcagaggcacctggtggagaattaatgggttatattatgggtaaagcagaaggctcagtagctagggaagaatggcacgggcacgtcacagctctgtctgttgccccagaatttcgacgccttggtttggctgctaaacttatggagttactagaggagatttcagaaagaaagggtggattttttgtggatctctttgtaagagtatctaaccaagttgcagttaacatgtacaagcagttgggctacagtgtatataggacggtcatagagtactattcggccagcaacggggagcctgatgaggacgcttatgatatgaggaaagcactttccagggatactgagaagaaatccatcataccattacctcatcctgtgaggcctgaagacattgaataaccctgggcagtggttcttaggcagatactctagatgctttatggacaatattattttcattggatgattctggagctctattaggagaaaagtaatcattttaggtcttaaagacttcaagaaaatacaggttatcaatttattttaaatctcattgtttccagttagcaatatcatacctattaaagctgttcattgtaacaaaattcaatcaaaaaggcagctaggtcagaaggaaacataccactctcatggttcatagtattcactgtatgtatgctagggaaaagacttgctccagtctcctcctcagttctgtgcctgagaaccactgctgcatatatttgtttttaaattttgtattgaactgttaattgaagctttaaaagcatatatgaaatgtataaatctaagatgtataatacattattgactctatgaatgttttctgaagtttgttagtcattt

SEQ ID NO: 2512 - DNA, 412 bp, Homo sapiens; identical to SEQ ID NO: 2104
  source 1..412: mol_type = genomic DNA

SEQ ID NO: 2513 - DNA, 2866 bp, Homo sapiens
  source 1..2866: mol_type = genomic DNA
tccattccaaataaaatctataacaaattaggtatagaaagaatatacctcaaaataaagagatatgttctttataagctataggacaatcccatggttaacattattgtcaatggtgaaattttggaattgtttttaagatttattataagaaaaagatgcccactctcactacttctttcaacaccgtattggaaatcctgctcagaatctaagacaagagaaaaaagagcatttaaataagaaacaacaagttcttctattcatggagattaacgctcaggtttttgcagattagatttaacagcatgaaatctgtaccatccaggaatcaaaggatataggactttagggcatcaattattaagaggctataggaaagcagaaatgctcctggatgtttccattgtccacacacaaaatttcaacagaccagccccaggaagtaaaggcacattcctgactactgttagttgatgagcttttcaccaaaagcagagatgtgagacctggcaggtttcaaagacccctcaagtgctccataccttgaaattcacttccacaaagctagaacaccatctgttcctgagggatcaggttatcgtctgtttcttttaggcactggccagtcaggctttagtggacacgaagccacagatttttagtgtaaaatgcctaatctatcataatctttaggtagatatttggaggcctgcacacttaaatgggttggtgaaatgtcataccagacacatggctgggaattgggtttttctcctccgctcttagcagcacctttgtaacccagtgattacccccctcatggctccacggccacatccgcaaaaagggtactggtgaacgtgacattttcacgaagccacagcccatggtcactccctgcaaagctctgaacttgcgcattcccaggccaggccgtggttgtctttccaaggcggctcagcttgtgctttgcttggagagagcggagggcagcagcacagtgacagcgtctgggacctcagaccagtttccacagccacttatgaaagcagacggctccatgggctggaggaggtgggacgctctggaaagaactcgggtgcgagtgggaaagaaaatcgagctgagcagctggaagtcgaagtcgcgtgagtgaggaccagacactctcgatttaggcaaaggcggggtgcacttcccaacaacacatcctcctcactggcgagaccaggcctgcccttcaagttcctctcctgatttaatccccttggcgagggtttggcatgaaatcaatggccagcaagcttggtaaacgaagccgcctacaccgccctccccctccctgcacggccgcgccccgcctccgctcctgtctcaatctgggattgtcctcctgtagccccaccatccaccgtggggaacggtggagagactacaactcccagtatgcaccgcgatgcgcgcctcaccctgcatctcccagcccgcagccagctggcatcctagaccctctgccctgcgaccaacagccgggagcggaccagacaccagaactcccggaacggttgaagacggttccgctccctgtcccgcctttcgcagcccagcagtttcgccctgcggagaggagccttgctgtttccaaatctctcctgctgaagagacattggagctagggcggctagtttcacctggtaattgtgacaccctgtctcctcgagctgcaggcttttatgcttgtcatgttcgaagtttgataccttgcagatcaacaaagggccggtggcctctcactgcctccgcggcagggttgtcaagtttttcaggttaagtactgcacgactactcgcttctgaaactgatagacactgcctcagctccgtgcagggcagacgcacaagagcagaatctccgtgggacatctctctggagcatcaatattactgcagtatttggaagaaacaaatttaaataagttctaaggtgaagaatggaacatttaagacaagtctggaaagtcatctgcctttaataactgtcgtttgtccttaacgtcagactttctccaagaccaaaactctaagaacttatttccattcttacaaatagtaaaaatgataaatcatatcaagtcaattgaaagtcctgcctgctgctttcctaaattgcaatatggccttggtatggttttatttgtacttttgtgggggattcgtggatctttagattaaaaaaaaaaaaataggtttttgaacaatttttgcaagtttgcagctgttagttattgatttatttttccaacccatctaattcttctgtctctctcctctcctcaggctcaataattccatgggtctctaaggctgtgtttattttctttaaattttgttgatttacttttatactccatttgattttttctatctctcaccttttctcagactcagtcatcccacaggtctgtaaggctctgttcattttctttaaacttcttttttttttcctctcctcagattggataaattatattgctatgtctctgtttctgaactatagaaaagctcaaaattattatttttatttctcattttttatatggctattttttctctgctgatgtttcacatctattcatttatgagaatattttcctttgccctcatgagcgtgtttataatagctgccttcaaattcttgtctgccgtttacatcttggacatcttggagatggctactgcctgctttttatcttgtgtatttattacattttcacgtgtcttcacgcatcccttgaattggaaattgtgccctggagactgtatacaagactggattaaaaagactggattctgttttgtccctg

SEQ ID NO: 2514 - DNA, 666 bp, Homo sapiens
  source 1..666: mol_type = genomic DNA
ttaatggacctggacagtggtgatgttaagagaagagtacatttatttgaaacccagagaaggacaaaagaagaagatccaataattccctttagtgatggacccatcatctcaaaatggggtgcgatttccagatcttcccgtacaggttaccataccacagatcctgtccaggccactgcttcccaaggaagtgcgactaagcccatcagtgtatcaggtggagttcatatggcaacgaggccacatcatcagcacactatgttgaaagggacagattcattgttactgatttatctggtcatagaaagcattccagtactggggaccttttgagccttgaacttcagcaggccaagagcaactcattacttcttcagagagaggccaatgctttggccatgcaacagaagtggaattccctggatgaaggccgtcaccttaccttaaaccttttaagcaaggaaattgaactaagaaatggagaggtaaagaaactgaacctttcggcttcatgcttaatgtatttgttttctgctgctgcatcttggttataccattactgagtgcattttggtgtgcctatctctgatggatgattgattgcttttaaaacttataacagaaataaaattgtaatcccagatttcttaaataattctttaa

SEQ ID NO: 2515 - DNA, 412 bp, Homo sapiens; identical to SEQ ID NO: 2104
  source 1..412: mol_type = genomic DNA

SEQ ID NO: 2516 - DNA, 2867 bp, Homo sapiens
  source 1..2867: mol_type = genomic DNA
tccattccaaataaaatctataacaaattaggtatagaaagaatatacctcaaaataaagagatatgttctttataagctataggacaatcccatggttaacattattgtcaatggtgaaattttggaattgtttttaagatttattataagaaaaagatgcccactctcactacttctttcaacaccgtattggaaatcctgctcagaatctaagacaagagaaaaaagagcatttaaataagaaacaacaagttcttctattcatggagattaacgctcaggtttttgcagattagatttaacagcatgaaatctggtaccatccaggaatcaaaggatataggactttagggcatcaattattaagaggctataggaaagcagaaatgctcctggatgtttccattgtccacacacaaaatttcaacagaccagccccaggaagtaaaggcacattcctgactactgttagttgatgagcttttcaccaaaagcagagatgtgagacctggcaggtttcaaagacccctcaagtgctccataccttgaaattcacttccacaaagctagaacaccatctgttcctgagggatcaggttatcgtctgtttcttttaggcactggtcagtcaggctttagtggacacgaagccacagatttttagtgtaaaatgcctaatctatcataatctttaggtagatatttggaggcctgcacacttaaatgggttggtgaaatgtcataccagacacatggctgggaattgggtttttctcctccgctcttagcagcacctttgtaacccagtgattacccccctcatggctccacggccacatccgcaaaaagggtactggtgaacgtgacattttcacgaagccacagcccatggtcactccctgcaaagctctgaacttgcgcattcccaggccaggccgtggttgtctttccaaggcggctcagcttgtgctttgcttggagagagcggagggcagcagcacagtgacagcgtctgggacctcagaccagtttccacagccacttatgaaagcagacggctccatgggctggaggaggtgggacgctctggaaagaactcgggtgcgagtgggaaagaaaatcgagctgagcagctggaagtcgaagtcgcgtgagtgaggaccagacactctcgatttaggcaaaggcggggtgcacttcccaacaacacatcctcctcactggcgagaccaggcctgcccttcaagttcctctcctgatttaatccccttggcgagggtttggcatgaaatcaatggccagcaagcttggtaaacgaagccgcctacaccgccctccccctccctgcacggccgcgccccgcctccgctcctgtctcaatctgggattgtcctcctgtagccccaccatccaccgtggggaacggtggagagactacaactcccagtatgcaccgcgatgcgcgcctcaccctgcatctcccagcccgcagccagctggcatcctagaccctctgccctgcgaccaacagccgggagcggaccagacaccagaactcccggaacggttgaagacggttccgctccctgtcccgcctttcgcagcccagcagtttcgccctgcggagaggagccttgctgtttccaaatctctcctgctgaagagacattggagctagggcggctagtttcacctggtaattgtgacaccctgtctcctcgagctgcaggcttttatgcttgtcatgttcgaagtttgataccttgcagatcaacaaagggccggtggcctctcactgcctccgcggcagggttgtcaagtttttcaggttaagtactgcacgactactcgcttctgaaactgatagacactgcctcagctccgtgcagggcagacgcacaagagcagaatctccgtgggacatctctctggagcatcaatattactgcagtatttggaagaaacaaatttaaataagttctaaggtgaagaatggaacatttaagacaagtctggaaagtcatctgcctttaataactgtcgtttgtccttaacgtcagactttctccaagaccaaaactctaagaacttatttccattcttacaaatagtaaaaatgataaatcatatcaagtcaattgaaagtcctgcctgctgctttcctaaattgcaatatggccttggtatggttttatttgtacttttgtgggggattcgtggatctttagattaaaaaaaaaaaaataggtttttgaacaatttttgcaagtttgcagctgttagttattgatttatttttccaacccatctaattcttctgtctctctcctctcctcaggctcaataattccatgggtctctaaggctgtgtttattttctttaaattttgttgatttacttttatactccatttgattttttctatctctcaccttttctcagactcagtcatcccacaggtctgtaaggctctgttcattttctttaaacttcttttttttttcctctcctcagattggataaattatattgctatgtctctgtttctgaactatagaaaagctcaaaattattatttttatttctcattttttatatggctattttttctctgctgatgtttcacatctattcatttatgagaatattttcctttgccctcatgagcgtgtttataatagctgccttcaaattcttgtctgccgtttacatcttggacatcttggagatggctactgcctgctttttatcttgtgtatttattacattttcacgtgtcttcacgcatcccttgaattggaaattgtgccctggagactgtatacaagactggattaaaaagactggattctgttttgtccctg

SEQ ID NO: 2517 - DNA, 2983 bp, Homo sapiens
  source 1..2983: mol_type = genomic DNA
gataaatgcggagggacggtccagctttagctctctgctcgccgccgccgctgtcgccgccacctcctctgatctacgaaagtcatgttacccaacaccgggaggctggcaggatgtacagtttttatcacaggtgcaagccgtggcattggcaaagctattgcattgaaagcagcaaaggatggagcaaatattgttattgctgcaaagaccgcccagccacatccaaaacttctaggcacaatctatactgctgctgaagaaattgaagcagttggaggaaaggccttgccatgtattgttgatgtgagagatgaacagcagatcagtgctgcagtggagaaagccatcaagaaatttggagcttataccattgctaagtatggtatgtctatgtatgtgcttggaatggcagaagaatttaaaggtgaaattgcagtcaatgcattatggcctaaaacagccatacacactgctgctatggatatgctgggaggacctggtatcgaaagccagtgtagaaaagttgatatcattgcagatgcagcatattccattttccaaaagccaaaaagttttactggcaactttgtcattgatgaaaatatcttaaaagaagaaggaatagaaaattttgacgtttatgcaattaaaccaggtcatcctttgcaaccagatttcttcttagatgaatacccagaagcagttagcaagaaagtggaatcaactggtgctgttccagaattcaaagaagagaaactgcagctgcaaccaaaaccacgttctggagctgtggaagaaacatttagaattgttaaggactctctcagtgatgatgttgttaaagccactcaagcaatctatctgtttgaactctccggtgaagatggtggcacgtggtttcttgatctgaaaagcaagggtgggaatgtcggatatggagagccttctgatcaggcagatgtggtgatgagtatgactactgatgactttgtaaaaatgttttcagggaaactaaaaccaacaatggcattcatgtcagggaaattgaagattaaaggtaacatggccctagcaatcaaattggagaagctaatgaatcagatgaatgccagactgtgaaggaaaatataaaaaaaaagtcgactgctatgctcaaaaagtaaaaaaagctcaacagttaaaatctaatgtttgttttctttcctgttatattataaggatatgcacgtttgttctggaaaagatagaatttgtctctaaaagacttgaaattgtaattaaaatggcaagctaatcaaacataagcttcattaagtgggattctaagacagtctgtgtttttatatttcaagggtttaaccctttgagccttacatctcattcactgtctttctccaagaaaagtattttgggcggacagtcagatcaagcagtaaaattagctctttcaaatcttcttgtcatgtaaaatgaagctagtctgttttaaaatttttagttttggattgtatactaatgaaaatcttaatgatgtttttgatttttatatacttattttaaagaaaatcttatatagtacattttacaaaaattataaaaaatgaattagtactggcgaggactaaatgaaacaataatttttcattttgataactagctttccaggtggacttagccataggaaaatattactaatgtaatttaacaaattgctgcatgtattccatttaaaaatatgtttaaattgtcctaaaacaaaataattttctccctaggagtatgcatttggctacagtgttttgaaacagaaaccttagaataggtcattggtatgggctgaactgtgtatcccccaattcatttgttgaggtcctaactcccatttcttttgaatgtgactgttcggagatgaggcctttaaagaggtgacttaagttcaaaggaggctgttagtctaatccaacatggtgtcctttggacataagagataccagcaatgtgtgcacagaacaaagaccaggagaggacacagtgagaaggcagttatctgcaagcaaagagagaggcttcagaagaaacaaaatcaccagcaccttgatctttgacttctaatctccagaatagtgagaaataaatttctgttgttaagccgtccactgtgggaggccgacgcaggaggattgcttgaggccaggagttcaaggccagcctggacaacatagtaagaccctatctctacccccctaataaattaatttaaaaagccccccaatctgtggtattttattatggcagccctagcaagctaatacagtggtttgagaggctgggagggttgaggggaagataaacttttaaaaagctcttatctttcatttcaatcagttaaaaatacttgctcagtgtaacaattttgcttctcagcttccactctaatattgttgtgccattaagcaatttagctaatcctgacatttcttagattcataatgttaggagcatttaatctgtattttacaagttaggaagcagaggatcagagatgggaaaggactagcccaaggccaacattaacaagccctctaacaaaaactttacaatacatttatgttgaatggaactccaagatctcacctctccatccaggaatggagtccatgtaatcaaagtgaacttaaaaataggacagtttcaacaagtcaggagattcacagcaactgatcaaagggagtccagtcaacgtgagcaagcgtgattatgatgaggaagccccctctgctttaatccacacaaggaacgtaacctgaagtaacctgatgttaaccaatctgctgtgtctactatgctgtttccttgttcctgctagtgctgctttacaaatgcagaccattctatcatacctggcggggcttctgttttattttgtaggctggatgctacccagttcatgaatcgctaataaaagccaattagatcttta

SEQ ID NO: 2518 - DNA, 3350 bp, Homo sapiens
  source 1..3350: mol_type = genomic DNA
agggaccaggcttgggaggcgacgaagaggaacgctgggcgcaggaggcccactgcatacgcaggcgcactcggcgatcccggcttttccgcgcgcagttcccgcacaggcatcggggggggcaggggcggggcaggggcggggataaatgcggagggacggtccagctttagctctctgctcgccgccgccgctgtcgccgccacctcctctgatctacgaaagtcatgttacccaacaccgggaggctggcaggatgtacagtttttatcacaggtgcaagccgtggcattggcaaagctattgcattgaaagcagcaaaggatggagcaaatattgttattgctgcaaagaccgcccagccacatccaaaacttctaggcacaatctatactgctgctgaagaaattgaagcagttggaggaaaggccttgccatgtattgttgatgtgagagatgaacagcagatcagtgctgcagtggagaaagccatcaagaaatttggaggaattgatattctggtaaataatgccagtgccattagtttgaccaatacattggacacacctaccaagagattggatctgatgatgaacgtgaacaccagaggcacctaccttgcatctaaagcatgtattccttatttgaaaaagagcaaagttgctcatatcctcaatatcagtccaccactgaacctaaatccagtttggttcaaacagcactgtgcttataccattgctaagtatggtatgtctatgtatgtgcttggaatggcagaagaatttaaaggtgaaattgcagtcaatgcattatggcctaaaacagccatacacactgctgctatggatatgctgggaggacctggtatcgaaagccagtgtagaaaagttgatatcattgcagatgcagcatattccattttccaaaagccaaaaagttttactggcaactttgtcattgatgaaaatatcttaaaagaagaaggaatagaaaattttgacgtttatgcaattaaaccaggtcatcctttgcaaccagatttcttcttagatgaatacccagaagcagttagcaagaaagtggaatcaactggtgctgttccagaattcaaagaagagaaactgcagctgcaaccaaaaccacgttctggagctgtggaagaaacatttagaattgttaaggactctctcagtgatgatgttgttaaagccactcaagcaatctatctgtttgaactctccggtgaagatggtggcacgtggtttcttgatctgaaaagcaagggtgggaatgtcggatatggagagccttctgatcaggcagatgtggtgatgagtatgactactgatgactttgtaaaaatgttttcagggaaactaaaaccaacaatggcattcatgtcagggaaattgaagattaaaggtaacatggccctagcaatcaaattggagaagctaatgaatcagatgaatgccagactgtgaaggaaaatataaaaaaaaagtcgactgctatgctcaaaaagtaaaaaaagctcaacagttaaaatctaatgtttgttttctttcctgttatattataaggatatgcacgtttgttctggaaaagatagaatttgtctctaaaagacttgaaattgtaattaaaatggcaagctaatcaaacataagcttcattaagtgggattctaagacagtctgtgtttttatatttcaagggtttaaccctttgagccttacatctcattcactgtctttctccaagaaaagtattttgggcggacagtcagatcaagcagtaaaattagctctttcaaatcttcttgtcatgtaaaatgaagctagtctgttttaaaatttttagttttggattgtatactaatgaaaatcttaatgatgtttttgatttttatatacttattttaaagaaaatcttatatagtacattttacaaaaattataaaaaatgaattagtactggcgaggactaaatgaaacaataatttttcattttgataactagctttccaggtggacttagccataggaaaatattactaatgtaatttaacaaattgctgcatgtattccatttaaaaatatgtttaaattgtcctaaaacaaaataattttctccctaggagtatgcatttggctacagtgttttgaaacagaaaccttagaataggtcattggtatgggctgaactgtgtatcccccaattcatttgttgaggtcctaactcccatttcttttgaatgtgactgttcggagatgaggcctttaaagaggtgacttaagttcaaaggaggctgttagtctaatccaacatggtgtcctttggacataagagataccagcaatgtgtgcacagaacaaagaccaggagaggacacagtgagaaggcagttatctgcaagcaaagagagaggcttcagaagaaacaaaatcaccagcaccttgatctttgacttctaatctccagaatagtgagaaataaatttctgttgttaagccgtccactgtgggaggccgacgcaggaggattgcttgaggccaggagttcaaggccagcctggacaacatagtaagaccctatctctacccccctaataaattaatttaaaaagccccccaatctgtggtattttattatggcagccctagcaagctaatacagtggtttgagaggctgggagggttgaggggaagataaacttttaaaaagctcttatctttcatttcaatcagttaaaaatacttgctcagtgtaacaattttgcttctcagcttccactctaatattgttgtgccattaagcaatttagctaatcctgacatttcttagattcataatgttaggagcatttaatctgtattttacaagttaggaagcagaggatcagagatgggaaaggactagcccaaggccaacattaacaagccctctaacaaaaactttacaatacatttatgttgaatggaactccaagatctcacctctccatccaggaatggagtccatgtaatcaaagtgaacttaaaaataggacagtttcaacaagtcaggagattcacagcaactgatcaaagggagtccagtcaacgtgagcaagcgtgattatgatgaggaagccccctctgctttaatccacacaaggaacgtaacctgaagtaacctgatgttaaccaatctgctgtgtctactatgctgtttccttgttcctgctagtgctgctttacaaatgcagaccattctatcatacctggcggggcttctgttttattttgtaggctggatgctacccagttcatgaatcgctaataaaagccaattagatctttacataa

SEQ ID NO: 2519 - DNA, 1566 bp, Homo sapiens
  source 1..1566: mol_type = genomic DNA
acaaagcggttggttgcggcagggactacaccggtgtatcatgggagcggcccgggctacacgttaaaaacactaaggggagcgcgcgaagctgaacttggcgctcgatgggggccgttagccgccctagagcgcgcggagccgcagaggcgtagctggactacaacgcagtgcatctcgggaggccaactcgactggactgggtgagaggacagaggtggctcgatgggcggcccgaaggccggggatcatggcgggaaggcgggcccagacaggttcagccccgccccgacccgccgctccccaccccccggccggcctcgcgtgccttcccgcagcactgccgtccccgggatgctgagcgcccaccgtctccccgcagccccctcatgcccggctgcgagctgcccgtgggcacctgcccggacatgtgcccggccgccgagcgcgcccagcgcgaaagggagcaccgcctgcaccgcttggaggtggtgccgggttgccgccaggacccgccccgcgcggatccgcagcgcgcggtgaaggagtacagccgacccgccgccggcaagccccggcccccgcccagccagttgcgtccgccctccgtgctgctggccaccgtgcgctacctggccggtgaggtggcggagagcgccgacatcgcccgcgccgaggtggccagcttcgtggcagaccgcttgcgagctgtgctcctggacctggcgctgcagggagcgggcgacgccgaggcagctgtggtgctggaggcggcgctggccacgctgctgaccgtagtggcgcggctcgggcccgacgcggcgcggggacccgcggacccggtgctgctgcaggcccaggtgcaggagggcttcggctcgctgcggcgctgctacgcgcggggcgccgggccgcacccccgccaacccgccttccagggcctctttctgctctataacctgggctcggtggaagccctgcatgaggttctacagctgcctgctgccctgcgcgcctgcccgcccctccgcaaggccttggcggtagatgctgccttccgagagggcaatgctgcccgcctgttccgtctgctccagaccctgccctacctgccaagttgcgctgtgcagtgccatgtgggccatgcccgccgggaagccctggcccgcttcgctcgtgcctttagcacccccaagggccagaccttgcctctgggcttcatggtcaacctcttggccctggatggactcagggaagcacgggacctgtgccaggcccacgggctgcccttggacggagaggagagagttgtgttcctgaggggtcgctacgtggaggaagggctaccgcctgccagtacgtgcaaggtgttagtggagagcaaacttcgaggacgtaccctggaggaggtggtcatggcagaggaggaagatgagggcacggacagacctgggtccccagcctgaggagggagcgtgagcctcccagagccccaggactgggccagagcacttaggtttctttttccatggtttccaggtaataaaaggaacttgttttgttggt

SEQ ID NO: 2520 - DNA, 393 bp, Homo sapiens
  source 1..393: mol_type = genomic DNA
gagccgagccgagccgagctgggggcgcagagcgcgggaggcggcggcggcgcggagcccagatggagtttccctcttgttgcccgagccagagtacagtggtgtgatctcggttcactgcaacctctgcctcccaggttcaagcgattctcctgcctcagcctcccgagtggctgggattacaggtggctccgctgccggatgggagtgccccagtgtgctggatgaagctggcgcatgcaccatgtcatcatgtgtctctagccagcccagcagcaaccgggccgccccccaggatgagctggggggcaggggcagcagcagcagcgaaagccagaagccctgtgaggccctgcggggcctctcatccttgagcatccacctgggcatgga

SEQ ID NO: 2521 - DNA, 6072 bp, Homo sapiens
  source 1..6072: mol_type = genomic DNA
agaaaggaaaaaagacaacgaggaaaaaggaggtgtccgggtagggcaacgcggcgacacccgaggcctggtggtggcggcggatcgagatattcaaggctgaagcagctacggaacggcagcggcggcggtcggacaaactgactgaccgagccgggtggtggcgggagcagcgggagcagccggaacgatgccggccgtgagcctcccgcccaaggagaatgcgctcttcaagcggatcttgaggtgttatgaacataaacagtatagaaatggattgaaattctgtaaacaaatactttctaatcccaaatttgcagagcatggagaaaccttggctatgaaaggattaacattgaactgtttggggaaaaaggaagaagcttatgaattggttcgtagaggtttgagaaatgacttgaagagtcatgtgtgttggcacgtttatggccttcttcagaggtcagacaagaagtatgatgaagccattaagtgttacagaaatgcactaaaatgggataaagacaatcttcaaatcttaagggacctttccttactacagattcaaatgcgagatcttgagggttacagggaaacgaggtatcagttacttcagcttcgacctgcgcagagagcatcatggattggttatgctattgcttaccatttattagaagattatgaaatggcagcaaagattttagaagaatttaggaaaacacaacagacatcccctgacaaggtggattatgaatatagtgaactactcttatatcagaatcaagttcttcgggaagcaggtctctatagagaagctttggaacatctttgtacctatgaaaagcagatttgtgataaacttgctgtagaagaaaccaaaggggaacttctgttgcaactatgtcgtttggaagatgctgcagatgtttatagaggattgcaagagagaaatcctgaaaactgggcctattacaaaggcttggaaaaagcactcaagccagctaatatgttagaacggctaaaaatttatgaggaagcctggactaaatatcccaggggactggtgccaagaaggctgccgttaaactttttatctggtgagaagtttaaagaatgtttggataagttcctaaggatgaatttcagcaagggttgcccaccagtcttcaatactttaagatcattatacaaagacaaagaaaaggtggcaatcatagaagagttagtagtaggttatgaaacctctctaaaaagctgccggttatttaaccccaatgatgatggaaaggaggaaccaccaaccacattactttgggtccagtactacttggcacaacattatgacaaaattggtcagccatctattgctttggagtacataaatactgctattgaaagtacacctacattaatagaactctttctcgtgaaagctaaaatctataagcatgctggaaatattaaagaagctgcaaggtggatggatgaggcccaggccttggacacagcagacagatttatcaactccaaatgtgcaaaatacatgctaaaagccaacctgattaaagaagctgaagaaatgtgctcaaagtttacaagggaaggaacatcagcggtagagaatttgaatgaaatgcagtgcatgtggttccaaacagaatgtgcccaggcttataaagcaatgaataaatttggtgaagcacttaagaaatgtcatgagattgagagacattttatagaaatcactgatgaccagtttgactttcatacatactgtatgaggaagattacccttagatcatatgtggacttattaaaactagaagatgtacttcgacagcatccattttacttcaaggcagcaagaattgctatagagatctatttgaagcttcatgacaacccccttacagatgagaataaagaacacgaagctgatacagcaaacatgtctgacaaagagctaaagaagctacgtaataaacaaagaagagctcaaaagaaagcccagatagaagaagagaaaaaaaatgcagaaaaagaaaagcagcagagaaatcagaaaaagaagaaggatgatgatgatgaggagataggaggtccaaaagaagaacttattccagagaaactggccaaggttgaaactccattggaagaagctattaaatttttaacaccgttgaagaacttggtgaagaacaagatagagactcatctttttgcctttgagatttactttaggaaagaaaagtttcttttgatgctacaatcagtaaagagggcatttgctattgattctagtcatccctggcttcatgagtgtatgattcgtctctttaatactgtgtgtgaaagtaaagatttatctgatacagttagaacagtattaaaacaagaaatgaatcgtctttttggagcaacgaatccaaagaattttaatgaaacttttctgaaaaggaattctgattcattgccacacagattatcagctgccaaaatggtatattacttagatccttctagtcagaagcgagctatagagttggcaacaacacttgatgaatctctcactaacagaaacctccagacatgtatggaggtattggaagccttgtatgatggtagcctaggagactgtaaagaagctgctgaaatttatagagcaaattgtcataagcttttcccttatgctttggctttcatgcctcctggatatgaagaggatatgaagatcacagttaatggagatagttctgcagaagctgaagaactggccaatgaaatttgaacatcactaaacaagcaaatggaatgactttggaccatatctagtatataatatttttgtcacgcacctgctgcattgctctaacttacacagaatgagaggagtaaatgttcttgccttcaaatagtgttttacgttttttatcctgctgaaaaagtatatataaaatatctaacattacaggatagaggttcagtttcttaaaaaattaaagctgctaaaattgagtggttaaaaaagataccttatcctattcctccccacccacccatgtttttaaactaatttatataaaatctggaggctgttacagctaacaaagcaggtgtgtggcagaaatattactttaaatttgtcttgtgagattttactatatctcagacagcataaatgctgttttagcactggattctttcactgagcacaaagagttgttggggctttagcatctgactgattttgttacggggttgattctgaccataggaagtatgcaatgtgaatcactatttacagagaaacctacaacagatgcttgatgttgtagaaactgggacatatagataccaagcaaaattataagaaacctataaggtgttcaatacgcttgtgtttccaaaattcactgtacatgatcagtttggtgttcttgtaccacagtttttaactgaaggaaccagttgtaacagtctcaattttaactaaaacttgaagaactaaaacaacaatgcaaacctttcagcattgtttggccaaacttgttaaaactgtaatgcaagaaccaaatgcactgtgatgtggcaccaactaattagcaagcatgaatttttcacccaagagtgaaaaaaggaaaatctaccatggcttgaagttaaagagcagaactcctgactaccattctatgactgatcaaaagactaatagttaaaaacctcagcaggccttgttcacgatatgcagaaaaaaaagtgctgcagtttagatacctctggaatttttccacagtgtcacaggtttgtaatacttgaagccctacatttctaagaatatatttcttgctcagttgtttcaggcaagcccaagactttgtaatttttaaagggcccaagattttttttttttttttttttttcaaataacagaccagcttctttttcttgcagttacagatgtaatttcctttttgttgtcaaacataaggtaccaaatatgatgcaataaattgttttgaaaaacagttgtgtgaatatttcaactaatctgtgttgggcttctgtgaaatacacaggtggaaacagaggtgcaagccagaggcaatgtaatatgctgtaaggctagtgcagatgggagctttttagaaggggctaagtgctggtgtcagggaaattccataatgaagtagaatgctgctcctgcattaagatttcattgagggcaaggctggtggcaggtactatgaatgtaattcataatttaaaaggaaaactaaaaactattttgatttgggaaaatgagccttaatttgttaaacctatacactgagaactagcctcaggcttaatattctcattgcatttgcaagatctgagcaaataagattaagtaaaacaaatcaattgtatatataattgacctttttgtggaacatgtagtttatagaaagtatactctaaagggaatttgccgaagaccttttactgattgaacagttgtgctacaatcaacttttcatagtacatgacctgcattccacatctcagtctaacagtttagtagtgatgtaaagagaagtacaaaccgaactccagtgctttgttatgttttattaactggccctgtctcaggaacatcttaacagatggcaaaaaaacaaaaactttttttcaactcctatgagtggcaactgaagttcttattgttgggaaagaacactagtcctacctctgccactaatgaggtgtttggaggaggtaccagccatataatagggggtgtatgtgtgaattttgtttaaactctactgtatattgaaatgaaattcatttatttgtcttgacaatgttcaaatgatgtagattgtcttagaatgaatattcataagtactcagaactcttaagatgcagatgccacccgtgaggagctaaattcctaatgtgtattgtattccaacccaattttactggaactattgaataaatcttttattttctttcaggtttacttgatagtggatacattggtgtcagaggaccttgactgggttcattttatgtccagacatcacccctgaaacactgtactgtactatcttgctctgagtagtatcaactggatcgtctcatatttgcctcattcatcctattaatttcaaatgatactgtgggggaaaaacagggttagaaaaacaagtggaaaaaatggagtgatgttgtaatctaaacaagtgccttatgtttattgctaagaactggtgttaccaacccttttgagaagaaagggtctcttgacctgtattaacataggaaagtaaagttctttttgtttttctttatattcagctactcttgtcatttctcgttgaaaaactaaaatctgactaggttagtttactcagctttaattagatagttgagtcatatattttcaacatttttctgtatcgtatttattatgcacaaaaataaagtgtgatctctaatagcatggctaaaggtaatgccaatattagtgaatagctttgctgtgggctttatcaggcccttgtttttcacagtgttgtttgtactccatggtgtattgctattagagctgtgaaatgaaagctgtgactttatgaagagatcaaaaaaagtgtggtccagattcaggtaggttgtggtaagttcagggaagtcttgtatgatttctaagaatatttcagttaccatgtatagtatttgggaaaagctgtaatgtaaaatattggactttgttgcaagataggtatatacttgtgtcagataattaaagccttaaattttgaaatgaatctttgagatttcaaagaaagactgacctttcaaatagaaggcggtctttctattctagctaatgccccacttctttaagttataaacaaagtttcatgataccattctgctatcatctaaactttgctgaactctactgccaacctacattaaaaacaaagtcccacgaaatggctgtgttacaccatagtgagcagaaacttaaattttgttctaattttgatggttgaaaaatttcaacctgtagcaataaa

SEQ ID NO: 2522 - DNA, 2309 bp, Homo sapiens
  source 1..2309: mol_type = genomic DNA
cgcggccccaagcggttcccgagcccaggcccgcgccgagcccaggtcctagagcagctccagcaggatggcggctccagcgtctctaaggcctgcagggggtccagccccatggggggcgccctaggcctccgacagctccccatctgtgctcctgcctgccggccatcctcaggccactcgccatgggcggctgcttctccaaacccaaaccagtggagctcaagatcgaggtggtgctgcctgagaaggagcgaggcaaggaggagctgtcggccagtgggaagggcagcccccgggcctaccagggcaatggcacggcccgccacttccacacggaggagcgcctgtccacccctcacccctaccccagccctcaggattgcgtggaggctgctgtctgccacgtcaaggacctcgagaatggccagatgcgggaagtggagctgggctgggggaaggtgttgctggtgaaggacaatggggagttccacgccctgggccataagtgtccgcactacggcgcacccctggtgaaaggcgttctgtcccgtggtcgggtgcgctgcccctggcacggcgcctgcttcaacatcagcactggggacctggaggacttccctggcctggacagtctacacaagttccaggtgaagattgagaaggagaaggtgtacgtccgggccagcaagcaggccctacagctgcagcgaaggaccaaggtgatggccaagtgtatctctccaagtgctgggtacagcagtagcaccaatgtgctcattgtgggtgcaggtgcagctggcctggtgtgtgcagagacactgcggcaggagggcttctccgaccggatcgtcctgtgcacgctagaccggcaccttccctacgaccgtcccaagctcagcaagtccctggacacacagcctgagcagctggccctgaggcccaaggagtttttccgagcctatggcatcgaggtgctcaccgaggctcaggtggtcacagtggacgtgagaactaagaaggtcgtgttcaaggatggcttcaagctggagtacagcaagctgctgctggcaccagggagcagccccaagactctgagctgcaaaggcaaagaagtggagaacgtgttcactatccggacgccagaggatgccaatcgcgtggtgaggctggcccgaggccgcaacgtggtcgtcgtgggagccggcttcctggggatggaggtggccgcttacctgacggagaaggcccactctgtgtctgtggtggagctggaggagacgcccttcaggaggttcctgggggagcgcgtgggtcgagccctcatgaagatgtttgagaacaaccgggtgaagttctacatgcagacggaggtgtctgagctgcggggccaggagggaaagctgaaggaggttgtgctgaagagcagcaaggtcgtgcgggctgacgtctgcgtggtgggcattggtgcagtgcccgccacaggcttcctgaggcaaagcggcatcggtttggattcccgaggcttcatccctgtcaacaagatgatgcagaccaatgtcccaggcgtgtttgcagctggcgatgctgtcaccttcccccttgcctggaggaacaaccgcaaagtgaacattccacattggcagatggctcatgctcaggggcgcgtggcagcccagaacatgttggcgcaggaggcggagatgagcactgtgccctacctctggaccgccatgtttggcaagagcctgcgctacgcgggctacggagaaggcttcgacgacgtcatcatccagggggatctggaggagctgaagtttgtggctttttacactaaaggcgacgaggtgatcgccgtggccagcatgaactacgatcccattgtgtccaaggtcgctgaggtgctggcctcaggccgtgccatccggaagcgggaggtggagactggcgacatgtcctggcttacggggaaaggatcctgagctcacatgcagtagacttgggcaggcaaagggggcaccaagggcacaggccaagccttgggggcaggtgccaatctccagtcccaggatcccccagggcagaacctgagccctcccagtgcttgccttcagccacctggctcccctcctgggaggcctctgctggatccagaagatgctcaaccctcaaggcctctgctgccactgacagctggcactggaggcaggacaagccctgcctcttctccctctattgggactggtcccctgaagaaccctgcaacacgttaaacattaccgtaaaattaaaacgcacaaatttgcaga

SEQ ID NO: 2523 - DNA, 2387 bp, Homo sapiens
  source 1..2387: mol_type = genomic DNA
agtgcaaacgcagcgccagacacgccccgcccgcgcctccccgcccccccgcgcccgcggccccaagcggttcccgagcccaggcccgcgccgagcccaggtcctagagcagctccagcaggatggcggctccagcgtctctaaggcctgcagggggtccagccccatggggggcgccctaggcctccgacagctccccatctgtgctcctgcctgccggccatcctcaggccactcgccatgggcggctgcttctccaaacccaaaccagtggagctcaagatcgaggtggtgctgcctgagaaggagcgaggcaaggaggagctgtcggccagtgggaagggcagcccccgggcctaccagggcaatggcacggcccgccacttccacacggaggagcgcctgtccacccctcacccctaccccagccctcaggattgcgtggaggctgctgtctgccacgtcaaggacctcgagaatggccagatgcgggaagtggagctgggctgggggaaggtgttgctggtgaaggacaatggggagttccacgccctgggccataagtgtccgcactacggcgcacccctggtgaaaggcgttctgtcccgtggtcgggtgcgctgcccctggcacggcgcctgcttcaacatcagcactggggacctggaggacttccctggcctggacagtctacacaagttccaggtgaagattgagaaggagaaggtgtacgtccgggccagcaagcaggccctacagctgcagcgaaggaccaaggtgatggccaagtgtatctctccaagtgctgggtacagcagtagcaccaatgtgctcattgtgggtgcaggtgcagctggcctggtgtgtgcagagacactgcggcaggagggcttctccgaccggatcgtcctgtgcacgctagaccggcaccttccctacgaccgtcccaagctcagcaagtccctggacacacagcctgagcagctggccctgaggcccaaggagtttttccgagcctatggcatcgaggtgctcaccgaggctcaggtggtcacagtggacgtgagaactaagaaggtcgtgttcaaggatggcttcaagctggagtacagcaagctgctgctggcaccagggagcagccccaagactctgagctgcaaaggcaaagaagtggagaacgtgttcactatccggacgccagaggatgccaatcgcgtggtgaggctggcccgaggccgcaacgtggtcgtcgtgggagccggcttcctggggatggaggtggccgcttacctgacggagaaggcccactctgtgtctgtggtggagctggaggagacgcccttcaggaggttcctgggggagcgcgtgggtcgagccctcatgaagatgtttgagaacaaccgggtgaagttctacatgcagacggaggtgtctgagctgcggggccaggagggaaagctgaaggaggttgtgctgaagagcagcaaggtcgtgcgggctgacgtctgcgtggtgggcattggtgcagtgcccgccacaggcttcctgaggcaaagcggcatcggtttggattcccgaggcttcatccctgtcaacaagatgatgcagaccaatgtcccaggcgtgtttgcagctggcgatgctgtcaccttcccccttgcctggaggaacaaccgcaaagtgaacattccacattggcagatggctcatgctcaggggcgcgtggcagcccagaacatgttggcgcaggaggcggagatgagcactgtgccctacctctggaccgccatgtttggcaagagcctgcgctacgcgggctacggagaaggcttcgacgacgtcatcatccagggggatctggaggagctgaagtttgtggctttttacactaaaggcgacgaggtgatcgccgtggccagcatgaactacgatcccattgtgtccaaggtcgctgaggtgctggcctcaggccgtgccatccggaagcgggaggtggagctgtttgtgctgcacagcaagactggcgacatgtcctggcttacggggaaaggatcctgagctcacatgcagtagacttgggcaggcaaagggggcaccaagggcacaggccaagccttgggggcaggtgccaatctccagtcccaggatcccccagggcagaacctgagccctcccagtgcttgccttcagccacctggctcccctcctgggaggcctctgctggatccagaagatgctcaaccctcaaggcctctgctgccactgacagctggcactggaggcaggacaagccctgcctcttctccctctattgggactggtcccctgaagaaccctgcaacacgttaaacattaccgtaaaattaaaacgcacaaatttgcagatc

SEQ ID NO: 2524 - DNA, 1923 bp, Homo sapiens
  source 1..1923: mol_type = genomic DNA
tgctgcgtggaaccgccgagttcccagcgcttgagaaggaaaattctggatctgttatctgtgaggaggccactccgttgacagttgtgtaaaactctgctgctttccccagctccaacctctctggtcttcaacaacactatcatcagggaaaacgtgggggaagatgaaccagccgtgcaactcgatggagccgagggtgatggacgatgacatgctcaagctggccgtcggggaccagggcccccaggaggaggccgggcagctggccaagcaggagggcatcctcttcaaggatgtcctgtccctgcagctggactttcggaacatcctccgcatagacaacctctggcagtttgagaacttgaggaagctgcagctggacaataacatcattgagaagatcgagggcctggagaacctcgcacacctggtctggctggatctgtctttcaacaacattgagaccatcgaggggctggacacactggtgaacctggaggacctgagcttgttcaacaaccggatctccaagatcgactccctggacgccctcgtcaagctgcaggtgttgtcgctgggcaacaaccggattgacaacatgatgaacatcatctacctccggcggttcaagtgcctgcggacgctcagcctctctaggaaccctatctctgaggcagaggattacaagatgttcatctgtgcctaccttcctgacctcatgtacctggactaccggcgcattgatgaccacacaaaaaagcttgcggaggctaagcaccagtacagcatcgacgagctgaagcaccaggagaacctgatgcaggcccagctggaggacgagcaggcgcagcgggaggagctagagaagcacaagactgcgtttgtggaacacctgaatggctccttcctgtttgacagcatgtacgctgaggactcagagggcaacaatctgtcctacctgcctggtgtcggtgagctccttgagacctacaaggacaagtttgtcatcatctgcgtgaatatttttgagtatggcctgaaacagcaggagaagcggaaaacagagcttgacaccttcagtgaatgtgtccgtgaggccatccaggaaaaccaggagcagggcaaacgcaagattgccaaattcgaggagaagcacttgtcgagtttaagtgccattcgagaggagttggaactgcccaacattgagaagatgatcctagaatgcagtgctgacatcagtgagttgttcgatgcgctcatgacgctggagatgcagctggtggagcagctggaggagactataaacatgtttgaaaggaacattgttgacatggtaggactgtttatcgaaaatgtccaaagcctgatggctcagtgccgggacctggagaatcaccaccacgagaagctcctggagatctctatcagcaccctggagaagattgtcgagggcgacctggacgaggacctgcctaacgacctgcgcgcgggtcgtttccaaaagttcaattatgtggaggcttctggcactttctaagagaagcagttacaggtagaggttgaagtctgagatttcccctggaggtcttcttaaccttagagtctgtataatgagtactgtgggggtgttggaaccaccatttctgatcctgcacaatgccatccggtttgcaccagcacatccactgatgaatggtcacaaaatcagcagggtcggcctgaggaacctggctccatccctggggtctgcacgctaagaaggctctcccggatgtctgcgctgggtcccgcggcagcatgtctatgtctctggaaggagtgtgggcatcaagggcccagacagagatactatgttgtcagggcccagacagagatactatgttgtcagggcctgctttagtgcatgcatcattcactcca

SEQ ID NO: 2525 - DNA, 2046 bp, Homo sapiens
  source 1..2046: mol_type = genomic DNA
gtgtttcaccacacggagatgtggtcacgtgacttgtcaactttcacccaggatgtctcccttctgacttccccttagcaaccaagtcgcggcgcttggttccccagcaaccgggagacgcgtctgctgcgtggaaccgccgagttcccagcgcttgagaaggaaaattctggatctgttatctgtgaggaggccactccgttgacagttgtgtaaaactctgctgctttccccagctccaacctctctggtcttcaacaacactatcatcagggaaaacgtgggggaagatgaaccagccgtgcaactcgatggagccgagggtgatggacgatgacatgctcaagctggccgtcggggaccagggcccccaggaggaggccgggcagctggccaagcaggagggcatcctcttcaaggatgtcctgtccctgcagctggactttcggaacatcctccgcatagacaacctctggcagtttgagaacttgaggaagctgcagctggacaataacatcattgagaagatcgagggcctggagaacctcgcacacctggtctggctggatctgtctttcaacaacattgagaccatcgaggggctggacacactggtgaacctggaggacctgagcttgttcaacaaccggatctccaagatcgactccctggacgccctcgtcaagctgcaggtgttgtcgctgggcaacaaccggattgacaacatgatgaacatcatctacctccggcggttcaagtgcctgcggacgctcagcctctctaggaaccctatctctgaggcagaggattacaagatgttcatctgtgcctaccttcctgacctcatgtacctggactaccggcgcattgatgaccacacaaaaaagcttgcggaggctaagcaccagtacagcatcgacgagctgaagcaccaggagaacctgatgcaggcccagctggaggacgagcaggcgcagcgggaggagctagagaagcacaagactgcgtttgtggaacacctgaatggctccttcctgtttgacagcatgtacgctgaggactcagagggcaacaatctgtcctacctgcctggtgtcggtgagctccttgagacctacaaggacaagtttgtcatcatctgcgtgaatatttttgagtatggcctgaaacagcaggagaagcggaaaacagagcttgacaccttcagtgaatgtgtccgtgaggccatccaggaaaaccaggagcagggcaaacgcaagattgccaaattcgaggagaagcacttgtcgagtttaagtgccattcgagaggagttggaactgcccaacattgagaagatgatcctagaatgcagtgctgacatcagtgagttgttcgatgcgctcatgacgctggagatgcagctggtggagcagctggaggagactataaacatgtttgaaaggaacattgttgacatggtaggactgtttatcgaaaatgtccaaagcctgatggctcagtgccgggacctggagaatcaccaccacgagaagctcctggagatctctatcagcaccctggagaagattgtcgagggcgacctggacgaggacctgcctaacgacctgcgcgcgggtcgtttccaaaagttcaattatgtggaggcttctggcactttctaagagaagcagttacaggtagaggttgaagtctgagatttcccctggaggtcttcttaaccttagagtctgtataatgagtactgtgggggtgttggaaccaccatttctgatcctgcacaatgccatccggtttgcaccagcacatccactgatgaatggtcacaaaatcagcagggtcggcctgaggaacctggctccatccctggggtctgcacgctaagaaggctctcccggatgtctgcgctgggtcccgcggcagcatgtctatgtctctggaaggagtgtgggcatcaagggcccagacagagatactatgttgtcagggcccagacagagatactatgttgtcagggcctgctttagtgcatgcatcattcactcc

SEQ ID NO: 2526 - DNA, 2014 bp, Homo sapiens
  source 1..2014: mol_type = genomic DNA
gagacagggtcttcctatgttgcccgggctggtcttgaactcctgaactcaagcagtccttccacctcggcctcccaaagagctgggattacaggtgaaaattctggatctgttatctgtgaggaggccactccgttgacagttgtgtaaaactctgctgctttccccagctccaacctctctggtcttcaacaacactatcatcagggaaaacgtgggggaagatgaaccagccgtgcaactcgatggagccgagggtgatggacgatgacatgctcaagctggccgtcggggaccagggcccccaggaggaggccgggcagctggccaagcaggagggcatcctcttcaaggatgtcctgtccctgcagctggactttcggaacatcctccgcatagacaacctctggcagtttgagaacttgaggaagctgcagctggacaataacatcattgagaagatcgagggcctggagaacctcgcacacctggtctggctggatctgtctttcaacaacattgagaccatcgaggggctggacacactggtgaacctggaggacctgagcttgttcaacaaccggatctccaagatcgactccctggacgccctcgtcaagctgcaggtgttgtcgctgggcaacaaccggattgacaacatgatgaacatcatctacctccggcggttcaagtgcctgcggacgctcagcctctctaggaaccctatctctgaggcagaggattacaagatgttcatctgtgcctaccttcctgacctcatgtacctggactaccggcgcattgatgaccacacaaaaaagcttgcggaggctaagcaccagtacagcatcgacgagctgaagcaccaggagaacctgatgcaggcccagctggaggacgagcaggcgcagcgggaggagctagagaagcacaagactgcgtttgtggaacacctgaatggctccttcctgtttgacagcatgtacgctgaggactcagagggcaacaatctgtcctacctgcctggtgtcggtgagctccttgagacctacaaggacaagtttgtcatcatctgcgtgaatatttttgagtatggcctgaaacagcaggagaagcggaaaacagagcttgacaccttcagtgaatgtgtccgtgaggccatccaggaaaaccaggagcagggcaaacgcaagattgccaaattcgaggagaagcacttgtcgagtttaagtgccattcgagaggagttggaactgcccaacattgagaagatgatcctagaatgcagtgctgacatcagtgagttgttcgatgcgctcatgacgctggagatgcagctggtggagcagctggaggagactataaacatgtttgaaaggaacattgttgacatggtaggactgtttatcgaaaatgtccaaagcctgatggctcagtgccgggacctggagaatcaccaccacgagaagctcctggagatctctatcagcaccctggagaagattgtcgagggcgacctggacgaggacctgcctaacgacctgcgcgcgctttttgtcgataaagatacgattgttaatgctgtcggggcatcgcacgacatccacctcctgaagattgacaatcgagaagatgagctggtgaccagaatcaactcttggtgtacacgtttaatagacaggattcacaaggatgagatcatgaggaaccgcaagcgcgtgaaggagatcaatcagtacatcgaccacatgcagagcgaactggacaacctggaatgtggcgacatcctagactagatgaatgtcagccacaggagcttcttcaaaacatagcaccagccccagccaggagaaggaagtgcacacgcctcacccgcacctctagagagttgctgggcatctctcaaccgcgatccccaacaccattcttcccccacccctggaaaaacttccaaaagtagagaaaataaaggactcatttcacatttcccctactcataaaaaaaaaaaaaaaa

SEQ ID NO: 2527 - DNA, 2008 bp, Homo sapiens
  source 1..2008: mol_type = genomic DNA
ccttagcaaccaagtcgcggcgcttggttccccagcaaccgggagacgcgtctgctgcgtggaaccgccgagttcccagcgcttgagaaggaaaattctggatctgttatctgtgaggaggccactccgttgacagttgtgtaaaactctgctgctttccccagctccaacctctctggtcttcaacaacactatcatcagggaaaacgtgggggaagatgaaccagccgtgcaactcgatggagccgagggtgatggacgatgacatgctcaagctggccgtcggggaccagggcccccaggaggaggccgggcagctggccaagcaggagggcatcctcttcaaggatgtcctgtccctgcagctggactttcggaacatcctccgcatagacaacctctggcagtttgagaacttgaggaagctgcagctggacaataacatcattgagaagatcgagggcctggagaacctcgcacacctggtctggctggatctgtctttcaacaacattgagaccatcgaggggctggacacactggtgaacctggaggacctgagcttgttcaacaaccggatctccaagatcgactccctggacgccctcgtcaagctgcaggtgttgtcgctgggcaacaaccggattgacaacatgatgaacatcatctacctccggcggttcaagtgcctgcggacgctcagcctctctaggaaccctatctctgaggcagaggattacaagatgttcatctgtgcctaccttcctgacctcatgtacctggactaccggcgcattgatgaccacacaaaaaagcttgcggaggctaagcaccagtacagcatcgacgagctgaagcaccaggagaacctgatgcaggcccagctggaggacgagcaggcgcagcgggaggagctagagaagcacaagactgcgtttgtggaacacctgaatggctccttcctgtttgacagcatgtacgctgaggactcagagggcaacaatctgtcctacctgcctggtgtcggtgagctccttgagacctacaaggacaagtttgtcatcatctgcgtgaatatttttgagtatggcctgaaacagcaggagaagcggaaaacagagcttgacaccttcagtgaatgtgtccgtgaggccatccaggaaaaccaggagcagggcaaacgcaagattgccaaattcgaggagaagcacttgtcgagtttaagtgccattcgagaggagttggaactgcccaacattgagaagatgatcctagaatgcagtgctgacatcagtgagttgttcgatgcgctcatgacgctggagatgcagctggtggagcagctggaggagactataaacatgtttgaaaggaacattgttgacatggtaggactgtttatcgaaaatgtccaaagcctgatggctcagtgccgggacctggagaatcaccaccacgagaagctcctggagatctctatcagcaccctggagaagattgtcgagggcgacctggacgaggacctgcctaacgacctgcgcgcgctttttgtcgataaagatacgattgttaatgctgtcggggcatcgcacgacatccacctcctgaagattgacaatcgagaagatgagctggtgaccagaatcaactcttggtgtacacgtttaatagacaggattcacaaggatgagatcatgaggaaccgcaagcgcgtgaaggagatcaatcagtacatcgaccacatgcagagcgaactggacaacctggaatgtggcgacatcctagactagatgaatgtcagccacaggagcttcttcaaaacatagcaccagccccagccaggagaaggaagtgcacacgcctcacccgcacctctagagagttgctgggcatctctcaaccgcgatccccaacaccattcttcccccacccctggaaaaacttccaaaagtagagaaaataaaggactcatttcacatttcccctactcataaaaaaaaaaaaaaaa

SEQ ID NO: 2528 - DNA, 2853 bp, Homo sapiens
  source 1..2853: mol_type = genomic DNA
cctccctccagtctccggatctccctcggtccctctctcctcctcttcctctctctggacgcccggctcctccgcaccccctcccccgggggtcccgcggccttgctccctaccctcacctcaagacgaccatggccaccatcccagactggaagctacagctgctagcccggcgccggcaggaggaggcgtccgttcgaggccgagagaaagcagaacgggagcgcctgtcccagatgccagcctggaaacgagggctcctggagcgccgccgggccaagcttgggctgtcccctggggagcctagccctgtgctagggactgtagaggctggacctccagacccggatgagtctgcggtccttctggaggccatcgggccagtgcaccagaaccgattcatccggcaggagcggcagcagcagcagcagcaacaacaacggagtgaagagctgctagcagagagaaagcctgggcctctggaggcccgggagcggagacccagccctggggagatgcgggatcagagccccaagggaagagagtcaagagaagagagactaagtccgagggagaccagagagaggaggctggggatagggggagcccaagagttgagcctgaggcctctggaggctcgggactggaggcaaagcccaggagaggtgggagacaggagctcccgactgtcagaggcatggaaatggaggctgagtcctggagaaactccagagcggagtctgagactagcagagtctcgagagcaaagccccaggagaaaagaggtggaaagtagactgagcccaggggaatctgcctaccagaagttgggcctgacagaggcccataaatggagacctgactccagagagtctcaggaacagagtttggtacaactggaggcaacagagtggaggctgaggtcaggagaagaaagacaagactactcggaagaatgtgggagaaaagaagagtggccagttccaggggtagctccaaaagagactgcagagctgtccgagaccctgacaagggaggcccaaggcaacagttccgcaggagtggaggcagcagagcagaggcctgtggaagatggcgagaggggcatgaagccaacagaagggtggaaatggaccctgaactccgggaaggctcgagaatggacacccagggacatagaggctcaaactcagaaaccagaacctccagagtcagcagagaagcttctggaatctcccggtgtggaggctggagaaggggaggctgagaaggaggaggcgggggctcagggcaggcctctgagagccctgcagaactgctgctctgtgccctcccccctcccaccagaggacgctgggactggaggcctgagacagcaggaagaggaagcagtggagctccagcccccaccaccagcccctctgtctcccccacccccagccccaactgccccccaacctcctggggatcccctcatgagccgcctgttctatggggtgaaggcagggccaggggtgggggccccccgccgcagtggacacaccttcaccgtcaacccccggcggtctgtgccccctgcgaccccagccaccccaacctctccagccacagttgatgctgcagtcccgggggctgggaagaagcggtacccaactgccgaggagatcttggttctggggggctacctccgtctcagccgcagctgccttgccaaggggtcccccgaaagacaccacaaacagcttaagatctccttcagcgagacagccctggagaccacgtaccaatacccctccgagagttcggtactggaggagctgggcccggagcctgaggtccccagtgcccccaaccctccagcagcccaacccgacgacgaagaggatgaggaagagctgctgctgctgcagccagagctccagggcgggctgcgcaccaaggccctgattgtggatgagtcctgccggcggtgaccatcttccaacatagggatatacctccctccttcttataactgaagatcctggagcccggaagattcagggcagacagaccctgataatgagcctggcagggaagggcaaccaacatcttgtaacttgctttccccaccctgtttctgggggcagagccaattgcccaatttctaccctaatccaaagtccctggtgtgggtggggttaaacgtgctggtgcatcctaggtcatccaagagtgagcgccaagtcctgagaaggggcacagaactccctggagggtggagatggagcacctgccccccatggcagggtacactctccccacagccttcctccccaccatcccgtggggactctcgggatttaagcactcgtctctctgggaggcccagaccccactccatttataggcacatctccttcatttcctaggtcactgcccctttgtttacagctcctgcctcctcccttgaccacagcctggtttacaaattccatcagctcccagccccacctgccaaagtcccaggtttacaagccacgcttacttgctgtgtctgcgtggaattctctcctctgtcccctccagtctcctcattggagtgacctgaaggtgtggcttcctccactttttctcagtattactttgccttagttttccccaagagggaaggctggaactcttaactctgtaccccttgatagttatttaattctgtttctcctagtggttcacaattgaactgaattgagatggtgtcgggtggctaaggagacacctcacctctccttccccattgtgccgcctttatcaattgcctgttttgttttgtttgttttttaactttccataataaaatggagttctcttcaa

SEQ ID NO: 2529 - DNA, 740 bp, Homo sapiens; identical to SEQ ID NO: 1924
  source 1..740: mol_type = genomic DNA

SEQ ID NO: 2530 - DNA, 884 bp, Homo sapiens
  source 1..884: mol_type = genomic DNA
atcttgagtgagggcacgctctccttagaggggcggaacagtttttggcaccttatcgcgagcggcagcttatgcaagagtgacttaaaaaagaaaggcaggtccggggccaggggctaagtagcggtgcggtttctttttctggattagtttccccatcttgcctaaaaatgtcctagtctagtctttttagcagaactccactccctaaacatgtcagaactacacttcccatcaagggtcagaaagaaacttccggcacagtcttttcccagcattccttgtttacttccgggtttattactactgaaggaagaacgccagatcagaaaagggagctcaggtaccttccagagagtgagacccagcgcccttgtctcgcacccagtaggctttcatccccgccatggcggagctgatccagaagaagctacagggagaagtggagaaatatcaacagctacagaaggacttaagtaaatccatgtcggggaggcagaaacttgaagcacaactaacagaaaataatatcgtgaaagaggaactggccctgctggatgggtccaacgtggtctttaaacttctgggtccggtgctagtcaaacaggagctgggggaggctcgggccacagtagggaagaggctggactatatcacagctgaaattaagcgatacgaatcccagcttcgggatcttgagcggcagtcagagcaacagagggagacccttgctcagctgcagcaggagttccagcgggcccaggcagcaaaggcaggggctcctggcaaggcctgaccccatggtggggggaggggaggggaggggagggaatgaggcagctctaggatctatactgtagctaataaaatgtaaaaacacctgg

SEQ ID NO: 2531 - DNA, 7396 bp, Homo sapiens
  source 1..7396: mol_type = genomic DNA
attgctggagcgcaggcggcggagaggatgactgccgctgccattctctcttgagctagcgagccgccgccaccctccaccctcccccggcagggcggagaggagcggccggagtcagcgatggtgcccggcgaggagaaccaactggtcccgaaagaggatgtgttttggagatgcagacaaaatatctttgatgaaatgaagaagaaatttttacagatagaaaatgctgctgaagaacctagagtcttatgtattatacaagatactactaattcaaagacagtgaatgaacggatcactttaaatttaccagcatctactccagtcagaaagctctttgaagatgtggccaacaaagtaggctacataaatggaacctttgacttggtgtggggaaatggaatcaatactgctgatatggcaccactggatcataccagtgacaagtcacttctcgacgctaattttgagccaggaaagaagaactttctgcatttgacagataaagatggtgaacaacctcaaatactgctggaggattccagtgctggggaagacagtgttcatgacaggtttataggtccgcttccaagagaaggttctgggggttctaccagtgattatgtcagccaaagctactcctactcatctattttgaataaatcagaaactggatatgtgggactagtaaaccaagcaatgacttgctatttgaatagccttttgcaaacactttttatgactcctgaatttaggaatgcattatataagtgggaatttgaagaatctgaagaagatccagtgacaagtattccataccaacttcaaaggctttttgttttgttacaaaccagcaaaaagagagcaattgaaaccacagatgttacaaggagctttggatgggatagtagtgaggcttggcagcagcatgatgtacaagaactatgcagagtcatgtttgatgctttggaacagaaatggaagcaaacagaacaggctgatcttataaatgagctatatcaaggcaagctgaaggactacgtgagatgtctggaatgtggttatgagggctggcgaatcgacacatatcttgatattccattggtcatccgaccttatgggtccagccaagcatttgctagtgtggaagaagcattgcatgcatttattcagccagagattctggatggcccaaatcagtatttttgtgaacgttgtaagaagaagtgtgatgcacggaagggccttcggtttttgcattttccttatctgctgaccttacagctgaaaagattcgattttgattatacaaccatgcataggattaaactgaatgatcgaatgacatttcccgaggaactagatatgagtacttttattgatgttgaagatgagaaatctcctcagactgaaagttgcactgacagtggagcagaaaatgaaggtagttgtcacagtgatcagatgagcaacgatttctccaatgatgatggtgttgatgaaggaatctgtcttgaaaccaatagtggaactgaaaagatctcaaaatctggacttgaaaagaattccttgatctatgaacttttctctgttatggttcattctgggagcgctgctggtggtcattattatgcatgtataaagtcattcagtgatgagcagtggtacagcttcaatgatcaacatgtcagcaggataacacaagaggacattaagaaaacacatggtggatcttcaggaagcagaggatattattctagtgctttcgcaagttccacaaatgcatatatgctgatctatagactgaaggatccagccagaaatgcaaaatttctagaagtggatgaatacccagaacatattaaaaacttggtgcagaaagagagagagttggaagaacaagaaaagagacaacgagaaattgagcgcaatacatgcaagataaaattattctgtttgcatcctacaaaacaagtaatgatggaaaataaattggaggttcataaggataagacattaaaggaagcagtagaaatggcttataagatgatggatttagaagaggtaatacccctggattgctgtcgccttgttaaatatgatgagtttcatgattatctagaacggtcatatgaaggagaagaagatacaccaatggggcttctactaggtggcgtcaagtcaacatatatgtttgatctgctgttggagacgagaaagcctgatcaggttttccaatcttataaacctggagaagtgatggtgaaagttcatgttgttgatctaaaggcagaatctgtagctgctcctataactgttcgtgcttacttaaatcagacagttacagaattcaaacaactgatttcaaaggccatccatttacctgctgaaacaatgagaatagtgctggaacgctgctacaatgatttgcgtcttctcagtgtctccagtaaaaccctgaaagctgaaggattttttagaagtaacaaggtgtttgttgaaagctccgagactttggattaccagatggcctttgcagactctcatttatggaaactcctggatcggcatgcaaatacaatcagattatttgttttgctacctgaacaatccccagtatcttattccaaaaggacagcataccagaaagctggaggcgattctggtaatgtggatgatgactgtgaaagagtcaaaggacctgtaggaagcctaaagtctgtggaagctattctagaagaaagcactgaaaaactcaaaagcttgtcactgcagcaacagcaggatggagataatggggacagcagcaaaagtactgagacaagtgactttgaaaacatcgaatcacctctcaatgagagggactcttcagcatcagtggataatagagaacttgaacagcatattcagacttctgatccagaaaattttcagtctgaagaacgatcagactcagatgtgaataatgacaggagtacaagttcagtggacagtgatattcttagctccagtcatagcagtgatactttgtgcaatgcagacaatgctcagatccctttggctaatggacttgactctcacagtatcacaagtagtagaagaacgaaagcaaatgaagggaaaaaagaaacatgggatacagcagaagaagactctggaactgatagtgaatatgatgagagtggcaagagtaggggagaaatgcagtacatgtatttcaaagctgaaccttatgctgcagatgaaggttctggggaaggacataaatggttgatggtgcatgttgataaaagaattactctggcagctttcaaacaacatttagagccctttgttggagttttgtcctctcacttcaaggtctttcgagtgtatgccagcaatcaagagtttgagagcgtccggctgaatgagacactttcatcattttctgatgacaataagattacaattagactggggagagcacttaaaaaaggagaatacagagttaaagtataccagcttttggtcaatgaacaagagccatgcaagtttctgctagatgctgtgtttgctaaaggaatgactgtacggcaatcaaaagaggaattaattcctcagctcagggagcaatgtggtttagagctcagtattgacaggtttcgtctaaggaaaaaaacatggaagaatcctggcactgtctttttggattatcatatttatgaagaagatattaatatttccagcaactgggaggttttccttgaagttcttgatggggtagagaagatgaagtccatgtcacagcttgcagttttgtcaagacggtggaagccttcagagatgaagttggatcccttccaggaggttgtattggaaagcagtagtgtggacgaattgcgagagaagcttagtgaaatcagtgggattcctttggatgatattgaatttgctaagggtagaggaacatttccctgtgatatttctgtccttgatattcatcaggatttagactggaatcctaaagtttctaccctgaatgtctggcctctttatatctgtgatgatggtgcggtcatattttatagggataaaacagaagaattaatggaattgacagatgagcaaagaaatgaactgatgaaaaaagaaagcagtcgactccagaagactggacatcgtgtaacatactcacctcgtaaagagaaagcactaaaaatatatctggatggagcaccaaataaagatctgactcaagactgactctgatagtgtagcattttccctgggggagttttggttttaattagatggttcactaccactgggtagtgccattttggccggacatggttggggtaacccagtgacaccagcactgattggactgccctacaccaatcagaagctcagtgcccaatgggccactgttttgactcggaatcatgttgtgcactatagtcaaatgtactgtaaagtgaaaagggatgtgcaaaaaaataaaaaaaaacaacaaaaaaagctaaccttctattagaaaaggggacaggggaatgagtaaacttcttttattgcggacaaatgtgcacatagccgctagtaaaactagcctcaaacaggatgctcatagcttaataataaaagctgtgcaaaggccatgaatgaatgaattttctgtttatttcactgatgcacacattacctcattgacaattcagaagtaaatccaacgtgtgttgactcttggaaagcagcaaaaacaggagctgaagaaaagaaattcttggaaccagccgtaacccagtaaggaattgtgaagttgtgtttttattttgtttcattttttgcagagtattaagaacattattctggaacatcagaacgtttcccttagaccgatcccagcaggtggcagctcagattgctgcagtgttgtaattataactgattgtacttaagttatggatgtagagaatatgtttcattcatttattcagcatgtaaataaaattgatcctgttgagttatcataattgcagttcaactatctgccatgattattcttttcacgtatcattcattctgtacatttgtgtacattgagaagtatagcaatctatgtaaatgtaatcctcagtgaggttcctcagtgctaggtcccataggattgtcgttgcccttgttaatgaggtttctctgttcagcggcttcaatttttttctctttgtacatctagttttgaagatttacttcaagtttgaatcttctagaatgcttgtaagtccagttttaatttttagagtcaatttgtagttacatgtagtttaacttttgggaaacgtcttaacattgttctgaataaacttgctaatgaggtcaggtcatggtacagactgatgcagtcaacatgatttcattgcagagtttattagtatcagcaagtttttgctttgctaaataaaagtactcaatgaacacaattctacataaattttgacataccatctaatttataaaaatcaataaaaaaggttttggtaaaactttttcatgccagatgctgtttacaacaatgaacatgccaataaaacatttgttcattctgttgtgttattttagtcattaaacttctgtggatgaagaatctgggttaagaatagatttgtcatctttaaatatgacattttgtaatgtgtattggatatctcatttctatgataaaggtatatttacagtaaagttctcataagagaaatgaaaagctgtgttaatatctaactttggggaaccctgtcagtatttcagatccgatttttaccctttttttcttataagaaagataaaattagaaaatactgttagcaaatgtggctctgccatttgaatataatcaccgagaattccatgtcttaaaagtctcctggaatccacaatgaaaaaaaaaatcttttctaaggtatttttctggctaatttttatttgaagaaagctatagcatttagcgaaatttgactgaagtaatgttctgagtttgcattagtgggattggtgatgttctcagaagaaaattggaaacacttgtgatgaattgtctttcagatcacttagattttctgatgtaagaggacagctgtttggttctgatacaggcctgcttacttgggatgtagggttagtaaatggggtttctgctttaaaggactgacttgctatcacacaaaagaggcagacttgtaaacacaatgggctttggagtttggtctgattgggtttggtttagtattcctatgagcgtaaatggtaaaattcttctgatacccactctttagactgtgccttctgctctgttctttgttttatgtttaactgctgtttctaattgcaggtgtattacagatacaaataagagtaaagaaaatatatttcattatagaaaagaaaaaattaaaagcttcttgcttttcagtgcctgatagagtgaaaacacaaagttgcactttaataatttcaataaaagctaatctgtgtcagcctccctctgcttcagagagtcaggtgagcatccataacctaacaggcagagccctagcgatgtggatcaagtttcctgagcccgggggcggtggagcctcatgatctcttatcttttgaggctgaggcaggtcacatgcaacaaattgtgaccctgctccccacaagtcatgcaaaggttttgaagagcttttaccgtggggcagatgaacttgtgtcaaccatgcacaccctgtgagaaccaagtacctgtgtttctaaggcgggcactcaaggtgaggggtgcattctggccaaagaaacaaaagctgtggtttcaggaccatgccgtgtgtagctgatctgtacgggacgtgtatgtaaggaagagcaatcatgatagataagaacagtgtgtgaagcagccttcacactagagtgtttggtcatctcttataatgtaagggaaggtactttaaaattctgggaagatgcgatgaactcatgtcccagtcagaaaataatccaatgaaataagcattggttgccaggccacagttaggaattgtattgtgatacatctagaggccaagagagcaggagagagctaccaacttacactgtggtttaagctaaatgaccgcacagcatcatagcattgcagtgttgttactaaatctggaagtgacctgtgaatgtatggaatacaataaagtcttttattctggttcatttgctagtacttcctttttgattggatactgtagttcttcctctggattttattttgttcagcgtcaaggccctaattttgcaaatgtagtctaaaccacattacgtggactagaggatactctgaattagcaagttttttgtttgctgaataaaactattccatctt

SEQ ID NO: 2532 - DNA, 661 bp, Homo sapiens
  source 1..661: mol_type = genomic DNA
acggcttacccgggctccgacagcggctgcaggtctccaagttgcggccgctggagcccgagccatgcggaccgcggaccgggaggcgcgcccggggcttccgtccctgctgctgctgctgctggccggggccgggctgtcagccgcctcgcccccagcagcgccgcgcttcaacgtgagcctggactcggtccccgagctgcgctggctgcccgtgctgcggcactacgacttggacttggtgcgcgccgcgatggcgcaagtcatcggggacagagtccccaagtgggtgcacgtgttaatcggaaaagtggtcctggagctggagcgcttcctgccccagcccttcaccggcgagatccgcggcatgtgtgacttcatgaacctcagcctggcggactgccttctggtcaacctggcctacgagtcctccgtgttctgcaccagtattgtggctcaagactccagaggccacatttaccatggtcggaatttggattatccttttgggaatgtcttacgcaagctgacagtggatgtgcaattcttaaagaatgggcagattgcattcacaggaactacttttattggctatgtaggattatggactggccagagcccacacaagtttacagtttctggtgatgaacgagaccctcac

SEQ ID NO: 2533 - DNA, 1731 bp, Homo sapiens
  source 1..1731: mol_type = genomic DNA
acggcttacccgggctccgacagcggctgcaggtctccaagttgcggccgctggagcccgagccatgcggaccgcggaccgggaggcgcgcccggggcttccgtccctgctgctgctgctgctggccggggccgggctgtcagccgcctcgcccccagcagcgccgcgcttcaacgtgagcctggactcggtccccgagctgcgctggctgcccgtgctgcggcactacgacttggacttggtgcgcgccgcgatggcgcaagtcatcggggacagagtccccaagtgggtgcacgtgttaatcggaaaagtggtcctggagctggagcgcttcctgccccagcccttcaccggcgagatccgcggcatgtgtgacttcatgaacctcagcctggcggactgccttctggtcaacctggcctacgagtcctccgtgttctgcaccagtattgtggctcaagactccagaggccacatttaccatggtcggaatttggattatccttttgggaatgtcttacgcaagctgacagtggatgtgcaattcttaaagaatgggcagattgcattcacaggaactacttttattggctatgtaggattatggactggccagagcccacacaagtttacagtttctggtgatgaacgagataaaggctggtggtgggagaatgctatcgctgccctgtttcggagacacattcccgtcagctggctgatccgcgctaccctgagtgagtcggaaaacttcgaagcagctgttggcaagttggccaagactccccttattgctgatgtttattacattgttggtggcacgtccccccgggagggggtggtcatcacgaggaacagagatggcccagcagacatttggcctctagatcctttgaatggagcgtggttccgagttgagacaaattacgaccactggaagccagcacccaaggaagatgaccggagaacatctgccatcaaggcccttaatgctacaggacaagcaaacctcagcctggaggcacttttccagtgagcaagaagaacccatcaggtgattgtcaggcctctgagcccaagctaagccatcatatgccctgtgacctgcacgtatacatccagatggcctgaagcaactgaagatccacaaaagaagagaaaatagccagttcctgccttaactgatgacatttcaccattgtgatttgttcctgccccaccctaactgatcaattgactttgtgacaagacaccctccccacccttgcaataatgtactttgtgatattcccccgcccttgtgaatgtactttgtacgatacaccctccccacccttgagaaggtactttgtaatatcctctccgcccttgagaatgtactttgtaagatccacttcctgcctgcaaaaaattgctccgaactccaccgtctatcccaaacctataagaactaatgataatcctaccaccctttgctgactccttttttggactcagcccacgtgcacccaggtgattaaaaagctttattgctcacatgaagcctatttggtggtctcttcacacagatgtgtgtgacagtgataacagtgtcacgtggtttaactacaatgtgtccagatattgaattttgtttaagcctgcttgggatttgttgtgctccccaaatttcaagtttgtgtcttttgttcaattttggaaaatagtcagctatctcagaattgctcacct

SEQ ID NO: 2534 - DNA, 7011 bp, Homo sapiens
  source 1..7011: mol_type = genomic DNA
atggcggcggcggcggggaatcgcgcctcgtcgtcgggattcccgggcgccagggctacgagccctgaggcaggcggcggcggaggagccctcaaggcgagcagcgcgcccgcggctgccgcgggactgctgcgggaggcgggcagcgggggccgcgagcgggcggactggcggcggcggcagctgcgcaaagtgcggagtgtggagctggaccagctgcctgagcagccgctcttccttgccgcctcaccgccggcctcctcgacttccccgtcgccggagcccgcggacgcagcggggagtgggaccggcttccagcctgtggcggtgccgccgccccacggagccgcgagccgcggcggcgcccaccttaccgagtcggtggcggcgccggacagcggcgcctcgagtcccgcagcggccgagcccggggagaagcgggcgcccgccgccgagccgtctcctgcagcggcccccgccggtcgtgagatggagaataaagaaactctcaaagggttgcacaagatggatgatcgtccagaggaacgaatgatcagggagaaactgaaggcaacctgtatgccagcctggaagcacgaatggttggaaaggagaaataggcgagggcctgtggtggtaaaaccaatcccagttaaaggagatggatctgaaatgaatcacttagcagctgagtctccaggagaggtccaggcaagtgcggcttcaccagcttccaaaggccgacgcagtccttctcctggcaactccccatcaggtcgcacagtgaaatcagaatctccaggagtaaggagaaaaagagtttccccagtgccttttcagagtggcagaatcacaccaccccgaagagccccttcaccagatggcttctcaccatatagccctgaggaaacaaaccgccgtgttaacaaagtgatgcgggccagactgtacttactgcagcagatagggcctaactctttcctgattggaggagacagcccagacaataaataccgggtgtttattgggcctcagaactgcagctgtgcacgtggaacattctgtattcatctgctatttgtgatgctccgggtgtttcaactagaaccttcagacccaatgttatggagaaaaactttaaagaattttgaggttgagagtttgttccagaaatatcacagtaggcgtagctcaaggatcaaagctccatctcgtaacaccatccagaagtttgtttcacgcatgtcaaattctcatacattgtcatcatctagtacttctacgtctagttcagaaaacagcataaaggatgaagaggaacagatgtgtcctatttgcttgttgggcatgcttgatgaagaaagtcttacagtgtgtgaagacggctgcaggaacaagctgcaccaccactgcatgtcaatttgggcagaagagtgtagaagaaatagagaacctttaatatgtcccctttgtagatctaagtggagatctcatgatttctacagccacgagttgtcaagtcctgtggattccccttcttccctcagagctgcacagcagcaaaccgtacagcagcagcctttggctggatcacgaaggaatcaagagagcaattttaaccttactcattatggaactcagcaaatccctcctgcttacaaagatttagctgagccatggattcaggtgtttggaatggaactcgttggctgcttattttctagaaactggaatgtgagagagatggccctcaggcgtctttcccatgatgtcagtggggccctgctgttggcaaatggggagagcactggaaattctgggggcagcagtggaagcagcccgagtgggggagccaccagtgggtcttcccagaccagtatctcaggagatgtggtggaggcatgctgcagcgttctgtcaatggtctgtgctgaccctgtctacaaagtgtacgttgctgctttaaaaacattgagagccatgctggtatatactccttgccacagtttagcggaaagaatcaaacttcagagacttctccagccagttgtagacaccatcctagtcaaatgtgcagatgccaatagccgcacaagtcagctgtccatatcaacactgttggaactgtgcaaaggccaagcaggagagttggcagttggcagagaaatactaaaagctggatccattggtattggtggtgttgattatgtcttaaattgtattcttggaaaccaaactgaatcaaacaattggcaagaacttcttggccgcctttgtcttatagatagactgttgttggaatttcctgctgaattttatcctcatattgtcagtactgatgtttcacaagctgagcctgttgaaatcaggtataagaagctgctgtccctcttaacctttgctttgcagtccattgataattcccactcaatggttggcaaactttccagaaggatctacttgagttctgcaagaatggttactacagtaccccatgtgttttcaaaactgttagaaatgctgagtgtttccagttccactcacttcaccaggatgcgtcgccgtttgatggctattgcagatgaggtggaaattgccgaagccatccagttgggcgtagaagacactttggatggtcaacaggacagcttcttgcaggcatctgttcccaacaactatctggaaaccacagagaacagttcccctgagtgcacagtccatttagagaaaactggaaaaggattatgtgctacaaaattgagtgccagttcagaggacatttctgagagactggccagcatttcagtaggaccttctagttcaacaacaacaacaacaacaacaacagagcaaccaaagccaatggttcaaacaaaaggcagaccccacagtcagtgtttgaactcctctcctttatctcatcattcccaattaatgtttccagccttgtcaaccccttcttcttctaccccatctgtaccagctggcactgcaacagatgtctctaagcatagacttcagggattcattccctgcagaataccttctgcatctcctcaaacacagcgcaagttttctctacaattccacagaaactgtcctgaaaacaaagactcagataaactttccccagtctttactcagtcaagacccttgccctccagtaacatacacaggccaaagccatctagacctaccccaggtaatacaagtaaacagggagatccctcaaaaaatagcatgacacttgatctgaacagtagttccaaatgtgatgacagctttggctgtagcagcaatagtagtaatgctgttatacccagtgacgagacagtgttcaccccagtagaggagaaatgcagattagatgtcaatacagagctcaactccagtattgaggaccttcttgaagcatctatgccttcaagtgatacaacagtaacttttaagtcagaagttgctgtcctgtctcctgaaaaggctgaaaatgatgatacctacaaagatgatgtgaatcataatcaaaagtgcaaagagaagatggaagctgaagaagaagaagctttagcaattgccatggcaatgtcagcgtctcaggatgccctccccatagttcctcagctgcaggttgaaaatggagaagatatcatcattattcaacaggatacaccagagactctaccaggacataccaaagcaaaacaaccgtatagagaagacactgaatggctgaaaggtcaacagataggccttggagcattttcttcttgttatcaggctcaagatgtgggaactggaactttaatggctgttaaacaggtgacttatgtcagaaacacatcttctgagcaagaagaagtagtagaagcactaagagaagagataagaatgatgagccatctgaatcatccaaacatcattaggatgttgggagccacgtgtgagaagagcaattacaatctcttcattgaatggatggcagggggatcggtggctcatttgctgagtaaatatggagccttcaaagaatcagtagttattaactacactgaacagttactccgtggcctttcgtatctccatgaaaaccaaatcattcacagagatgtcaaaggtgccaatttgctaattgacagcactggtcagagactaagaattgcagattttggagctgcagccaggttggcatcaaaaggaactggtgcaggagagtttcagggacaattactggggacaattgcatttatggcacctgaggtactaagaggtcaacagtatggaaggagctgtgatgtatggagtgttggctgtgctattatagaaatggcttgtgcaaaaccaccatggaatgcagaaaaacactccaatcatcttgctttgatatttaagattgctagtgcaactactgctccatcgatcccttcacatttgtctcctggtttacgagatgtggctcttcgttgtttagaacttcaacctcaggacagacctccatcaagagagctactgaagcatccagtctttcgtactacatggtagccaattatgcagatcaactacagtagaaacaggatgctcaacaagagaaaaaaaacttgtggggaaccacattgatattctactggccatgatgccactgaacagctatgaacgaggccagtggggaacccttacctaagtatgtgattgacaaatcatgatctgtacctaagctcagtatgcaaaagcccaaactagtgcagaaactgtaaactgtgcctttcaaagaactggccctaggtgaacaggaaaacaatgaagtttgcatgactaaattgcagaagcataattttatttttttggagcactttttcagcaatattagcggctgaggggctcaggatctattttaatatttcaattattcttccatttcatatagtgatcacaagcagggggttctgcaattccgttcaaattttttgtcactggctataaaatcagtatctgcctcttttaggtcagagtatgctatgagtagcaatacatacatatatttttaaaagttgatacttctttatgacccacagttgacctttattttcttaaataccagggcagttgtggctcattgtgcattttactgttggcccattcatttcgtttttggaaattatggttttgtattttcatgtttatttacattcatttttgtttattcagggaaagctgatctttttttcaaaccagaaaaaaaaaatgaactagatatgaagtagagttcattaaatatcttgctattgtcagagtttttaaaatatagacttaattttgtttttttaaattggaatacaataaagtactacctacatttgagtcagtcaccactcttattgtgcaggttaagtacaagttaactaaaaataaactgtcctctctggtgcaactcacaaccaagatcaagattaccttaaaatttatttgaattttttagatgttttggttgtcaaactgtaggaaacttcacaacatttaagtcttactctgtatgtaacaatccatcattcaccttcactactggtagtaacatagagctgccattttccttttaccatgcatcatctctttacagtaggcctggcagatcattttttaaaaagattattcaactaccaatcagtaatgtttttaaacagtacatttgctttgaacttggaaaatgtgttcagaaagaaaaatggaattgaatttcatttatacactaattccttggattttgcacagttacctaacggttttagtctggagttaaattcagatgcatggaatcctgaaggaaaatggtagctttttaatctttttgtgtgtgtgtgagtcttttaaatcaagtactgattaactattaagtacaactttgagattttagttttaactcttcagaagccagtgtgaaatagaattggttattctcaaagactcaggataaactaaataagctatatatagagtacatttaaaatgtacaacacaaattggaaataaaataagttacaagataagtttacagggatatattgcttacaatttttaaaaggcagtttgttttttatgtgaatatgtttcttagtgaaattttacattcctttgttttggaagattggcgatatttgaagagttaaaaatagtacagaaatgtgaagtttggtatctctaaatgtgttgtacttgactttcttttttattttgtttttttttttttttgactacttagaattttcacaattctaataagattgtttccaagtctctcatgtgcaagctttaaaggatgcactcttgccattttatgtactggaagatcattggtcagatgaatactgtgtctgacaaaaatgtaaactgtataaactgaggaacctcagctaatcagtattactttgtagatcaccatgcccaccacatttcaaactcaaactatctgtagatttcaaaatccattgtgtttgagtttgtttgcagttccctcagcttgctggtaattgtggtgttttgttttttgttttgttttcaatgcaaatgtgatgtaatattcttattttctttggatcaaagctggactggaaattgtatcgtgtaattatttttgtgttcttaatgttatttggtactcaagttgtaaataacgtctactactgtttattccagtttctactacctcaggtgtcctatagatttttcttctaccaaagttcactttcacaatgaaattatatttgctgtgtgactatgattcctaagatttccagggcttaagggctaacttctattagcaccttactgtgtaagcaaatgttacaaaaaaaaaaaaaaaaaatctctgggttaagaaaatttggcttaaatgtatcctttgttattttaaatatattgagatattttaattaaaatttttaccccattgaaccgattttatagtatttgtacctattttggtgtttttgtctttatagtaaataaaagtttttgaacaaa

SEQ ID NO: 2535 - DNA, 3436 bp, Homo sapiens
  source 1..3436: mol_type = genomic DNA
agttgctgccatggagtcagccgggctagagcagctcctacgggagctgctgctaccggacaccgagcgcatccgtcgggccacggaacagctccagatcgttcttcgggcccccgccgctttgccggctctctgcgacctgctagcctcggcggccgacccccagacgactgaacacccgctggcgacggctggcggcggagcaacgggagagcctcaagtccctgatcctgacggccctgcagagagaaacagagcactgtgtgagcctcagcctggcccagctctcagccaccatttttcgaaaggaaggcttggaggcctggccacagcttttgcagctgcttcagcacagtacccacagcccccacagcccagagagagagatggggcttttgctgctaagtgtggtggtgacctcccggcccgaggccttccaaccccaccaccgggagcttcttcggcttctgaatgagactcttggtgaggtgggctctcctgggctgctcttctactccctgcgcactctgaccaccatggctccctacctcagcactgaagatgtgcctctcgctcggatgttggtgcccaagctgatcatggccatgcagactctgatccccatagatgaggcaaaggcctgtgaggcccttgaggctttggatgaactgttggagtcagaggtgccggtcatcaccccctacctctctgaagtcctcacattctgcctggaggtagctagaaatgtggccctgggcaatgcgatacgcatacgtattctctgctgcctcactttcttggtcaaagtcaagagcaaggccttactgaagaatcgtctcctgccacccttgctgcacacccttttccccattgtggctgctgagcccccaccaggccagttggatcccgaggaccaggattcagaagaggaagagttggagattgagctgatgggggagactcccaagcatttcgctgtacaagttgtggacatgctggcactacacctgccccccgagaagctctgtccccagctgatgcccatgttggaagaggctttgcggagcgagagcccataccagcgcaaggactcctggtgctggccgtgctgtctgacggagctggcgaccacatcaggcagagactgctgcccccactgctgcagattgtgtgcaagggcctggaggacccctcgcaagttgtacgcaatgctgcgctgtttgccctgggccagttctcagaaaacctacagccccatatcagcagctattcaagggaggtaatgccactgctcctcgcctacttgaagtcggtgcctcttggacacacacaccacctagccaaggcctgctatgccctggagaattttgtggagaacctagggcccaaggtgcagccctaccttccggagcttatggaatgcatgctgcagcttctgaggaaccccagcagtccccgggccaaggagctggctgtgagcgccctgggagccattgctacggctgcccaggcctcgctgctgccctacttccctgccatcatggagcacctgcgggaattcctgttaacaggccgtgaggaccttcagcctgtgcagatccagagcctggagacactgggggtgctggcacgagcagtgggggagcccatgaggccgctggctgaggaatgctgccagctgggtctgggcctctgcgaccaggtagacgaccctgacttgcggcgctgcacgtacagcctatttgcagccttatcgggtctgatgggtgagggcctggcgccccacttggaacagatcaccacgctcatgctgctgtcactgcgttccaccgagggcattgtgcctcagtatgacgggagcagctccttccttctgtttgacgatgagagtgatggggaagaagaggaggagctcatggatgaggatgtggaagaagaggatgactcagagatctcagggtacagcgtggagaatgccttcttcgatgagaaggaagacacctgtgctgccgtgggggagatctctgtgaacaccagtgtggccttccttccatacatggaaagtgtctttgaagaagtatttaaactgctggagtgccctcacctgaatgtgcggaaggcagcccatgaggctctgggtcagttttgctgtgcactgcacaaggcctgtcaaagctgcccctcggaacccaacactgctgctttgcaggctgccctggcccgagtcgtgccatcctacatgcaggcagtgaacagggagcgggaacgccaggtggtgatggccgtgctggaggccctgacaggggtgctccgcagctgtgggaccctcacactgaagccccctgggcgcctcgctgagctctgtggcgtgctcaaggctgtgctgcagaggaagacagcctgtcaggatactgacgaggaggaggaagaggaagatgatgatcaggctgaatacgacgccatgttgctggagcacgctggagaggccatccctgccctggcagccgcggctgggggagactcctttgccccattctttgccggtttcctgccattattggtgtgcaagacaaaacagggctgcacagtggcagagaagtcctttgcagtggggaccttggcagagactattcagggcctgggtgctgcctcagcccagtttgtgtctcggctgctccctgtgctgttgagcaccgcccaagaggcagaccccgaggtgcgaagcaatgccatcttcgggatgggcgtgctggcagagcatgggggccaccctgcccaggaacacttccccaagctgctggggctcctttttcccctcctggcgcgggagcgacatgatcgtgtccgtgacaacatctgtggggcacttgcccgcctgttgatggccagtcccaccaggaaaccagagccccaggtgctggctgccctactgcatgccctgccactgaaggaggacttggaggagtgggtcaccattgggcgcctcttcagcttcctgtaccagagcagccctgaccaggttatagatgtggctcccgagcttctgcgtatctgcagcctcattctggctgacaacaagatcccaccagacaccaaggccgcactgttgctgctcctgacgttcctggccaaacagcacaccgacagctttcaagcagctctgggctcactgcctgttgacaaggctcaggagctccaggctgtactgggcctctcctagactgcaggctgcagccagtccagagagaatagagcctgcccaggccttaagaccacctctcagcccagttcagttctgccttaccaaagattctgagactcatacccatttggagccagccccacttgctgccttacagggctgtccctgaggctggatctgttacaaatgagtcatgacatcatactgtaataaaagcagcttgttttctgcttg

SEQ ID NO: 2536 - DNA, 2232 bp, Homo sapiens
  source 1..2232: mol_type = genomic DNA
atagcagggggacagacagagggggtgggggtggatttggtgttgagttgagggcagagtgtgggactggaaagggacggccagaggactttgcttctaggatacctcccaaatcctctggccctggccctcccatgcattagcaccatcccttctccctagacaaatgggtgtgataccagaaggaccactgtgggtgtcgggctcagatgacaatttgtcgggcacgagcggtatggaagtggacgaccgcgtgtcggcgctggagcagcggctgcagttacaggaagacgagctggcggtcctaaaggcggcgctggcggatgctctgcgtcgcctgcgggcatgcgaagaacagggagcggcgctacgcgcgcggggcacccccaagggccgggcgcctccgcgcttaggcaccactgcctcggtgtgtcagctcttgaaaggccttcccaccaggacgccccttaatggctcgggacccccgcggcgcgtgggtggctatgccacgtccccatcctctcccaagaaggaggcgacctccgggcgcagcagtgtccgccgctacttgtcaccagagcgcctcgcctcggtgcgccgtgaggacccccgcagccggaccacatcctccagcagcaactgtagcgccaaaaaggaaggcaaaaccaaagaagttatcttcagtgtggaggatggctccgtgaaaatgttcctgaggggccgccctgtgcccatgatgatcccagacgagctggcacccacctacagcctggacacacgctcggagctgccttcttgccggctcaagctggagtgggtctatggctaccgtggccgagactgccgggccaacctttatttgctgcccaccggggagatagtgtactttgtggcctccgtagccgtgctatacagcgtggaggagcagaggcagcgacactacctgggacacaacgatgacatcaaatgcttggccatccacccagatatggtcaccatcgccacgggacaggtggcgggaaccactaaggaagggaagccgctgccgccccacgtgcgcatctgggactcagtttccctctccaccttacacgtgctgggcttgggggtgtttgacagagccgtgtgctgtgtgggcttctccaaatctaatggaggcaacctgctgtgtgcagtggatgaatccaatgatcacatgctctcggtgtgggactgggccaaggagaccaaggtggtggatgtcaagtgctccaatgaggctgtattggtggccaccttccaccccacggaccccactgtgcttatcacctgcgggaaatctcacatctacttctggaccttggaggggggcagcttgagcaagcggcaaggcctctttgagaaacatgagaaaccgaagtatgtgctgtgtgtgacctttttggaaggtggcgacgtggtcacgggggactctggggggaacctctatgtttggggcaaaggtgggaaccgtatcacacaggcggtgctgggcgcccacgacggcggcgtgtttgggctctgcgccctgcgggacgggacgctggtgtctggagggggccgtgatcggcgggtggtcctctggggttctgactacagcaagctgcaggaagtggaggtccctgaggactttggccctgtgcgcaccgtggcagagggccacggagacacactgtacgtggggaccacccgcaattccatcctgcagggctccgtgcacacaggcttctcactgctggtccagggccatgtggaagagctgtggggcctggccacacaccccagtcgggcccagtttgtgacctgcgggcaggataagctggtgcatctatggagctcagattcccaccagcccctgtggagcaggatcatcgaggtggagtctcgctctgtcacccaggctggagggcaatggcacgatctcggctcactgcaacctccgcctcccgggttcaagtgattcttctgcctcagcctcccgagtagctgggattacaggaccctgcccgctcagccggcttccaccccagtggctctgtcctggctgtgggtacagtgactggcagatggctgctgctggacacggagacccatgacctggtggctatccacacagacggcaatgaacagatctcagtggtcagcttctccccagacggggcgtacctggccgtgggctcccacgacaacttggtgtacgtgtacacggtggac

SEQ ID NO: 2537 - DNA, 5068 bp, Homo sapiens
  source 1..5068: mol_type = genomic DNA
ggttcgggtagcggggacgcgcacgcaccttgcgcgtcttcgcccctcctgcggttgccaggcaaccggccccggaagttgcggcaggtgcgtccgcagcgggcgccgctagccagcggaagatggcggagggcggaggccctgagcccggcgagcaggagaggaggtcttccgggccgcggcctccgagcgcgcgggatttgcagttggccttggcagaattgtatgaagatgaagtgaagtgcaaatcttccaagtctaatagacctaaagccacagtcttcaagagcccacggacaccacctcaacggttttactcaagtgaacatgaatacagtggattaaatatagttcgaccttcaactgggaaaattgtgaatgaacttttcaaagaggcaagggaacatggggctgtccctctgaatgaagccacaagagcttcaggtgatgataaatctaagtcatttacaggtggaggatacagattgggtagttctttttgtaagcggtctgaatatatctatggagaaaatcagctgcaagatgttcagattttgcttaaactgtggagcaatggtttcagtttagatgatggagaattgagaccttacaatgaaccaacaaatgctcaatttctggagtctgttaagagaggagagattcccctggagcttcagcgccttgttcatggtggccaagtgaatttggatatggaggatcatcaggatcaagaatacataaaacctagattgaggttcaaggcttttagtggagaagggcaaaaacttggaagccttacacctgaaatagtcagtacaccttcctctccagaagaggaggataaatcaatacttaatgcagttgttcttattgatgattcagtgccaacaacaaaaattcaaatcaggttagcagatgggagtcgtttgatacaaagattcaatagtacacacaggatcctggatgtccggaactttattgtacagtctcgtcctgaatttgcggctcttgactttattcttgtgacttcatttccgaataaagagctaacagatgaaagcctgacactgctagaagcagatattcttaacactgtgttactccagcaactaaaataatattgttcctgtccatgcagtagcatgtgggaatagatgatgtgccgtattaataaggacaatacttcagcattaaaaacagccaaattatttttattatttttacagataaattttggttttattgttattctgtcttccaatctgaatatagacaaatttggattaggaatagaccttgagataagtatgtttgagtttttagttgaaggactggcttatgttgatagtttttggatttctaggcaaatgagttgttacatgcttagtgttaatgtaacaacatttgtttgcagagaaaaatgaacaaaacccctttttgataaatgcatttggtaaaatttgcactaaagtttcttgatgcagcattgaccaacagccattaagaaatcttttgatcaaataagttgaaaatttgtctataatatatactgaaacgtgtcttttgattttgaaattgtttgatcatacaataattatttctcctattaagattttacacatcctttttacttactgatttagatatattactagtatcagaaactacagttttgccttgtattttacagaattatgactgttgtgaacttaaacagaaacacataaaggtcagcaattctttttttttttttttttgatatggagttttgctcttgttgcccaggctggagtgcaatggcataatttctgctcaccgcaacctccgcctcccaggttcaaaagattctcctgccttagcctcccaagtagctgggattacaggcatgcgccaccatgcctggctaatttttgtacttttgctagagacagcgtttctctgtgttgatcaggctggtctcgaactccgaacctcaggtgatccacccacctcagcctcccaaagtgctgggattacaggcatgagccaccacgcccagcctaaaggtcagcagttcttaagaagatatggtaaacagcaacaatattttaaaatcaagtaattacagttcctcccagagcttgcgttgatcacattcatttattcattcaacacatttttctaggaaactcactgtatacactaaacactattctgtgtgctcaacctagaatgtcttctccagaacaagactagtgtagaaatacaggaatgtaaattctgtcagacggactagatctaaagaattaccagcataaatgtttgcatttctgctgaagccagaagcttttccttcttcctagacaccatttcatccttaattattacttctggttagttttccattgccaccataacaagttacaaaatgtggcttaaaatagcacaaatttattatcttcacaattctgtaggttaggagtccaggttaagagtttcgcggtgccaagatcaatttgttggcagggttgcattctgttaggaggctctacaggagaatcatttccttgtcattccaccttctacaggacatcctcattccttggcttgtgacctccttcttccatcttaaaaaccagtgctgtttcatctctatgacccttctgttaccacatctctctgacaccagtgtggagaggttctctgcaggactcatgattaaatgaggcccaccggatatccaatctaggcttatctccttgtcttgaaatccatagtaaccttaattacatctgcaaaatctcttttaccatctaaggttacatacaggtttggagattaggacattaacattttacatggaacattattcttgcctactacagttcccacccaccccccgctccactcctgtgttaaagattcagattcatcacaaataaatttacatcactcataggtgctcaaaagtcacaatccattattacagcatcaactctaaatccaaaatcttatctgagtctcaccaactcaaaagtctcaaatctcacattgaagccatctaaattaagtttgggagaggatctgtgtgtgatttctgggacataattccaactgtgcacttgtgaacctagaaaacaagttatctgttcccaagtatgatggcatgacaggcagacaataatagttacacacgttcctgttcaaaaagcagaaacagatggaaaaaggagccatcagcaccaatcaatttacaaaaccagcgaggcacccttctttaagtttcaaggcctgggagtaatcttcagctcactgctgttctctgggcttgttgactgtctcagagtcatctttactttttcacaaaaggtagcacacgtttgcagctgagtatcaacttatcagtttgttcttcttttatattctctaaagctttctgttaaaaatggtggtgcttctgctgctataacgttgtcaagaaacttgtgggtcttttacatatgtcacagggatgcactcatttagataggaggctcctcacgtatctttcctggaaaatcctgtctctgtttttggctttttctgaaatagctgagaggatctatgattcacacccttaatatcttcaaagagtcttgtgtgtgacctgatattcagaccttttgatgtttctgaagtattagcaaaaggttatacagccatatcttcatcactttctctagagtaaaggctgtcctgacggtgaatcttagttttagtggcttttgccatttgaataggccgcgaatttcccaaatcatcaagtcctggtttctttatatttaacaggtcttccctcaatctacctctttccacattttactataatcagcaagaagacagcaggctgtaccttccacagcttgcttggaaatatcctcagctaaatattgaagtcatcacttaaaagttctgctttacacataacggcaggacacaactcagcttagcttttcgccactatgtaacaaggactcctttcctccacttctccagtaacatattcctcattttttaccaacagtctattcatgatgatttagatattctatggcaatcgaggtattctctattatgctcctttcttcaaggccgccctagcattaacattccatatttctactaacagtctgtttaaggcagtttagcttcttttctggcatgctcctcagaattcttccagcctccacctactgcccaattccagagccacttttctacttttaggtatttgttacagcagcacctcaagtacctagaaaactcttttatgcctgcttctctgccagatgacttgaatatggtactagatttggaattcacctttctccagggtcactgtttatttcaaagaggtgaatttacctgtgctagggttttcacactgggagtgctaccagaactaccacaggatgaaagtggtgagcccaccactgcagagaagttttctcagtgccgtaatatagaggaattctcaaaataagccctactccttttcacttactgaaaacaacttggataatgtgtaacagccagccccatttcaaaaagattaccaggggtaaaacaactttttcatgggtcaaaatcatcttccgaagaaaatgatttcttaaaagaattgaacattgtaaatcaaagggcattgtcctgttttggattaacaaaacaggaaaaataaccaatccttgtaaaattatttgaaattttcttgtttttatcagttgagtgcctatagatgcacatacaaaaacaactgccatttttgtatataatagtcttccaagatagagatttacattaggagagaattaaacatccaggagggatgaacagtatttcatgtgtgctatgtagtgttttgcttcattgagagtcattttcatgaattatttttactactgcagtcatcttaaatttataatcatctcaaaaaagatgtcacaatgaacagacaaccatctgtgaggtcagtcattttgcatgatgtatgtaatcaaaaagtttgaaatgtctgcttactaataaagaatgttttcactgaaactta

SEQ ID NO: 2538 - DNA, 4940 bp, Homo sapiens
  source 1..4940: mol_type = genomic DNA
gccgcagccggcggaggaggcagtagcgggggactcgatggaccgcggctggcaattccaggaatggatggaggtgctttaactgatacaagtctcacagattcctattttagcaccagctttattggagtcaatggatttggaagccctgtagaaacaaaatatcccctgatgcagagaatgactaatagtagcagctccccaagccttctaaatgacagtgccaagccatattcagcccatgatcctctaacatcacctgcttcatccttgtttaatgactttggtgccctcaacatctctcagagacgaaagacaccaaatcctactgcaagcgagtttattcctaaaggaggatcaacctccaggctgagtaacgtgtcccagtcaaatatgtctgccttctctcaagttttctctcacccatccatgggaagccctgctactgctggattagcgccaggaatgtcgttgtctgctgggtcttcccctcttcattcccccaagattactccacatacttctcctgctcccagaagaagaagtcacactccaaatccagcaagttacatggtgccttctagtgcctctacatctgttaataatcctgtttctcagactccgtcttctggtcaggtgatccaaaaggaaactgttggtgggacgacttacttctatacagacacaactccagcacctttgactggaatggtgtttccaaactatcatatttatcctccaactgcacctcacgttgcttatatgcaaccgaaagcaaacgcaccttccttcttcatggctgatgaactccgacaggagctgatcaacagacatttaataacaatggctcaaattgatcaagcagatatgccagcagttcctacagaggttgacagctaccatagcctattccctctagaaccactgccacctcccaaccggatacagaaatcaagtaattttggatatattacatcttgctacaaagctgtaaacagcaaagatgatctgccatattgccttcggaggatacatggttttcgtcttgttaacacaaagtgcatggtgttggtcgacatgtggaagaaaattcaacactcaaatatcgtaactttgcgtgaagtatttaccactaaagcatttgctgagccctctcttgtgtttgcatatgatttccatgctggaggagaaactatgatgagcagacactttaatgaccctaatgctgatgcctacttcaccaagagaaagtggggtcagcacgagggaccattgcccaggcagcatgctggattattgccagaatctcttatttgggcatatattgtccaactaagttctgcattgcgtaccattcatacagcaggtttggcatgtcgagttatggatccaacaaagattctgataactggcaaaacaaggttgcgagtaaattgtgttggagtttttgatgttttaacatttgataacagtcaaaataataatccattggcattaatggcccagtaccagcaagcagatctgatatcattaggaaaagttgtgttggctttggcttgcaactctttggcaggaattcagcgagagaatttacagaaagccatggaactggtgacaatcaactattcctctgacctgaagaatctgattttgtatttgttgactgaccaaaacaggatgcgaagtgtaaatgacatcatgcccatgattggtgctcgattttatactcaattggatgctgctcaaatgagaaatgatgtcatagaggaagaccttgcaaaggaggttcaaaatggaagactgtttaggctcctagcaaaattgggaacaatcaatgagaggccggagtttcagaaggatcccacttggtcagagactggagaccgttatctgttgaaactctttagggatcatctttttcatcaggtgacagaagcaggtgctccctggattgacctcagtcatataatttcttgtcttaacaagctagatgctggtgtgccagaaaaaataagcctgatttccagagatgagaagagtgtacttgtggtgacctacagtgacttaaagcgctgctttgaaaatacttttcaagaactgattgcagctgcaaatggtcagttgtagtatttgctaaaaaagcacgcaggacatggctaaagaccttaaccaatagcaaattgcactacagctgaacttttcatcatctcattcacatttgggaaacgaacaggagatgagcaaagctgcttgcacttcagtcaggtacactgttacttgaaaggaagaatgtttcacttacccaagagctatggctgccattggaggctgttatctgtgaagaatttattttagatttaggagcaccatcaggtgaatgatgttcctgcttttgttttttccacttgtatatgcactaattttaattttttaaagactttttctgatctttgaacttttgccacattgtatacttataatgggaaactttgcaaggacatttttgggaagcaatgctgggcagcgtttttgccattgagggttgcagaatttgctctttttgggatgggttgccctgaataacattacggaccaggtaaataatttcatagaagttcagtatagtacgtaattcttgtaagagtatcgtatgcaagctctctgtatgccacccactgttagttcaaattgagatttttgttttgttttgttcttaagaacataccaagaaaataccagtgaattgttggatatgaattccctgttagttgatttaaatcctttctgaataaagatcagataaacagtaactgaaggagcatgtatagctctttccttcaaattcaactagagcctttttaaaaagacatttgcctgctagtcagatacatttacatttatgcaaattttttaaataggagaaaattaagaaattgtgttaaaggcctaaagttcaggagtgtattactttaggttctttccagtttgctggtttttttttttttttttttttttttttttgggcgggggggaggtttatgaagttttgctctttgaaccacagctttattatggtcctttacactggagacagacacagagacactgttcagaagatgaactaaactcagcagtggtctggtatcaagagctttctgatgttttacagcctgaatttggagggataacgatctgctgtgcctttgcagtcactgcttagcccaaagtaatagtacttttgataataactcactctgtgcgatattcctgaataagtccatctcaaaagtttgggattttcctcctcttaactttcttaatatttggacatgcagttgtcgccaaacttgggtattcatggaatttctagtaaatgaaatacctatactttgatactgaagactgccaaatacataggaattttctttcttaaaaaacagtaatgaagactatatctcctttcccagcactgaatgttttactagcactgggtgctcaccatgcaactgaagaaaatgtggaaactcaaaaggtcaggacagacttccaagcacttgcaactgatgttactgtcttcaattttaataattacacatatttgtatatttcagagaagtttttaatatttctctgtccactttttataagctttaaaatgattttctctgccttgagatttgcatcaagaaaaagcacctctcttcacctgaaagctttgaagactagagacacgctttacacgttttaacaagtatattgagtccacgtttggtagcatcagttgttgagttaaaaagaaaattattgcatttgatctggatggattttaaaagaatataatgttcaatattaaaaggataattcacatttgccaccataatgttcttttttatgtaaaaagaagaacttggagacattaacatgaaaaagtcttttatcattagctcatgtatttgaggaagagcagctgtctttttatatgttttttgacaaatcatattgtattcttttgtacaaaaaagaactacttgtattctagaagaaatatgaaatgcttaatttataagcgggctggagattttttccaatattgttttctttgaaaatgaaaggggatcatctattttagttttggggtctgggaactttttgaaaatttaatttgtggaccaatgttttgtgaaagctaaagagggcaggggttaaaatagggcttgaatttctcattctgtatagaccagcaaacttccctgtgcaaggcaagtttacatcacaaatccaagaatgtttgcatcctaaatgctagtttgcttcagcccctagttaacctcaggacttggtttgcatataaaaggtagacagctgatatgttttcatgaataaatattgtcagccagaaaaggttggtgtcaggtaatgcatatttttttaagctttgttttatatttatttttcatttagtttttattgggaatggttttcaaagaactctcagttctgcctaggtgtttttgggggagccctgttttccatagtgtaattccatttaagaggttgtctaaaagtctttttaattaatagaaagattttaatatccaagagtagtcaaattaaggatataaactttccacaccttcctgtcgtgacagataaaagcacagaaaggacaacccttgaaatcatgtaacgttggtcatttcaatattttgtacctgttttaaattctgttagtgtatttacttcattgtaaatatttttgagggtacctttgtattttgcttttgaccttggttctgtgatttggatgtcaacaacttccctaaaaagcaccagtgtgttaggttctaatgtcatgacccaatttgtgttattcatctttaatcctgttttcagtctctatgtgtacagcagtatttttaataaagaattacagagataaa

SEQ ID NO: 2539 - DNA, 7607 bp, Homo sapiens
  source 1..7607: mol_type = genomic DNA
agatttgaatacttcactgaggcgagccgggcgttgtgagcggactgctagaggcggctgtctgtttccgctctaaggaaactcagagcgtgtggaccccaaacaagtctgcgcaaaatttgtcgaggaggtttgccgcggcagaaaagttttcttcaaaaatggatggggtgtcttcagaggctaatgaagaaaatgacaatatagagagacctgttagaagacggcattcttcaatattgaaacccccaaggagtcctcttcaggacctcagaggtgggaatgaaagagttcaggaatccaatgctttgagaaataagaaaaactctcgtcgagtcagctttgcagatactataaaggtattccagacggagtctcatatgaaaatagtgagaaagtcagaaatggaagaaacagaaacaggagaaaatcttcttttgatacagaataagaaattagaagataattactgtgaaattactgggatgaacacattgctttctgctcccattcatacccagatgcaacagaaggagttttcaattatagaacatacccgtgaaaggaaacatgcaaatgaccagacagtcattttttcagatgaaaaccagatggacctgacatcaagtcacactgtaatgattaccaaaggccttttagataatcccataagtgaaaagtccaccaagatagataccacatcatttctagctaatttaaagcttcacaccgaggactcaagaatgaaaaaagaagtaaatttttccgtggatcaaaacacttcttcagaaaataaaatagatttcaatgacttcataaaaagattgaaaacaggaaaatgtagtgcttttcctgatgtgcctgataaagaaaattttgagatacctatttattccaaggaaccgaacagtgcctcttctacacatcaaatgcatgtatctcttaaggaagatgaaaataacagtaatattactaggctctttagagaaaaagatgatgggatgaatttcacccagtgtcatacagccaatattcagacattgattcccacatccagtgagaccaactcacgggaatctaaaggtaatgatattacaatttatggcaatgactttatggacttgacatttaaccacactttgcagatcttacctgcaacaggtaatttttctgaaatagaaaatcaaactcagaatgccatggatgtaacaacaggttatggaactaaagcttcaggaaataaaacagtttttaagagtaaacaaaatactgcttttcaagacctttccataaactctgcagacaaaatacatattaccagaagtcatattatgggggcagaaactcacatagtctcacagacttgtaatcaggatgccagaatattagccatgaccccagaatctatatattctaatccatctattcaaggttgtaagactgttttctattctagttgtaatgatgccatggaaatgaccaaatgtctctcaaatatgagagaggagaaaaatttgctaaagcatgacagtaattatgctaaaatgtattgcaatccagatgctatgtcttctctcacagagaaaactatttattccggagaggagaacatggacattaccaagagtcatacagttgcaatagataatcaaatttttaaacaagatcaatcaaatgtgcaaatagcagctgcaccaacacccgaaaaagaaatgatgctccaaaatcttatgaccacatcagaagatgggaaaatgaatgtaaattgtaactcagttcctcatgtatctaaggaaagaatacagcagagcctgtcaaatcctttgtctatttcattgactgatagaaagactgaactcttatcaggtgaaaatatggatttgactgaaagtcacacaagtaacttaggaagtcaggttcctcttgcagcttataatctagcaccggagagtaccagtgaatctcactctcagagcaaaagctcttcagatgaatgtgaagaaattaccaaaagtcgtaatgaaccatttcagcgatcagacataatagccaaaaacagcttaaccgacacctggaacaaagacaaagattgggttttgaagattttgccctaccttgataaagattctcctcagtcagctgattgtaatcaggagatagcaacaagccataatatagtctactgtggtggagttcttgataaacaaataactaatagaaatacagtatcatgggaacaatctttgttttctaccacaaagccattattttcatcaggacagttctctatgaaaaatcatgatactgctataagtagtcatacagtgaaatctgtactaggccagaattctaaactggctgagccactgaggaaaagtttaagcaatcccacacctgactattgccatgacaagatgattatatgttcagaggaagagcaaaatatggatctaacaaagagccacactgtcgtcattggatttggtccttctgaactacaagaacttggtaaaactaatttagaacacactactggccagctaacaacaatgaacagacagatagctgtaaaagttgaaaaatgtggtaaaagtcccatagaaaaaagtggagtgcttaaatctaactgtattatggatgtgttagaggacgaaagtgtacagaaacctaaatttccaaaggaaaagcaaaatgtcaaaatttggggaaggaaaagtgttggtggaccaaaaattgataagactattgtattttcagaagacgataagaatgatatggatatcactaagagttatacaatagaaataaaccatagacctttattagagaaacgtgattgtcatttggtgccattggcaggaacttctgaaactattttatatacatgtaggcaggatgacatggagatcactagaagtcacacaactgccttagaatgtaaaactgtctcaccagatgaaataactactaggcctatggacaaaactgtagtgtttgtagataatcatgttgaactagaaatgacagagtcccatactgttttcattgactaccaagaaaaggaaagaacagacagacctaactttgaactatcccaaaggaaaagcctaggaacaccaacagtgatatgtactcctactgaggagagtgttttctttccaggaaatggtgaaagtgaccgtctagtagcaaatgacagccagctaacccctctggaggaatggtctaataataggggccctgtagaggtagctgataacatggaattgtctaaatcagccacttgcaaaaacatcaaagatgtacaaagtcctggatttctgaatgaacctctatcaagcaaaagtcagagaagaaaaagccttaagctaaaaaatgacaagaccattgtattttcagagaatcataaaaatgatatggatattacccagagttgtatggtggaaatagataacgaaagtgccctggaggataaagaggacttccatttggcaggggcttctaaaactattttgtattcatgtgggcaggatgacatggagatcactaggagtcacacaactgccttagaatgtaaaactctcctgccaaatgaaatagctattaggcccatggacaaaaccgtattgttcacagataattacagtgatctggaagtcaccgattcccatactgttttcattgactgtcaagccacagagaaaatacttgaagaaaaccctaaatttggaataggaaaaggaaaaaacttgggtgtttcctttcctaaggataatagctgtgttcaagaaatcgctgaaaaacaagcactggctgtaggaaacaaaatagttcttcacaccgagcaaaagcaacaactctttgctgctactaatagaactactaatgaaatcatcaaatttcatagtgctgctatggatgaaaaggtcatagggaaagttgtagaccaggcctgtacattggaaaaagcgcaagttgaaagctgtcagttaaataatagagatagaagaaatgtggactttacaagtagtcatgcaactgctgtttgtggatccagtgataattattcctgtttaccaaatgttatttcctgtactgataatttggagggtagtgccatgctcttatgtgataaagatgaggaaaaagccaattattgcccagtgcaaaatgatcttgcttatgcaaatgattttgccagtgaatattacttggaatctgagggacagcctctctctgctccttgtcctttgttagagaaggaagaagttattcaaaccagtaccaaaggacagttagactgtgttataacactgcacaaagatcaagatctgattaaggatccacgaaatctattggctaatcaaactttagtatatagtcaagatctgggggagatgactaaacttaattcaaagcgagtatcttttaagcttccaaaggatcaaatgaaagtctatgttgatgacatttatgttattcctcagcctcatttctcaaccgaccaacctccattacctaaaaaaggacagagtagtatcaataaagaagaagtaatactgtctaaagctggaaataagagtttaaatattatagaaaattcctctgcacccatatgtgaaaacaagcccaaaatactcaatagtgaggaatggtttgctgcagcctgtaaaaaagaactgaaggaaaatattcaaacaactaactataatacagctctagatttccacagtaactcagacgtaactaagcaagtcattcaaactcatgtcaatgctggagaagcaccagatcctgtaattacatctaatgttccatgttttcatagtatcaaaccaaatctgaataatttgaatggaaaaactggagagtttttagcctttcaaactgttcatctaccaccccttccagagcaattacttgaattaggaaataaggcacacaatgatatgcatatagtgcaagctacagaaatacataatattaacataatctccagcaatgctaaagatagtagagatgaggaaaataaaaagtctcataatggagctgaaaccacctctctaccgccaaagacagtttttaaagataaagtaaggagatgttctttgggaatctttttgcctagattgcccaacaagagaaattgtagtgtcactggtattgatgacctggaacagattccagcagacacaactgatataaatcacttagaaactcagccggtctctagcaaagattcaggcattggatctgttgcaggtaaactgaacctaagtccttctcaatatataaatgaggaaaatcttcctgtatatcctgatgagatcaattcttcagactctattaacatagaaactgaggaaaaggccttgattgagacataccaaaaagagatttcaccatatgaaaataaaatgggaaaaacttgcaatagccaaaaaagaacgtgggtacaagaagaagaagatattcataaggagaaaaaaatcagaaaaaatgagattaagtttagtgatacgacacaagatcgggagatttttgatcaccatactgaagaggatatagataaaagtgctaacagtgtattgataaaaaacctgagcaggaccccatctagttgcagcagctctctggattcaatcaaggctgatgggacctctctggacttcagcacttaccgcagtagtcaaatggaatcacagtttctcagagatactatttgtgaagagagcttgagggagaaactccaagatgggagaataacaataagggagttctttatacttctccaggtccacatcttgatacagaaaccccgacagagcaatctcccaggcaattttactgtaaacacaccacctactccagaagacctgatgttaagtcaatatgtttaccgacccaagatacagatttatagagaagattgtgaggctcgtcgccaaaagattgaagaattaaagctttctgcatcgaaccaagataagctgttggttgatataaataagaacctgtgggaaaaaatgagacactgctctgacaaagagctgaaggcctttggaatttatcttaacaaaataaagtcatgttttaccaagatgactaaagtcttcactcaccaaggaaaagtggctctgtatggcaagctggtgcagtcagctcagaatgagagggagaaacttcaaataaagatagatgagatggataaaatacttaagaagatcgataactgcctcactgagatggaaacagaaactaagaatttggaggatgaagagaaaaacaatcctgtggaagaatgggattctgaaatgagagctgcagaaaaagaattggaacagctgaaaactgaagaagaggagcttcaaagaaatctcttagaactggaggtacaaaaagagcagacccttgctcaaatagactttatgcaaaaacaaagaaatagaactgaagagctactggatcagttgagcttgtctgagtgggatgtcgttgagtggagtgatgatcaagctgtattcacctttgtttatgacacgatacaactcaccatcacctttgaagagtcagttgttggtttccctttcctggacaagcgttataggaagattgttgatgtcaattttcaatctctgttagatgaggatcaagctcctccttcctcccttttagttcataagcttattttccagtacgttgaagaaaaggaatcctggaagaagacatgtacaacccagcatcagttacccaagatgcttgaagaattctcactggtagtgcaccattgcagactccttggagaggagattgagtatttaaagagatggggaccaaattataacctaatgaacatagatattaataataatgaattgagacttttattctctagctccgcagcatttgcaaagtttgaaataactttgtttctctcagcctattatccatctgtaccattaccttccaccattcagaatcacgttgggaacactagccaagatgatattgctaccattctatctaaagtgccactggagaacaactacctgaagaatgtagtcaagcaaatttaccaagatctgtttcaggactgccatttctaccactagacccttggaccaccattggaacaaccaagcagaatgtacttgatattatttcagggtcccattgctgttcagcctttgtttttacgtcattacaagctgagtaaaattccttctgatgatgttatagttaatctgtatgttttttatatctctgcagaatgatggtgatgaagtctggatggtaggcctcatagcctactatcaacttactcatctttgtaccaaaggtttaagtaataggacacttaggaaaaatgtctcctaactaaactagtgctttctgctttagtacaagccctaaggattaacttaagtataagaagtgttatcactgacaagaacattagccattttcccataactagatagagctatgattttttaggttgcctggcttctgcctagcagatatttctggagtagaaatgtatctgtctacaaactattatcctttttctccgttactaaaatgctattaagagaaagtagggctgg

SEQ ID NO: 2540 - DNA, 1128 bp, Homo sapiens
  source 1..1128: mol_type = genomic DNA
tgctcctctacctgctccaccctcaatccaccagaaccatgggctgctgtggctgctccggaggctgtggctccggctgtggaggccgtggctccggctgtgggggctgtggctccggctgtggaggctgtggctctggctgtgggggctgtggctccggctgtggaggctgtgggggctgtggctccggctgtgcgggctgtgggggatgtggctccggctgctgtgtgcctgtctgctgctgcaagcccatgtgctgctgtgtgccagcttgttcctgctccagctgtggcaaagggggctgtggctcttgcgggggctccaagagaggctgtgtctcctgtggggtgtccaagggggcctgtggctcctgtggggggtccaaggggggctgtggctcctgtggggggtccaaggggggctgtggctcctgtggggggtccaaggggggctgtggctcctgtggggggtccaaggggggctgtggttcttatggctgctcccagtccagctgctgcaagccctgctgctgctcctcaggctgtgggtcatcctgctgccagtccagctgctgtaagccttactgctgccagtccagctgctgtaagccctactgctgccagtccagctgctgtaagccctgtagctgcttctcaggctgtggatcatcctgctgccaatccagctgctacaagccctgctgctgccagtccagctgctgtgtccccgtgtgctgccagtgtaagatctgaggctctgactgcagactgcaggtggcctgactggtgaagggcccggctgcccagcttccttgccctgggttctctggtgctccactgtctccactgtgtcctcactggcttcatccactccacaccagtgctcccgaaactgactgaggaccccttctggctcattgcctactacttctcctgaacttcctctccctgctcctcactcatttaagatccaaagcggcccactgaggccccagaggcagatcagaccccttagaccctgacagctgctccttctttcaggagtgtgatcgaccctcaatctctctggctgtctgtatatcaagactgaatcctgaccctctaaataaacaaagtctctaagcacaaa

SEQ ID NO: 2541 - DNA, 899 bp, Homo sapiens
  source 1..899: mol_type = genomic DNA
gggctcagagaactccacacctgcacacctccctctcacctgctcctctacctgctccaccctcaacccaccagaaccatgggctgctctggctgctctggaggctgtggctccagctgtgggggctgtggctccagctgtgggggctgtggctccggctatgggggctgtggctccggctgctgtgtacctgtctgctgctgcaagcccgtgtgctgctgtgtgccagcctgttcctgctccagctgtggctcctgtgggggctccaagggggtctgtggctcttgtgggggctgcaaggggggctgtggctcctgtggaggctccaaggggggctgtggctccagctgctgtgtgcccgtctgctgctcctccagctgtggctcctgtgggggttccaagggggtctgtggatttcgtgggggctccaaggggggctgcggttcttgtggctgctcccagtgcagctgctataagccctgctgctgctcctcaggctgtgggtcatcctgctgccagtccagctgctgcaagcccagctgctcccagtccagctgctgtaagccctgctgttcccagtccagctgctgtaagccctgctgctgctcctcaggctgtgggtcatcctgctgccagtccagctgctgcaaaccctgctgttcccagtccagctgctgtaagccctgctgctgctcctcaggctgtgggtcatcctgctgccagtccagctgctgcaagccctgctcctcccagtccagctgctgtgtcccaatttgctgccagtgcaagatctgaggctctgcccacaaacctcagtgggtcctacagatccgggctctccaggaatgattgcagctgtgtcctgaattcctgaagcacgtctctgaatctgtcctcct

SEQ ID NO: 2542 - DNA, 2384 bp, Homo sapiens
  source 1..2384: mol_type = genomic DNA
cctgctcgttcctgacagaattaacggcacagccaacaagatgaacggagctttggatcactcagaccaaccagacccagatgccattaagatgtttgtcggacagatcccccggtcatggtcggaaaaggagctgaaagaactttttgagccttacggagccgtctaccagatcaacgtcctccgggaccggagtcagaaccctccgcagagtaaaggttgttgtttcgtaacattttatacaagaaaagctgcacttgaggcccagaatgcactgcacaatattaaaactttacctgggatgcatcatcccattcagatgaaacctgcagatagtgaaaagtccaacgctgtggaagacagaaaattgttcataggaatggtatcgaagaaatgtaatgagaacgacatcagggtgatgttctctccatttggccagatagaagaatgccggatcctccggggacctgatgggctgagtcgaggctgtgcgtttgtcacattttctacaagggcaatggcacagaatgcaatcaaagccatgcatcagtctcagaccatggagggctgctcttcacctatcgtggtgaagtttgctgacactcagaaggacaaagagcaaaggcgcctccagcagcagctcgctcagcagatgcagcagctcaacactgccacctgggggaacctgacagggctgggcggactgaccccacagtatctggcgctcctgcagcaggccacctcctccagcaacctgggtgcgttcagcggcattcaacaaatggcaggcatgaatgctttacagttgcagaacctggcgacgctggctgctgctgcagctgcggcccagacctcagccaccagcaccaatgcaaaccctctctctaccacgagcagcgccctgggagccctcacgagtcccgtggctgcttcaacccccaactccactgctggtgcagccatgaactccttgacctctctcgggactctgcaaggactggctggagccactgttggactgaataatattaatgcactagcagttgctcaaatgctctcaggtatggcggctctgaatggaggacttggcgccacaggcttgacgaatggcacggctggcaccatggacgccctcacccaggcctactcaggaattcaacagtacgcagccgccgcgctgcccactctgtacagccagagcctgctgcagcagcagagcgctgcaggcagccagaaggaaggtccagagggggcaaacctctttatttaccaccttccacaggaatttggagaccaggacattctgcagatgttcatgccttttggaaatgttatctctgctaaagtcttcattgacaaacagaccaatctgagcaagtgctttggttttgttagctacgacaatccagtctctgcacaagctgctatccaagctatgaatggctttcagatcggcatgaaacgcttgaaggtgcagctgaagcgttccaaaaacgacagcaaaccttactgatcctaaccccagaggctccctgctctcattttagctttcttaggacatcttcatgcccgttagttcatcgtttgcctagcatgtccctgtggcgtctcaaaaaaaagtttcatcgtcccgtcattgtttctgatgtctttctgacctcacatcatatttggttctcctactgacctttgatctagtttgacctttgaaatttgcatgtgacctcatctagctatgaattctgggaagtcaatgtgaaaaacattgctgcattcatgcaagactgaaatttattattagacaaattcattatagaaaaaacctgtggcaaaaacgtttctttcttattttttttcttttcctaaaacagacttgaaagtattatacagggattggcattcttcccggtcactggtaacaatagcaatatgtgtccagggacacagaatgttggtttctaacagactacttccaaaaacagtttgagaaaaaaactgtctgattttaagtctctagaggtctgtaatagtttttacatttttcaggcagtgtaaagttttttgataaggccattttaggtggctcactttctcattaagatatatatatagaaccactttttgtagattagtataagaaaaatatttaccctgttttggggcaaatgctacctatttgtgtcaccttttgctgaactcacagttagacaatccatggtttaatgcacatgaaattacctatattttatactgtttcaatgtacaggagaaaggttactgtaaactgtgttatgttggtgcttctgtgaattaagttgtggtttcatcatgagtcttaatgttctttgttgataagacaagtttagaattggtttacttaatac

SEQ ID NO: 2543 - DNA, 6104 bp, Homo sapiens
  source 1..6104: mol_type = genomic DNA
cttttgactagtgttttaatgccatcatttggctattttattagatcaccagagaagagagaacctattgccttaataagaaaatctgatgtatcaagaggtaatttggaaaaagaaatggctcatcttaaccatgatctatattcaggagatttaaatgaacagtcccaggcacagctaagtgaaggatcaattacacttcaggttgaagcagtagagagtacttcacaagtggatgaaaatgatgtgacgttaacggctgataaaggcaaaacagaggacactttcttcatgagcaacaaaccccaaagatacaaagacaagctaccagatagtggtgattctatgcttaggatcagcaccattgcttcagccattgcagaggcatcagttaatactgatccttcccaacttgctgcaatgatcaaggcactttcaaataaaaccagagacaagacttttcaggaagatgagaaacaaaaggactattctcatgtgcgtcatttcttacctaatgatttagaaaaaagtaatggatccaatgcacttgatatggagaaataccttaaaaaaacagaagttagtagatatgaaagtgcattggaaaacttttcaagggctagtatgtctgatacttgggatttatctttgcccaaagaacaaactactcaagacattcatccggtggacttaagtgctactagtgtaagtgtgagggcaccagaagaaaacacagcagctattgtttatgttgaaaatggagagagtgagaatcaagagtcatttagaaccataaactcctcaaattcagttacaaatagagagaataacagtgcagtagttgatgtgaagacatgttccattgacaacaaattacaagatgttggtaacgatgaaaaagctacctcaatttccactccatctgatagttattcatcagtgaggaaccccagaataacatccctttgtctgttaaaagactgtgaagaaatacgagataacagagaaaatcagaggcaaaatgagtgtgtcagtgaaataagcaacagtgagaagcatgtgacttttgaaaaccatcgcatagtctcacctaaaaatagtgatttgaaaaatacctctcctgagcatggtggacgtggctcagaggatgagcaggagagcttcagaccttccacgtcaccactgagtcattcttctcctagtgaaatttctggaacgagttcatcagggtgtgcgttagagtcctttggttcagcagctcagcagcagcagcctccctgtgagcaggagttgtctcccttggtgtgctcgcctgctggggtgagcaggctgacgtatgtgtctgaaccagagagctcctatcctaccacagccacagatgatgccctggaggaccgcaagagtgatatcaccagcgagttgagtaccacaattattcaaggcagtccagccgcattggaggaacgggctatggaaaaattgagagaaaaagttccatttcagaatagaggaaaaggaacattatcatctattatccagaataactctgatacaagaaaagcaactgaaactacttctctgagtagcaagcctgaatatgtaaaacctgactttagatggagtaaagatccttcctccaaaagtggaaatctgttggaaaccagtgaggtaggttggacatcaaaccctgaggaattggacccgatcaggctggctctcctgggcaagtcaggtctgagctgtcaggtggggtcagccacatcacaccctgtgtcctgccaggagcctatagatgaagatcaaagaataagtcctaaagataagtcaactgctggccgtgagttcagtggccaggtttctcatcagaccacctctgaaaaccagtgtactcctattcccagcagcacagttcacagctctgtggctgacatgcagaacatgcctgctgctgtgcacgcactcttgacacaaccctctctcagcgctgctccttttgctcagcggtatttgggaacactcccttcaactggaagcaccaccttgcctcagtgccatgctggcaatgccacagtctgtggcttctcaggaggccttccctatccagctgttgcaggagagcctgtgcagaactctgtggctgtgggaatttgtctaggatcaaatatcggctctggatggatgggtacctcttccctctgtaacccatattctaataccttaaatcagaacctgctaagcacaacaaaaccttttcctgtgccgtctgttggtacaaactgtggaattgaaccatgggattcaggagtgacatcaggattggggagtgtccgagtgcccgaggagttgaagcttcctcatgcttgctgtgtcgggatcgcttcccagaccctcctcagtgtgcttaatccaactgaccgctggctgcaagtcagcattggggtcctcagcattagtgttaatggtgaaaaggtggatctttcaacatatcgttgtttagttttcaagaataaagccatcataagacctcatgccacagaagagataaaagtgctttttataccatccagtcctggggttttcagatgcacattcagtgttgcttcttggccatgttcgacagatgctgagaccatcgtacaggcagaagctttggccagcaccgtcactctcactgccattgccgagagtcctgttattgaggtagaaacagaaaagaaagacgttcttgattttggtgacttgacttatggaggctggaaagccctcccactaaaattgataaaccgaacgcatgccactgtgccaattagactgattattaatgctaacgctgtagcctggcgctgtttcacgttttccaaggaatccgtccgagctcctgtggaagttgctccttgcgctgatgtggtcactcggctagcaggcccttctgtggtcaaccacatgatgcctgctagttatgatggacaggatccagaatttctgatgatttgggttcttttccatagtccaaagaaacagatcagctcttcagatattctggactcagcagaagaattctcggcaaaagttgatatcgaagttgacagcccaaaccctacgcccgttcttagaagtgtgagtctccgagcaagagcaggaatagctaggatccatgctcccagggacttgcagacgatgcatttcttggccaaagtggcttcctcaagaaagcagcacttacctttgaaaaatgctgggaacattgaagtttatttggatatcaaggtcccagaacaaggaagtcacttttcagtggatccaaagaatctactccttaaacctggagaagaacatgaggttattgtttcatttactccaaaggatcctgaagcctgcgaggaaaggatcttgaaaatatttgtgcagccatttggacctcagtatgaggtagtgttaaaaggcgaagtcatttcttcaggaagtaaacctctgtcacctggaccttgcttagatattccatcgattttgtccaacaaacaatttctggcttggggaggagtccctctaggtagaacacagcttcagaaactagctttaagaaataattctgcatctacaactcaacatttacgactgcttattagaggacaagatcaggactgctttcagcttcagaacacttttggttcagaacagcgattgaccagtaactgtgagatcagaattcacccaaaggaagacattttcatctctgtattatttgcacctactcgattatcttgcatgttggctagactagaaatcaaacaacttggaaatcgatcacaaccaggcattaagttcacaatacctttgtctggatatggaggaacaagcaatcttattttggaaggcgttaaaaaattatctgacagttacatggtaacagtgaatggcttagtacctggcaaagaaagtaaaattgttttttctgtccgcaacactggctcccgagcagcttttgttaaagcagtaggttttaaggattctcagaaaaaagttttgctggatcctaaagtattgaggatttttccagataaatttgtactcaaggaaagaacacaagaaaatgttactttaatatataatccatcagacagaggaatcaataataaaactgcaacagaactatcaactgtatacttatttggtggagatgaaatttcaagacagcagtatcgcagggccctgttacataaaccagagatgataaaacagatacttccagaacatagtgtgcttcaaaacattaattttgttgaagcatttcaagatgagctattagtaactgaagtatatgatcttccccaacgacctaatgatgttcagctcttttatggaagcatgtgtaaaattatactttcagtaattggagaattcagagattgcatttctagcagagaattccttcagccttcttccaaagctagcttggaatctacaagcgacttgggagcttctgggaaacatggtggcaacgtctctttggatgttttaccagtcaaaggtcctcagggttctcctcttctctcacgggcggctcgcccgcctctggatcagctggcctccgaagagccgtggactgtcctacccgagcacttgattctggtagctccttctccttgtgacatggcaaaaactggacgtttccagattgtgaataactctgtgaggttactgagatttgagctgtgctggccagcgcattgcctcacagtcacgccgcagcatggatgtgtcgcgccagagagtaaactacaaattcttgtgagtcctaattcctccttatccacaaaacagtcaatgttcccgtggagtggtttgatctatatacactgtgacgatggacagaagaaaattgtgaaagttcaaattcgagaagatttaactcaagtggaacttttaactcgtttgacctccaaaccatttggaattctttccccagtatctgagccttcagttagtcatttggtcaaaccaatgacaaaaccgccttccacaaaagttgaaataagaaacaagagtattacttttcctacaacagaacctggtgaaacttcagagagctgtctagaactcgagaatcatggcaccacagacgtgaaatggcatctgtcatctttagcgccaccttatgtcaagggagttgatgaaagtggagatgtttttagagctacctatgcagcattcagatgttctcctatttctggtctgctggaaagccatgggatccaaaaagtctccatcacatttttgcccagaggtaggggggattatgcccagttttgggatgttgaatgtcaccctcttaaggagcctcacatgaaacacacgttgagattccaactctctggacaaagcatcgaagcagaaaatgagcctgaaaacgcatgcctttccacggattccctcattaaaatagatcatttagttaagccccgaagacaagctgtgtcagaggcttctgctcgcatacctgagcagcttgatgtgactgctcgtggagtttatgccccagaggatgtgtacaggttccggccgactagtgtgggggaatcacggacacttaaagtcaatctgcgaaataattcttttattacacactcactgaagtttttgagtcccagagagccattctatgtcaaacattccaagtactctttgagagcccagcattacatcaacatgcccgtgcagttcaaaccgaagtccgcaggcaaatttgaagctttgcttgtcattcaaacagatgaaggcaagagtattgctattcgactaattggtgaagctcttggaaaaaattaactagaatacatttttgtgtaaagtaaattacataagttgtattttgttaactttatctttctacactacaattatgcttttgtatatatattttgtatgatggatatctataattgtagattttgtttttacaagctaatactgaagactcgactgaaatattatgtatctagcccatagtattgtacttaacttttacaggtgagaagagagttctgtgtttgcattgattatgatattctgaataaatatggaatatattttaatgtggtatatcc

SEQ ID NO: 2544 - DNA, 108 bp, Homo sapiens
  source 1..108: mol_type = genomic DNA
atgtgctactacggaaactactatggcggctatggctatggaggcctgggctgtggctatggctcctgctgtggctgtggcttccgcagactgggctgtggctatggc

SEQ ID NO: 2545 - DNA, 849 bp, Homo sapiens
  source 1..849: mol_type = genomic DNA
cagctgaactcacatctcccgtcaacatgtcctacaactgctgctctggaaacttctcctcccgctcctgtggtgactacctgcgctacccagcatcctcacgtggcttttcctaccccagcaatctggtctacagcactgacctctgctctcccagcacctgccagctgggttcctctctctataggggctgtcaggagatctgctgggagcccaccagctgccagacgtcctatgtggagtccagcccctgccagacctcctgctaccgccccagaacctccttgctctgcagtccttgcaagacgacttactctgggtctctaggctttggatccagcagctgccgctccctgggctatggatcgaggagctgctactcagtgggctgtgggtccagtggtgtcagatccctgggttatggaagctgtggcttcccttccctcggctatggatctggattctgccgcccaacctacttggcttctaggagctgccagtctccttgttacagaccagcctatggatcaaccttctgcagatcaacttgctgaatttccagaccttttaagcaaagtgtctcagtctctacgtagagctgttatcataggcatttccagcaatgtgagctaacccctcttactactagctcttcatcctttctctggcatcaagtactggctggacaggctagttctttcagactgtgaaattaatgaatgagcaaaatatagagtcaaatgtctataattttgaaacaagtgattcgttatcacgtaagttcatcttataaagtatatggaagttcagttttgtttcacgtaataaattcatttactgttgattcca

SEQ ID NO: 2546 - DNA, 581 bp, Homo sapiens
  source 1..581: mol_type = genomic DNA
tttccaggggtcactctggcttcgactccgtcgctctcaattcgtcaccaggaggaagacggagctggctgcccagcccaaaggcccatgaggggatgcagttatgggctctgtcgccgtggagatagagtgtcgctttgttgcccaggctagtcttgaacttctggcctcaagccgtcctcccacctcgatctcccaaagtgttgggattacaggcattgttattttgtgtcagtaagtaatccataaagtgccaacatgggaaagaaacggacaaagggaaaaactgttccaatcgatgattcctctgaaactttagaacctgtgtgcagacacattagaaaaggattggaacaaggtaatttgaaaaaggctttagtgaatgtggaatggaatatctgccaagactgtaagactgacaataaagtgaaagataaagctgaagaagaaacagaagaaaagccttcagtttggctgtgtcttaaatgtggccatcagggctgtggcagaaattctcaggagcagcatgccttgaagcactatctgacgccaagatctgaacctcactgtctggttcttag

SEQ ID NO: 2547 - DNA, 2960 bp, Homo sapiens
  source 1..2960: mol_type = genomic DNA
ataatgccgcgttccggaagttattgctttccaggggtcactctggcttcgactccgtcgctctcaattcgtcaccaggaggaagacggagctggctgcccagcccaaaggcccatgaggggatgcagttatgggctctgtcgccgtggattgttattttgtgtcagtaagtaatccataaagtgccaacatgggaaagaaacggacaaagggaaaaactgttccaatcgatgattcctctgaaactttagaacctgtgtgcagacacattagaaaaggattggaacaaggtaatttgaaaaaggctttagtgaatgtggaatggaatatctgccaagactgtaagactgacaataaagtgaaagataaagctgaagaagaaacagaagaaaagccttcagtttggctgtgtcttaaatgtggccatcagggctgtggcagaaattctcaggagcagcatgccttgaagcactatctgacgccaagatctgaacctcactgtctggttcttagtttggacaactggagtgtatggtgttacgtatgtgataatgaggtccagtattgtagttcaaaccagttgggtcaagtggttgattatgtcagaaaacaagccagcattacaactccaaagccagagaaagataatggaaatattgaacttgaaaataaaaaattagaaaaagagagtaagaatgaacaagagagagaaaagaaggaaaacatggctaaagagaatcctcccatgaattctccttgccaaataaccgtgaaaggactcagtaatttgggaaacacatgtttcttcaatgcagttatgcagaacttgtcacaaacaccagtgcttagagaactactaaaagaagtgaaaatgtctggaacaattgtaaaaattgaaccacctgatttggcattaacagaaccattagaaataaaccttgagcctccaggccctcttactttagccatgagccagtttcttaatgagatgcaagagaccaaaaagggggttgtgacaccgaaagaactcttttctcaggtctgtaaaaaagcagtgcggtttaaaggctatcagcagcaagacagccaggagctgcttcgctacttattggatgggatgagagcagaagaacaccaaagagtgagtaaaggaatacttaaagcatttggtaattctactgaaaagttggatgaagaactaaaaaataaagttaaagattatgagaagaaaaaatcaatgccaagttttgttgaccgcatctttggtggtgaactaactagtatgatcatgtgtgatcaatgcagaactgtctccttggttcatgaatctttccttgatttgtccctcccagttttagatgatcagagtggtaagaaaagtgtaaatgataaaaatctgaaaaagacagtggaggatgaagatcaagatagtgaggaagaaaaagataacgacagttacataaaagagagaagtgatattccttctggaacaagtaagcacttacagaaaaaagcaaagaaacaagccaaaaagcaagccaagaaccaacgaagacaacaaaaaattcaaggaaaagttcttcatttaaatgatatttgtactattgaccatcctgaagacagtgaatatgaagctgaaatgtcacttcaaggagaagtaaatattaaatccaaccatatttcacaagagggtgttatgcataaagaatattgtgtcaaccagaaagatttgaatggccaagcaaaaatgatcgaaagtgtaactgacaatcaaaaatccacagaggaagtagatatgaaaaatatcaacatggataatgatctggaggttttaacatcttctcccactaggaatttaaatggtgcctacctaacggaagggagcaatggagaagtggacatttccaatggtttcaaaaacctaaatttgaatgctgctcttcatcctgatgaaataaatatagagattctgaatgatagtcatactcctggaacaaaggtgtatgaggttgtaaatgaagatccagaaactgctttctgtactcttgcaaacagggaagttttcaatactgatgagtgttcaatccaacattgtttatatcagttcacccgtaatgagaaacttcgagatgcgaataaactgctttgtgaagtatgcacacggagacagtgtaatggaccaaaggcaaatataaaaggtgaaaggaagcatgtttacaccaatgccaaaaagcagatgctaatttctcttgctcctcctgttcttactcttcatttaaagagatttcagcaggctggttttaacctacgcaaagttaacaaacacataaagtttccggaaatcttagatttggctcctttttgcacccttaaatgtaagaatgttgcagaagaaaatacaagggtactctattccttatatggagttgttgaacacagtggtactatgaggtcggggcattacactgcctatgccaaggcaagaaccgcaaatagtcatctctctaatcttgttcttcacggtgatattccacaagattttgaaatggaatcaaaagggcagtggtttcacatcagcgacacacatgtgcaagctgtgcctacaactaaagtactaaactcacaagcgtacctcctattttatgagagaatactgtaataatatcaaaagcactttttctggaaacacatttatggcttttataatggctgaaataacgataaaaaaagactaattaaaatcatgttcacttaacattaaatacatgccagaagaaatcatgtttatttaaatattgaagggaaaaatacctaaaaatgtacaaaggttttatattgtcatagtggtttttattcctgctttgtttctggaaaggaaatcctgaattacttaagtactttgtgtttaatatatctgggtgatggatcacaacacatcaataaactgacttaccctaaaa

SEQ ID NO: 2548 - DNA, 2963 bp, Homo sapiens
  source 1..2963: mol_type = genomic DNA
ataatgccgcgttccggaagttattgctttccaggggtcactctggcttcgactccgtcgctctcaattcgtcaccaggaggaagacggagctggctgcccagcccaaaggcccatgaggggatgcagttatgggctctgtcgccgtggattgttattttgtgtcagtaagtaatccataaagtgccaacatgggaaagaaacggacaaagggaaaaactgttccaatcgatgattcctctgaaactttagaacctgtgtgcagacacattagaaaaggattggaacaaggtaatttgaaaaaggctttagtgaatgtggaatggaatatctgccaagactgtaagactgacaataaagtgaaagataaagctgaagaagaaacagaagaaaagccttcagtttggctgtgtcttaaatgtggccatcagggctgtggcagaaattctcaggagcagcatgccttgaagcactatctgacgccaagatctgaacctcactgtctggttcttagtttggacaactggagtgtatggtgttacgtatgtgataatgaggtccagtattgtagttcaaaccagttgggtcaagtggttgattatgtcagaaaacaagccagcattacaactccaaagccagcagagaaagataatggaaatattgaacttgaaaataaaaaattagaaaaagagagtaagaatgaacaagagagagaaaagaaggaaaacatggctaaagagaatcctcccatgaattctccttgccaaataaccgtgaaaggactcagtaatttgggaaacacatgtttcttcaatgcagttatgcagaacttgtcacaaacaccagtgcttagagaactactaaaagaagtgaaaatgtctggaacaattgtaaaaattgaaccacctgatttggcattaacagaaccattagaaataaaccttgagcctccaggccctcttactttagccatgagccagtttcttaatgagatgcaagagaccaaaaagggggttgtgacaccgaaagaactcttttctcaggtctgtaaaaaagcagtgcggtttaaaggctatcagcagcaagacagccaggagctgcttcgctacttattggatgggatgagagcagaagaacaccaaagagtgagtaaaggaatacttaaagcatttggtaattctactgaaaagttggatgaagaactaaaaaataaagttaaagattatgagaagaaaaaatcaatgccaagttttgttgaccgcatctttggtggtgaactaactagtatgatcatgtgtgatcaatgcagaactgtctccttggttcatgaatctttccttgatttgtccctcccagttttagatgatcagagtggtaagaaaagtgtaaatgataaaaatctgaaaaagacagtggaggatgaagatcaagatagtgaggaagaaaaagataacgacagttacataaaagagagaagtgatattccttctggaacaagtaagcacttacagaaaaaagcaaagaaacaagccaaaaagcaagccaagaaccaacgaagacaacaaaaaattcaaggaaaagttcttcatttaaatgatatttgtactattgaccatcctgaagacagtgaatatgaagctgaaatgtcacttcaaggagaagtaaatattaaatccaaccatatttcacaagagggtgttatgcataaagaatattgtgtcaaccagaaagatttgaatggccaagcaaaaatgatcgaaagtgtaactgacaatcaaaaatccacagaggaagtagatatgaaaaatatcaacatggataatgatctggaggttttaacatcttctcccactaggaatttaaatggtgcctacctaacggaagggagcaatggagaagtggacatttccaatggtttcaaaaacctaaatttgaatgctgctcttcatcctgatgaaataaatatagagattctgaatgatagtcatactcctggaacaaaggtgtatgaggttgtaaatgaagatccagaaactgctttctgtactcttgcaaacagggaagttttcaatactgatgagtgttcaatccaacattgtttatatcagttcacccgtaatgagaaacttcgagatgcgaataaactgctttgtgaagtatgcacacggagacagtgtaatggaccaaaggcaaatataaaaggtgaaaggaagcatgtttacaccaatgccaaaaagcagatgctaatttctcttgctcctcctgttcttactcttcatttaaagagatttcagcaggctggttttaacctacgcaaagttaacaaacacataaagtttccggaaatcttagatttggctcctttttgcacccttaaatgtaagaatgttgcagaagaaaatacaagggtactctattccttatatggagttgttgaacacagtggtactatgaggtcggggcattacactgcctatgccaaggcaagaaccgcaaatagtcatctctctaatcttgttcttcacggtgatattccacaagattttgaaatggaatcaaaagggcagtggtttcacatcagcgacacacatgtgcaagctgtgcctacaactaaagtactaaactcacaagcgtacctcctattttatgagagaatactgtaataatatcaaaagcactttttctggaaacacatttatggcttttataatggctgaaataacgataaaaaaagactaattaaaatcatgttcacttaacattaaatacatgccagaagaaatcatgtttatttaaatattgaagggaaaaatacctaaaaatgtacaaaggttttatattgtcatagtggtttttattcctgctttgtttctggaaaggaaatcctgaattacttaagtactttgtgtttaatatatctgggtgatggatcacaacacatcaataaactgacttaccctaaaa

SEQ ID NO: 2549 - DNA, 2745 bp, Homo sapiens
  source 1..2745: mol_type = genomic DNA
agtggcgggaggctgtgagctgagcggtggggtctgcgtacgcctggagtccttccccgctgtgctcagcatggaccctatccggagcttctgcgggaagctgcggtctctggccagcacgctggactgcgagacggcccggctgcagcgagcgctggacggagaggaaagcgactttgaagattatccaatgagaattttatatgaccttcattcagaagttcagactctaaaggatgatgttaatattcttcttgataaagcaagattggaaaatcaagaaggcattgatttcataaaggcaacaaaagtactaatggaaaaaaattcaatggatattatgaaaataagagagtatttccagaagtatggatatagtccacgtgtcaagaaaaattcagtacacgagcaagaagccattaactctgacccagagttgtctaattgtgaaaattttcagaagactgatgtgaaagatgatctgtctgatcctcctgttgcaagcagttgtatttctgagaagtctccacgtagtccacaactttcagattttggacttgagcggtacatcgtatcccaagttctaccaaaccctccacaggcagtgaacaactataaggaagagcccgtaattgtaaccccacctaccaaacaatcactagtaaaagtactaaaaactccaaaatgtgcactaaaaatggatgattttgagtgtgtaactcctaaattagaacactttggtatctctgaatatactatgtgtttaaatgaagattacacaatgggacttaaaaatgcgaggaataataaaagtgaggaggccatagatacagaatccaggctcaatgataatgtttttgccactcccagccccatcatccagcagttggaaaaaagtgatgccgaatataccaactctcctttggtacctacattctgtactcctggtttgaaaattccatctacaaagaacagcatagctttggtatccacaaattacccattatcaaaaacaaatagttcatcaaatgatttggaagttgaagatcgtacttcgttggttttaaattcagacacatgctttgagaatttaacagatccctcttcacctacgatttcttcttatgagaatctgctcagaacacctacacctccggaagtaactaaaattccagaagatattctccagaaattccagtggatctatccaacacagaaactgaacaaaatgagatgaaagccgagctggaccgattttaacattcacattgccctgcctctgtccccctttaaacgttgacccattttaaagacaaacatgaacattaacatcataatatgctttttatgaagtttcaataaggtttaaccttagtcttgttgacatgtagcccagtcattcactctttaaggattattagtgtttcattgatactaaattacccagcttaatcaacagaatggtttaagtagtaccaggaagtaggacaagtaatttcaaaaatataaaggtgtttgctactcagatgaggccgcccctgaccttctggccagagagacattgctgccagccagctctgccttcccatcatctcctttcaggaccgtcccacaccttttacttgctcagtgctgtctgaagatgcagttgctgtttgcaaacaacaggaacaccagttaaactaattaggaaaagagggagatttccaggcctgggtaactatatactgtgaccattggaggtagagacaggtctcaacagttggaaccaggaactctgctgtcaggttgagagttttgtttctcttccagcttttcactgtgtgggggtcttttctcttatgtcagctctttctatcacatggcagctgacctctcacgctccactctgcagcttggacacccagtagaccctgaatttcactctctctaaaaggttctgagggctcatcctgggccaggggccctcctgtgcactgttagctatggccacgggagcctccagagctgcctggtagcttcaggttgacctgcttatcaggcctacgatccttctgatttaagtacagctggaaagtattatctaattaagttcatgatagtgcttttggagaacttgtcaaattacagccaatgagaaaataaggacctagcatactgtggagaaccattaaaaatttgagaagaaacaacaagtattatgtcaacttacttcaaaggcgtagttttgggaatttgatgcagtaaagattaccctgttttatgattgttccttgaaagtcaaatgggggacctgtccattgtgctctattaatcttgtcagaaaactgtcaccaaaacaaaacttgagtttgtccttgttctaggagttactgggtagttgtaagtattatttttattaaatataatgtaaaataaaatgttaagatacttagttttgtttttcaaagtaaagctgtagtcagccttatgtatgccattgactctgaaatgtataccagcctttcactgtgtaccgtgtgtatataaatccacagaaccggatgagctgcttagggagggaatatattcaaagtgtaccaaggaccaaatcctggagttctcccaactttagaggatggaaaggggcagagtaatctagcaaaggagactgaggccagtgaagtaggaagaaagtatttcaaggagagtgatgattctgtgaatattgctgagaattcaaataaaaagaggactgagaactga

SEQ ID NO: 2550 - DNA, 1551 bp, Homo sapiens
  source 1..1551: mol_type = genomic DNA
aatcccagacagcgcacggcgggaggctgtcgttgggcgtgcgcagctgcagcggcggttgaggtcaagtagtagcgttgggctgcggcagcggaggagctcaacatgcgtgagtgtatctctatccacgtggggcaggcaggagtccagatcggcaatgcctgctgggaactgtactgcctggaacatggaattcagcccgatggtcagatgccaagtgataaaaccattggtggtggggacgactccttcaacacgttcttcagtgagactggagctggcaagcacgtgcccagagcagtgtttgtggacctggagcccactgtggtcgatgaagtgcgcacaggaacctataggcagctcttccacccagagcagctgatcaccgggaaggaagatgcggccaataattacgccagaggccattacaccatcggcaaggagatcgtcgacctggtcctggaccggatccgcaaactggcggatctgtgcacgggactgcagggcttcctcatcttccacagttttgggggtggcactggctctgggttcgcatctctgctcatggagcggctctcagtggattacggcaagaagtccaagctagaatttgccatttacccagccccccaggtctccacggccgtggtggagccctacaactccatcctgaccacccacacgaccctggaacattctgactgtgccttcatggtcgacaatgaagccatctatgacatatgtcggcgcaacctggacatcgagcgtcccacgtacaccaacctcaatcgcctgattgggcagatcgtgtcctccatcacggcctccctgcgatttgacggggccctgaatgtggacttgacggaattccagaccaacctagtgccgtacccccgcatccacttccccctggccacctacgccccggtcatctcagccgagaaggcctaccacgagcagctgtccgtggctgagatcaccaatgcctgcttcgagccagccaatcagatggtcaagtgtgaccctcgccacggcaagtacatggcctgctgcatgttgtacaggggggatgtggtcccgaaagatgtcaacgcggccatcgccaccatcaagaccaagcgcaccatccagtttgtagattggtgcccaactggatttaaggtgggcattaactaccagccccccacggtggtccctgggggagacctggccaaggtgcagcgggctgtgtgcatgctgagcaacaccacggccatcgcggaggcctgggctcgcctggaccataagttcgatctcatgtatgccaagcgggcctttgtgcactggtacgtgggagaaggcatggaggagggggagttctctgaggcccgcgaggacctggcagctctggagaaggattatgaagaggtgggcgtggattccgtggaagccgaggctgaagaaggtgaagaatactgaggggagggtgtggtgggttctccactccactgccacccccagcgtggctgctttcaagttctttgcaattaaaggttctgtataaaaccaaga

SEQ ID NO: 2551 - DNA, 5178 bp, Homo sapiens
  source 1..5178: mol_type = genomic DNA
gcggccgccgtggccctcacagtcggcgtttcgccgcctgcccgcggtgcccgcgcacgccggccgccatcgccttcgcgcctggctggcgggggcgctgtcctcccaggccgtccgcgccgctccctggagctcggcggagcgcggcagccagggccggcggaggcgcgaggagccgggcgccaccgccgccgccgccgccgccgccgcgggggccatgaccgtggagcagaacgtgctgcagcagagcgcggcgcagaagcaccagcagacgtttttgaatcaactgagagaaattacggggattaatgacacccagatactacagcaagccttgaaggatagtaatggaaacttggaattagcagtggctttccttactgcgaagaatgctaagacccctcagcaggaggagacaacttactaccaaacagcacttcctggcaatgatagatacatcagtgtgggaagccaagcagatacaaatgtgattgatctcactggagatgataaagatgatcttcagagagcaattgccttgagtttggccgaatcaaacagggcattcagggagactggaataactgatgaggaacaagccattagcagagttcttgaagccagcatagcagagaataaagcatgtttgaagaggacacctacagaagtttggagggattctcgaaacccttatgatagaaaaagacaggacaaagctcccgttgggctaaagaatgttggcaatacttgttggtttagtgctgttattcagtcattatttaatcttttggaatttagaagattagttctgaattacaagcctccatcaaatgctcaagatttaccccgaaaccaaaaggaacatcggaatttgccttttatgcgtgagctgaggtatctatttgcacttcttgttggtaccaaaaggaagtatgttgatccatcaagagcagttgaaattcttaaggatgctttcaaatcaaatgactcacagcagcaagatgtgagtgagtttacacacaaattattagattggttagaagatgccttccaaatgaaagctgaagaggagacggatgaagagaagccaaagaaccccatggtagagttgttctatggcagattcctggctgtgggagtacttgaaggtaaaaaatttgaaaacactgaaatgtttggtcagtacccacttcaggtcaatgggttcaaagatctgcatgagtgcctagaagctgcaatgattgaaggagaaattgagtctttacattcagagaattcaggaaaatcaggccaagagcattggtttactgaattaccacctgtgttaacatttgaattgtcaagatttgaatttaatcaggcattgggaagaccagaaaaaattcacaacaaattagaatttccccaagttttatatttggacagatacatgcacagaaacagagaaataacaagaattaagagggaagagatcaagagactgaaagattacctcacggtattacaacaaaggctagaaagatatttaagctatggttccggtcccaaacgattccccttggtagatgttcttcagtatgcattggaatttgcctcaagtaaacctgtttgcacttctcctgttgacgatattgacgctagttccccacctagtggttccataccatcacagacattaccaagcacaacagaacaacagggagccctatcttcagaactgccaagcacatcaccttcatcagttgctgccatttcatcgagatcagtaatacacaaaccatttactcagtcccggatacctccagatttgcccatgcatccggcaccaaggcacataacggaggaagaactttctgtgctggaaagttgtttacatcgctggaggacagaaatagaaaatgacaccagagatttgcaggaaagcatatccagaatccatcgaacaattgaattaatgtactctgacaaatctatgatacaagttccttatcgattacatgccgttttagttcacgaaggccaagctaatgctgggcactactgggcatatatttttgatcatcgtgaaagcagatggatgaagtacaatgatattgctgtgacaaaatcatcatgggaagagctagtgagggactcttttggtggttatagaaatgccagtgcatactgtttaatgtacataaatgataaggcacagttcctaatacaagaggagtttaataaagaaactgggcagccccttgttggtatagaaacattaccaccggatttgagagattttgttgaggaagacaaccaacgatttgaaaaagaactagaagaatgggatgcacaacttgcccagaaagctttgcaggaaaagcttttagcgtctcagaaattgagagagtcagagacttctgtgacaacagcacaagcagcaggagacccagaatatctagagcagccatcaagaagtgatttctcaaagcacttgaaagaagaaactattcaaataattaccaaggcatcacatgagcatgaagataaaagtcctgaaacagttttgcagtcgaaacctgaaaatactacaagccaaccactttctaatcagcgagttgtagaggtggcgatccctcatgtagggaaatttatgattgaatcaaaggagggggggtatgatgacgagatcatgatgacaccgaacatgcaaggtattatcatggcgataggtaaatccaggagtgtatatgacaggtgtggccctgaagcagggttctttaaggcaattaagttggaatatgcaaggttggttaagttggcccaagaagacaccccaccagaaaccgattatcgtttacatcatgtagtggtctactttatccagaaccaggcaccaaagaaaattattgagaaaacattactagaacaatttggagatagaaatttgagttttgatgaaaggtgtcacaacataatgaaagttgctcaagccaaactggaaatgataaaacctgaagaagtaaacttggaggaatatgaggagtggcatcaggattataggaaattcagggaaacaactatgtatctcataattgggctagaaaattttcaaagagaaagttatatagattccttgctgttcctcatctgtgcttatcagaataacaaagaactcttgtctaaaggcttatacagaggacatgatgaagaattgatatcacattatagaagagaatgtttgctaaaattaaatgagcaagccgcagaactcttcgaatctggagaggatcgagaagtaaacaatggtttgattatcatgaatgagtttattgtcccatttttgccattattactggtggatgaaatggaagaaaaggatatactagctgtagaagatatgagaaatcgatggtgttcctaccttggtcaagaaatggaaccacacctccaagaaaagctgacagattttttgccaaaactgcttgattgttctatggagattaaaagtttccatgagccaccgaagttaccttcatattccacgcatgaactctgtgagcgatttgcccgaatcatgttgtccctcagtcgaactcctgctgatggaagataaactgcacactttccctgaacacactgtataaactctttttagttcttaacccttgccttcctgtcacagggtttgcttgttgctgctatagtttttaacttttttttattttaataactgcaaaagacaaaatgactatacagactttagtcagactgcagacaataaagctgaaaatcgcatggcgctcagacattttaaccggaactgatgtataatcacaaatctaattgattttattatggcaaaactatgcttttgccaccttcctgttgcagtattactttgcttttatcttttctttctcaacagctttccattcagtctggatccttccatgactacagccatttaagtgttcagcactgtgtacgatacataatatttggtagcttgtaaatgaaataaagaataaagttttatttatggctacctatgtgtttgtaagcaggtatattgtatattagtgtattagtaatactagataaatgaattttgtctggggattaagattggatagttaatagattaatacaatcttttaattctgctctaatgctagcaaattggaaaatgtttaagtctttgacacttaaatttatctatatttttaacaaagttcttgaacttagtatggcaccggaacctgttttgaattcagtcaggtttttactcaagtaagtggttgattttttttaagtcaaactacactgaaacttttatccttttcttagattaatcttactttttaaatgtatttacaatatacagcaaggtgattatttcaagagaatcccaaagtacttgaataagggctattgtaaaatttaaaagaaatatttatatatacacatatatacacatacacacatgtatatatatattcttcataatggaggacaatgttttgcaatatataaatcattctatttttgtaaattgtatatcactttaattgaaaatgttctctactaattaatactgtgaaacaaaattgatgttgtttaactagaagttatgagtatcttaactgcctttattccttttcaaaaaggaaaaagctgtagaacattttgtagatgaaactactgtttaagattaatgaattaatattgtgaatgaaaatcaaaatccatactttaaaggtaatcatgttactaacaacctatttttgaattcataaaaatttctttataaatgatgttttgtgaacatagtaaaatagaccattatactatgtgtatgtttgatacagcgtcgccaaaactagtgttctttattagtgcctctcacaaaagatcctggatggaggagtaagatgaaatattatgctattatatgatgctgtttgtaaaggtattaatgtactagtaaggtgttaatgacaaggaattagtactattcctgttgtaaagttagattttgcatattgtatctatcaaaatatgtttgggtttagattttaagttgtctactgagcagatttctgcattggttttccagtcctgttaaaagtttagaaacttcatatgtgtcatcacagcttttgtaaagaaagtatccttaatattttatgacattct

SEQ ID NO: 2552 - DNA, 2378 bp, Homo sapiens
  source 1..2378: mol_type = genomic DNA
agtccgccgtccgccctccgcgcccgcgccgctagcatgaccgacgcgctgttgcccgcggccccccagccgctggagaaggagaacgacggctactttcggaagggctgtaatccccttgcacaaaccggccggagtaaattgcagaatcaaagagctgctttgaatcagcagatcctgaaagccgtgcggatgaggaccggagcggaaaaccttctgaaagtggccacaaactcaaaggtgcgggagcaagtgcggctggagctgagcttcgtcaactcagacctgcagatgctcaaggaagagctggaggggctgaacatctcggtgggcgtctatcagaacacagagattttatcctggaacattacagtgaagatggctatttatatgaagatgaaattgcagatcttatggatctgagacaagcttgtcggacgcctagccgggatgaggccggggtggaactgctgatgacatacttcatccagctgggctttgtcgagagtcgattcttcccgcccacacggcagatgggactcctgttcacctggtatgactctctcaccggggttccggtcagccagcagaacctgctgctggagaaggccagtgtcctgttcaacactggggccctctacacccagattgggacccggtgtgatcggcagacgcaggctgggctggagagtgccatagatgcctttcagagagccgcaggggttttaaattacctgaaagacacatttacccatactccaagttacgacatgagccctgccatgctcagcgtgctcgtcaaaatgatgcttgcacaagcccaagaaagcgtgtttgagaaaatcagccttcctgggatccggaatgaattcttcatgctggtgaaggtggctcaggaggctgctaaggtgggagaggtctaccaacagctacacgcagccatgagccaggcgccggtgaaagagaacatcccctactcctgggccagcttagcctgcgtgaaggcccaccactacgcggccctggcccactacttcactgccatcctcctcatcgaccaccaggtgaagccaggcacggatctggaccaccaggagaagtgcctgtcccagctctacgaccacatgccagaggggctgacacccttggccacactgaagaatgatcagcagcgccgacagctggggaagtcccacttgcgcagagccatggctcatcacgaggagtcggtgcgggaggccagcctctgcaagaagctgcggagcattgaggtgctacagaaggtgctgtgtgccgcacaggaacgctcccggctcacgtacgcccagcaccaggaggaggatgacctgctgaacctgatcgacgcccccagtgttgttgctaaaactgagcaagaggttgacattatattgccccagttctccaagctgacagtcacggacttcttccagaagctgggccccttatctgtgttttcggctaacaagcggtggacgcctcctcgaagcatccgcttcactgcagaagaaggggacttggggttcaccttgagagggaacgcccccgttcaggttcacttcctggatccttactgctctgcctcggtggcaggagcccgggaaggagattatattgtctccattcagcttgtggattgtaagtggctgacgctgagtgaggttatgaagctgctgaagagctttggcgaggacgagatcgagatgaaagtcgtgagcctcctggactccacatcatccatgcataataagagtgccacatactccgtgggaatgcagaaaacgtactccatgatctgcttagccattgatgatgacgacaaaactgataaaaccaagaaaatctccaagaagctttccttcctgagttggggcaccaacaagaacagacagaagtcagccagcaccttgtgcctcccatcggtcggggctgcacggcctcaggtcaagaagaagctgccctcccctttcagccttctcaactcagacagttcttggtactaatgtgaggaaacaaacatgttcaggccctgaacatttccggtgctgactcggccttaaacgtttgtgccataatggaaaatatctatctatctgttctcaaatcctgtttttctcatagtgtaaactcacatttgatgtgtttttatgaaggaaagtaaccaagaaacctctaggaattagtgaaaaaagaacttttttgaggtgtgttactatactgctgtaagttatttattatataaagtattgtaaatagaatagtgttgaagatatgaaatatggctatttttaatggtgacaattatgacttttagtcactattaaattggggttacctatatcagtacaatttgtagttgt

SEQ ID NO: 2553 - DNA, 4309 bp, Homo sapiens
  source 1..4309: mol_type = genomic DNA
aacgtccgcgggcgcggggtgtgtcgggtgtcgacggcggcgctttgcggccggtcgtgcgggtcgggcgcgggcgggcgcggcggcagtggcgcgcacaggtgattgactggccagctgcctgaaggagcgccaggtcctccttgctggcaggtggcgaagcccattggggcggcggtgcagaccgcggcggcggctgcggcggtctggctcgggaggcgttcctggggccaaggccatggccccgcggctgcagctggagaaggcggcctggcgctgggcggagacggtgcggcccgaggaggtgtcgcaggagcacatcgagaccgcttaccgcatctggctggagccctgcattcgcggcgtgtgcagacgaaactgcaaaggaaatccgaattgcttggttggtattggtgagcatatttggttaggagaaatagatgaaaatagttttcataacatcgatgatcccaactgtgagaggagaaaaaagaactcatttgtgggcctgactaaccttggagccacttgttatgtcaacacatttcttcaagtgtggtttctcaacttggagcttcggcaggcactctacttatgtccaagcacttgtagtgactacatgctgggagacggcatccaagaagaaaaagattatgagcctcaaacaatttgtgagcatctccagtacttgtttgccttgttgcaaaacagtaataggcgatacattgatccatcaggatttgttaaagccttgggcctggacactggacaacagcaggatgctcaagaattttcaaagctctttatgtctctattggaagatactttgtctaaacaaaagaatccagatgtgcgcaatattgttcaacagcagttctgtggagaatatgcctatgtaactgtttgcaaccagtgtggcagagagtctaagcttttgtcaaaattttatgagctggagttaaatatccaaggccacaaacagttaacagattgtatctcggaatttttgaaggaagaaaaattagaaggagacaatcgctatttttgcgagaactgtcaaagcaaacagaatgcaacaagaaagattcgacttcttagccttccttgcactctgaacttgcagctaatgcgttttgtctttgacaggcaaactggacataagaaaaagctgaatacctacattggcttctcagaaattttggatatggagccttatgtggaacataaaggtgggtcctacgtgtatgaactcagcgcagtcctcatacacagaggagtgagtgcttattctggccactacatcgcccacgtgaaagatccacagtctggtgaatggtataagtttaatgatgaagacatagaaaagatggaggggaagaaattacaactagggattgaggaagatctagcagaaccttctaagtctcagacacgtaaacccaagtgtggcaaaggaactcattgctctcgaaatgcatatatgttggtttatagactgcaaactcaagaaaagcccaacactactgttcaagttccagcctttcttcaagagctggtagatcgggataattccaaatttgaggagtggtgtattgaaatggctgagatgcgtaagcaaagtgtggataaaggaaaagcaaaacacgaagaggttaaggagctgtaccaaaggttacctgctggagctgagccctatgagtttgtctctctggaatggctgcaaaagtggttggatgaatcaacacctaccaaacctattgataatcacgcttgcctgtgttcccatgacaagcttcacccggataaaatatcaattatgaagaggatatctgaatatgcagctgacattttctatagtagatatggaggaggtccaagactaactgtgaaagccctgtgtaaggaatgtgtagtagaacgttgtcgcatattgcgtctgaagaaccaactaaatgaagattataaaactgttaataatctgctgaaagcagcagtaaagggcagcgatggattttgggtggggaagtcctccttgcggagttggcgccagctagctcttgaacagctggatgagcaagatggtgatgcagaacaaagcaacggaaagatgaacggtagcaccttaaataaagatgaatcaaaggaagaaagaaaagaagaggaggaattaaattttaatgaagatattctgtgtccacatggtgagttatgcatatctgaaaatgaaagaaggcttgtttctaaagaggcttggagcaaactgcagcagtactttccaaaggctcctgagtttccaagttacaaagagtgctgttcacagtgcaagattttagaaagagaaggggaagaaaatgaagccttacataagatgattgcaaacgagcaaaagacttctctcccaaatttgttccaggataaaaacagaccgtgtctcagtaactggccagaggatacggatgtcctctacatcgtgtctcagttctttgtagaagagtggcggaaatttgttagaaagcctacaagatgcagccctgtgtcatcagttgggaacagtgctcttttgtgtccccacgggggcctcatgtttacatttgcttccatgaccaaagaagattctaaacttatagctctcatatggcccagtgagtggcaaatgatacaaaagctctttgttgtggatcatgtaattaaaatcacgagaattgaagtgggagatgtaaacccttcagaaacacagtatatttctgagcccaaactctgtccagaatgcagagaaggcttattgtgtcagcagcagagggacctgcgtgaatacactcaagccaccatctatgtccataaagttgtggataataaaaaggtgatgaaggattcggctccggaactgaatgtgagtagttctgaaacagaggaggacaaggaagaagctaaaccagatggagaaaaagatccagattttaatcaaatcatgcatgcattttcagttgctccttttgaccagaatttgtcaattgatggaaagattttaagtgatgactgtgccaccctaggcacccttggcgtcattcctgaatctgtcattttattgaaggctgatgaaccaattgcagattatgctgcaatggatgatgtcatgcaagtttgtatgccagaagaagggtttaaaggtactggtcttcttggacattaatctttgaatacttgctgactgctaagaaatgaccagaggggaagaggagtttgacatgttagggcattaaagcaaaggtggatttaagaattaaaccattacatgccccttccaaaaggcagaaatccattcaaacgtgactgtcccaaatgccttatgtcaaataaagcagattgcactgatggacatcagacttgaaggaaatgtttccaattttatatttaaggggggtggtgggtgggagggggcaagtaaagacggaacaagtttagtagcagtaatagtaaatcatgtttacatatgagatttatagtcgtgggaggggaataaagttctgttatatttccttgctcgagtttcataccagatgcgttggtccataaaggattgtatcaagtagatgggacaacattctgctctgaacgaaaagtaattttagagacataacctgcttaccaatgcctgtctttgattcatattctactttcaataaagcatgaaagtgaagaacttgtcctaagtgtggaaaagtgtcttcagatttagactcttctccatgtcagctgcagcgccacccgccttacacctgcccggccgtctgtctcttggtattgggtaaaggagggggcacctgcatgtctcctgcaatgagcaaggaattatgtctcatgttttgacttcagaggctttttgctttggtgcatttcagaaaggatggagaacatttattatgtgtgaaagcatcctcttccggttttgctgttattcaaaagtgggaaatgtacctggcacgtttgaaaataaaaaatctgactacctatcagaagagtaaatcagactgaagtacatttggataacacaaggtttctataaaatttgttcttcctgtcctccatgtcactgtttcttggacctcagttctctttttgaaagcattattccaaaatgccctgagagggtctcttagatcattgtttaaaaaaggaaaaaagtatatggatgtgctgtccatccaactcaggattatcattcttagcaacacgtaaccgaagcaatattcttaagaatattgaaggggtttttttaattgaacttaagactggagtttttcctttgaaa

SEQ ID NO: 2554 - DNA, 873 bp, Homo sapiens
  source 1..873: mol_type = genomic DNA
agctcaacccccagcacggctgcatccaccatgtccgtctgctccagcgacctgagctatggcagccgcgtctgccttcctggttcctgtgactcttgctccgactcctggcaggtggacgactgcccagagagctgctgtgagcccccctgctgcgccccggccccctgcctgagcctggtctgcaccccagtgagccgtgtatccagcccctgctgccgagtgacctgtgagcccagcccctgccaatcaggctgcaccagctcctgcacgccctcgtgctgccagcagtctagctgccagccggcttgctgcacctcctccccctgccagcaggcctgctgcgtgcccgtctgctgcaagactgtctgctgcaagcctgtgtgctgtatgcccgtctgctgtgggccttcttcttcatgctgccagcagtctagctgccagccagcttgctgcatctcctccccgtgtcaacagtcctgctgtgtgcccgtctgctgcaagcccatctgctgtgtgcctgtctgctctggggcctcctctctgtgctgccagcagtctagctgccagccagcttgctgcaccacctcctgctgcagaccctcctcctccgtgtccctcctctgccgccctgtgtgcagacccgcccgccgcgtgcccgtcccctcctgctgtgtccccacctcctcctgccagccaagctgcggccgcctggcctcctgcgggtccctcctctgccgccccacatgttcccgcctggcctgctgaggcctctgctcaggccagaagtccagctgctgccaggcatgtcccccagggccactgggcactatgagtcccccacctctcccactactggcccctcggctgctc

SEQ ID NO: 2555 - DNA, 1238 bp, Homo sapiens
  source 1..1238: mol_type = genomic DNA
ctccaccagttcaaccccagcatggccgcgtccaccatgtccgtctgctccagcgacctgagctacggcagccgcgtctgccttcctggttcctgtgactcttgctccgactcctggcaggtggacgactgcccagagagctgctgtgagcccccctgctgcgccccggccccctgcctgagcctggtctgcaccccagtgagccgtgtgtccagcccctgctgcccagtgacctgtgagcccagcccctgccaatcaggctgcaccagctcctgcacgccctcgtgctgccagcagtctagctgccagctggcttgctgtgcctcctccccctgccagcaggcctgctgcgtgcccgtctgctgcaagactgtctgctgcaagcctgtgtgctgtgtgtccgtctgctgtggggattcttcatgctgccagcagtctagctgccagtcagcttgctgcacctcctccccctgccagcaggcctgctgtgtgcccgtctgctgcaagcctgtctgctctgggatttcctcttcgtgctgccagcagtctagctgtgtgagctgtgtgtccagcccctgctgccaggcggtctgtgagcccagcccctgccaatcaggctgcaccagctcctgcacgccctcgtgctgccagcagtctagctgccagccaacttgctgcacctcctccccctgccagcaggcctgctgcgtgcccgtctgctgcgtgcctgtgtgctgtgtgcccacctgctctgaggattcctcttcatgctgccagcagtctagctgccagccagcttgctgcacctcctccccctgccagcacgcctgctgtgtgcccgtctgctctggggcttccacatcatgctgccagcagtctagctgccagccggcttgctgcaccgcctcctgctgcagaccctcctcctccgtgtccctcctctgccaccctgtgtgcaagtccacctgctgcgtgcccgtcccctcctgtggtgcctctgcctcctcctgccagcccagctgctgccgcacggcctcctgtgtttccctcctctgccgccccatgtgctcccgccctgcctgctacagcctctgctctggccagaagtccagctgctgacagccctggatgtgatccggagtcccttcccaccaggggctgacctcccagctgccccagcaagctctgccctctctggctttgacaccctcagaagatggggcaggctctttgtctta

SEQ ID NO: 2556 - DNA, 1150 bp, Homo sapiens
  source 1..1150: mol_type = genomic DNA
ccagctcacgtcttccccaccccagcatggccgcgtgcaccatgtccgtctgctccagcgcttgctctgactcctggcgagtggacgactgcccagagagctgctgtgagcccccctgcggcaccgccccctgcctgaccctggtctgcaccccagtgagctgtgtgtccagcccctgctgccaggcggcctgtgagcccagcccctgccaatcaggctgcaccagctcctgcacgccctcgtgctgccagccggcttgctgcgcctcctccccctgccagcaggcctgctgcgtgcccgtctgctgcaagcctgtgtgctgcctgcccacctgctctaaggattcctcttcatgctgccagcagtctagctgccagccaacttgctgtgcctcttcctcctgccagcagtcctgctgtgtgcctgtctgctgcaagcccgtgtgctgtgtgcccacctgttctgaggattcctcttcatgctgccagcattctagctgccagccgacttgctgcacctcctccccctgccagcagtcctgctacgtgcctgtctgttgcaagcctgtctgcttcaaacccatctgctgtgtgcccgtctgctctggggcttccacttcatgctgccagcagtctagctgtcagccggcttgctgcaccacctcctgctgcagaccctcctcctccgtgtccctcctctgccgccccatatgcaggcccgcctgctgcgtgcccatctcctcctgctgtgcccctgcctcctcctaccaggccagctgctgccgcccggcctcctgcgtgtccctcctctgccgccccgcgtgctcccgcctggcctgctgaggcctctgctcaggccaggagtccagttgctgatgtgcacatcccccagggccaactggtcctgactcgggttaggaggttgcccccgcttgggacggggcccccatgtgctgaggtgacccccccctccatactcccaggaatctccatcctcgaagctccccagctcctgcctcccagcaggggcccacctgcctgttgggtcccctgtcctccctcccagcttctctgccccaggtcacttggcctcgacttgaacctgtcagcacctcctcctgctccccaataaactccccttggtcgcctga

SEQ ID NO: 2557 - DNA, 1382 bp, Homo sapiens
  source 1..1382: mol_type = genomic DNA
agctcaacccccagcacagcagcatccaccatgtccgtctgctccagcgacctgagctacagcagccgcgtctgccttcctggttcctgtgactcttgctccgactcctggcaggtggacgactgcccagagagctgctgcgagcccccctgctgcgcccccagctgctgcgccccggccccctgcctgagcctggtctgcaccccagtgagccgtgtgtccagcccctgctgcccagtgacctgcgagcccagcccctgccaatcaggctgcaccagctcctgcacgccctcgtgctgccagcagtctagctgccagctggcttgctgtgcctcctccccctgccagcaggcctgctgcgtgcccgtctgctgcaagactgtctgctgcaagcctgtgtgctgtgtgcccgtctgctgtggggattcttcatgctgccagcagtctagctgccagtcagcttgctgcacctcctccccctgccagcaggcctgctgtgtgcccatctgctgcaagcctgtctgctctgggatttcctcttcgtgctgccagcagtctagctgtgtgagctgtgtgtccagcccctgctgccaggcggtctgtgagcccagcccctgccaatcaggctgcatcagctcctgcacgccctcgtgctgccagcagtctagctgccagccggcttgctgcacctcctcctcctgccagcaggcctgctgcgtgcccgtctgctgcaagactgtctgctgcaagcctgtgtgctctgaggattcctcttcatgctgccagcagtctagctgccagccggcttgctgcacctcctctccctgccagcaggcttgctgtgtgcctgtctgctgcaagcctgtgtgctgcaagcctgtcggctctgtgcccatctgctctggggcttcctctctgtgctgccagcagtctagctgccagccagcttgctgcacctcctcccaaagccagcagggctgctgcgtgcccgtctgctgcaagcctgtgagctgtgtgcctgtttgctctggggcttcctcttcatgctgccagcaatctagctgccagccagcttgctgcaccacctcctgctgcagaccctcctcctccgtgtccctcctctgccgccccgtgtgcaggcccgcctgctgcgtgcccgtcccttcctgctgtgctcccacctcctcctgccaacccagctgctgccgcccagcctcctgcgtgtccctcctctgacgccccgtgtgctcccgcccagcctgctgaggcctccgctcaggtcagaagcccagctgctgatggacacgccccccagtgccagccaggctcaggtcccacctgaaagctgatagtcgcgtcctgaattgctcctgcactttgac

SEQ ID NO: 2558 - DNA, 1215 bp, Homo sapiens
  source 1..1215: mol_type = genomic DNA
tcactcactcacacctcccgcagctcacctcctccccaccccagcatggccgcgtccaccatgtccgtctgctccagcgcttgctccgactcctggcaggtggatgcctgcccagagagctgctgtgagccccactgctgcgccctcagctgctgcgccccggccccctgcctgaccctggtctgcaccccagtgagccgtgtgtccagcccctgctgccaggcagcctgtgagcccagcccctgccaatcaggctgcaccagctcctgcacgccctcgtgctgccagcagtctagctgccagccggcttgctgcacctcctccccctgccagcaggcctgctgcgtgcccgtctgctgcaagcctgtgtgctgcctgcccacctgctctaaggattcctcttcatgctgccagcagtctagctgccagccaacttgctgtgcctcttcctccagccagcagtcctgctgtgtgcctgtttgctgcaagcctgtgtgctatgtgcccacctgctctgaggattcctcttcatgctgccagcagtctagctgccatccagcttgctgcacctcctccccctgccagcaggcctgctgcgtgcccgtccgttgcaagcctgtctgctgcaagcccatctgctgtgtgcccgtctgctctggggcttccacttcatgctgccagcagtctagctgccagccggcttgctgcaccacctcctgctgcagaccctcctcctccgtgtccctcctctgccgccctgtatgccggcccgcctgctgtatgcctgtctcctcctgctgtgcccctgcctcctcctgccaggccagctgctgccgcccggcctcctgcgtgtccctcctctgccgccccgcgtgctcccgcccggcctgctgaggcctctgctcaggccaggagtccagctgctgatgggcacccgccctgggccagctgggctcagttcctgacctgggttaggtggcttcccccacctaggacgggtccccgtgtctcccctgtgctgaggtgaccccccctccttgctcccaggagcctccatccttgcagctccccagctcttgccttccagcaggtgcccacctgcctgctaggtcccctgtcctccctcccagcttctctgctctgggtcacttggcctcgacttgaacctctcagcacctcctcctgctccccaataaactctccttggtcacctga

SEQ ID NO: 2559 - DNA, 891 bp, Homo sapiens
  source 1..891: mol_type = genomic DNA
atggcttccagtccgctgccagggcccaacgacatcctgctggcgtcgccgtcgagcgccttccagcccgacacgctgagccagccgcggccagggcacgccaacctcaaacccaaccaggtgggccaggtgatcctctacggcattcccatcgtgtcgttggtgatcgacgggcaagagcgcctgtgcctggcgcagatctccaacactctgctcaagaacttcagctacaacgagatccacaaccgtcgcgtggcactgggcatcacgtgtgtgcagtgcacgccggtgcaactggagatcctgcggcgtgccggggccatgcccatctcatcgcgccgctgcggcatgatcaccaaacgcgaggccgagcgtctgtgcaagtcgttcctgggcgaaaacaggccgcccaagctgccagacaatttcgccttcgacgtgtcacacgagtgcgcctggggctgccgcggcagcttcattcccgcgcgctacaacagctcgcgcgccaagtgcatcaaatgcagctactgcaacatgtacttctcgcccaacaagttcattttccactcccaccgcacgcccgacgccaagtacactcagccagacgcagccaacttcaactcgtggcgccgtcatctcaagctcaccgacaagagtccccaggacgagctggtcttcgcctgggaggacgtcaaggccatgttcaacggcggcagccgcaagcgcgcactgccccagccgggcgcgcaccccgcctgccacccgctcagctctataagaacaaggagcatagctttttcatcacagactctgatgcttctggaggagatttttggagagaaagatcaggaggattatatgcgaataaatgaggacaacatttggttatga

SEQ ID NO: 2560 - DNA, 6196 bp, Homo sapiens
  source 1..6196: mol_type = genomic DNA
gctctgctcgttgagtgaagaaaatccaccggcatcgcctgagccccgctaccgagaagggcgccgcttcctccggggagggggataaagatcccccgccgccggcccatgaggatattgccgtgaaaggcacagcgactgcagcaggaaccggacccggcaccggagcggcggcggcggcggcagcagcggtaccgcctcctcacccggcggcggcagcagcggcggcggcggcggcggcggcggcggcggcggcagcggtcccccctcctcacccgaacatcagggccctccagactcaggcgccccaacaaattcctagaggacctgtgcaacaacctcttgaggatcgaatcttcactcccgctgtctcagcagtctacagcacggtaacacaagtggcaagacagccgggaacccctaccccatccccttattcagcacatgaaataaacaaggggcatccaaatcttgcggcaacgcccccgggacatgcatcgtcccctggactctctcaaaccccttatccctctggacagaatgcaggtccaaccacgctggtataccctcaaacccctcagacaatgaattcacaacctcaaacccgttctccggtaattttctccccttcccagtttttccagaggcctcaaatacagcctcctagagctaccatcccgaacagcagtccttccattcgtcctggtgcacagacacccactgcagtgtaccaggctaatcagcacatcatgatggttaaccatctgcccatgccgtacccagtgccccaggggcctcagtactgtataccacagtaccgtcatagtggccctccttatgttgggcccccccaacaatatccagttcaaccaccggggccaggtcctttttatcctggaccaggacctggggacttccccaatgcttatggaacgcctttttacccaagtcagccggtgtatcagtcagcacctatcatagtgcctacgcagcaacagccgcctccagccaagagagagaaaaaaactataagaattcgggatccaaaccagggaggtaaagacataacagaggagattatgtctggaggtggcagcagaaatcctactccacccataggaagacccacgtccacacctactcctcctcagctgcccagccaggtccccgagcacagccctgtggtttatgggactgtggagagcgctcatcttgctgccagcacccctgtcactgcagctagcgaccagaagcaagaggagaagccaaaaccagatccagtgttaaagtctccttccccagtccttaggctagtcctcagtggagagaagaaagaacaagaaggccagacatctgaaactactgcaatagtatccatagcagagcttcctctgcctccatcacctaccactgtttcttctgttgctcgaagtacaattgcagcccccacctcttctgctcttagtagccaaccaatattcaccactgctatagatgacagatgtgaactctcatccccaagagaagacacaattcctatacccagcctcacatcttgcacagaaacatcagaccctttaccaacaaatgaaaatgatgatgatatatgcaagaaaccctgtagtgtagcacctaatgatattccactggtttctagtactaacctaattaatgaaataaatggagttagcgaaaaattatcagccacggagagcattgtggaaatagtaaaacaggaagtattgccattgactcttgaattggagattctcgaaaatcccccagaagaaatgaaactggagtgtatcccagctcccatcaccccttccacagttccttcctttcctccaactcctccaactcctccagcttctcctcctcacactccagtcattgttcctgctgctgccactactgttagttctccgagtgctgccatcacagtccagagagtcctagaggaggacgagagcataagaacttgccttagtgaagatgcaaaagagattcagaacaaaatagaggtagaagcagatgggcaaacagaagagattttggattctcaaaacttaaattcaagaaggagccctgtcccagctcaaatagctataactgtaccaaagacatggaagaaaccaaaagatcggacccgaaccactgaagagatgttagaggcagaattggagcttaaagctgaagaggagctttccattgacaaagtacttgaatctgaacaagataaaatgagccaggggtttcatcctgaaagagacccctctgacctaaaaaaagtgaaagctgtggaagaaaatggagaagaagctgagccagtacgtaatggtgctgagagtgtttctgagggtgaaggaatagatgctaattcaggctccacagatagttctggtgatggggttacatttccatttaaaccagaatcctggaagcctactgatactgaaggtaagaagcagtatgacagggagtttctgctggacttccagttcatgcctgcctgtatacaaaaaccagagggcctgcctcctatcagtgatgtggttcttgacaagatcaaccaacccaaattgccaatgcgaactctggatcctcgaattttgcctcgaggaccagactttacaccagcctttgctgattttggaaggcagacacctggtggaagaggcgtacctttgttgaatgttgggtcacgaagatctcaacctggccaaagaagagaacccagaaagatcatcacagtttctgtaaaagaagatgtacacctgaaaaaggcagaaaatgcctggaagccaagccaaaaacgagacagccaagccgatgatcccgaaaacattaaaacccaggagctttttagaaaagttcgaagtatcttaaataaattgacaccacagatgttcaatcaactgatgaagcaagtgtcaggacttactgttgacacagaggagcggctgaaaggagttattgacctggtctttgagaaggctattgatgaacccagtttctctgtggcttacgcaaacatgtgtcgatgtctagtaacgctgaaagtacccatggcagacaagcctggtaacacagtgaatttccggaagctgctactgaaccgttgccagaaggagtttgaaaaagataaagcagatgatgatgtctttgagaagaagcagaaagaacttgaggctgccagtgctccagaggagaggacaaggcttcatgatgaactggaagaagccaaggacaaagcccggcggagatccattggcaacatcaagtttattggagaactctttaaactcaaaatgctgactgaagccatcatgcatgactgtgtggtgaagctgctaaagaaccatgatgaagaatccctggagtgcctgtgtcgcctgctcaccaccattggcaaagacttggactttgaaaaagcaaagccacgtatggaccagtactttaatcagatggagaaaattgtgaaagaaagaaaaacctcatctaggattcggttcatgcttcaagatgttatagacctaaggctgtgcaattgggtatctcgaagagcagatcaagggcctaaaactatcgaacagattcacaaagaggctaaaatagaagaacaagaagagcaaaggaaggtccagcaactcatgaccaaagagaagagaagaccaggtgtccagagagtggacgaaggtgggtggaacactgtacaaggggccaagaacagtcgggtactggacccctcaaaattcctaaaaatcactaagcctacaattgatgaaaaaattcagctggtacctaaagcacagctaggcagctggggaaaaggcagcagtggtggagcaaaggcaagtgagactgatgccttacggtcaagtgcttccagtttaaacagattctctgccctgcaacctccagcaccctcagggtccacgccatccacgcctgtagagtttgattcccgaaggaccttaactagtcgtggaagtatgggcagggagaagaatgacaagccccttccatctgcaacagctcggccaaatactttcatgaggggtggcagcagtaaagacctgctagacaatcagtctcaagaagagcagcggagagagatgctggagaccgtgaagcagctcacaggaggtgtggatgtggagaggaacagcactgaggctgagcgaaataaaacaagggagtcagcaaaaccagaaatttcagcaatgtcagctcatgacaaggctgcattatcagaagaggaactggagaggaagtcgaaatctatcattgatgaatttctacacattaatgattttaaggaagccatgcagtgtgtggaagagctgaatgcccagggcctactacatgtttttgtgagagtgggagtggagtccaccctggaaaggagccagatcaccagggatcacatgggccaattactctatcagctggtacagtcagaaaaactcagcaaacaggactttttcaaaggtttttcagaaactttggaattggcagatgacatggccattgatattccccatatttggttgtaccttgctgaactggtgacccccatgttaaaagaaggtggaatctccatgagagaacttaccatagaatttagcaaacctttacttcctgttggaagagctggggtcttgctatctgaaatattgcacctactatgcaaacaaatgagccataagaaagtgggagccttatggagggaggctgacctcagctggaaggactttttaccagaaggagaagatgtacataattttcttttggagcagaagttggacttcatagagtctgacagtccctgttcctctgaagcactttcaaagaaagaactgtctgccgaagagctgtataagcgactcgagaaactcattattgaggacaaagcgaatgatgaacagatctttgactgggtagaggctaatctagacgaaatccagatgagttcacctacattccttagagctttaatgactgctgtttgtaaagcagctattatagccgactcttctaccttcagagtggacactgctgttatcaagcagagagtgccgatcttactcaagtacctagactcagatacagagaaggaactgcaagcactttatgcactacaagcatcgatagtaaaacttgatcaacctgccaatttgctgcggatgttttttgattgtctatatgacgaggaggtgatctccgaggatgccttctacaaatgggagagcagcaaggaccctgcagagcagaatgggaagggcgtggctctgaaatctgtcacggcattcttcacgtggctgcgggaagcagaagaggagtctgaggataactaaaacttcaaatacacaaaatgaaacaaaagaaacaatttaagtatttttttaaaaagtttcacgtcttcgccaatcacagtgcagcaaggccaattctcgcagaaacccccacgtgtgcacgagtgggagaggggaaagagaaaaaaaggtgatcatggaggaaaaaggtactggataaaagtaaacttcaaaccttagggcgggagcactaaaaccaaaatacatgtattatttatagaaaatattttctgttttaatcttttctttttaaacaaggactcatacttaaaaaaatgtttagcaaaaaaaaaaaaagttgagaacttttaatttattttaaggactgcaaatgccagtgtaattttttaatttgcagtttctgtaaacaacttgtataatagaaaagcagagaaataaatttccctccccttcaagatgcacctcatgtttgttttaaggtatagcatttagtccagatttgagaaagtttggggtgaacaaggtaagaaagatttttttttttttggcatcaaatctttctgcctgcctctcagcttgcttcagaaaatttaaaaaatcacaatagtaatcaaaacatacataacattgaaacagaaggaaatgctgtggaccacagaactccaagaattgtttaaaaaaaaaaaagtgctaccctgagaaaagtactcttaatactcttgaaatctttagagcaactttaaggcttgtaaatacatagaacaaatatttaaaaaaacaaaaagaaattgactcagtactatttcttttcactttgaaaatataaagaacaaaataaagacaaacattgcaagttt

SEQ ID NO: 2561 - DNA, 6175 bp, Homo sapiens
  source 1..6175: mol_type = genomic DNA
ctgctcgttgagtgaagaaaatccaccggcatcgcctgagccccgctaccgagaagggcgccgcttcctccggggagggggataaagatcccccgccgccggcccatgaggatattgccgtgaaaggcacagcgactgcagcaggaaccggacccggcaccggagcggcggcggcggcggcagcagcggtaccgcctcctcacccggcggcggcagcagcggcggcggcggcggcggcggcggcggcggcggcagcggtcccccctcctcacccgaacatcagggccctccagactcaggcgccccaacaaattcctagaggacctgtgcaacaacctcttgaggatcgaatcttcactcccgctgtctcagcagtctacagcacggtaacacaagtggcaagacagccgggaacccctaccccatccccttattcagcacatgaaataaacaaggggcatccaaatcttgcggcaacgcccccgggacatgcatcgtcccctggactctctcaaaccccttatccctctggacagaatgcaggtccaaccacgctggtataccctcaaacccctcagacaatgaattcacaacctcaaacccgttctccgtttttccagaggcctcaaatacagcctcctagagctaccatcccgaacagcagtccttccattcgtcctggtgcacagacacccactgcagtgtaccaggctaatcagcacatcatgatggttaaccatctgcccatgccgtacccagtgccccaggggcctcagtactgtataccacagtaccgtcatagtggccctccttatgttgggcccccccaacaatatccagttcaaccaccggggccaggtcctttttatcctggaccaggacctggggacttccccaatgcttatggaacgcctttttacccaagtcagccggtgtatcagtcagcacctatcatagtgcctacgcagcaacagccgcctccagccaagagagagaaaaaaactataagaattcgggatccaaaccagggaggtaaagacataacagaggagattatgtctggaggtggcagcagaaatcctactccacccataggaagacccacgtccacacctactcctcctcagcagctgcccagccaggtccccgagcacagccctgtggtttatgggactgtggagagcgctcatcttgctgccagcacccctgtcactgcagctagcgaccagaagcaagaggagaagccaaaaccagatccagtgttaaagtctccttccccagtccttaggctagtcctcagtggagagaagaaagaacaagaaggccagacatctgaaactactgcaatagtatccatagcagagcttcctctgcctccatcacctaccactgtttcttctgttgctcgaagtacaattgcagcccccacctcttctgctcttagtagccaaccaatattcaccactgctatagatgacagatgtgaactctcatccccaagagaagacacaattcctatacccagcctcacatcttgcacagaaacatcagaccctttaccaacaaatgaaaatgatgatgatatatgcaagaaaccctgtagtgtagcacctaatgatattccactggtttctagtactaacctaattaatgaaataaatggagttagcgaaaaattatcagccacggagagcattgtggaaatagtaaaacaggaagtattgccattgactcttgaattggagattctcgaaaatcccccagaagaaatgaaactggagtgtatcccagctcccatcaccccttccacagttccttcctttcctccaactcctccaactcctccagcttctcctcctcacactccagtcattgttcctgctgctgccactactgttagttctccgagtgctgccatcacagtccagagagtcctagaggaggacgagagcataagaacttgccttagtgaagatgcaaaagagattcagaacaaaatagaggtagaagcagatgggcaaacagaagagattttggattctcaaaacttaaattcaagaaggagccctgtcccagctcaaatagctataactgtaccaaagacatggaagaaaccaaaagatcggacccgaaccactgaagagatgttagaggcagaattggagcttaaagctgaagaggagctttccattgacaaagtacttgaatctgaacaagataaaatgagccaggggtttcatcctgaaagagacccctctgacctaaaaaaagtgaaagctgtggaagaaaatggagaagaagctgagccagtacgtaatggtgctgagagtgtttctgagggtgaaggaatagatgctaattcaggctccacagatagttctggtgatggggttacatttccatttaaaccagaatcctggaagcctactgatactgaaggtaagaagcagtatgacagggagtttctgctggacttccagttcatgcctgcctgtatacaaaaaccagagggcctgcctcctatcagtgatgtggttcttgacaagatcaaccaacccaaattgccaatgcgaactctggatcctcgaattttgcctcgaggaccagactttacaccagcctttgctgattttggaaggcagacacctggtggaagaggcgtacctttgttgaatgttgggtcacgaagatctcaacctggccaaagaagagaacccagaaagatcatcacagtttctgtaaaagaagatgtacacctgaaaaaggcagaaaatgcctggaagccaagccaaaaacgagacagccaagccgatgatcccgaaaacattaaaacccaggagctttttagaaaagttcgaagtatcttaaataaattgacaccacagatgttcaatcaactgatgaagcaagtgtcaggacttactgttgacacagaggagcggctgaaaggagttattgacctggtctttgagaaggctattgatgaacccagtttctctgtggcttacgcaaacatgtgtcgatgtctagtaacgctgaaagtacccatggcagacaagcctggtaacacagtgaatttccggaagctgctactgaaccgttgccagaaggagtttgaaaaagataaagcagatgatgatgtctttgagaagaagcagaaagaacttgaggctgccagtgctccagaggagaggacaaggcttcatgatgaactggaagaagccaaggacaaagcccggcggagatccattggcaacatcaagtttattggagaactctttaaactcaaaatgctgactgaagccatcatgcatgactgtgtggtgaagctgctaaagaaccatgatgaagaatccctggagtgcctgtgtcgcctgctcaccaccattggcaaagacttggactttgaaaaagcaaagccacgtatggaccagtactttaatcagatggagaaaattgtgaaagaaagaaaaacctcatctaggattcggttcatgcttcaagatgttatagacctaaggctgtgcaattgggtatctcgaagagcagatcaagggcctaaaactatcgaacagattcacaaagaggctaaaatagaagaacaagaagagcaaaggaaggtccagcaactcatgaccaaagagaagagaagaccaggtgtccagagagtggacgaaggtgggtggaacactgtacaaggggccaagaacagtcgggtactggacccctcaaaattcctaaaaatcactaagcctacaattgatgaaaaaattcagctggtacctaaagcacagctaggcagctggggaaaaggcagcagtggtggagcaaaggcaagtgagactgatgccttacggtcaagtgcttccagtttaaacagattctctgccctgcaacctccagcaccctcagggtccacgccatccacgcctgtagagtttgattcccgaaggaccttaactagtcgtggaagtatgggcagggagaagaatgacaagccccttccatctgcaacagctcggccaaatactttcatgaggggtggcagcagtaaagacctgctagacaatcagtctcaagaagagcagcggagagagatgctggagaccgtgaagcagctcacaggaggtgtggatgtggagaggaacagcactgaggctgagcgaaataaaacaagggagtcagcaaaaccagaaatttcagcaatgtcagctcatgacaaggctgcattatcagaagaggaactggagaggaagtcgaaatctatcattgatgaatttctacacattaatgattttaaggaagccatgcagtgtgtggaagagctgaatgcccagggcctactacatgtttttgtgagagtgggagtggagtccaccctggaaaggagccagatcaccagggatcacatgggccaattactctatcagctggtacagtcagaaaaactcagcaaacaggactttttcaaaggtttttcagaaactttggaattggcagatgacatggccattgatattccccatatttggttgtaccttgctgaactggtgacccccatgttaaaagaaggtggaatctccatgagagaacttaccatagaatttagcaaacctttacttcctgttggaagagctggggtcttgctatctgaaatattgcacctactatgcaaacaaatgagccataagaaagtgggagccttatggagggaggctgacctcagctggaaggactttttaccagaaggagaagatgtacataattttcttttggagcagaagttggacttcatagagtctgacagtccctgttcctctgaagcactttcaaagaaagaactgtctgccgaagagctgtataagcgactcgagaaactcattattgaggacaaagcgaatgatgaacagatctttgactgggtagaggctaatctagacgaaatccagatgagttcacctacattccttagagctttaatgactgctgtttgtaaagcagctattatagccgactcttctaccttcagagtggacactgctgttatcaagcagagagtgccgatcttactcaagtacctagactcagatacagagaaggaactgcaagcactttatgcactacaagcatcgatagtaaaacttgatcaacctgccaatttgctgcggatgttttttgattgtctatatgacgaggaggtgatctccgaggatgccttctacaaatgggagagcagcaaggaccctgcagagcagaatgggaagggcgtggctctgaaatctgtcacggcattcttcacgtggctgcgggaagcagaagaggagtctgaggataactaaaacttcaaatacacaaaatgaaacaaaagaaacaatttaagtatttttttaaaaagtttcacgtcttcgccaatcacagtgcagcaaggccaattctcgcagaaacccccacgtgtgcacgagtgggagaggggaaagagaaaaaaaggtgatcatggaggaaaaaggtactggataaaagtaaacttcaaaccttagggcgggagcactaaaaccaaaatacatgtattatttatagaaaatattttctgttttaatcttttctttttaaacaaggactcatacttaaaaaaatgtttagcaaaaaaaaaaaaagttgagaacttttaatttattttaaggactgcaaatgccagtgtaattttttaatttgcagtttctgtaaacaacttgtataatagaaaagcagagaaataaatttccctccccttcaagatgcacctcatgtttgttttaaggtatagcatttagtccagatttgagaaagtttggggtgaacaaggtaagaaagatttttttttttttggcatcaaatctttctgcctgcctctcagcttgcttcagaaaatttaaaaaatcacaatagtaatcaaaacatacataacattgaaacagaaggaaatgctgtggaccacagaactccaagaattgtttaaaaaaaaaaaagtgctaccctgagaaaagtactcttaatactcttgaaatctttagagcaactttaaggcttgtaaatacatagaacaaatatttaaaaaaacaaaaagaaattgactcagtactatttcttttcactttgaaaatataaagaacaaaataaagacaaacattgcaagttt

SEQ ID NO: 2562 - DNA, 3731 bp, Homo sapiens
  source 1..3731: mol_type = genomic DNA
cttggcccgggctgctgggagtccccggcggggcgggggtcagctctggtcccgttggtcctgggcgcggcgccatggcctccgaggcggtgaaggttgtcgtgcgctgccgtcccatgaaccagcgggagcgagagctgcgctgccagcccgtggtgactgtggactgcgcgcgcgcccagtgctgcatccagaacccgggcgccgccgacgagccgcccaagcagttcaccttcgacggcgcctaccacgtggaccacgtcaccgagcagatctacaacgagatcgcctatccgctggtggagggcgtcactgagggctacaatggcaccatctttgcctacggccagacaggcagcgggaagtccttcaccatgcagggcctgccggatccgccctcccagagaggcatcatccccagggccttcgagcacgtgttcgagagcgtccagtgtgcagagaacactaagttcctggtccgggcctcctacctggagatctacaatgaagatgtccgggacctccttggggctgacaccaagcagaagctggagctgaaggagcacccagagaagggcgtgtacgtgaaggggctgtccatgcacacggtgcacagcgtggcccagtgtgagcacatcatggagactggctggaagaaccgttcggtcggctacacgctgatgaacaaggattcctcacgctcgcactccatcttcaccatcagcatcgagatgtctgccgtggatgagcggggcaaggaccacctccgggcgggcaagctgaacctggtggacctggcgggcagcgagcggcagtccaagaccggggccacgggcgagcggctcaaggaggccaccaagatcaacctgtcgctctcggcactgggcaatgtcatctcggcgctggtggacgggcgctgtaagcacgtcccctaccgtgactcgaagctgacgcggctgctgcaggactcactgggcggcaacaccaagacgctcatggtggcctgcctgtcgcctgcggacaacaactacgatgagacactcagcacgctgcgctacgccaaccgggccaagaacatcaggaacaagccgcgcatcaatgaggaccccaaggatgcgctgcttcgcgagtaccaggaggagatcaagaagctcaaggccatcctgacacagcagatgagccccagcagcctgtcagccctgctgtccaggcaggtgcccccagaccctgtgcaggtggaggagaagctgttgccccaacctgtgatccagcatgacgtggaggccgagaagcagctgatccgggaggagtatgaagagcgcctggcccggctgaaagccgactataaggccgagcaggagtctcgggccaggctggaggaagacatcactgccatgcgcaactcatatgacgtcaggctgtccacgctggaggagaacctgcggaaggagacagaggctgtcctgcaggtgggagtcctctacaaggctgaggtcatgtccagggctgagtttgccagcagcgctgagtacccgcctgcttttcagtatgagacagtggtgaaacccaaggtcttctccacgactgacactctgcccagtgacgatgtctccaagactcaggtttcctccaggtttgcggagctgcccaaggtggaaccctccaaatctgagatttctctgggctccagtgagtcatcctcgctcgaagaaacctctgtgtccgaggctttccctgggcctgaggagccctccaacgtggaggtctccatgcccactgaggagtccaggagcagatacttcctggatgagtgcctcgggcaggaggccgctgggcacctgctgggggaacagaactacctcccgcaagaggagccgcaggaggtgcccctgcaggggttactaggcctgcaggacccgtttgccgaggtggaagccaagctggccagactctcctccaccgtggccaggacagatgcaccccaggcagacgtccccaaggtccctgtgcaggtccctgcgccgacagacctgctggagcccagtgatgccaggcccgaagccgaggcggctgatgacttcccgcccaggcctgaggtagatctggcctcggaagtggccttagaggtggtgcggacagcagagcctggcgtgtggttggaggctcaggccccggtggccctggtggctcagcctgagcccctgccggccacagctggtgtgaagagggagagcgtgggcatggaggtggcagtgctgactgatgacccgctgcccgttgtggaccagcagcaggtgctggcccgtctgcagctgttggagcagcaggttgtgggtggagagcaggccaagaacaaggacctgaaggagaagcacaagcggcgcaagcgctacgcagacgagcgcaggaagcagctggtggctgccctgcagaactcggatgaggacagcggggactgggtgctgcttaacgtctacgactccatccaggaggaagtgcgggccaagagcaagctgctggagaagatgcagaggaagcttcgggcagcagaggtggagatcaaagatctgcagtccgagtttcagctggagaagatcgattacttggccaccatccgccggcaggagcgtgactccatgctcttgcagcagctcctggagcaggtgcagcccctgattcgcagggactgtaactacagcaacctggagaagattctgcgtgagtcctgctgggacgaagataacggcttctggaagatcccacatcccgtcatcacaaaaaccagcctcccagtagtttcaactgggccacagaacaaaccagcccgcaaaacctctgcagcagacaatggcgagccgaacatggaggacgaccgctacaggctcatgctcagtcggagcaacagtgaaaacattgccagcaactacttccgatctaagcgggccagccagatcctcagcacagacgccaggaagagcctcacacatcacaactcgccaccaggcctcagctgcccactcagcaacaactctgccatcccacccacccaggcccctgaaatgccccagccccggcccttccgcctcgagtccctcgacatccctttcaccaaggccaagcgtaagaaaagcaaaagcaactttggcagtgagcctctgtgagcacagctgcttgccattgcctgccttataggcatgtagagactgccaggccctcccagggcagccccaaccaggtctcctcccacctgccacacagcgctccggggcctgagggctccctcagccctgggaagacacattcccttccctgttccccagagagcccacctccgccctgggcaggagcccctcggaggctgtatagtcctccttagagaggcctgctccagctgttcataccacatcagtgtttccgtctgctcacctgccacagagcccacacccatgcccaccagtgttggtctttgcctcaaagcctgagacctgcttcacggccttcaccagccctgatggagagggcagcagctgccacgtggaggaagctcaatatcagctgggaaggaactgtgcctctgtctgactggccccacttcctaagcactgccctgccccatggggtggcacaggggtcccacagcaggtcttcctgcactgcccacccctggctggtctgtggcccaaggaaggccactccacattaagctgcccaataaactgcttttaagataa

SEQ ID NO: 2563 - DNA, 1544 bp, Homo sapiens
  source 1..1544: mol_type = genomic DNA
gtgcttatgagataaacgacagggtaactgtccacattggtcccagtttatgagggagaagagatcataatctacaaaaatttgcaaggtgaccaggggaaaagagtacggcgcctcatctcccagagatcttccttggagaccctggaagatattgaggagaacgcccctctccggagatgtcgaactctctcaggttcacccagaccaaagaattttaagaagattcattttatcaagaacatgcggcaacacgataccaggaatggcagaatagtccttatcagtggcagaagatccttctgtagtatattttcagtgctgccgtatcgcgacagtacccaagtcggggacttgaagttggacggaggaagacaatcaactggtgcagtgagtttgaaagagatcattggtctggaaggtgtggagctgggtgctgatgggaagactgtttcctatacccaatttctgttacccacaaatgcctttggagcccggagaaataccatagactccacctcctctttctcccagttccgtaacctgagccaccgcagcctctccataggccgggcaagcggcacccaggggagcctcgacacaggtagtgacctgggagactttatggactatgacccaaatctcttggatgacccccagtggccttgtggcaaacacaaacgcgttctgatcttcccttcctacatgacaacagtgattgactacgtgaagccctcggatctcaagaaggacatgaacgagaccttcaaggagaagtttcctcacattaagctgacactcagcaaaattaggagtctgaaacgagagatgcggaagcttgcgcaggaggactgtggccttgaggagcccacggtggccatggccttcgtctactttgaaaagctcgccctcaaggggaaactcaacaaacagaaccggaagctgtgtgctggggcatgtgtgctgttagcagccaaaattggaagtgacctcaaaaaacacgaagtcaagcatttaattgacaaactggaagagaagttccggctgaacaggcgagaactgattgcctttgaattcccggtgttagtggccttggaattcgccctccacttgcccgagcacgaagtcatgccccactacagacggctggtccagagttcctagcactggccccgaggacagccaagggccatttcttctcagcttggtggagcagcacttacttactactggaaatgaaaaaaagtagaactcagaataccagacttttcttcctctcgacatagtttggggagaagcagtactagaaactttccaaggagtcttgggtgtgtagccaagaggagccatgagctatggactcctcaagcacgggaagaggaggtgtgtgctgagaacagagaggccctgccctctgtccactagcgagaatccctagctgccccagcccagtctttctccccggcattcacaaactttgcaagcgtggtccagggccttctccagatctgttccaacttggagtgtgaagggcttgagcatac

SEQ ID NO: 2564 - DNA, 4246 bp, Homo sapiens
  source 1..4246: mol_type = genomic DNA
agggctccacagtcgttccgccacctcccagtcgggttgcggcggaggccgttcctggctttgtagctcgctcaagatggcggcgcagccaccccgcgggatacgcctcagcgcgctttgcccgaagtttttacatacaaattctactagtcacacctggccattcagtgcagttgctgaattaatagataatgcttatgatcctgatgtgaacgctaaacaaatatggattgacaaaacagtgataaatgaccatatatgcttgacattcaccgacaatgggaatggtatgacttctgataaattacataaaatgctaagctttggcttcagtgacaaagtcaccatgaatggtcatgtcccagttggattatatgggaatggcttcaagtcgggttctatgcgtctgggtaaagacgcaatcgtttttaccaaaaatggagaaagcatgagcgtgggccttttgtctcagacctacttggaagtcataaaagcggagcatgttgttgttccaatagtggcattcaacaagcaccgacagatgattaatttagcagaatcaaaagccagccttgctgcaattctggaacattctctgttttccacggaacagaagttactggcagaacttgatgctattataggcaagaaggggacgaggatcatcatttggaatcttagaagctacaaaaatgcaacagagttcgattttgaaaaggataaatatgatatcagaattcccgaggatttagatgagataacagggaagaaggggtacaagaagcaggaaaggatggaccagattgcccctgagagtgactattccctgagggcttattgcagtatattatatctaaagccaagaatgcagatcatcctacgtggacagaaagtgaagacacagctggtttcgaagagtcttgcctacatcgaacgtgatgtttatcgaccaaaatttttatctaaaacagtgagaattacctttggattcaactgcagaaataaagatcattatgggataatgatgtatcacagaaatagactcatcaaagcttatgaaaaagttggatgtcagttaagggcaaacaacatgggtgttggagtggttggaattatagagtgtaatttccttaagccaactcataataaacaagatttcgactatactaatgagtacagacttacaataacagcactaggagaaaagctgaatgattactggaatgaaatgaaagtgaagaaaaatacagaatatcctctaaatttgccagttgaagatatacagaagcgtcctgatcagacatgggttcagtgtgatgcctgtctaaagtggcggaaattacctgatgggatggatcaacttcctgaaaaatggtattgctccaataaccctgacccacagttcagaaattgtgaggttccagaagaacctgaagatgaggatttggtacatcccacttatgaaaaaacctacaaaaagaccaacaaggaaaaattcaggatcagacaaccggaaatgatccctcggattaatgctgaactgttgtttcggccaactgctctttcaactccaagcttttcttctcctaaggaaagtgttccaagaagacatctttcagaaggaacaaattcttatgcgacaagacttctaaataatcatcaagttccacctcagtctgaacctgagagcaacagcttgaaacggagactttctactcgttcctcaattttgaatgcaaagaatcggagattgagtagtcagtttgaaaattcagtttataaaggtgatgatgatgatgaagatgtcatcatcttagaagaaaacagtacccccaaacctgcagtagatcatgatattgacatgaaatcagaacagagtcacgttgagcaaggtggtgttcaggttgagtttgtgggtgacagtgaaccttgtggccagactggttcaacaagcacctcatcatcccgatgcgaccagggaaatactgcagctacccagactgaagtaccaagtttagttgttaaaaaagaagaaactgttgaagacgagatagacgtaagaaatgatgcagtgattctgccctcctgtgtagaagctgaagcaaagatacatgaaacccaggaaaccaccgataaatctgcagatgatgcaggctgccaattacaagaactgagaaaccagctactccttgtcactgaggaaaaagagaattataaaagacagtgtcatatgtttactgatcaaatcaaagtgttacaacagaggatactagaaatgaatgacaagtatgttaagaaagaaacttgccatcagtccactgaaaccgatgctgtatttttacttgaaagtattaatggcaaatctgaaagtccagaccatatggtatctcagtatcagcaagctttggaagaaatagaaaggctgaaaaaacaatgtagtgctttgcaacatgtaaaggctgaatgcagccagtgttccaataatgagagtaaaagtgaaatggatgagatggctgtgcagcttgacgatgtgtttagacaactggacaaatgcagtattgagagggaccagtataaaagtgaggttgaattgctggaaatggaaaagtcacaaatccgttcacagtgtgaagaactcaaaactgaagtagaacagttaaaatctacaaatcaacagacggcaacagatgtttcaacatcaagtaacattgaggagtctgtaaatcatatggatggagaaagcctcaaactccgatctcttcgagttaacgtaggacaactgctggctatgattgtgcctgatcttgatcttcagcaagtgaattacgatgttgatgtagttgatgagattttaggacaagttgttgaacaaatgagtgaaatcagtagtacttaaagtatatgttatgtaagataaaatatttgctcaattcttttggttgtacagctttcaaaatataattaattttgttttatagatatgataggcaacagactgaaaaccataatctttactgtattctatgcattcaaatgtggtcacaaatattgtggacacattatcttatgttttgaaatacctgtgaattgttggcattgagcagctgaagctaactcatgactctgttttgaatgtaaatatttgtaattaagcctgcacatatttttttattgccctagagtactcaagtgtttttcaccaagagcttttcaggttgcccctaagctttgtgcaattttttctggttccccaaagtgtatttttctctaagtcgagggctatgccataatacaaatggaaatgttacctttgattttcttataaaggagtttaaataggatttttaaataatgtagtaacactcctgatacaactctggttataagtgaattgagcattaatgtttcttttgtataaattcctgtcctgaaatattttattcatgaaaataaggtaagcaaaaaccaactccattttgccaggattttgttgtgctgagattgccaatcacggttaaacacaaagtgtttttatagaatgaagaaacagtctttaacagaaaaaaggtattgaaatattaaatggccaccaagtttactttgaagcccatttttggctgtttagtcagcatgaagtgggcatgataattttttaatatttctttttgtgaaatttcctgtacagccttttgtaggattactacaggttaatgtgagttgaggaagacagtctttctcaaacaatactacataccttttattatattacaaacctaagtgttttatatcctagagtcaaggaacaaatttccttaggattatagtattacatgccataaaatactatgctttattggtcccatgttttgtgcaattttaaagagatggctttctattaagtataaactatgtatatataagaaccatattttccacaactaaaatgtgcattattttttccaaagttttatcattgctatttatttttacctttgtttttgaacattcaatccgttcattttgtatgtatgcttaatacgtgtcggtcatatacagtattgaatttttactgtatagtaattctggaaagagcaaataaatgaagattgtttttatttgcctgataaagtaattgaaagtgtatttttggtatgaagctggttttctgtcacaattgtaatttcccaaattttaaaatatcttataataaaataaaaatatatgatggctaactgttcaaatgcta

SEQ ID NO: 2565 - DNA, 3390 bp, Homo sapiens
  source 1..3390: mol_type = genomic DNA
ctggcggttctacctccgagggttcgcccgcccttggttttccttacaccttagcctttggctcctttgaccactcgaagccccacagcgtgttccagcggacttcaccagcagacccagaagtggtgggtgaaacactgcctctgttcctccttgagcctgtcgggagctgctgcctgccaccaccatgtctgctgcaaatcctgagactccaaactcaaccatctccagagaggccagcacccagtcttcatcagctgcagctagccaaggctgggtgttaccagaaggcaaaatcgtgccaaacactgtttttgttggtggaattgatgctaggatggatgaaactgagattggaagctgctttggtagatacggttcagtgaaagaagtgaagataatcacgaatcgaactggtgtgtccaaaggctatggatttgtttcgtttgttaatgacgtggatgtccagaagatagtaggatcacagatacatttccatggtaaaaagctgaagctgggccctgcaatcaggaaacaaaagttatgtgctcgtcatgtgcagccacgtcctttggtagttaatcctcctcctccaccacagtttcagaacgtctggcggaatccaaacactgaaacctacctgcagccccaaatcacgccgaatcctgtaactcagcacgttcaggcttactctgcttatccacattcaccaggtcaggtcatcactggatgtcagttgcttgtatataattatcaggaatatcctacttatcccgattcagcatttcaggtcaccactggatatcagttgcctgtatataattatcagccatttcctgcttatccaagatcaccatttcaggtcactgctggatatcagttgcctgtatataattatcaggcatttcctgcttatccaaattcaccatttcaagtcgccactggatatcagttccctgtatacaattatcagccatttcctgcttatccaagttcaccatttcaggtcactgctggatatcagttgcctgtatataattatcaggcatttcctgcttatccaaattcaccatttcaagtcgccactggatatcagttccctgtatacaattatcaggcatttcctgcttatccaaattcaccagttcaggtcaccactggatatcagttgcctgtatacaattatcaggcatttcctgcttatccaaattcaccatttcaagtcgccactggatatcagttccctgtatacaattatcaggcatttcctgcttatccaaattcaccagttcaggtcaccactggatatcagttgcctgtatacaattatcaggcatttcctgcttatccaaattcagcagttcaggtcaccactggatatcagttccatgtatacaattaccagatgccaccgcagtgccctgttggggagcaaaggagaaatctgtggaccgaagcatacaaatggtggtatcttgtctgtttaatccagagaagagactgataaattccgttgttactcaagatgactgcttcaagggtaaaagagtgcatcgctttagaagaagtttggcagtatttaaatctgttggatcctctcagctatctagtttcatgggaagttgctggttttgaatattaagctaaaagttttccactattacagaaattctgaattttggtaaatcacactgaaactttctgtataacttgtattattagactctctagttttatcttaacactgaaactgttcttcattagatgtttatttagaacctggttctgtgtttaatatatagtttaaagtaacaaataatcgagactgaaagaatgttaagatttatctgcaaggatttttaaaaaattgaaacttgcattttaagtgtttaaaagcaaatactgactttcaaaaaagtttttaaaacctgatttgaaagctaacaattttgatagtctgaacacaagcatttcacttctccaagaagtacctgtgaacagtacaatatttcagtattgagctttgcatttatgatttatctagaaatttacctcaaaagcagaatttttaaaactgcatttttaatcagtggaactcaatgtatagttagctttattgaagtcttatccaaacccagtaaaacagattctaagcaaacagtccaatcagtgagtcataatgtttattcaaagtattttatcttttatctagaatccacatatgtatgtccaatttgattgggatagtagttaggataactaaaattctgggcctaattttttaaagaatccaagacaaactaaactttactgggtatataaccttctcaatgagttaccattcttttttataaaaaaaattgttccttgaaatgctaaacttaatggctgtatgtgaaatttgcaaaatactggtattaaagaacgctgcagcttttttatgtcactcaaaggttaatcggagtatctgaaaggaattgtttttataaaaacattgaagtattagttacttgctataaatagatttttatttttgttttttagcctgttatatttccttctgtaaaataaaatatgtccagaagaggcatgttgtttctagattaggtagtgtcctcattttatattgtgaccacacagctagagcaccagagcccttttgctatactcacagtcttgttttcccagcctcttttactagtctttcaggaggtttgctcttagaactggtgatgtaaagaatggaagtagctgtatgagcagttcaaaggccaagccgtggaatggtagcaatgggatataatacctttctaagggaaacatttgtatcagtatcatttgatctgccatggacatgtgtttaaagtggctttctggcccttctttcaatggcttcttccctaaaacgtggagactctaagttaatgtcgttactatgggccatattactaatgcccactggggtctatgatttctcaaaattttcattcggaatccgaaggatacagtctttaaactttagaattcccaagaaggctttattacacctcagaaattgaaagcaccatgactttgtccattaaaaaattatccatagtttttttagtgcttttaacattccgacatacatcattctgtgattaaatctccagatttctgtaaatgatacctacattctaaagagttaattctaattattccgatatgaccttaaggaaaagtaaaggaataaatttttgtctttgttgaagtatttaatagagtaaggtaaagaagatattaagtccctttcaaaatggaaaattaattctaaactgagaaaaatgttcctactacctattgctgatactgtctttgcataaatgaataaaaataaactttttttcttca

SEQ ID NO: 2566 - DNA, 5847 bp, Homo sapiens
  source 1..5847: mol_type = genomic DNA
ggcattatgcaattatattactaaggctgctacctgcccatgcccctctcctcctcctggtttggaactaccctccccatctgctgctatatttatctgccttcttggccataaaaggctggttgtgtggcctgacattcgactgcctgaccacatgcattatttttgaactggcccccagggtcctgtctttagccctgcctcttaacattgtcttggattcaacctaggtggagtcttcattctctcatccagctcctcggcctcatcggaacatttccaccaccattactcctttggaaactggtggcccggttccttcaaggggcacaggatgtctttgcctttttatcagaggtgccaccagcactatgatctcagctaccgcaacaaggacgtgcgcagcaccgtgagtcactaccagcgggagaagaaacgctccgccgtctacacccagggctccacggcctacagcagccgctcctccgccgcgcaccgccgggagtccgaggccttccgtcgggcgtccgcctcctcctcccagcagcaggcctcgcagcacgccctgagctctgaagtcagtcggaaggcagcctcagcctacgattatggctcctcccatggacttacagattccagtctgctgttagatgattattcatccaagttgagccccaaaccaaagagagccaagcacagcctactgtctggagaagagaaagaaaatttgcccagtgactacatggtacccattttctcaggacgtcaaaagcatgtcagtggaattactgatacggaagaagaaagaattaaagaagctgctgcttatatagcccagaggaatcttcttgctagtgaggaaggaatcacaacatctaaacagtccacggcatccaagcagaccacggcatctaagcagtccacggcatccaagcagtccacagcatccaagcagtccacggcatccaggcagtccacggcatccaggcagtctgtggtttccaaacaggccacatccgctcttcaacaggaagaaacttctgaaaagaagtcaaggaaagttgtgattcgagaaaaggcagaacgcctgtccctgaggaaaacattagaagaaaccgagacatatcatgccaagctgaatgaagaccatcttctccatgctcctgagtttatcattaaacctcgctcccacacggtttgggagaaggagaatgtaaaattgcattgctccatagcaggctggccagaacctcgtgtcacgtggtataaaaaccaggtgccaataaatgtccatgcaaaccctggaaagtatattattgagagtcgatatgggatgcacactctggagattaatggatgtgattttgaagatacagctcagtaccgggcctcggcgatgaatgttaaaggagagctttcggcatatgcttcagttgtggtaaaaaggtataagggagagtttgatgagactcgcttccacgctggggcttccaccatgcccctcagctttggtgtgaccccatatggttatgcatcccggtttgagatccactttgatgacaaatttgatgtgtcttttgggagagagggagagacaatgagtctaggctgtcgtgttgtcatcactcctgaaattaaacatttccagccagagatccagtggtacagaaacggagtacctctttctccatcaaaatgggtgcaaacactttggagtggagagcgggcaacgctgacattttcccatctcaacaaagaagatgaaggcctctatacaatccgtgtacggatgggagaatattatgaacaatatagtgcttatgtctttgttcgagatgctgatgcagagattgaaggagccccagctgctcccttggatgtgaagtgcttggaggccaacaaagattatatcatcatctcctggaaacagccagctgtcgatggagggagtcctattctcggatattttattgataagtgtgaggtgggcacagatagctggtcgcagtgcaatgacacacctgtgaagtttgctcgttttcctgtcactggattgatcgaaggtcgttcctatatcttccgagttcgagctgtgaataaaatgggaataggtttcccatctcgagtttccgagcccgtggctgctctggatccggctgagaaagctagacttaaaagtcgcccctcagcaccctggactggacagatcattgttactgaagaggaaccttcagagggtattgtgcctggccccccgacagacctctctgtcactgaggccacccggagctatgtggtgctcagctggaagccccctggccagcgtggtcatgagggcattatgtactttgtggaaaagtgtgaggcaggaacagaaaactggcagcgagtgaacacggagctccctgtgaagtctccccgctttgctctgtttgacttggccgaggggaaatcctactgtttccgtgtccgctgttctaattctgcaggagttggtgagccctcagaggcaacggaggtgactgtggtaggggacaaacttgatatccccaaggctcctggcaaaatcatcccaagcagaaacacagacacctcagtggtagtttcgtgggaggagtccaaagatgccaaagagctggtcgggtactacatagaggcgagcgttgctggctctggcaagtgggagccctgtaacaacaaccccgtgaagggctcacgattcacttgtcatggattagtgactggtcagagttatattttccgggtcagagcagtcaatgcagctggacttagtgaatattcccaggattcagaagctattgaagtcaaagctgctattgggggaggagtgtctccagatgtgtgtcccgcactgagcgatgagcctggtggactaaccgcctccagggggcgcgtgcatgaagcctccccgccaaccttccagaaagatgctttgcttggcagcaaacctaacaaaccttcactacccagtagctctcaaaacctgggccaaacagaagtgagtaaagtaagtgaaacagttcaggaagagcttaccccgccaccacagaaagcggctcctcaggggaaaagtaagtctgaccccctgaaaaagaagacagacagagcaccaccatctccaccctgtgatatcacctgtcttgaaagttttcgtgactcaatggttcttggatggaagcaaccagataagattggaggggcagaaattactggctattatgtgaactatcgcgaggtcattgatggggtaccaggaaaatggagagaagccaatgtcaaggctgtcagtgaggaggcatacaagattagcaacttgaaggaaaacatggtgtatcagttccaagtggcagccatgaacatggctgggctgggcgcgccctccgcagtaagcgaatgcttcaaatgtgaagagtggaccatcgccgtcccaggaccaccgcacagtctcaagtgtagtgaagtcaggaaagactcactggttctccagtggaagccgccagtccactccgggcggactccggtcactggttacttcgtggacttgaaggaggccaaggccaaagaagaccagtggcgagggctcaatgaggcggctattaaaaacgtatacctgaaggttcgaggcctcaaggagggcgtcagctacgtgttccgtgttcgagccataaaccaggcgggagttgggaagccatctgaccttgctggccctgttgtggcagagacccgtccaggaaccaaagaggttgttgtaaatgtggatgatgatggagtcatttcattgaacttcgagtgtgataagatgactccaaagtccgagttctcctggtccaaagattatgtatccactgaggactctccacgattggaagtcgaaagcaagggcaacaagacgaaaatgaccttcaaagaccttgggatggatgacttgggtatttactcttgcgatgtaacagacactgatggaatagcatcaagctacttaatagatgaggaagaattgaaacgtttacttgctctcagccatgaacacaagttcccaactgtcccagttaaatcagagttggcagttgaaattttggagaaaggccaggtccggttttggatgcaggctgagaaactgtctggcaatgccaaagtcaactacatatttaacgagaaggaaatttttgaaggcccgaaatataaaatgcatattgaccgaaacactggcatcatcgaaatgttcatggaaaagctacaggatgaggatgagggaacgtacactttccagcttcaagatggaaaagcaactaaccattctactgttgttctcgttggagatgttttcaaaaagctccagaaagaagctgaattccagcggcaagaatggatcaggaaacaaggtcctcactttgttgagtatttgagctgggaagtgactggtgaatgtaatgtactattgaaatgcaaggtggcaaatattaagaaggagactcatattgtgtggtacaaagatgagagggagatatcagtggatgaaaagcatgactttaaggatggtatatgtaccctgcttataacagagttttccaagaaagatgctgggatttatgaagttatcctgaaagatgaccgaggaaaagataagagcagactgaagcttgtggatgaagcctttaaggaactgatgatggaagtatgcaaaaaaatagctttgtctgctacagacctgaaaatccagagcacagccgagggcatccaactgtactcttttgtaacttactatgtggaggatttgaaagttaactggtcccacaatgggtccgccattaggtactcagacagagttaagaccggggtcactggagagcagatctggctacaaatcaacgagcccaccccgaatgacaaagggaagtatgtcatggagctctttgatggcaaaactggacatcagaagacagtggatctctctggacaagcatacgatgaggcctatgctgaattccagaggttgaaaaagagccttttatttcagaaagatcgtgcccgggtgttgggaggtctcccagacgtggtcaccatccaggaggggaaggcccttaatctcacttgcaacgtgtggggagacccgcctccggaggtgtcgtggttgaagaacgagaaggccctggcctcagacgaccactgcaacctcaagttcgaggctgggaggaccgcgtacttcaccatcaacggcgtgagcaccgctgactcgggcaaatacgggctggttgtgaagaacaagtatggctcggagaccagcgacttcaccgtcagcgtgttcatcccagaggaggaggcgaggatggccgccttggagtccctgaaaggtggcaagaaggccaagtgaccggaggtgcgaggagagccagccggcctgtgtgacttgggtgtgaatggtttgggttaaggatgagacgtcttcatgctttctcctccctattattttctggcttgaggggaaaataatgtcaggtctttcactcatataaaaaagcaccaactaatgacactttaattgtttttctttatctacaaaattatgtgttaagaaaataccattcatagcatgaagattaggaaacagttttaaggagaagacttgaatgaagttggagggacattgaatgatggtcagagggcagacgaatgtgtcgtggggcgaattgggatttgctgcagctgtgaagccatggccgtgtctcgtgtgttgttacagaggtgatgtgcttttcgacgggcgcctcgtggcttggaacctcctctgtatgaataaacagttttcacgtctgtcctcttccccga

SEQ ID NO: 2567 - DNA, 9884 bp, Homo sapiens
  source 1..9884: mol_type = genomic DNA
agaatgcagcgcatggcgcgtcattgaagagagaccatgatggcggcggcgctggggcccccagaagtgatcgctcagctggagaacgcggctaaagttctgatggcaccaccttccatggtcaataatgaacaacgccagcatgcagagcacatattcttatcatttaggaaatcaaaatcaccatttgcagtttgcaagcatattttggaaactagtaaagtggactatgtcctctttcaagctgccacagccataatggaagcagttgtccgagagtggattctcttggaaaaaggtagcatcgagtctctgcgaacattccttttaacctatgtcttacaaaggcccaaccttcaaaagtatgttcgggaacagattctactagcagtagcagtaattgtaaaaagaggatcattagataaatcaattgactgcaaaagcatttttcatgaagtcagccagttgattagtagtggcaatcccactgtgcaaactctggcctgttctattctgactgcgctattgagtgaattttcaagttcaagtaaaactagcaacattggattgagcatggaattccatggtaactgcaaaagagtttttcaggaagaagaccttcgtcagatcttcatgttaactgttgaagttctgcaggagttcagcaggcgggaaaacctcaatgctcagatgtcttcagtatttcagcgttaccttgcactcgccaatcaagtcttgagctggaactttcttcctccaaaactgggcagacattatatagctatgtttgaatcctcgcaaaatgtgctgttgaagccaacagagtcctggcgggagactcttctggacagcagagttatggagcttttcttcacagtacatcgaaaaatcagagaagattcagatatggcacaagattctctgcagtgccttgcccagttagcttctcttcatggacccatcttcccagatgaaggatcacaagttgattatctagcacacttcattgagggattactgaatactatcaatggaattgaaatagaagattctgaagctgtggggatctccagcattatcagcaacctgataaccgtgttcccacgaaatgttttaactgccattccaagtgaacttttctcctcctttgttaactgcctcacacacctcacttgttcttttgggcgaagtgctgcattggaagaagtgcttgataaagatgacatggtatacatggaagcatatgataaattgttggagtcctggttaactttggttcaagatgacaaacatttccataaaggcttttttacccaacatgcagttcaagttttcaattcctatattcagtgccacctagctgctccagatggcacaagaaatttgactgccaatggtgtggcctctcgtgaggaggaagaaataagtgaacttcaagaggatgatcgagaccagttttctgatcaactggccagtgtaggaatgctaggaagaattgctgcagaacactgtatacctcttctgacaagtttattagaagaaagagtaacaagactccatggtcagttacaacgacatcagcaacagttacttgcttcaccgggttcaagcactgttgacaacaaaatgcttgatgatctctatgaagatattcactggcttattttagttacaggctacctcttagctgatgatactcagggagagactccgctaatacctccagaaataatggaatattccattaagcattcatctgaagttgacattaatacaacacttcaaattttgggatctccaggagaaaaggcttcttccatcccagggtacaacagaacagattctgtgattaggctgttgtctgccattctcagagtttcagaagttgaatctcgagcaataagagcagatctcactcatctactaagtccccagatgggcaaagatattgtttggtttttaaaacgctgggcaaagacttatctcctggtggatgaaaaactgtatgatcagataagtctgccattcagtacagcgttcggagcagatacagagggttctcagtggataattggctacctcttacaaaaagtcatcagtaacctctcagtctggagtagtgagcaggaccttgcaaatgacactgtgcagctccttgtcactttggtggaaagaagagaaagggcaaacttagtaattcaatgtgagaactggtggaatttagctaagcagtttgcaagccgaagcccacctcttaatttcttgtcaagtcctgtgcagaggacattgatgaaggctctagtcttaggaggttttgcacatatggacacagaaaccaaacagcagtattggacagaggttcttcagccacttcagcagcgattcttaagagtgataaaccaagaaaacttccagcagatgtgtcagcaagaggaagtcaagcaggaaatcactgccacactagaggccctgtgtggcattgctgaggctacccagattgacaacgtagcaatcctgtttaattttttaatggacttccttaccaattgcattggattgatggaagtttacaagaataccccagagactgtcaatctcattatagaagtttttgttgaagttgcacataaacagatatgctatcttggagagtccaaagctatgaacttatatgaagcctgccttactttgttgcaagtgtattctaagaataatttagggcggcaaagaatagatgttacagcagaagaagagcaataccaagacctgcttctcattatggaacttcttactaacctgctgtcaaaagaattcatagatttcagtgatacagatgaagtgtttagaggacatgagccaggtcaagcagcaaacagatctgtgtcagcagcggatgttgtgttgtatggagtaaacctaattctgcccttgatgtcacaggatctcttgaagtttccaaccctttgtaatcagtactacaaattaatcacatttatctgtgagatttttcctgaaaaaataccacagcttcctgaggatctgtttaaaagtctgatgtactccctagaattaggaatgacatcaatgagttcggaggtttgccagctttgcctggaggccttgacaccgttagctgaacagtgtgcaaaagcacaagaaacagactcaccactttttctagcaacacggcactttcttaagctggtttttgatatgctggttttgcaaaagcacaacacagagatgaccactgcggctggcgaagctttctacacgttggtgtgtttgcaccaggctgaatattctgaactggtcgaaacattactatcaagtcagcaagacccagttatttaccagagattagcagatgccttcaacaagctcactgcaagcagcactcctcctacgctggatcggaagcagaagatggccttcttaaagagtttagaagaatttatggcaaatgttggtggtctcctttgtgtaaaataaacaacagaactttatgcttaatttagatcctttctgcaaagtgcactgaattgctgaaagttgacttgagtcttgtcctattcctcagttcatttggccattttggattttggagagcctgaaactttgatatgtatgtaatacagtgaaacaggagaggtcaacttggcatcagcttctgctgttaagtgttagccacaatctgtcatatatatgtcttttagattctgaatggtgatttaaaattttcaaaatgaaattccatatatgtgcaaacagatatgggcaccacgaaatacatatgcagtgccttttttccttttaacataggtggctagccaaagtttagaatttttgtcattaaatatgaaatggatatatgctaggcagtgtttctcaaaatctccatagatcgcctgcatcacttgaggagctggtgaaaaggcagattcttaggcccaactgtagaccttcagagtcagaatgtctggttgttgggcccaggagtcttcatgttaataagcttctccctttcgtcaccccaaaagttttgaatcaatgaaagagacattgaaaactcttaagaggttttgtgctttctagcttttcctccctttgatgattgggttttataattcagcaggaaggggaaacatcaccaggggtttgttggctttttcttagcttgctttcttgcttgcttgctttcttgcttttcttgctttctgtctctctctttcttttctctctctctctcacatcaacccagtgctgcaggttttgtgtaatacaagtcactaatcatactctgatgcctgaacttgaggaggaaaatacatgtatatttttgttccgtaaaaataaccttaggaactgtagccatttcattgccttaattttaagaggaaaatacaaaaacagctgatttgttttagtaagaaaccacgtcttgatgcttcagagttggtttagggtgttagctgctatgaacctgttgcccctttcgatcgtgtatttatgtaggtttatcagtgaaatgaaaggcttgtttccgtctagtctaactttttgagtgtgtttctatccagccacatagcccatatctactctaaatggcttgcttaagcaataattattttaaaggatgtgaatcactgattcacacagactattgcacgttggggcattaggggcaataattcttatccagacatgggagccagtgaatttaatttcagagattaaaaattcactttagatcctctagtttgatctcttaatcaggatttttatacagctgccaggctcccctaattcagtgtgccagcttacaatgtggaaatgaaagctaatttatacacagcaggcatatgaaactccactcattgcagtactttcacagcacagtgacaggtagaggactctggcacaggtgcactcatgaaactctgcttccaccatgttcctgacacctatctattaaaccattctgcaaatacggtttttctacctgattgcatatagcatatgtgtcattacatgtgatgctgtgcaaaactttgtataattctgtgttattaacagttaacaaaactggagcatctgaattacatccaacctgtgcatgtgatgttaggtagatgtgaatgcagggccttgggccataacttacatttctctcaatttgattagctttgagtcacaattaaggggaagcaaaaacatcttgaaaagactgctaggaaggaaattaatatcagtcatccagaagtacacgtttctgtattttaaaaaatactttgatgcatttatttttaggtgttttttttttccccttaaaaaacttgaagtgatatgcagcagtaatctatttgttttgcattgttcttggtgttttgtgtttcccagatccctcaagctttctcagctgttgtgaattatgtgtatctgtgtgtgtgctaagtacagtctctttaccaaagggcactgaaacacacaattgactggacaggtccacgcgccatgacaaaactataatcaagttattaaaactaaagaggagtgggaaaggaatgccttggtaagtaaaaaggcatctatatttaataacttttatccagatggcaacatatttgcaaaatttgcccagatcctattacaatactaaaaatagaaaatttcacctccatattcctgaggtgtaatttcattagactagttttagtttaaaaagaccttcttcagattggaccaaataatacttataagatcagcagaatgttgaatattagctcactggggtggggagaagccactaccattttttaggtgatggggatgccactgagttgcaacggctagaccttttcagggtggttgtgtccatgtttgcctgattggatgcttattcactttgtgttttcttttgttttattttgtccaattttgtctttagctgtgtttattaacttctccggtcttgttttgttttaatgctcttggcccagtgggtgtcaagaacactggcttaattcaagtcagttgattttttttctattaaaactgttgttaaaatattttttaaaacaaaaacattatttgtgccctcttttatatatgtcaaagggacactgtcaagtatttcatttttagatttttgttttataaaatttctgttgttcatatagtatcctttaacctctagttttccatacatcctttgtttgtttctcattttattttccttgacccatttatttcccaaggcacaatcactaaagactttgtactttcacagtctgttaatgtggtagcacctgtaactgtgttcttgttctgttaaaaggattgatttgcttttatagtccttgtgctggatgagtggctgcctcagtagcaaaactacctgacagtatttgacagtgtcctttccagcaccattatttgggtctttcagggtggccatctctgttagaagacagtagcatgttaacatcactgcattgagtttttgtctggtgtaaagtatgacttttaatgtaaacaaactgcaggtttttttcaaactaattttaagaatttagtcttatttcgttgtaaactgtgtatctaattatattacattactctgttcagatgggatggttactaccacttgtccatgattttcatttgaaaagcaagtatctatatcatttccccccagtcagcattatttaacactccccttaactgtctttgaactttctcttttaacaaaaatgtcaagtctttatagttgtaatatcaccatgtttcccatttctgttaatacttctatgaacccctaaagtattgaagggaactagctgtcagtttcaaggattacaagtttgagtctcctagtattcaacatcattctgaaccctgaaataatatttttctctgttaaacaatttttatctgtttgccacctctgttgttagaggtggttgtcaattgaccttactaagttagctgtctttgatgaggaattattgttattggttcctgaataaaacattaaccttttaagtcagaaggaacctcggtacttcttaaggtttgtttgtgttttctaaaaccagagaataaggaactgatttggctatgaggtttaacattataattttctgtaagctttcccacaaaaaaacattgttgatttgaggatataataatgttttaatctttttaaaatataagtggttattctctgacttggtaactatgttctgaaaacactgcatttaagaatttttaaaaattggttttctaaaattaaaatgtccaaattaggcatattgctgagctcaaattgatgtgaaatgccatggttccagttgaattttaagcatattttcatttagatataaaatatatgaagtatgctttgttgattatagtgagaacccatgacatagttaaccaaagaatatgtttggttcaaataaaaatagaagcttaatactgggcattcatactttttaaagagaatgaatgaagaaatcggtttcctgctgtagttctctatgggtaagtcttagtaaagacgagaatgctgaagtcggccgtggcgattccctcctaggaactgggaggtgtggcttgcccattacccgcttgaagctcacatctttaccctcctctcccactgtggtttgatcttcacctattcccaggccctcccagcaattggagaggtgtctttttttttggttttggttttttttctccccgtctgcattcttaggcctcttagctattaggaactgtcagatacatactagtagctaattttcctagcctgaaattatatactgcatctgcactatgtacctactagggatctgacctcaagtgttttctgagcccaggcttcctggtgtggtgtcttttaccacataaaattattacaaattgcaaatgttggtattgtgatttgattatctgtacaaagaaagaagctctatgcagtgagtttgtggtttaatggtcacaaaaatgttagcactgctaccactcagcacgtgtaaaattttttaaatttataaatattaaaattttaaacttacactaagacttttcagttttatttaaagacccagggatgagtgtactgtttaaatatttacctctattaacataactaatgaaggtataaaattgcatttagtttttcagaagatgctgcaatatgattttaggaaataaggctatgtattgagccagttataggctgaatatcaggttgataaaattttatttgtatttttaaaattcataaatgggagttaaaatgtgtcttttcactaaatatttttattacatttttgttttgaccatgtgtgatttgttcatgggtatttagctagactcttttatgaaatgcattgaaatggtgctagtttgtttaccattataggaagattgacactggggacattacacggtcctaaaataattttaaatttaaaaaaatgaagacatctgtacagataaaaatcaagatttgcatcaccttctgggagaacccgtggtactcacagaatatccagtattagaaatataaaaattttgtctatattttataatatttatctcagcccacagtcttagaaacagtttcacagttactagttaagtcattatctttggtgcatatttagtaaatacttttagcaagtcattctttttggcctttcagggaaagtggtgaattaccatattactgtgtgctagatagatccaccctttgcccagtgttaaatcttgtaaacatatgaagtgaaaagttaatttttaaagaaaatgcatctttaaaatgttcatttttaacctgaatttgctttgaatattctttgatttgtaatgttgttatttagcttatattgagatttattccactccaaaggtggataaagaaaagttgtttaagaaaaccaattagagtgtattttgaatttttgtttctttcattaccaagtgtggggccatacacacaggctaatcatctgtcatttgagacccacagatgatttcaaaggtcccaaataaatacacatctataactgttttttaaaagacatctttaatggtgctctccaaaaatacaattcggttgcttatgagtgatgcctttgacaggctgattagattataaaacagttttgtttttttaaacatagggtctcagattgagtcttgtgcattctatgtaatctcaaatggcagttcagtttgactttcttttaaaactaagtggaaatggtatatttggtgaaactaatgaaagaatcttttgctgggaaattccatacagcacccccagcagcatcctgtctcagtctggcgtataattcaacctcctactgagtgtccctgtaaattatttttaatatatagcatgagagtgaactgaggtaagtcattgatgtttcccagagatgatgaatgaacaaaagcaaataggatctgctaaacatttttattcccacagtagtgagcagttttgttcttgttttgataatgttcatttctgcctaatcttaggcttcaaatacacctttaagaaagcccaagatgtattgagtagtagaacttcttatttgtacacctgtttataactgcactgccctggatgttatggttatttctaaggactgacctggtaaagctacttgaactggtagactgcagggtagaggcagacctagattcaatgtctaactaagctgcttagggcttacattaatttccacaggtctgttatccatatcatgagtttataagtgttcctcccaaagaaaaaatttaaaagtgatggatgaaatataatagtagatgctcaataaattccattgtatttaaagatt

SEQ ID NO: 2568 - DNA, 2370 bp, Homo sapiens
  source 1..2370: mol_type = genomic DNA
gtcggtagaggcagaaggagaaggtcgggttgtagaagctggggtggccggcagctcgctcatcggtgttcgtgggctttgtcggtccgtgcctcgtctctccctggaaagggagggaggcttcgacgtcgagagggagccgctgccgcgttagttccgagcttgaagtcactaggacttctctcaaacttgtgtgctgaggagactcagatgttggcctcagctcctaggctgaactcagcagatcggcccatgaaaacttctgtattgagacaaaggaagggatctgtcagaaagcaacacttgttatcttgggcttggcagcaaggaagaggacaggtagtggagatcctgcaatctgaaaagcagactgaaaggtgacaaagaagctgaagatgggtggtggagagaggtataacattccagcccctcaatctagaaatgttagtaagaaccaacaacagcttaacagacagaagaccaaggaacagaattcccagatgaagattgttcataagaaaaaagaaagaggacatggttataactcatcagcagctgcctggcaggccatgcaaaatggggggaagaacaaaaattttccaaataatcaaagttggaattctagcttatcaggtcccaggttactttttaaatctcaagctaatcagaactatgctggtgccaaatttagtgagccgccatcaccaagtgttcttcccaaaccaccaagccactgggtccctgtttcctttaatccttcagataaggaaataatgacatttcaacttaaaaccttacttaaagtacaggtataaaataagacaaatgtttaaatttagttatgttcacgggtagttgtcaattggtctgaaacaaatttgctagggaatctatttgtgtagaactaattaatgtaaaaaaaatagaccatctcgtgttgtgtgcactgtgatataatggtagtatcagtgcaacttaaactaatgattgtacttgatattaagtgttctcaactgagtaacttttaagtggaaaccaagtttagatttggggagtggtaaaggaatcagctttttctattgttaggggaagacagtaatttatcattcatggaccagtagattgttgaaagttggtgaatcggattataagcttctagctaacacaaggattcagaattaggtaaacatctgaaggtttagtatattagaaacacccaaaccagtaatatgctaacctgatgcactgctgaaagaaaatgtgaatttttcgtaataattgcattttagtgaattgtacagtgggtggaaagggcatttggagctcattagaatgagacatagtacaccccaatggccctgtttattaaatgtagtggattaagtgtctgtcaacaaatacaccaaaaccattttttatagaaacagtatttaatggtcactcaatagctttcaaaatacatttttgtattacagcactgcacaagctattctaatagtgctctggcctcatcattcctgcaaagcttgctttggggagttggataatgtgaaaattttaagtacctaggggagaaagagccatgtaaatatctgtaataaacttgtagcatatgtaaagttttcttggcctttatcttacaaaaatggagtattttagtatgaatttgctgaatgtaagaccgtggactgttttttataatatggcctaattttaaaggtccaaaataacttgtttttaaagtttgcccttgtgctaaagtgccagtgtatgtatgttatacttgatttggttgtaaactatatttcaaagtaaaccctagtgtaataagttttataactaaaaaggtttaagctgctaaaactatttttaagagatgtgaaatgcagtatgggactatctttttttcctcctctaagcccaaagattaactagagtccctccaaccttatagattgttggctttcacaatcttataacctaggatacaggtagtttcgagtatggtgccagtgatgttttgtttttgtttggtcaaggggtaggtgcaacccaatggaccacttatgcaaaagatgtaaactcttgcataatacattgataacatgttttgccaactttaaatgcttaaacataagcgaaaccagtagcaagtatgtgggtcagcttaaaaattttgattgttaatgccctattttctaatttggcacctcttgatgcctaagcaggtaagcagatgcctaagctgtatttctccaaataaatcaagatgaagtactgcccaagttaaatattgatagcctaaagacaagtttatgtagtacttaatgtacatgatatgaagcataaaattaaataaaatttttcccc

SEQ ID NO: 2569 - DNA, 1295 bp, Homo sapiens
  source 1..1295: mol_type = genomic DNA
gcatcagcagctgtctgccagtgttgacggagggctcatgggtgccaggccgcttgctggggctttttatctgtcctcaggcattggcacagcagccctgggagatgaatactattgtgatcttcattctccacacaaggacagggaagtgacgtgccagggtcaaacaactacccaaggacagagccaggatttgaaccaggccatccagttccagaaccactgctcttcactgtcattgtggccattttacagtgctcctgcgggaagaagtgtcgcggctccaggaggaagttcaccttctccggcagatgaaggagatgttggcgaaggacctggaggagtcgcagggcggcaagtcctctgaggtcctctcggccaccgagctcagggtccagctggcccagaaggagcaggagctagccagagccaaagaagccttgcaggccatgaaagctgatcggaagcgcttaaagggcgagaagacagacctggtgagccagatgcagcagctgtatgccacactggagagccgcgaggagcagctccgagacttcatccgcaactatgagcagcaccgcaaggagagcgaggatgcggtcaaagcgctggccaaggagaaggacctgctggagcgtgagaagtgggagctgcggcgccaagccaaggaggccacagaccacgccacggcactgcgctcccagctggacctcaaggacaaccggatgaaggagctggaggccgagctggccatggccaaacagtccttagctacgctgaccaaggacgtccccaagcggcattccctcgccatgccgggcgagacggtgctcaatggcaaccaggagtgggtggtgcaggcggacctcccgctgaccgcagccatccggcagagtcaacagactctctaccactcacacccccctcaccctgcggaccggcaagcggtcagggtgagcccctgccactcccggcagccctctgtcatctccgacgcatctgccgccgaaggcgaccggtcgtccacaccgagcgacatcaactcccctcgacaccggacacactccctctgcaacggcgacagtcccggcccagttcagaagaacctgcacaaccctattgtacagtcactagaggatcttgaagaccaaaaacggaaaaagaagaaagagaagatgggattcggctccatctcccgcgtcttcgccagagggaagcagcggaagtccctcgaccccggcctctttgatggtaccgcccctgattattacatagaggaggacgcggactggtga

SEQ ID NO: 2570 - DNA, 3643 bp, Homo sapiens
  source 1..3643: mol_type = genomic DNA
gggagagggaaggtcaggcttgcctcctgttcacaaggacaacctctgtctcccttgtggcggcttctatgaaggtggggactccaggctttctctcgtctgctttttggatgccttcaagagaggccagttagaggatatcaattgtggcaattccccagagccctcatcagatggcattagcccgtcatgtgctgcagtggcacccagtttggaggaaattcggaaccagaagagtgtgacagtgctcctgcgggaagaagtgtcgcggctccaggaggaagttcaccttctccggcagatgaaggagatgttggcgaaggacctggaggagtcgcagggcggcaagtcctctgaggtcctctcggccaccgagctcagggtccagctggcccagaaggagcaggagctagccagagccaaagaagccttgcaggccatgaaagctgatcggaagcgcttaaagggcgagaagacagacctggtgagccagatgcagcagctgtatgccacactggagagccgcgaggagcagctccgagacttcatccgcaactatgagcagcaccgcaaggagagcgaggatgcggtcaaagcgctggccaaggagaaggacctgctggagcgtgagaagtgggagctgcggcgccaagccaaggaggccacagaccacgccacggcactgcgctcccagctggacctcaaggacaaccggatgaaggagctggaggccgagctggccatggccaaacagtccttagctacgctgaccaaggacgtccccaagcggcattccctcgccatgccgggcgagacggtgctcaatggcaaccaggagtgggtggtgcaggcggacctcccgctgaccgcagccatccggcagagtcaacagactctctaccactcacacccccctcaccctgcggaccggcaagcggtcagggtgagcccctgccactcccggcagccctctgtcatctccgacgcatctgccgccgaaggcgaccggtcgtccacaccgagcgacatcaactcccctcgacaccggacacactccctctgcaacggcgacagtcccggcccagttcagaagaacctgcacaaccctattgtacagtcactagaggatcttgaagaccaaaaacggaaaaagaagaaagagaagatgggattcggctccatctcccgcgtcttcgccagagggaagcagcggaagtccctcgaccccggcctctttgatggtaccgcccctgattattacatagaggaggacgcggactggtgatacgcgctcccctgcgcctgctgcccgcaggcgtgtctgtgcgtgtgggcgtgtgtgcaagcgagcgtgggtgcgcgtgtggccgtgcgtggggtgcgtgtgcacgtgtgcgctggcacacatgggtgctgggtgtggccgagcgcctctaacaagtgaaaacacgagtgtgaacctctctcccctgcgtcgccacctctgtaattgatgtacataccgcaaaccgtgtgtgaacctgtcaactctctgtcgtctttggagcgatacagttgtgttgttaatctggtttattatttttcttcagtgtttggtttttctttttctttttgtttggttcgtcggtttgtttttgtttttgtttttttccccctttctcctcccctcctcctttttatgaaacttgaaaacttgaaggactgctgtgtatttgtaaataacaaaactattgtgcactctgtgcttgtaaatgtccctcgtccaaaccgctactcctggagcccgtctggcagaggatgtggtctgtttttgatgtcccccctcccgcccccctggtgtgaacgtgtgggaccagaccctgtcctgggggtgcgcccaagtcactttaaccacaaaacgccatcgtcgtcagggtaagctctgctctctacaaagactcgcgagccgggccaaggggccttgtcttggctgggtttgtcagaggtcaaaccggctcttttaaacggcctaccagtttttaaattgcattgccgtttctttctttatgaaaaaaaagaaaaaaagaaaattgtttcatttaatttatttgcacaaatgctgaaaacttattctatctaaattattacataaatattggaatgtctatttttccatggggtgggcgggaggtgggtgtctctgttgacttgtctgttctgttaccatgctgctacccaactgtgcaaagtagtttagggtggccagaacccagggaccattggatttcaaagcttgctttttctgttggttcttctctctccttctctctctgtctctcccattctcctgcccatgcatgaaaggatcctccaccttcttcccacccagagctccctccaggcctttctctatatatttatttatctgacatacagaacacgactttagtgagcagagtgctgacagtcatggtccccttctttgggtctgtcttttgagagaggttgagttcagggcaagacagcctgccacacatccaagggtacgaccagtgggaccctggcctgagtctgttctccgaggggcctccagcagcttctgttcctccctgcagctgtgtctttcttgtcctgggtttaggatgcaggtgggccaggcaggtgttgttaggggaggcacccacttcaaaaggagggccacagtggggacacagagtccagcacctgagccctccaccctccccattctggttggttccatcagccacacttagaatctcccaggatcccttggactccgtcccccaacttgtcacagcagcctgagcctacccaccccaggagacaagagctggcaggaacatctgcctatatggggggtggcgttggccccaaagaggcttcaccagcaaaggaactgtgtgtattttaatgccaggggacggaggatgtgtgagctgttcagcaaggtctgcccaaggcctaaaactcaatttccttattcttttgcttctgctcgtccttaacaactaacagctcaacccacacctctagacaacagtagtcgtgctttctgctaacggtgacattttcagctcttaaaaagaagcaaggagattttcaaatgctagagtatctctatcagaaggcataggacattgtgtccaaagtctcaagaacaaacaacactttccttctgacctggtccaaaagtcagcaaacagcaagcaggcagaggccctcataaggacttttctgtcctcctttgaccaaactgtttaaccgagcctaggggtgacggggagcgacccaagctggcatctttctctacggagacagattttagaaaatacttttcttgcccatgaatttcttttctggttgatttttatcattttccctttacttacaagaaaataagattgcaaccactcctgctaatgatttagtagttccttttcatttcagtttttgtaaattaggagataattctaagagttactaaaggatgatttatttaagagaactacgtcaaatagcgaatgagttatgggtaacattagacgaaaataacctttcccgtgggaaaggtttctcgaaggcatggatgcaaatataaaatattaaaaaaaatctaaataaagcttattttaaaatatgatcg

SEQ ID NO: 2571 - DNA, 984 bp, Homo sapiens
  source 1..984: mol_type = genomic DNA
cctgggacacggagcttgcagtgagctgatacggtgccactgcactccagcctgggcaacagagtgagactccgtctcaaaaaaaaaaatcagatttttaggaattacacattagtggagtagttagcagagcccatttttctgagaattaggctctaacttttagttgtaatttagataagttccaaaataagtttttaaacatttaagcttctttgcatgattttatccatttacgttattcaggataagcatctatttgtttatcaagtaatgttttctttcaactttgttttttgtggcagatgtttataaattcttctgtgggatcagagggcacgcctattacaaccagaaaactacaagtataacagcgaggatggatgaacaggctctattagggctaaatccaaatgctgattcagactttagacaaagggccctggcctattttgagcagttaaaaatttccccagatgcctggcaggtgtgtgcagaagctctagcccagaggacatacagtgatgatcatgtgaagtttttctgctttcaagtactggaacatcaagttaaatacaaatactcagaactaaccactgttcaacaacagctaattagggagacgctcatatcatggctgcaagctcagatgctgaatccccaaccagagaagacctttatacgaaataaagccgcccaagtcttcgccttgctttttgttacagagtatctcactaagtggcccaagtttttttttgacattctctcagtagtggacctaaatccaaggggagtagatctctacctgcgaatcctcatggctattgattcagagttggtggatcgtgatgtggtgcatacatcagaggaggctcgtaggaatactctcataaaagataccatgagggaacagtgcattccaaatctggtggaatcatggtaccaaatattacaaaattatcagtttactaattctgaagtgac

SEQ ID NO: 2572 - DNA, 2048 bp, Homo sapiens
  source 1..2048: mol_type = genomic DNA
agttgtcgggtcttattggccgctgattagaccagccggggtccactagccctgggcttcagggaggctgctgcgtccagtgaacacttcagcacctgtagcacagaagggccaaggagctgcagtcctcgaccagcaggaggtttgctcctcagcccactcgctgcatccagatcagctcacccctctcccttccctgcccaccaggactctgatagcccctggcagccacagcccattttgccaagatgtctagagtagccaaatatcgccggcaggtgagtgaagaccccgacatcgacagcctgctggagaccctgtctcccgaggagatggaggagctggagaaggagctggacgtggtggacccagacgggagtgttcccgtggggctgcggcagagaaaccagacggagaaacagtccacgggtgtgtacaaccgggaggccatgctcaacttctgtgaaaaggagaccaagaaacttatgcagagggagatgtccatggatgaaagcaagcaagtggagaccaagacagatgccaagaatggagaggaaaggggcagagatgccagcaaaaaagccctgggccccagacgggactcagatctggggaaggagccaaagaggggtggtttaaagaaaagcttctctagagacagagatgaagctggtggcaagagtggcgagaagcccaaggaggagaagatcatccggggcattgacaagggccgggtcagggctgcagtggataagaaggaggcagggaaggatgggagaggagaggagagggcagtggccaccaagaaggaagaggagaagaaagggagtgacaggaacacaggcttgagcagggacaaggataaaaagagagaggagatgaaggaggtggccaagaaagaggatgatgagaaggtaaaaggggagcgtaggaacacagacaccagaaaagagggtgagaagatgaaaagagcaggtgggaacacagacatgaaaaaggaggatgagaaggtaaaaagaggaactgggaacacagacaccaaaaaggacgatgaaaaagtcaagaagaatgaacccttacatgaaaaggaagccaaggatgacagcaagaccaaaacacccgagaaacagacgcccagtggccccaccaagccctctgaaggaccggccaaggtggaggaggaggcagctcccagcatatttgatgagcctctggagagagtgaagaacaatgaccccgagatgactgaggtgaacgtcaacaactcagactgcatcacaaatgagatcttggtccggtttactgaggctctggagttcaacactgtggttaagctgttcgccttggccaacacgcgagccgatgaccacgtggcctttgccattgccatcatgctcaaggccaacaagaccatcaccagcctcaacctggactccaaccacatcacaggcaaaggcatcctggccatcttccgggccctcctccagaacaacacgctgaccgagctccgcttccacaaccagcgacacatctgtggaggcaagacggagatggagatcgccaagctgctgaaggagaatactaccctgctcaagctgggctaccattttgagctggccgggccccgaatgactgtcaccaatctgctcagccgcaacatggacaagcagagacaaaagcggctgcaggagcaaaggcaggcacaggaagccaagggagagaagaaggatctgctggaggtacccaaggccggggccgtggctaagggctccccaaaaccttcacctcaaccatctccaaagccctctccaaagaactcacccaaaaaagggggtgctccagctgccccaccaccccctccccctcccttggctccaccccttatcatggagaacctgaagaattcactctcaccagctacccagaggaagatgggagacaaagtcctccctgcccaggagaagaactcccgtgaccagctattggctgccatccgctccagcaacctcaagcagctcaagaagctagagcttccactgttgcttcag

SEQ ID NO: 2573 - DNA, 886 bp, Homo sapiens
  source 1..886: mol_type = genomic DNA
gttgcctaaacctctgccacccacctgtgaacttcactttgccacagggaggcactgaactgaaaaactgccttgtaagaggtgtcgcccctctgtctactccctttcttatatcaagaggggaaaaacacgtaactacctctacccgatctggtcaccatacgcctattacctttactgttacaagtaccggatcactctccgggagaagatgctgcctcgttgttataaaagcatcacttataaggaagaggaggacttgacactccagccccgttcctgcctccagtgctcctgagtccctagtaggcctccaggagggcaaaagcaccgagcagggtaaccacgaccagcttaaagaactgtattcggctgggaacttgacggtgctggctactgaccccctgctccaccaggacccagtacagttagactttcacttccgccttacctcccagacctctgcccattggcacggccttctctgtgaccgtcgactcttcttggatatcccatatcaggccttggatcaaggcaaccgggaaagtttgactgcaaccctggagtacgtggaagagaagacaaatgtggactctgtgtttgtgaacttccagaatgatcggaacgacagaggtgccctgctgcgggccttcagctacatgggctttgaggtggtcagaccagatcaccctgccctccctcccttggacaatgtcatctttatggtgtatccccttgaaagggatgttggccacctgcccagtgagcctccttgaacatgcttattccaacgctttgaggggctggaagccttgacacatggaatcaggggcccgggatgtgattcaggacactttccatcctaggaataaagggtagtgcaatc

SEQ ID NO: 2574 - DNA, 2539 bp, Homo sapiens
  source 1..2539: mol_type = genomic DNA
gcctccccagcgtcggctccccggcgggcggtgcgggccctcccactctaccccgcgccgtctcacggccccggccctagcttcaccccgactacccggcgtgcgcgtcctcctgccggcctgcaggcccggggcctccgcctgcttccccacagctgctccttgcggccccgcttgcgttcacgctgtcgcccgggccggcgcggccgcgggcaaccgctccccctcccacacctaccccgccccctccccgccttttccgccctccggtccccctccctcggcccgctgctgctgctccagatgaggtgatggcaacggccaacttcggcaagatccagatcgggatttacgtggagatcaagcgcagcgatggccgaatacatcaagcaatggtaacatctttaaatgaagataatgaaagtgtaactgttgaatggatagaaaatggagatacaaaaggcaaagagattgacctggagagcatcttttcacttaaccctgaccttgttcctgatgaagaaattgaacccagtccagaaacacctccacctccagcatcctcagccaaagtaaacaaaattgtaaagaatcgacggactgtagcttctattaagaatgaccctccttcaagagataatagagtggttggttcagcacgtgcacggcccagtcaatttcctgaacagtcttcctctgcacaacagaatggtagtgtttcagatatatctccagttcaagctgcaaaaaaggaatttggacccccttcacgtagaaaatctaattgtgtgaaagaagtagaaaaactgcaagaaaaacgagagaaaaggagattgcaacagcaagaacttagagaaaaaagagcccaggacgttgatgctacaaacccaaattatgaaattatgtgtatgatcagagactttagaggaagtttggattatagaccattaacaacagcagatcctattgatgaacataggatatgtgtgtgtgtaagaaaacgaccactcaataaaaaagaaactcaaatgaaagatcttgatgtaatcacaattcctagtaaagatgttgtgatggtacatgaaccaaaacaaaaagtagatttaacaaggtacctagaaaaccaaacatttcgttttgattatgcctttgatgactcagctcctaatgaaatggtttacaggtttactgctagaccactagtggaaactatatttgaaaggggaatggctacatgctttgcttatgggcagactggaagtggaaaaactcatactatgggtggtgacttttcaggaaagaaccaagattgttctaaaggaatttatgcattagcagctcgagatgtctttttaatgctaaagaagccaaactataagaagctagaacttcaagtatatgcaaccttctttgaaatttatagtggaaaggtgtttgacttgctaaacaggaaaacaaaattaagagttctagaagatggaaaacagcaggttcaagtggtgggattacaggaacgggaggtcaaatgtgttgaagatgtactgaaactcattgacataggcaacagttgcagaacatccggtcaaacatctgcaaatgcacattcatctcggagccatgcagtgtttcagattattcttagaaggaaaggaaaactacatggcaaattttctctcattgatttggctggaaatgaaagaggagctgatacttccagtgcggacaggcaaactaggcttgaaggtgctgaaattaataaaagccttttagcactcaaggagtgcatcagagccttaggtagaaataaacctcatactcctttccgtgcaagtaaactcactcaggtgttaagagattctttcataggtgaaaactctcgtacctgcatgattgccacaatctctccaggaatggcatcctgtgaaaatactcttaatacattaagatatgcaaatagggtcaaagaattgactgtagatccaactgctgctggtgatgttcgtccaataatgcaccatccaccaaaccagattgatgacttagagacacagtggggtgtggggagttcccctcagagagatgatctaaaacttctttgtgaacaaaatgaagaagaagtctctccacagttgtttactttccacgaagctgtttcacaaatggtagaaatggaagaacaagttgtagaagatcacagggcagtgttccaggaatctattcggtggttagaagatgaaaaggccctcttagagatgactgaagaagtagattatgatgtcgattcatatgctacacaacttgaagctattcttgagcaaaaaatagacattttaactgaactgcgggataaagtgaaatctttccgtgcagctctacaagaggaggaacaagccagcaagcaaatcaacccgaagagaccccgtgccctttaaaccggcatttgctgctaaaggatacccagaaccctcactactgtaacatacaacggttcagctgtaagggccatttgaaagtttggaattttaagtgtctgtggaaa

SEQ ID NO: 2575 - DNA, 2251 bp, Homo sapiens
  source 1..2251: mol_type = genomic DNA
gggacaccggggcgggggcaccgggaggaagctgccttggaagaggtgggggcggcgacgggaggggcggcgagcccccgggagcctgggcgttaggcccgggcgtggcggggccccggcggcctggggggtctcctgggcccccccccacccatggagcccgccgccccggaggtcggtctcagatgactgaactgggcaccgagcgcccctggtgtccctcgcagtggactgacgccgcaggggcgagctagccggctccgcgcctctccgcgggatccagacgcctcctggggctgctggcggagggtctgaggcggcgcggccatggctcacctccggggatttgccaaccagcactctcgagtggaccctgaggagctcttcaccaagctcgaccgcattggcaagggctcgtttggggaggtctacaagggcatcgataaccacacaaaggaggtggtggccatcaagatcatcgacctggaggaggccgaggatgagatcgaggacatccagcaggagatcactgtcctcagtcagtgcgacagcccctacatcacccgctactttggctcctacctaaagagcaccaagctatggatcatcatggagtacctgggcggcggctcagcactggacttgcttaaaccaggtcccctggaggagacatacattgccacgatcctgcgggagattctgaagggcctggattatctgcactccgaacgcaagatccaccgagacatcaaagctgccaacgtgctactctcggagcagggtgacgtgaagctggcggactttggggtagcagggcagctcacagacacgcagattaagaggaacacattcgtgggcacccccttctggatggcacctgaggtcatcaagcagtcggcctacgacttcaaggctgacatctggtccctggggatcacagccatcgagctggccaagggggagcctccaaactctgacctccaccccatgcgcgtcctgttcctgattcccaagaacagcccacccacactggagggccagcacagcaagcccttcaaggagttcgtggaggcctgcctcaacaaagacccccgattccggcccacggccaaggagctcctgaagcacaagttcatcacacgctacaccaagaagacctccttcctcacggagctcatcgaccgctataagcgctggaagtcagaggggcatggcgaggagtccagctctgaggactctgacattgatggcgaggcggaggacggggagcagggccccatctggacgttcccccctaccatccggccgagtccacacagcaagcttcacaaggggacggccctgcacagttcacagaagcctgcggagcccgtcaagaggcagccgaggtcccagtgcctgtccacgctggtccggcccgtcttcggagagctcaaagagaagcacaagcagagcggcgggagcgtgggtgcgctggaggagctggagaacgccttcagcctggccgaggagtcctgccccggcatctcagacaagctgatggtgcacctggtggagcgagtgcagaggttttcacacaacagaaaccacctgacatccacccgctgaagcgcactgctgttcagataggggacggaaggtcgtttgtttttgttctgagctccataagaactgtgctgacttggaaggtgccctgtgctatgtcgtgcctgcagggacacgtcggatcccgtgggcctcacatgccaggtcaccaggtcaccgtctccttccacccctgcagtgtgctgttgtgcacgtcagggacgctgttctctatgcccactgccctcctccctctcctggcccagcagtattgctcacgggggctccagccgccggcgtggccctcatgagctacgcctgggtcttctgcagactcatgcagccctatggccgctcagaccaaggcgcagagcaactatcagggcagctctgcctcctcctcccatgaggtggggagaggcaacagggcagcccccagaggagtgtcctggccgctgtcctcccggggcccatgatggccatagatttgccttgtggtgttggatcaggtactgtgtctgctcataagtacttgtgtcatccagaatgttttgttttttaagaaaattgaattacttgtttcctgaaatattctgaggttaatatgttagttttcatagaacattgagaggcccctgccactttcaataaagacctgacttggaga

SEQ ID NO: 2576 - DNA, 1685 bp, Homo sapiens
  source 1..1685: mol_type = genomic DNA
gcgccggcacacctattggcccccgcggcgtcccgtcgccgcgtcgcgttgctggcccgtcggagcgacgccgctcgggtcagtcggcggccggactgggaagatggacgcagctactctgacctacgacactctccggtttgctgagtttgaagattttcctgagacctcagagcccgtttggatactgggtagaaaatacagcattttcacagaaaaggacgagatcttgtctgatgtggcatctagactttggtttacatacaggaaaaactttccagccattggggggacaggccccacctcggacacaggctggggctgcatgctgcggtgtggacagatgatctttgcccaagccctggtgtgccggcacctaggccgagattggaggtggacacaaaggaagaggcagccagacagctacttcagcgtcctcaacgcattcatcgacaggaaggacagttactactccattcaccagatagcgcaaatgggagttggcgaaggcaagtccataggccagtggtacgggcccaacactgtcgcccaggtcctgaagaagcttgctgtcttcgatacgtggagctccttggcggtccacattgcaatggacaacactgttgtgatggaggaaatcagaaggttgtgcaggaccagcgttccctgtgcaggcgccactgcgtttcctgcagattccgaccggcactgcaacggattccctgccggagctgaggtcaccaacaggccgtcgccatggagacccctggtacttctcattcccctgcgcctggggctcacggacatcaacgaggcctacgtggagacgctgaagcactgcttcatgatgccccagtccctgggcgtcatcggagggaagcccaacagcgcccactacttcatcggctacgttggtgaggagctcatctacctggacccccacaccacgcagccagccgtggagcccactgatggctgcttcatcccggacgagagcttccactgccagcacccgccgtgccgcatgagcatcgcggagcttgacccgtccatcgctgtggggtttttctgtaagactgaagatgacttcaatgattggtgccagcaagtcaaaaagctgtctctgcttggaggtgccctgcccatgtttgagctggtggagctgcagccttcacatctggcctgccccgacgtcctgaacctgtccctaggtgagagctgccaagtccaggtggggtccctcggagattcttctgatgtagagcgactggaaagattcttcgactcagaagatgaagactttgaaatcctgtccctttgaaaatcctggggtcgggggtggcacctgtgagagcctggggctcctggtgccgctgcgtttcatccatcccgcccgctcgcctgccgagggctgcgccccgtgctgcctccccccagagggccacccgctgtgctcgtggactgaggctgcgctgcccgggaggccttactgcttggtgtcagactgcccagctcagagtgcccgtcagggcctgtgcatccgcacgcggagccgtctgttaggagcttccagagtgttctctcgacactgccagccccgtgttagcacctgggcctcagtcccacttgctcccaggcgccggttctgtggttggtttggaattaaagtcctgtttgaagttgtc

SEQ ID NO: 2577 - DNA, 1883 bp, Homo sapiens
  source 1..1883: mol_type = genomic DNA
ggtcagacatgccagcagggttggaaagaggcaggtacggaagctgagctgcagagttagccggcatctgacagaaaaatgtgagtgtgctgtggaaggcttgcatttcctttaaggtttgtctacagattttgagcgttcgaagttgacccctgactaagtatactttgctgctccctcagcctttgaaaaaatgtctgtcacatatgatgattccgttggagtagaagtgtccagcgacagcttctgggaggtcgggaactacaagcggactgtgaagcggatcgacgatggccaccgcctgtgcagcgacctcatgaactgcctgcatgagcgggcgcgcatcgagaaggcgtatgcgcagcagctcactgagtgggcccggcgctggaggcagctcgtggagaaagggccccagtacgggaccgtggagaaggcctggatggccttcatgtccgaggcagagagggtgagcgagctgcacctcgaggtgaaggcctcactgatgaacgatgacttcgagaagatcaagaactggcagaaggaagcctttcacaagcagatgatgggcggcttcaaggagaccaaggaagctgaggacggctttcggaaggcacagaagccctgggccaagaagctgaaagaggtagaagcagcaaagaaagcccaccatgcagcgtgcaaagaggagaagctggctatctcacgagaagccaacagcaaggcagacccatccctcaaccctgaacagctcaagaaattgcaagacaaaatagaaaagtgcaagcaagatgttcttaagaccaaagagaagtatgagaagtccctgaaggaactcgaccagggcacaccccagtacatggagaacatggagcaggtgtttgagcagtgccagcagttcgaggagaaacgccttcgcttcttccgggaggttctgctggaggttcagaagcacctagacctgtccaatgtggctggctacaaagccatttaccatgacctggagcagagcatcagagcagctgatgcagtggaggacctgaggtggttccgagccaatcacgggccgggcatggccatgaactggccgcagtttgaggagtggtccgcagacctgaatcgaaccctcagccggagagagaagaagaaggccactgacggcgtcaccctgacgggcatcaaccagacaggcgaccagtctctgccgagtaagcccagcagcacccttaatgtcccgagcaaccccgcccagtctgcgcagtcacagtccagctacaaccccttcgaggatgaggacgacacgggcagcaccgtcagtgagaaggacgacactaaggccaaaaatgtgagcagctacgagaagacccagagctatcccaccgactggtcagacgatgagtctaacaaccccttctcctccacggatgccaatggggactcgaatccattcgacgacgacgccacctcggggacggaagtgcgagtccgggccctgtatgactatgaggggcaggagcatgatgagctgagcttcaaggctggggatgagctgaccaagatggaggacgaggatgagcagggctggtgcaagggacgcttggacaacgggcaagttggcctatacccggcaaattatgtggaggcgatccagtgatgagtcggggacaggccagcggggggacggaggcggcgggcccaggagcctcagccagccacgtgggcatccactccttttcctgcaagagatgatggttccattgctcttggcttcatggtgttcctggaaggcagatgagctggtcatttcgcctgggactcggcacctttccgagtgcagctggagggatctgagcgcaggaagacgcagaacaacagaaatagcc

SEQ ID NO: 2578 - DNA, 3355 bp, Homo sapiens
  source 1..3355: mol_type = genomic DNA
acactgtcctctcacagaacaagaaggtatctggtctacaagaactcgaggcctcactgaaacggaaagcaaatacaaagaaactttattttaaaaacatgtcttggtctcccaagaagagggcaattggattgctcagccagaatgaagagtagttttacagaaaaaagaggacaatattgggatcacctttgacctttccatttggaaataatattttctattgtgttatagaaaggtgggaagctttcatccagaacaatgaatttcataaaggacaatagccgagcccttattcaaagaatgggaatgactgttataaagcaaatcacagatgacctatttgtatggaatgttctgaatcgcgaagaagtaaacatcatttgctgcgagaaggtggagcaggatgctgctagagggatcattcacatgattttgaaaaagggttcagagtcctgtaacctctttcttaaatcccttaaggagtggaactatcctctatttcaggacttgaatggacaaagtctttttcatcagacatcagaaggagacttggacgatttggctcaggatttaaaggacttgtaccataccccatcttttctgaacttttatccccttggtgaagatattgacattatttttaacttgaaaagcaccttcacagaacctgtcctgtggaggaaggaccaacaccatcaccgcgtggagcagctgaccctgaatggcctcctgcaggctcttcagagcccctgcatcattgaaggggaatctggcaaaggcaagtccactctgctgcagcgaattgccatgctctggggctccggaaagtgcaaggctctgaccaagttcaaattcgtcttcttcctccgtctcagcagggcccagggtggactttttgaaaccctctgtgatcaactcctggatatacctggcacaatcaggaagcagacattcatggccatgctgctgaagctgcggcagagggttcttttccttcttgatggctacaatgaattcaagccccagaactgcccagaaatcgaagccctgataaaggaaaaccaccgcttcaagaacatggtcatcgtcaccactaccactgagtgcctgaggcacatacggcagtttggtgccctgactgctgaggtgggggatatgacagaagacagcgcccaggctctcatccgagaagtgctgatcaaggagcttgctgaaggcttgttgctccaaattcagaaatccaggtgcttgaggaatctcatgaagacccctctctttgtggtcatcacttgtgcaatccagatgggtgaaagtgagttccactctcacacacaaacaacgctgttccataccttctatgatctgttgatacagaaaaacaaacacaaacataaaggtgtggctgcaagtgacttcattcggagcctggaccactgtggagacctagctctggagggtgtgttctcccacaagtttgatttcgaactgcaggatgtgtccagcgtgaatgaggatgtcctgctgacaactgggctcctctgtaaatatacagctcaaaggttcaagccaaagtataaattctttcacaagtcattccaggagtacacagcaggacgaagactcagcagtttattgacgtctcatgagccagaggaggtgaccaaggggaatggttacttgcagaaaatggtttccatttcggacattacatccacttatagcagcctgctccggtacacctgtgggtcatctgtggaagccaccagggctgttatgaagcacctcgcagcagtgtatcaacacggctgccttctcggactttccatcgccaagaggcctctctggagacaggaatctttgcaaagtgtgaaaaacaccactgagcaagaaattctgaaagccataaacatcaattcctttgtagagtgtggcatccatttatatcaagagagtacatccaaatcagccctgagccaagaatttgaagctttctttcaaggtaaaagcttatatatcaactcagggaacatccccgattacttatttgacttctttgaacatttgcccaattgtgcaagtgccctggacttcattaaactggacttttatgggggagctatggcttcatgggaaaaggctgcagaagacacaggtggaatccacatggaagaggccccagaaacctacattcccagcagggctgtatctttgttcttcaactggaagcaggaattcaggactctggaggtcacactccgggatttcagcaagttgaataagcaagatatcagatatctggggaaaatattcagctctgccacaagcctcaggctgcaaataaagagatgtgctggtgtggctggaagcctcagtttggtcctcagcacctgtaagaacatttattctctcatggtggaagccagtcccctcaccatagaagatgagaggcacatcacatctgtaacaaacctgaaaaccttgagtattcatgacctacagaatcaacggctgccgggtggtctgactgacagcttgggtaacttgaagaaccttacaaagctcataatggataacataaagatgaatgaagaagatgctataaaactagctgaaggcctgaaaaacctgaagaagatgtgtttatttcatttgacccacttgtctgacattggagagggaatggattacatagtcaagtctctgtcaagtgaaccctgtgaccttgaagaaattcaattagtctcctgctgcttgtctgcaaatgcagtgaaaatcctagctcagaatcttcacaatttggtcaaactgagcattcttgatttatcagaaaattacctggaaaaagatggaaatgaagctcttcatgaactgatcgacaggatgaacgtgctagaacagctcaccgcactgatgctgccctggggctgtgacgtgcaaggcagcctgagcagcctgttgaaacatttggaggaggtcccacaactcgtcaagcttgggttgaaaaactggagactcacagatacagagattagaattttaggtgcattttttggaaagaaccctctgaaaaacttccagcagttgaatttggcgggaaatcgtgtgagcagtgatggatggcttgccttcatgggtgtatttgagaatcttaagcaattagtgttttttgactttagtactaaagaatttctacctgatccagcattagtcagaaaacttagccaagtgttatccaagttaacttttctgcaagaagctaggcttgttgggtggcaatttgatgatgatgatctcagtgttattacaggtgcttttaaactagtaactgcttaaataaagtgtactcgaagcc

SEQ ID NO: 2579 - DNA, 543 bp, Homo sapiens
  source 1..543: mol_type = genomic DNA
caggcggcggagcctccgggacggcgagcggcgggcggcggaggaggagacggcagactgaccaaatatggaagtgtgcaagtcttgaacacattagtttatacaatgtggcctgaaagtttccctcctctttccaaatcaaccataatattctgaggcattaaaaaatatttaatcattcatgtgttgagactcattcttgagttatggatgacaaggcttctgttggaaaaatcagtgtctcttcagactcagtatctactcttaatagtgaagattttgtcttggtttccaggcaaggagatgagacaccatctacaaataatggaagtgatgatgagaaaacaggactcaagattgtagggaatggaagtgaacagcagctgcaaaaagagctagcagatgtactgatggatcctccaatggacgaccagccaggggaaaaggagcttgtgaaaaggtcacaactggatggtgaaggagatgggcctctttctaatcagctctccgcttcatccaccattaaccctgtgccattagtag

SEQ ID NO: 2580 - DNA, 1002 bp, Homo sapiens
  source 1..1002: mol_type = genomic DNA
gtgcccacaggcctgcagcgggtccaaacctcaggcccccagcccgtgccgcttcgcggggtccacttctcgggaaatgtcctccgagccgcctgctggcggtgtcccgatccccccgggagtgggtcgaagggccaggccctccccagggggtgctgtgcctagggctcgactgtccgctctctctccctgcgcagctggtgggcacggaggatgctcttctgcagcagctggcggactcgatgctcaaagaggactgcgcctccgagctgaaggtccacttggcaaagtccctccctttgccctccagtgtgaatcggccccgaattgacctgatcgtgtttgtggttaatcttcacagcaaatacagtctccagaacacagaggagtccctgcgccatgtggatgccagcttcttcttggggaaggtgtgtttcctcgccacaggtgctgggcgggagagccactgcagcattcaccggcacaccgtggtgaagctggcccacacctatcaaagccccctgctctactgtgacctggaggtggaaggctttagggccaccatggcgcagcgcctggtgcgcgtgctgcagatctgtgctggccacgtgcccggtgtctcagctctgaacctgctgtccctgctgagaagctctgagggcccctccctggaggacctgtgagggtggctggcccctgggctgccccttctcatggcttcgtgctgactccataaacattctctgttgaggatgtccagtcagggcttgacaggcccaggctcagcccgccgtggctgggaaggttccctgcagtgccagtgctgcagcagggagagctgggcagaagcagcgagggggcccagctggcgagactgtagccccctcccactcccacactcactcttgcagagcctgtgtctttaagcagctggcgtgttacatctccatttaaggtttcctttgaacaaaaggtctgtggctaaaaaaagtttaaaaatca

SEQ ID NO: 2581 - DNA, 2331 bp, Homo sapiens
  source 1..2331: mol_type = genomic DNA
atggcctcggacacccaggcagtccctgacgtgtcggggaggagccgggcgcggaggtacgctgagtggagctcggggctgcgtagtggccgggccggcggaggggagacgtcggttgagcggcggcgaacatgcgcttttgacacattggaggctttcttgatcatggatggtgaagatataccagatttttcaagtttaaaggaggaaactgcttattggaaggaactttccttgaagtataagcaaagcttccaggaagctcgggatgagctagttgaattccaggaaggaagcagagaattagaagcagagttggaggcacaattagtacaggctgaacaaagaaatagagacttgcaggctgataaccaaagactgaaatatgaagtggaggcattaaaggagaagctagagcatcaatatgcacagagctataagcaggtctcagtgttagaagatgatttaagtcagactcgggccattaaggagcagttgcataagtatgtgagagagctggagcaggccaacgacgacctggagcgagccaaaagggcaacaatagtttcactggaagactttgaacaaaggctaaaccaggccattgaacgaaatgcatttttagaaagtgaacttgatgaaaaggaatctttgttggtctctgtacagaggttaaaggatgaagcaagagatttaaggcaagaactagcagttcgggaaagacaacaggaagtaactagaaagtcggctcctagctctccaactctagactgtgaaaagatggactccgccgtccaagcatcactttctttgccagctacccctgttggcaaaggaacggagaacacttttccttcaccgaaagctataccaaatggttttggtaccagtccactaactccctctgctaggatatcagcactaaacatcgtgggggatctcttacggaaagtaggggctttagaatccaaattagcagcttgcaggaattttgcaaaggaccaagcatcacgaaaatcctatatttcagggaatgttaactgtggggtgctgaatggcaatggcacaaagttctctcgatcagggcatacatctttcttcgacaaaggggcagtaaacggctttgaccccgctcctcctcctcctggtctgggctcctcgcgtccatcgtcagcgccgggtatgctgcctctcagtgtgtgagtgcctagcctccaggtgggggctcctgccctcctccaacaacccaggacacccacgcctcacccctcggtgcctgggcccagccccgtgcccctccgtctgcctccgcacggctggcagagggcaggctgcatgcagtggcggctactgggccctgcccagccccggaactctgcgcgatatcaatactggctattttctcttctcgccgtagtgccgttggtttcacatgattgcacttttgtgggtcgcaaggtgatacatacgtgtattacttggtcactggatgcagaagtacccattcatcacacctgccccatagcccccactctgctgtactgataggatttagttgtgttttaggacattgcaaatcttctagaagttctcccccaaatcaggtcaatgtgtgccctcctgagctcccacccaggcatctccagtgctcatgatcatgtgtcccccaactccacccctcacagtttgggcctgtttctggcaaagagtcaggaaggttactgaattagggaacattttctgcaccttctgattttacttaagcagctaccattccatggacttgcctcccagagcagcacaatgcccgtctgagccccacgtggcaggagcctctgggacggggcacacacaggcccagcctctgtgctgtctcctcctccgtgcgcctcagactcggggtgagggaggcgggcagcctctcgccagccttcccgtccttcagttcaacgacatctttggagtgtttttgttttctcttccaagggccgtcccgttgtgttaggaagggtgagtggctggttccagggtgggccggtgccagctccggggtggactgaacagcggcggctgtccctgtgcatcctttgattactctcatgctgcatttactgtttacatttgttttattgtacataggtttgtaaacattattgcctgagatatttgtatataacttgggctttgtagcttttatttattcagaacgcatacggcatgttaatgactctgatggtgtcctcctctgggcagctgtataggatcatcatgtggttacaaaaaatacttccctcaaaaaaattcttttaatgtggaaacaataaatttcac

SEQ ID NO: 2582 - DNA, 1606 bp, Homo sapiens
  source 1..1606: mol_type = genomic DNA
gggtttgaatccccggcggcggcgcggggcggccgcggaccgtgagtcagcattggcggcggccccagcgcgtggcagccgtgcgccgccaaggttctgcgttagacctgcatcttagcaatgtgaatattgcatccctagagaaggacctggaagagcaagacggccacgacctgggagcagcaggtcccaggtcgctggccggctctgcacctgtcgccatccccggctccctgcccagagcaccatcgctacactcgccatcctctgcgtccacctcgccgctcggttcgctgtcccagcccctcccagggccggtgggctcctcagccatgacgcctccccagcagccgccacccctgcgttcagagccgggcacactgggctctgcagcctcatcctacagccccctaggtttgaacggtgtccccgggagcatctgggactttgtttccggcagcttctcccccagcccctcccccatcctgagtgccggccccccatcctcttcgagtgcaagtccaaacggagctgagctggcccgggtcaggcggcagctggacgaggccaagaggaagatccggcagtgggaggagtcctggcagcaggtgaagcaggtctgcgatgcctggcagcgagaggcgcaggaggccaaggagcgtgcccgtgtggccgatagcgaccggcagctggcgctgcagaagaaggaggaggtggaggcacaggtgaagcagctgcaggaggagctggagggcctgggcgtagcctccacactgccggggctgcggggctgtggggacatcggcaccattcccctgccgaagctgcactcgctgcagagtcagctgcgcctggacctggaggcggtggacggcgtgatcttccagctccgcgccaagcagtgtgtggcctgccgggagcgggcccacggtgctgtcctgcggccctgtcagcaccacatcctctgtgagccgtgtgcggccaccgcacctgagtgcccctactgcaagggccagcccctgcagtggtgacctcagcggggacagccacctcctgctgggcaccctggctccagcgctcctcctgaccacggacatgtcgtcactcgcttctggtgccaccgacgtgaggaccgaggctgggagcccttcctgttacacgttatcatgaggctgggagccccgcctgcgcttggcctgacagcctttcctgtcacacgttgtcacctatctagtcctaccgacggtttcaaggtattttcctcaaaaaccttaaatgcaaacccacagaacccgcctgcctgtccctgaggggcctggtgcctccgggatccacgcggcgctgtgatcacagcagtttgtggtcctgacactactgtgactaggccactgggagctggggtctttcaaagcactttgtaaaccgaggaatttagttagaggttataaattgctctaagctgctttctgtttttttttaatatgcgataatatgaagctttatatgtgtactgtgaacttaaatatttcatatcagtttattgtcaattcatagtatgctaaatatattagatttcatattctgaaactagtacttatgaaatgag

SEQ ID NO: 2583 - DNA, 1634 bp, Homo sapiens
  source 1..1634: mol_type = genomic DNA
atgctgccctggcctcctgcactggccatgcccatgcccacggagggcaccccgccacctctgagtggcacccccatcccagtcccagcctacttccgccacgcagaacctggattctccctcaagaggcccagggggctcagccggagcctcccacctccgccccctgccaagggcagcattcccatcagccgcctcttccctcctcggaccccaggctggcaccagctgcagccccggcgggtgtcattccggggcgaggcctcagagactctgcagagccctgggtatgacccaagccggccagagtccttcttccagcagagcttccagaggctcagccgcctgggccatggctcctacggagaggtcttcaaggtgcgctccaaggaggacggccggctctatgcggtaaagcgttccatgtcaccattccggggccccaaggaccgggcccgcaagttggccgaggtgggcagccacgagaaggtggggcagcacccatgctgcgtgcggctggagcaggcctgggaggagggcggcatcctgtacctgcagacggagctgtgcgggcccagcctgcagcaacactgtgaggcctggggtgccagcctgcctgaggcccaggtctggggctacctgcgggacacgctgcttgccctggcccatctgcacagccagggcctggtgcaccttgatgtcaagcctgccaacatcttcctggggccccggggccgctgcaagctgggtgacttcggactgctggtggagctgggtacagcaggagctggtgaggtccaggagggagacccccgctacatggcccccgagctgctgcagggctcctatgggacagcagcggatgtgttcagtctgggcctcaccatcctggaagtggcatgcaacatggagctgccccacggtggggagggctggcagcagctgcgccagggctacctgccccctgagttcactgccggtctgtcttccgagctgcgttctgtccttgtcatgatgctggagccagaccccaagctgcgggccacggccgaggccctgctggcactgcctgtgttgaggcagccgcgggcctggggtgtgctgtggtgcatggcagcggaggccctgagccgagggtgggccctgtggcaggccctgcttgccctgctctgctggctctggcatgggctggctcaccctgccagctggctacagcccctgggcccgccagccaccccgcctggctcaccaccctgcagtttgctcctggacagcagcctctccagcaactgggatgacgacagcctagggccttcactctcccctgaggctgtcctggcccggactgtggggagcacctccaccccccggagcaggtgcacacccagggatgccctggacctaagtgacatcaactcagagcctcctcggggctccttcccctcctttgagcctcggaacctcctcagcctgtttgaggacaccctagacccaacctgagccccagactctgcctctgcacttttaaccttttatcctgtgtctctcccgtcgcccttgaaagctggggcccctcgggaactcccatggtcttctctgcctggccgtgtctaataaaaagtatttgaaccttg

SEQ ID NO: 2584 - DNA, 4974 bp, Homo sapiens
  source 1..4974: mol_type = genomic DNA
ggtgcgaagccattcacccagcgcattccgccgcccgcaggcttgcggggaaacttccttattattgtgacgccgaaaacggagaaaccccgggtccggcgagaggggctgtgacagtcggagtcccaagctgcggttcggctgctgccgagaactgcaaggtgtggaatatttctggcttctagtccaatgccaagtgtgtgacctgtggctacatgattccctgaaagataagaacaatgttatgttggggatattggtctctgggccaacctggtatcagcaccaacctgcagggaattgtggctgagccccaggtgtgtgggttcatatctgacagaagtgtcaaggaagtggcctgtgggggaaaccactctgtgttcctgctggaagatggggaagtttacacatgtggtttgaacaccaaggggcaactgggccatgagagggaaggaaacaagccagaacaaattggagctctggcagatcagcatatcattcatgtggcatgtggcgagtcccacagtctggccctcagtgaccgaggccagctgttttcttggggtgcagggagtgatggtcagctaggactcatgactactgaggattctgtggcagtgcccaggttaatacaaaagctgaaccagcaaacaatattacaagtttcctgtggcaactggcattgcttggctcttgcggctgatggccagttcttcacctggggaaagaacagccatgggcagcttggcttagggaaggagttcccctcccaagccagcccacagagggtgaggtccctggaggggatcccactggctcaggtggctgccggaggggctcacagctttgccctgtctctctcaggagctgtttttggctgggggatgaataatgccgggcagctagggctcagtgatgaaaaagatcgagaatctccatgccatgtaaaactcttacgcacgcaaaaagttgtctatattagttgtggagaagaacacacagcagttctcacaaagagtggaggtgtgtttacctttggcgctggttcctgtgggcaacttggacacgactccatgaatgatgaggttaaccctagaagagttctagagctgatgggtagtgaagtaactcaaattgcttgtggcagacaacataccctagccttcgtgccttcttctggactcatctatgcatttggttgtggagcaagaggtcaattaggaactgggcacacttgtaatgttaagtgcccatctcctgtcaagggttactgggctgcccacagtggccagctttcagcccgagctgatcgctttaaatatcatatcgttaagcagatcttctctggaggagaccagacttttgtactttgctccaaatacgagaattattctcctgctgttgacttcaggactatgaaccaagcacattataccagtttaataaatgatgaaaccatagcagtttggagacaaaaactctcagaacacaacaatgcaaatacaatcaatggtgttgttcagatattatcttctgcagcctgttggaatggaagttttcttgaaaaaaaaattgatgaacattttaaaacgagtcccaaaatccctgggattgacctgaactcaactagggtgttatttgagaagttaatgaactctcagcactccatgattctagaacagattttgaacagttttgaaagttgtctgattccccagttgtcaagctcaccaccagatgttgaagccatgagaatctatttaatactacctgagtttcccctactccaggattccaagtattatataacattgactattcccttggctatggccattcttcggctggatacaaaccccagcaaagtactagataactggtggtctcaggtatgcccgaaatatttcatgaagctggtaaacctctataaaggtgcagtcctttatctactgaggggaagaaagacattcttaattcccgtactgtttaacaattatatcacagcagctctcaaactcttggagaagttatataaggtaaatcttaaagtgaagcatgtggaatatgatacattttacattcctgagatttccaatctcgtggacattcaggaagactacctcatgtggttcttgcatcaagcagggatgaaggctagaccatcaataatacaggatactgtaacactttgttcctaccctttcatctttgatgcccaagccaagaccaaaatgttacagacagatgctgaactacagatgcaggtggcagtcaatggagccaacctgcagaatgtcttcatgcttctcaccctggagcctctgctggccagaagccccttcctggtccttcacgttcgcaggaacaaccttgttggagatgccctaagagagctgagcattcattctgatattgatttgaaaaagcctctcaaagtaatctttgatggtgaagaagcagtggatgccggtggtgttacaaaggaattttttcttttgctgttaaaagaacttttgaatcccatctatggaatgtttacctactatcaagattcaaatctcttgtggttttcagacacgtgttttgtagagcacaactggtttcacttgattggtataacctgtggactagctatctacaactccactgtggtcgatctccacttcccattggctctctacaagaagttactcaatgtaaagcctggcttggaagacttaaaggagttgtcacccactgaaggaaggagtctccaagagcttttagattaccccggggaggatgtggaggagactttctgcctcaacttcacgatctgccgagaaagctatggagtgattgaacagaagaagctgatacctgggggagataatgtaactgtgtgcaaggataacaggcaggaatttgtggatgcttatgtgaattatgtcttccaaatctcagttcatgaatggtacacagccttctctagtggcttcctaaaggtgtgtggtggcaaagtacttgagctcttccagccttcagaactgagggctatgatggtggggaacagcaactacaactgggaagaactggaagagactgccatctacaagggagattactcggccacacatcccactgtaaaactattttgggaaacatttcatgagtttccattggaaaagaagaagaagtttctcttgttcctgacaggcagcgatcggattcccatctacggcatggccagtctgcagattgtcatccagtccacagccagcggggaggagtacttgccggtggcccacacttgctacaaccttcttgacctccccaagtacagcagcaaagagattctgagtgcccggctgacccaggcccttgacaactatgaagggtttagtttggcctgaggcttctcagcttgtccagtatttcccttcgttcctcagtgtccacattgaggcctatacagaaaatcatggggagtgatttctatttttttattgtctaagtgggttgggacttttaaatactgagcctggttgatgtgtttctgggattgtatagcagtaaacaacctttttgaaaaattagaggttggggatggggtgaaaaattggcccttgtatgggaggtgtttttgtttttgttttaaaccaaactacccagtattccttgcacttgtgaatgtgttgcactctgctggatgaaatggcagtggatttttaaactttaatttcccaaatgtctctctcagccctgatgttttctcacagtgcttccttgtccttctcttaacttctcattcctctataagaatgatttagactgacctgtccttttttatctgcgcatgcgagaacatcaccttcctctgtacacttggaaatgcctctggcttgttgcagccctcctttaacccaaaggaggaaaggactgcttcagaaactcccaattccaaaaagctgagtctgggtccattattttggcagaactcctaagaatttatgggagcctatataaacatatcttgcttttaaaaagttcttgagggaatagcaactttcccatggctgtgcctatttcctagaccttttaaaagatgtgcagagcagcttagcattcgttgcagctgagcctaattttttcttgctcatccttgtccctttgacaataaggttaattgatagacccaccacctcttgcactctcgcttttggagcaagttgcattaactattttgagtctctatattgtccaagaaaagtagaaataataaatttactttccctttttctatcaccttatgtcctctaccattttctccttcctcccttcccttattttctccttttcgtaccctgtgtcctccctgattttcctttcgtttcttctttattttatcccattctctgttacttgactcagtgctcccttcctctcctctccttctagtggatgcatgcagcctttttttcaatttttatttaaattgcaaaatttttactcagattttttttcctcttccctaattgctaagatttaaggacgttctttattatgaaactttatcacattcgaaatgtttgtttacagtgggattttaggggggattgtgtttaaatcaaatatatgtattttaaaaataatgacatgctcaaccttcctcatcatggagtaagaaaattctacatgattaaagaatccatgtaagtctaattttaaattcctagtaactagagaaaagacttatttatataaaatgaagtatttatgaactgtgataaagcatcaaatcttgatgaaggattgtagatttttgctttttctttttgtttttaaaacttattccaattgctaaattggtagtttttcagtctttataaatacaggattaaaaatatatatacagttatatgaaatgtttattttctatgtgtgtgcatatagttcaatattatgcaataaatttggtgttttaacttaaaacta

SEQ ID NO: 2585 - DNA, 567 bp, Homo sapiens
  source 1..567: mol_type = genomic DNA
gactcacgccttcgccgtagcatctttcgcagcggaccgaagagaagaaaagtaggccagagccgaactctcttcctgccaagatgtctattggtgtgccgattaaagtactgcatgaggccgagggccacattgtgacatgtgagacgaacaccggtgaggtatatcgggggaagctcattgaagcagaggacaacatgaactgccagatgtccaacatcacagtcacatacagagatggccgagtggcacagctggagcaggtatacatccgtggcagcaaaatccgctttctgattttgcctgacatgctgaagaacgcacccatgttaaagagcatgaaaaataaaaaccaaggctcaggggctggccgaggaaaagctgctattctcaaggcccaaggttatctgagttcattggagtgggtgcttgtgcatatatgctaggtcccagagaaaaacctccatgctgggttgatagcagcagctaggatcagttgcccaagactctggattctcgagatgaagaccgtcagcagaggctgatctctcctgtgggctcatgtcc

SEQ ID NO: 2586 - DNA, 1696 bp, Homo sapiens
  source 1..1696: mol_type = genomic DNA
agcgtcacgcagcgaggccgtgcgtgcgcgggcgtcagggcggcgctgagttgaggacgctggcggctccgcgacgagctttgttttttcggttgggcatgctgcttaccgcaggatgatggaagcgacggcccgtacaaagacagaagcgttggtttcactgagtcagtgctgattctctcaaatagagcttgaaggataaatcttcatttttgtttcaacaaaacttcgaaacaaaatggaagaaaataatctacagtgcagtagtgtggttgacggtaattttgaagaagttcccagggagacggcaattcagtttaaacctccactatacagacagcggtaccagttcgttaaaaatttagtggatcaacatgagcctaagaaggttgcagacctgggatgtggtgatacttcactcttaaggctgctaaaagtcaatccatgcattgaattgcttgttggagtagatattaatgaggataaattacgatggagaggggattcgttagctcctttcctgggggattttctgaaacctcgggatctgaatttgaccatcacattgtatcatggctccgttgtggagagagactctcgtttgcttggatttgacttgataacgtgtattgaattaatagaacatttggattcaggtgatctggccagatttcctgaagtggtatttgggtacctgtctccatccatgattgtcatcagcacaccaaactctgaattcaatcccctgtttccatcagtgaccttaagagattcagatcataaatttgagtggaccagaatggagtttcagacctgggctttatatgtggcaaatcgctatgattactctgtggagtttactggtgtcggggaaccaccagctggagctgagaatgttggatactgtacccagataggaatcttccggaaaaatggaggaaaggcaacagaatcatgtctttcagagcagcatgatcagcatgtttataaagctgtttttaccacctcatacccaagcttacagcaggaaaggttctttaaacttgtgttggttaatgaggtgtcccaacaagtggaaagcttaagagtgagccacctgccaaggcggaaagaacaggctggggaacggggtgataagcccaaagacattggtggctcaaaggcccctgtcccatgctttggaccagtcttcacagaggttgagaaggccaagatagagaactctcccacacccttctgtgttggagataaatttttcgtacctctgcagagactccttgcgtatcccaagttgaaccgcttatgtgctaatgaagagatgatgagatcagtcattgctgactcaattcctctgagcagtgatggttctgcagtggtggctgacctgcgtaattattttgatgaacagtttgagttttgaaccatgtttatttcctgaaatttcagggtctcagcgatagttgtgctcacttagaatttagttttttttgtgtaatcctaattcaagtaatgtttttaaagtttcactgcaaaagtctatgttccaagccattggacagacctgcttgagatatggccagactgcagtgagccctgagaaagatatgagggtttaaaacgggtgctttcctttgattttggacttttttgttttctcaagaataaagaagttggatgtggtaatatgttaattttg

SEQ ID NO: 2587 - DNA, 622 bp, Homo sapiens
  source 1..622: mol_type = genomic DNA
ggcctgtgcggctgcaggtagagtgtcttaggaacctaggaaataactcggaacctgtaacgtcccactggtttggacatattcctctcctgatctggcctcatctgttccagggaggtgggattgaacaaagtcttgctctgtcacccaggctggagtgcagtggcgcaatcacggctctctgcagcctcgacccccggggctcaagctattctcctgcctcaccctcctgagtagataggactacaggcacgtgcggctatgcctagctaattttttaaatcttaagtagagacattgtctcactgtgttgcccagactggtcttgaactcctaggttgaagggatcttccagcctctgcctcccgaagtgctgtattacagaacatatgcagtaatgtcacctcaaaagagagttaagaacgtccaggcacaaaacaggacttcacaaggtagtagtagttttcagaccacgctttcagcctggaaagtaaaacaggatccaagcaactcgaagaacatctcaaaacatggacaaaacaatccagtgggagattatgaacatgctgatgatcaagctgaagaagatgctttgcaaatggcagtgggatattttgagaaa

SEQ ID NO: 2588 - DNA, 2033 bp, Homo sapiens
  source 1..2033: mol_type = genomic DNA
cgtgtatacccgctcaacgctgggacgttacagccagggccaatgggcagagcgggactcgaggccccgcccccgccttgtggcgtcacggggacgccgggggcgcgcgggctgcagggccgcgtaggtccccgcccccagagtctggctttccgcggctgcccgcctcgcgcgtcttccctgcccgggtctcctcgctgtcgccgccgctgccacaccatggccttcgtcaccaggcagttcatgcgttccgtgtcctcctcgtccaccgcctcggcctcggccaagaagataatcgtcaagcacgtgacggtcatcggcggcgggctgatgggcgccggcattgcccaggttgctgcagcaactggtcacacagtagtgttggtagaccagacagaggacatcctggcaaaatccaaaaagggaattgaggaaagccttaggaaagtggcaaagaagaagtttgcagaaaaccttaaggccggcgatgaatttgtggagaagaccctgagcaccatagcgaccagcacggatgcagcctccgttgtccacagcacagacttggtggtggaagccatcgtggagaatctgaaggtgaaaaacgagctcttcaaaaggctggacaagtttgctgctgaacatacaatctttgccagcaacacttcctccttgcagattacaagcatagctaatgccaccaccagacaagaccgattcgctggcctccatttcttcaacccagtgcctgtcatgaaacttgtggaggtcattaaaacaccaatgaccagccagaagacatttgaatctttggtagactttagcaaagccctaggaaagcatcctgtttcttgcaaggacactcctgggtttattgtgaaccgcctcctggttccatacctcatggaagcaatcaggctgtatgaacgagacttccaaacgtgtggtgattctaactcgggtttgggcttttctttaaaaggtgacgcatccaaagaagacattgacactgctatgaaattaggagccggttaccccatgggcccatttgagcttctagattatgtcggactggatactacgaagttcatcgtggatgggtggcatgaaatggatgcagagaacccattacatcagcccagcccatccttaaataagctggtagcagagaacaagttcggcaagaagactggagaaggattttacaaatacaagtgatgtgcagcttctccggctctgagaagaacacctgagagcgctttccagccagtgccccgagtgcctgtgggaatgctctttggtcagacattccctcacacagtacagtttaataaatgtgcattttgattgtaatctatcgaagtgattattacaccagttacagcagtaatagattctccattaagaaataattcccttttttagtctgttcatttctgtgtattttctaaacagctttacacccttggtgccttggagcaaacatgttttttgaaccttgtcatttttgtgaagaattgcctagattccttctctcatcaacgggaaagtacttcctctgagagtgcgagtgcaccatgctcactgttgctgcgtgggagagtcacaagccactggcaagcaagtggtatagtctgtgaagcactgcagcgagcagcacctggatcttgcctttataagaacattttactacctgcagctttgagtcttgccctacattttgggcatgacataagatgtgtctttattcagctcgtcgtgaagatgctgctgctgaatgggtcagcatatctctgtttgcatggtttgcaggaggtcggttttcatggtcattcagttccacagatctgaatgattactgtctgtctgtgtcttttttccatgagaaatcactgttgcaaattgcctataaattgactctactaaaataacaatgtttcagtctgaaaatttgaattgaaaaaaatgtataatataaaattgtaatacactcaaatgattataaaagtaaaagttggtaatttaggcagaagcta

SEQ ID NO: 2589 - DNA, 2210 bp, Homo sapiens
  source 1..2210: mol_type = genomic DNA
aacgccagcaggcttccgggcccggagtgggcggtgggactcggggtcccagagagccgtgcgcgggccgcgacgccgagcaccgccctcgccgtcgcctccgggctttctccggtcgctgccgccaccaccgttgcttcgcgggctgggaggcccggggtccccgggcgaacagaggctgcggtggactgacgccgcaggggcgagctagccggctccgcgcctctccgcgggatccagacgcctcctggggctgctggcggagggtctgaggcggcgcggccatggctcacctccggggatttgccaaccagcactctcgagtggaccctgaggagctcttcaccaagctcgaccgcattggcaagggctcgtttggggaggtctacaagggcatcgataaccacacaaaggaggtggtggccatcaagatcatcgacctggaggaggccgaggatgagatcgaggacatccagcaggagatcactgtcctcagtcagtgcgacagcccctacatcacccgctactttggctcctacctaaagagcaccaagctatggatcatcatggagtacctgggcggcggctcagcactggacttgcttaaaccaggtcccctggaggagacatacattgccacgatcctgcgggagattctgaagggcctggattatctgcactccgaacgcaagatccaccgagacatcaaagctgccaacgtgctactctcggagcagggtgacgtgaagctggcggactttggggtagcagggcagctcacagacacgcagattaagaggaacacattcgtgggcacccccttctggatggcacctgaggtcatcaagcagtcggcctacgacttcaaggctgacatctggtccctggggatcacagccatcgagctggccaagggggagcctccaaactctgacctccaccccatgcgcgtcctgttcctgattcccaagaacagcccacccacactggagggccagcacagcaagcccttcaaggagttcgtggaggcctgcctcaacaaagacccccgattccggcccacggccaaggagctcctgaagcacaagttcatcacacgctacaccaagaagacctccttcctcacggagctcatcgaccgctataagcgctggaagtcagaggggcatggcgaggagtccagctctgaggactctgacattgatggcgaggcggaggacggggagcagggccccatctggacgttcccccctaccatccggccgagtccacacagcaagcttcacaaggggacggccctgcacagttcacagaagcctgcggagcccgtcaagaggcagccgaggtcccagtgcctgtccacgctggtccggcccgtcttcggagagctcaaagagaagcacaagcagagcggcgggagcgtgggtgcgctggaggagctggagaacgccttcagcctggccgaggagtcctgccccggcatctcagacaagctgatggtgcacctggtggagcgagtgcagaggttttcacacaacagaaaccacctgacatccacccgctgaagcgcactgctgttcagataggggacggaaggtcgtttgtttttgttctgagctccataagaactgtgctgacttggaaggtgccctgtgctatgtcgtgcctgcagggacacgtcggatcccgtgggcctcacatgccaggtcaccaggtcaccgtctccttccacccctgcagtgtgctgttgtgcacgtcagggacgctgttctctatgcccactgccctcctccctctcctggcccagcagtattgctcacgggggctccagccgccggcgtggccctcatgagctacgcctgggtcttctgcagactcatgcagccctatggccgctcagaccaaggcgcagagcaactatcagggcagctctgcctcctcctcccatgaggtggggagaggcaacagggcagcccccagaggagtgtcctggccgctgtcctcccggggcccatgatggccatagatttgccttgtggtgttggatcaggtactgtgtctgctcataagtacttgtgtcatccagaatgttttgttttttaagaaaattgaattacttgtttcctgaaatattctgaggttaatatgttagttttcatagaacattgagaggcccctgccactttcaataaagacctgacttggagaca

SEQ ID NO: 2590 - DNA, 1751 bp, Homo sapiens
  source 1..1751: mol_type = genomic DNA
accgccgccgccgccgctggccaaaaagcggagcccaggggaagcgtgtcctgctcagaccgccttccttctccattgccacccgtgccgaacagccaggctgcccaattgcaactgtagaccaatgaactaatccatcgcccgcagcccgactctcagcagcggttcgtcccggtgcccacccccgcgaagcggagcgcccgggcacctagcctccctgccggccacctagcctccctgccggccacgatgccgaacgtgctgctgccgcccaaggagagcaacctcttcaaacgcatcttgaaatgttatgaacagaagcagtacaaaaatggcctcaagttttgcaagatgattctgtcgaacccaaaatttgctgaacatggagagactttggctatgaaaggattaacactgaactgtttaggaaaaaaagaagaagcttatgagtttgttcgtaaaggacttcgtaatgatgtcaagagtcatgtctgttggcatgtatatggactcttgcagcgttctgataaaaaatatgatgaagctataaaatgttaccgaaatgccctcaaattagataaagataacctgcaaattttgagggatctctcactgttgcagatccaaatgagagaccttgaaggttaccgagagacaagataccagcttcttcagttgcgccccacacagcgtgcctcctggattggatatgctattgcataccatttgctgaaagattatgatatggccctaaaactgttggaagaatttagacaaactcagcaagttcctccaaacaaaatagattatgaatatagtgaattgatattataccagaatcaagtgatgagagaggcagatctgttgcaggaatctttggaacatatagaaatgtatgagaaacaaatatgtgataaacttttggtggaagaaattaaaggggaaatactgttgaaattgggaagattaaaagaagccagtgaagtgttcaaaaacttgattgatcgaaatgcagaaaattggtgttattatgaaggcttggaaaaagctctacaaattagcactttagaagagaggcttcaaatttatgaagaaattagtaagcagcaccccaaagcaattacacccagaagattacctttgactcttgtcccaggtgaaagatttagagaactaatggataagttcctgagggttaacttcagtaaaggctgcccacccttgtttactactttgaaatctttatattacaatacagaaaaggtttctataatccaggaacttgttactaattatgaagcctctcttaaaacgtgtgacttttttagcccatatgagaatggggagaaggaacccccgacaacactactctgggttcagtatttcctggcacagcactttgataaacttggacagtattctttggctttggattatattaatgctgcaattgctagtactccaactctaatagaattattctatatgaaagcaaaaatttacaaggtaaaatctgaatcctgttttttgagtagttgaagaattcagctactttaagaatccttggagttttttctttgtggaaacaagttctagggcaccctgataatctttttctaataatcctgtgtagtttcatgttatattaattgtataatcaatgtgtaattagatgtgtaatcatttgagctcttagtaaatgtgaactgtaattttgatttctaaataaatttgacagaaatggtgacaga

SEQ ID NO: 2591 - DNA, 555 bp, Homo sapiens
  source 1..555: mol_type = genomic DNA
atttactccatcctttatagtgatgctacaggacgaagaggaatggataaaaacattggcgagcaactcaataaagcgtatgaagccttccggcaggcatgcatggatagagattctgcagtaaaagaattacagcaaaagactgagaactatgagcagagaatacgtgaacaacaggaacagctgtcacttcaacagactattattgacaagctaaaatctcagttacttcttgtgaattccactcaagataacaattatggctgtgttcctctgcttgaagacagtgaaacaagaaagaataatttgactcttgatcagccacaagataaagtgatttcaggaatagcaagagaaaaactaccaaaggtagacattgcttctgcagaaagcagcatttaaatgctgatgcgtgacatagcttcctcattttatttttctgaagtgatctgctggaattccaaacagaagttccatatatacaaatatgtggcttaaatatttctaaatagaagaactattttcaagtaaaataaaggctgaggttttgtattt

SEQ ID NO: 2592 - DNA, 4121 bp, Homo sapiens
  source 1..4121: mol_type = genomic DNA
gaatccccggcggcggcgcggggcggccgcggaccgtgagtcagcattggcggcggccccagcgcgtggcagccgtgcgccgccaaggtgcgggtctcgttactcggcggtcaggagcgggccctcccttaggtgcgccccccgccaggttctgcgttagacctgcatcttagcaatgtgaatattgcatccctagagaaggacctggaagagcaagacggccacgacctgggagcagcaggtcccaggtcgctggccggctctgcacctgtcgccatccccggctccctgcccagagcaccatcgctacactcgccatcctctgcgtccacctcgccgctcggttcgctgtcccagcccctcccagggccggtgggctcctcagccatgacgcctccccagcagccgccacccctgcgttcagagccgggcacactgggctctgcagcctcatcctacagccccctaggtttgaacggtgtccccgggagcatctgggactttgtttccggcagcttctcccccagcccctcccccatcctgagtgccggccccccatcctcttcgagtgcaagtccaaacggagctgagctggcccgggtcaggcggcagctggacgaggccaagaggaagatccggcagtgggaggagtcctggcagcaggtgaagcaggtctgcgatgcctggcagcgagaggcgcaggaggccaaggagcgtgcccgtgtggccgatagcgaccggcagctggcgctgcagaagaaggaggaggtggaggcacaggtgaagcagctgcaggaggagctggagggcctgggcgtagcctccacactgccggggctgcggggctgtggggacatcggcaccattcccctgccgaagctgcactcgctgcagagtcagctgcgcctggacctggaggcggtggacggcgtgatcttccagctccgcgccaagcagtgtgtggcctgccgggagcgggcccacggtgctgtcctgcggccctgtcagcaccacatcctctgtgagccgtgtgcggccaccgcacctgagtgcccctactgcaagggccagcccctgcagtggtgacctcagcggggacagccacctcctgctgggcaccctggctccagcgctcctcctgaccacggacatgtcgtcactcgcttctggtgccaccgacgtgaggaccgaggctgggagcccttcctgttacacgttatcatgaggctgggagccccgcctgcgcttggcctgacagcctttcctgtcacacgttgtcacctatctagtcctaccgacggtttcaaggtattttcctcaaaaaccttaaatgcaaacccacagaacccgcctgcctgtccctgaggggcctggtgcctccgggatccacgcggcgctgtgatcacagcagtttgtggtcctgacactactgtgactaggccactgggagctggggtctttcaaagcactttgtaaaccgaggaatttagttagaggttataaattgctctaagctgctttctgtttttttttaatatgcgataatatgaagctttatatgtgtactgtgaacttaaatatttcatatcagtttattgtcaattcatagtatgctaaatatattagatttcatattctgaaactagtacttatgaaatgagtgtttatctagtagtaagacctaggatttttacattttccaattaagtgcaaatagtatttataagcagagtgattatggattgagatgtttttaacttgatggaaggagctagttttcctgagcctgtgtgtgcaccaggcactggggctgatgttccagcctcgtggcgtgggagcaggagagctccgtcctgcatttctgtggtccgtggccgctgtttctgtgcgcctgcgcctcggagagcaagtgaaggagcatcatgggttttgttttctcccttaaccctctgaaagacagtttgatactaacaaaaaacgcagcagaggggatccgacgtcagagcttttagaattacttttttaagcagctgtcttctggctgggtgcggtggctcatgcctgtgatcccagcactttgggaggcgggtggatcacctaaggtcaggagttcaagaccagcctggccaacatggtgcaaccccgtcttagtaaaaatacaaaaattggcctggcgtgagagcgggcacctgtagtcccagctactcgggaggctgaggcaggagaatcgcttgaacctgggaggcagaggttgcagtgagccgagatcgcgccaccgcactccagcccgggtgacagagcgagactctggctcaaaaaaaaaaaaaaaaagctgttttctgattactcagagctgtcctaggcaatggtgctttgtagctccttggagatgtcgctgggcgtcctggcaggggtcaggcagtgaactgggagagtggttgcctccccagcacccgtgaccaccctggtcctgctcgtgtgggagatgctcgggccgtgtgtgcgccagggtccggggtgccgggtgtatgtggcagtcacctgacccgcgctgccagttatcatcggagctcatccatgtggccagtgaggtcacaggagaggacccggccacagcctctcagtggcctggagcacacgggggaagcgaccccccccaggtcccggctctgctgtggtcccctgtcccgtctgcccctggagcgacagtgtggtttcggccgcagcagaaacgtgactgagaacgcatccccgcgatgacctgacccttctgctcagggctgggactgtccctaggagttgagcaggaacaggcatctgtggtttacggcgacctggctctccgcgggccacgtgggtggtgagggcacacgagtgggaagcggcaccgacgtgtttctccccgaccgtggctttgccaaagacttttaatagcattttttaagtgcaaaacgtctaggtaaaaatctttatcatcagtgaccaaattagaatgtatttaatatagtaggtggtttaagaactgttttaacgtaagacaaactgatagcaacattctgttgttttaaaggaagtgggtccgtgacattctgcagctagtccactactccaaggtaactatcgacttggtttcagtgaatctattttgtttttaactacagtgatttattagctcagtatctagaaattacgtatattttgtgctactgtcatcgatgtgtaaactctgtttttatttgtatttatgcacttggttcccatttggagcctctggtcttttctgggataagtggtgtctgccgagacatctcccggttgtcagtggtcaggagcagctgagctctagtctgccagctgctctgctctttctgggaaggaggtggcgcccgcccctcagggtgtctccagggctcagcttccggggtggtagagctggggagccccaggggtggggggacagctgggagatggaggtggcacctgctcccctagatcagtactggctctgaggacaggtgagcagtgggaagaccaaagaatggctggcagcgctgccagggttggaaatgggggcaagatcctggggctgtgtgccctggggcctccctcacctgtcttggtggccatggcctcagggatggctcctaggtggctgaggcacagcagtggctggaaggtgccccgtggaggctgaggtggaggcgcgcccagcagctcccccctgtggccatggcgggcacggggcgtaggagctggctggcggccggctctgcatgttcttgttgcctgtcgtctgtaactctagtgttcgacattcgccgtgatacagtggtgtcacgacgtgtgtaactgtggtcagcagaccttgttccgcgtggacgcctcaagtggattaatttctggaagcctcaatctgtatgtttgagtatttacatgagaatgttatttgaatggaattttcttaacccagaaggtagtatttataatcatttacttgtagcgaactgtttaaagttaacacttgtttaaatttttttacactatagcatttatgcaatggtttacagaattcatggagttatttttatcagtatgggaattaattaaaaccttgaatcttt

SEQ ID NO: 2593 - DNA, 2110 bp, Homo sapiens
  source 1..2110: mol_type = genomic DNA
ctgtcccactgggcaggtgcctctgacggagaggaggcgtcgtcgggaagtatgtggccgtggctgctctggcatgatcctgaagactggcacgaaggggaatggagccgcacagagaatttcaggcatcagaggggaagcgcaggtttgtctacagattttgagcgttcgaagttgacccctgactaagtatactttgctgctccctcagcctttgaaaaaatgtctgtcacatatgatgattccgttggagtagaagtgtccagcgacagcttctgggaggtcgggaactacaagcggactgtgaagcggatcgacgatggccaccgcctgtgcagcgacctcatgaactgcctgcatgagcgggcgcgcatcgagaaggcgtatgcgcagcagctcactgagtgggcccggcgctggaggcagctcgtggagaaagggccccagtacgggaccgtggagaaggcctggatggccttcatgtccgaggcagagagggtgagcgagctgcacctcgaggtgaaggcctcactgatgaacgatgacttcgagaagatcaagaactggcagaaggaagcctttcacaagcagatgatgggcggcttcaaggagaccaaggaagctgaggacggctttcggaaggcacagaagccctgggccaagaagctgaaagaggtagaagcagcaaagaaagcccaccatgcagcgtgcaaagaggagaagctggctatctcacgagaagccaacagcaaggcagacccatccctcaaccctgaacagctcaagaaattgcaagacaaaatagaaaagtgcaagcaagatgttcttaagaccaaagagaagtatgagaagtccctgaaggaactcgaccagggcacaccccagtacatggagaacatggagcaggtgtttgagcagtgccagcagttcgaggagaaacgccttcgcttcttccgggaggttctgctggaggttcagaagcacctagacctgtccaatgtggctggctacaaagccatttaccatgacctggagcagagcatcagagcagctgatgcagtggaggacctgaggtggttccgagccaatcacgggccgggcatggccatgaactggccgcagtttgaggagtggtccgcagacctgaatcgaaccctcagccggagagagaagaagaaggccactgacggcgtcaccctgacgggcatcaaccagacaggcgaccagtctctgccgagtaagcccagcagcacccttaatgtcccgagcaaccccgcccagtctgcgcagtcacagtccagctacaaccccttcgaggatgaggacgacacgggcagcaccgtcagtgagaaggacgacactaaggccaaaaatgtgagcagctacgagaagacccagagctatcccaccgactggtcagacgatgagtctaacaaccccttctcctccacggatgccaatggggactcgaatccattcgacgacgacgccacctcggggacggaagtgcgagtccgggccctgtatgactatgaggggcaggagcatgatgagctgagcttcaaggctggggatgagctgaccaagatggaggacgaggatgagcagggctggtgcaagggacgcttggacaacgggcaagttggcctatacccggcaaattatgtggaggcgatccagtgatgagtcggggacaggccagcggggggacggaggcggcgggcccaggagcctcagccagccacgtgggcatccactccttttcctgcaagagatgatggttccattgctcttggcttcatggtgttcctggaaggcagatgagctggtcatttcgcctgggactcggcacctttccgagtgcagctggagggatctgagcgcaggaagacgcagaacaacagaaatagccgcccctccccgcccactgtgcctgttggcctatcatagatctctatgttcttgactttgtctctcctttccgagtcaatggtgggttacactgatcttgttccactgattactctctctgacgagtccatcacctgcaacttaaatgaacaagcttacatcccattttgagtgaagattttgaggtttttaatttaaa

SEQ ID NO: 2594 - DNA, 3581 bp, Homo sapiens
  source 1..3581: mol_type = genomic DNA
agaatgtcatcctcaagggaagtgcagagagatttcttcagtcctcagctgagtataagctggcctcctggagtctgtgaacacaaacgtccaatgtgagtgtgcctgtgcaagcccctggctgtttatactccggagggtgtccccgtgcgtcatcggtggagtggaccaaaactggtgatctgtttgccctgtgtgaccttgcccagaaccctgctgactgagagaacacatctgctggaagtcctctgggattcaaggtacagggagaactcgaggcctcactgaaacggaaagcaaatacaaagaaactttattttaaaaacatgtcttggtctcccaagaagagggcaattggattgctcagccagaatgaagagtagttttacagaaaaaagaggacaatattgggatcacctttgacctttccatttggaaataatattttctattgtgttatagaaaggtgggaagctttcatccagaacaatgaatttcataaaggacaatagccgagcccttattcaaagaatgggaatgactgttataaagcaaatcacagatgacctatttgtatggaatgttctgaatcgcgaagaagtaaacatcatttgctgcgagaaggtggagcaggatgctgctagagggatcattcacatgattttgaaaaagggttcagagtcctgtaacctctttcttaaatcccttaaggagtggaactatcctctatttcaggacttgaatggacaaagtctttttcatcagacatcagaaggagacttggacgatttggctcaggatttaaaggacttgtaccataccccatcttttctgaacttttatccccttggtgaagatattgacattatttttaacttgaaaagcaccttcacagaacctgtcctgtggaggaaggaccaacaccatcaccgcgtggagcagctgaccctgaatggcctcctgcaggctcttcagagcccctgcatcattgaaggggaatctggcaaaggcaagtccactctgctgcagcgaattgccatgctctggggctccggaaagtgcaaggctctgaccaagttcaaattcgtcttcttcctccgtctcagcagggcccagggtggactttttgaaaccctctgtgatcaactcctggatatacctggcacaatcaggaagcagacattcatggccatgctgctgaagctgcggcagagggttcttttccttcttgatggctacaatgaattcaagccccagaactgcccagaaatcgaagccctgataaaggaaaaccaccgcttcaagaacatggtcatcgtcaccactaccactgagtgcctgaggcacatacggcagtttggtgccctgactgctgaggtgggggatatgacagaagacagcgcccaggctctcatccgagaagtgctgatcaaggagcttgctgaaggcttgttgctccaaattcagaaatccaggtgcttgaggaatctcatgaagacccctctctttgtggtcatcacttgtgcaatccagatgggtgaaagtgagttccactctcacacacaaacaacgctgttccataccttctatgatctgttgatacagaaaaacaaacacaaacataaaggtgtggctgcaagtgacttcattcggagcctggaccactgtggagacctagctctggagggtgtgttctcccacaagtttgatttcgaactgcaggatgtgtccagcgtgaatgaggatgtcctgctgacaactgggctcctctgtaaatatacagctcaaaggttcaagccaaagtataaattctttcacaagtcattccaggagtacacagcaggacgaagactcagcagtttattgacgtctcatgagccagaggaggtgaccaaggggaatggttacttgcagaaaatggtttccatttcggacattacatccacttatagcagcctgctccggtacacctgtgggtcatctgtggaagccaccagggctgttatgaagcacctcgcagcagtgtatcaacacggctgccttctcggactttccatcgccaagaggcctctctggagacaggaatctttgcaaagtgtgaaaaacaccactgagcaagaaattctgaaagccataaacatcaattcctttgtagagtgtggcatccatttatatcaagagagtacatccaaatcagccctgagccaagaatttgaagctttctttcaaggtaaaagcttatatatcaactcagggaacatccccgattacttatttgacttctttgaacatttgcccaattgtgcaagtgccctggacttcattaaactggacttttatgggggagctatggcttcatgggaaaaggctgcagaagacacaggtggaatccacatggaagaggccccagaaacctacattcccagcagggctgtatctttgttcttcaactggaagcaggaattcaggactctggaggtcacactccgggatttcagcaagttgaataagcaagatatcagatatctggggaaaatattcagctctgccacaagcctcaggctgcaaataaagagatgtgctggtgtggctggaagcctcagtttggtcctcagcacctgtaagaacatttattctctcatggtggaagccagtcccctcaccatagaagatgagaggcacatcacatctgtaacaaacctgaaaaccttgagtattcatgacctacagaatcaacggctgccgggtggtctgactgacagcttgggtaacttgaagaaccttacaaagctcataatggataacataaagatgaatgaagaagatgctataaaactagctgaaggcctgaaaaacctgaagaagatgtgtttatttcatttgacccacttgtctgacattggagagggaatggattacatagtcaagtctctgtcaagtgaaccctgtgaccttgaagaaattcaattagtctcctgctgcttgtctgcaaatgcagtgaaaatcctagctcagaatcttcacaatttggtcaaactgagcattcttgatttatcagaaaattacctggaaaaagatggaaatgaagctcttcatgaactgatcgacaggatgaacgtgctagaacagctcaccgcactgatgctgccctggggctgtgacgtgcaaggcagcctgagcagcctgttgaaacatttggaggaggtcccacaactcgtcaagcttgggttgaaaaactggagactcacagatacagagattagaattttaggtgcattttttggaaagaaccctctgaaaaacttccagcagttgaatttggcgggaaatcgtgtgagcagtgatggatggcttgccttcatgggtgtatttgagaatcttaagcaattagtgttttttgactttagtactaaagaatttctacctgatccagcattagtcagaaaacttagccaagtgttatccaagttaacttttctgcaagaagctaggcttgttgggtggcaatttgatgatgatgatctcagtgttattacaggtgcttttaaactagtaactgcttaaataaagtgtactcgaag

SEQ ID NO: 2595 - DNA, 2116 bp, Homo sapiens
  source 1..2116: mol_type = genomic DNA
gcgcgcccgccgcccgggcggaggagaggagcgcgcggccgcgcagagcaagctgagccgagccgagccgagctgggggcgcagagcgcgggaggcggcggcggcgcggagcccaggtggctccgctgccggatgggagtgccccagtgtgctggatgaagctggcgcatgcaccatgtcatcatgtgtctctagccagcccagcagcaaccgggccgccccccaggatgagctggggggcaggggcagcagcagcagcgaaagccagaagccctgtgaggccctgcggggcctctcatccttgagcatccacctgggcatggagtccttcattgtggtcaccgagtgtgagccgggctgtgctgtggacctcggcttggcgcgggaccggcccctggaggccgatggccaagaggtcccccttgacacctccgggtcccaggcccggccccacctctccggtcgcaagctgtctctgcaagagcggtcccagggtgggctggcagccggtggcagcctggacatgaacggacgctgcatctgcccgtccctgccctactcacccgtcagctccccgcagtcctcgcctcggctgccccggcggccgacagtggagtctcaccacgtctccatcacgggtatgcaggactgtgtgcagctgaatcagtataccctgaaggatgaaattggaaagggctcctatggtgtcgtcaagttggcctacaatgaaaatgacaatacctactatgcaatgaaggtgctgtccaaaaagaagctgatccggcaggccggctttccacgtcgccctccaccccgaggcacccggccagctcctggaggctgcatccagcccaggggccccattgagcaggtgtaccaggaaattgccatcctcaagaagctggaccaccccaatgtggtgaagctggtggaggtcctggatgaccccaatgaggaccatctgtacatggtgttcgaactggtcaaccaagggcccgtgatggaagtgcccaccctcaaaccactctctgaagaccaggcccgtttctacttccaggatctgatcaaaggcatcgagtacttacactaccagaagatcatccaccgtgacatcaaaccttccaacctcctggtcggagaagatgggcacatcaagatcgctgactttggtgtgagcaatgaattcaagggcagtgacgcgctcctctccaacaccgtgggcacgcccgccttcatggcacccgagtcgctctctgagacccgcaagatcttctctgggaaggccttggatgtttgggccatgggtgtgacactatactgctttgtctttggccagtgcccattcatggacgagcggatcatgtgtttacacagtaagatcaagagtcaggccctggaatttccagaccagcccgacatagctgaggacttgaaggacctgatcacccgtatgctggacaagaaccccgagtcgaggatcgtggtgccggaaatcaagctgcacccctgggtcacgaggcatggggcggagccgttgccgtcggaggatgagaactgcacgctggtcgaagtgactgaagaggaggtcgagaactcagtcaaacacattcccagcttggcaaccgtgatcctggtgaagaccatgatacgtaaacgctcctttgggaacccattcgagggcagccggcgggaggaacgctcactgtcagcgcctggaaacttgctcaccaaaaaaccaaccagggaatgtgagtccctgtctgagctcaaggaagcaaggcagcgaagacaacctccagggcaccgacccgccccccgtgggggaggaggaagtgctcttgtgagaggcagtccctgcgtggaaagttgctgggcccccgcccccggctcccccgcacgcatgcatccactgcggccggaggaggccatggagcccgagtagctgcctggatcgctcgacctcgcatgcgcgccgcgtcgcctctggggggctgctgcaccgcgtttccatagcagcatgtcctacggaaacccagcacgtgtgtagagcctcgatcgtcatctctggttatttgttttttcctttgttgttttaaaggggacaaaaaaaaaaaaa

SEQ ID NO: 2596 - DNA, 793 bp, Homo sapiens
  source 1..793: mol_type = genomic DNA
ggaacgggaacgaccacagccaccgcagggaaacaaccggggcccaggcccagcagaagaatagaaggaaggtgataggatgtgatgatagaatttgtgatagccaagcaacaacttttcctaattcggcatgttaaaaaataagggtcactcatctaagaaagataacttggcagtcaatgcagttgctttacaagatcacattttacatgatcttcaacttcgaaatctttcagttgcagatcattctaagacacaagtacaaaagaaagagaacaaatctctaaaaagagatacaaaggcaataatagatactggacttaaaaaaactacacagtgccccaaactagaagactcagaaaaagaatatgttcttgatcccaaaccgccgccgttgactttggcacagaagttgggcctcattgggcctccaccacctccactgtcatcagatgaatgggagaaggtgaaacagcgctctctcctgcaaggggactccgtgcaaccatgccccatctgtaaagaagaattcgagcttcgtcctcaggtgctgctttcatgctcccatgtgttccacaaagcatgtcttcaggcttttgaaaagttcacaaataagaaaacctgtcctctctgtagaaagaaccagtatcaaacccgagtgatacacgatggggcccgcctgttcagaatcaagtgtgtgaccagaatccaagcctactggagaggatgtgttgttagaaagtggtacagaaacctgaggaaaacagtacctcccacagatgccaagttaaga

SEQ ID NO: 2597 - DNA, 1141 bp, Homo sapiens
  source 1..1141: mol_type = genomic DNA
ggagttggcgcctagcgcgcagctccatccccgcctctgcagtggactcggccgcagaatcggggtcccgggctcctggaacttgtcccgcccaggccgcggcgaggaggtcactccagccgatctctggaccggattcgtcccattctcgtcctcatggtggacaagaaactggtggtggttttcggaggcacaggtgcccagggtggctccgtggcccgcacactcctggaagatgggacattcaaggttcgagtggtgacccgaaaccctaggaagaaggcagcaaaggagctgaggctgcaaggtgcagaagtagtgcagggagaccaagatgaccaggtcatcatggagctggccctgaatggggcttacgccaccttcatcgtgaccaattactgggagagctgcagccaggagcaggaggtcaagcaggggaagctgctcgctgatctggccaggcgcctgggcctccactatgtggtctacagcggcctggagaacatcaagaagctgacggcagggagattggccgccgcgcactttgacggcaaaggggaggtggaggaatatttccgggacattggcgttcccatgaccagtgtgcggctgccctgctattttgagaacctcctctcccacttcttgccccagaaagccccagacggaaagagctacttgctgagcttgcccacaggtgacgttcccatggatggcatgtccgtgtctgacctgggtcctgtggtgctcagccttttgaagatgccagaaaaatacgtcggccagaacatcgggctgagcacttgcaggcacacggccgaggagtacgctgccctgctcaccaagcacacccgcaaggtcgtgcacgatgccaagatgactcctgaggactacgaaaagcttggctttcccggtgcccgggacctggccaacatgttccgtttctatgccctgagacccgaccgtgacatcgagctgaccctgagactcaaccccaaggccctgacgctggaccagtggctggaacagcacaaaggggacttcaacctgctgtgacctgcccgcctcgcggccccttgtggggatcgggggcaccagaggggcagaggcaccaacatctgaataaagccattgttctccc

SEQ ID NO: 2598 - DNA, 2654 bp, Homo sapiens
  source 1..2654: mol_type = genomic DNA
gcggcggctgctttggcggcggttggtggccgtgcgggcggggagggagggggaggagagaagaggaggtggagaaggcttgggctcgcgccgctgaagtcggcttacccgctggccgcctcctgacaagcgggagggatccgcggtggacccagggaagcggaggagcctggcggccaccccctcttcctcacttccctgtactctcatcgctctcggcctccgacacgaaaaggaagcaaatgagctgatggaagatctgtttgaaactttccaagatgagatgggattctccaacatggaagatgatggcccagaagaggaggagcgtgtggctgagcctcaagctaactttaacacccctcaagctctacggtttgaggaactactggccaacctactaaatgaacaacatcagatagcgaaggaactatttgaacagctgaagatgaagaaaccttcagccaaacagcagaaggaggtagagaaggttaaaccccagtgtaaggaagttcatcagaccctgattctggacccagcacaaaggaagagactccagcagcagatgcagcagcatgttcagctcttgacacaaatccaccttcttgccacctgcaaccccaatctcaatccggaggccagtagcaccaggatatgtcttaaagagctgggaacctttgctcaaagctccatcgcccttcaccatcagtacaaccccaagtttcagaccctgttccaaccctgtaacttgatgggagctatgcagctgattgaagacttcagcacacatgtcagcattgactgcagccctcataaaactgtcaagaagactgccaatgaatttccctgtttgccaaagcaagtggcttggatcctggccacaagcaaggttttcatgtatccagagttacttccagtgtgttccctgaaggcaaagaatccccaggataagatcctcttcaccaaggctgaggacaacaagtaccttctaacctgcaagactgcccgccaactgacagtgagaatcaagaacctcaacatgaacagagctcctgacaacatcattaaattttataagaagaccaaacagctgccagtcctaggaaaatgctgtgaagagatccagccacatcagtggaagccacctatagagagagaagaacaccggctcccattctggttaaaggccagtctgccatccatccaggaagaactgcggcacatggctgatggtgctagagaggtaggaaatatgactggaaccactgagatcaactcagatcaaggcctagaaaaagacaactcagagttggggagtgaaactcggtacccactgctattgcctaagggtgtagtcctgaaactgaagccagttgccgaccgtttccccaagaaggcttggagacagaagcgttcatcagtcctgaaacccctccttatccaacccagcccctctctccagcccagcttcaaccctgggaaaacaccagcccaatcaactcattcagaagcccctccgagcaaaatggtgctccggattcctcacccaatacagccagccactgttttacagacagttccaggtgtccctccactgggggtcagtggaggtgagagttttgagtctcctgcagcactgcctgctatgccccctgaggccaggacaagcttccctctgtctgagtcccagactttgctctcttctgcccctgtgcccaaggtaatgatgccctcccctgcctcttccatgtttcgaaagccatatgtgagacggagaccctcaaaaagaaggggagccagggcctttcgctgtatcaaacctgcccctgttatccaccctgcatctgttatcttcactgttcctgctaccactgtgaagattgtgagccttggcggtggctgtaacatgatccagcctgtcaatgcggctgtggcccagagtccccagactattcccatcgccaccctcttggttaaccctacttccttcccctgtccattgaaccagccccttgtggcctcctctgtctcacccttaattgtttctggcaattctgtgaatcttcctataccatccacccctgaagataaggcccacatgaatgtggacattgcttgtgctgtggctgatggggaaaatgcctttcagggcctagaacccaaattagagccccaggaactatctcctctctctgctactgttttccccaaagtggaacatagcccagggcctccaccagtcgataaacagtgccaagaaggattgtcagagaacagtgcctatcgctggaccgttgtgaaaacagaggagggaaggcaagctctggagccgctccctcagggcatccaggagtctctaaacaactcttcccctggggatttagaggaagttgtcaagatggaacctgaagatgctacagaggaaatcagtggatttctttgagctaggagaataagagtctggagactgggagccttcacttcggcctccgattggtggcgcatagggtgtaaccaataggaaacccctaaagggtacttaaaccccagattttgcaactggggctcttgagcagcttgctttagcctgctcccactctgtggaatatacttttgcttcaataaatctgtgcttttattgcttcattgtttca

SEQ ID NO: 2599 - DNA, 1693 bp, Homo sapiens
  source 1..1693: mol_type = genomic DNA
cgcgagcgccaggcgtccggccgccgtggctatgttcgtgtccgatttccgcaaagagttctacgaggtggtccagagccagagggtccttctcttcgtggcctcggacgtggatgctctgtgtgcgtgcaagatccttcaggccttgttccagtgtgaccacgtgcaatatacgctggttccagtttctgggtggcaagaacttgaaactgcatttcttgagcataaagaacagatcaaattactcattaaacaagatgatgaccttgaagttcccgcctatgaagacatcttcagggatgaagaggaggatgaagagcattcaggaaatgacagtgatgggtcagagccttctgagaagcgcacacggttagaagaggagatagtggagcaaaccatgcggaggaggcagcggcgagagtgggaggcccggagaagagacatcctctttgactacgagcagtatgaatatcatgggacatcgtcagccatggtgatgtttgagctggcttggatgctgtccaaggacctgaatgacatgctgtggtgggccatcgttggactaacagaccagtgggtgcaagacaagatcactcaaatgaaatacgtgactgatgttggtgtcctgcagcgccacgtttcccgccacaaccaccggaacgaggatgaggagaacacactctccgtggactgcacacggatctcctttgagtatgacctccgcctggtgctctaccagcactggtccctccatgacagcctgtgcaacaccagctataccgcagccaggttcaagctgtggtctgtgcatggacagaagcggctccaggagttccttgcagacatgggtcttcccctgaagcaggtgaagcagaagttccaggccatggacatctccttgaaggagaatttgcgggaaatgattgaagagtctgcaaataaatttgggatgaaggacatgcgcgtgcagactttcagcattcattttgggttcaagcacaagtttctggccagcgacgtggtctttgccaccatgtctttgatggagagccccgagaaggatggctcagggacagatcacttcatccaggctctggacagcctctccaggagtaacctggacaagctgtaccatggcctggaactcgccaagaagcagctgcgagccacccagcagaccattgccagctgcctttgcaccaacctcgtcatctcccaggggcctttcctgtactgctctctcatggagggcactccagatgtcatgctgttctctaggccggcatccctaagcctgctcagcaaacacctgctcaagtcctttgtgtgttcgacaaagaaccggcgctgcaaactgctgcccctggtgatggctgcccccctgagcatggagcatggcacagtgaccgtggtgggcatccccccagagaccgacagctcggacaggaagaacttttttgggagggcgtttgagaaggcagcggaaagcaccagctcccggatgctgcacaaccattttgacctctcagtaattgagctgaaagctgaggatcggagcaagtttctggacgcacttatttccctcctgtcctaggaatttgattcttccagaatgaccttcttatttatgtaactggctttcatttagattgtaagttatggacatgatttgagatgtagaagccatttttta

SEQ ID NO: 2600 - DNA, 1306 bp, Homo sapiens
  source 1..1306: mol_type = genomic DNA
gtctctcggctgcagccctggtgcgacccggcccgttgccgtagagatgggcagggctggatggagtggggtgcggtgagctgagctgaccctgcttcgccacggggactgcagtgaccccggcttgccggcagggcgggtaacaggttgagccagggtggggctgctcaggggcgtggagccgaggccaggatttctctgaagacccggcacaggctattcctttctgcgacgagcccattgctatggaaaccaaagcgttaggccagcggggattgaggctgcgggatcatgacgggtctctctcccgaagaaccttgcctaaggcttccccaagcggctacttcctgagcgaacccgcccacccgcctgaaggagagagttttccatggacacagcctagcagaaagacgcagccttcgtgcttcgctgactgctgaccactgacccaccgccttgatgacagcaccctcgtgtgccttcccagttcagttccggcagccctcagtcagcggcctctcgcagataaccaaaagcctgtatatcagcaatggtgtggccgccaacaacaagctcatgctgtctagcaaccagatcaccatggtcatcaatgtctcagtggaggtagtgaacaccttgtatgaggatatccagtacatgcaggtacctgtggctgactcccctaactcacgtctctgtgacttctttgaccctattgctgaccatatccacagcgtggagatgaagcagggccgtactttgctgcactgtgctgctggtgtgagccgctcagctgccctgtgcctcgcctacctcatgaagtaccacgccatgtccctgctggacgcccacacgtggaccaagtcatgccggcccatcatccgacccaacagcggcttttgggagcagctcatccactatgagttccaattgtttggcaagaacactgtgcacatggtcagttccccagtgggaatgatccctgacatctatgagaaggaagtccgtttgatgattccactgtgagccatcccacgagcccctgcattggagtcagagcccctgcccttgatggatcagctggcaccacccagattgataaactggctcgtctgatcttgtggcccccacccaggaactgactgggcactagaaaacagcttcaacatcctgtgatttcatccctgaccaatcagcactcctgtctcactggcttcccccaacccaccaagttgtccttaaaactctgctccctgaatggtcggggagactgatttcagtaatagtaaaactctggtctcctgca

SEQ ID NO: 2601 - DNA, 2878 bp, Homo sapiens
  source 1..2878: mol_type = genomic DNA
gcgccggcacacctattggcccccgcggcgtcccgtcgccgcgtcgcgttgctggcccgtcggagcgacgccgctcgggtcagtcggcggccggactgggaagatggacgcagctactctgacctacgacactctccggtttgctgagtttgaagattttcctgagacctcagagcccgtttggatactgggtagaaaatacagcattttcacagaaaaggacgagatcttgtctgatgtggcatctagactttggtttacatacaggaaaaactttccagccattggggggacaggccccacctcggacacaggctggggctgcatgctgcggtgtggacagatgatctttgcccaagccctggtgtgccggcacctaggccgagattggaggtggacacaaaggaagaggcagccagacagctacttcagcgtcctcaacgcattcatcgacaggaaggacagttactactccattcaccagatagcgcaaatgggagttggcgaaggcaagtccataggccagtggtacgggcccaacactgtcgcccaggtcctgaagaagcttgctgtcttcgatacgtggagctccttggcggtccacattgcaatggacaacactgttgtgatggaggaaatcagaaggttgtgcaggaccagcgttccctgtgcaggcgccactgcgtttcctgcagattccgaccggcactgcaacggattccctgccggagctgaggtcaccaacaggccgtcgccatggagacccctggtacttctcattcccctgcgcctggggctcacggacatcaacgaggcctacgtggagacgctgaagcactgcttcatgatgccccagtccctgggcgtcatcggagggaagcccaacagcgcccactacttcatcggctacgttggtgaggagctcatctacctggacccccacaccacgcagccagccgtggagcccactgatggctgcttcatcccggacgagagcttccactgccagcacccgccgtgccgcatgagcatcgcggagcttgacccgtccatcgctgtggggtttttctgtaagactgaagatgacttcaatgattggtgccagcaagtcaaaaagctgtctctgcttggaggtgccctgcccatgtttgagctggtggagctgcagccttcacatctggcctgccccgacgtcctgaacctgtccctagattcttctgatgtagagcgactggaaagattcttcgactcagaagatgaagactttgaaatcctgtccctttgaaaatcctggggtcgggggtggcacctgtgagagcctggggctcctggtgccgctgcgtttcatccatcccgcccgctcgcctgccgagggctgcgccccgtgctgcctccccccagagggccacccgctgtgctcgtggactgaggctgcgctgcccgggaggccttactgcttggtgtcagactgcccagctcagagtgcccgtcagggcctgtgcatccgcacgcggagccgtctgttaggagcttccagagtgttctctcgacactgccagccccgtgttagcacctgggcctcagtcccacttgctcccaggcgccggttctgtggttggtttggaattaaagtcctgtttgaagttgtcagacacagacatgaatttctgggcgctccctgagtcagagtctcagaagacctgtgcaggctggcgtgagaggagcggcagccacactgcggccccacgcccaaggactgggctgctctcgaggggggcgcgcccaccgctgtgtcctctctgcccagcctggcttaccaagggctacctcagtgggagatgaggttggaggaacgaaggcgaggttcctccttgctttggggagaaaagtattcaggaagtgggtgtgtgggaaacctgaagatggcgtgcacaggacacagcgtgggcggcctgggcagaagggcggctggctgtcctggagctgctgctggagcctgccctcagagtgtccctttccagtgctgtggcattctgtggcagcttccccaggtgtggtgacggggggggggcggggcctccacctgtgacagccaggcttgagggtggacggcgtgcctctcccaggagccttccccatgtccttgccttgctgagaattgccctcccatgccgctgaggtgttaggtggtttagggccaaaaggggaaaaccacttgagtcttgtggtgtgtggtgggcagacaccacagggtggcatcacctggtggcatttccagaacctcagccccgattccagcacccaccaccgcctgaccctgtgtaacctgctgtcccgggtcccagagtgcactctgccccgctgctctgctgcctgtcctgggaaagtatctttgccccactaggaaatgtaaacaggagggcttggggagcgtgggcacttttctcatgagcagctactgcggcgttggcaggactcgctgctgctgctgctgcttgtgtaggtcggggagccagagatccccgaggacgcgcgccggacagtcggcactgaccggcccacctggtagcagaggacacccccagccccccaagcattgaagacatagtgtatttcctcgtatcctttctcccttgggtgtagttggggtggggaagcagggaaggctggtgcgatctccattccttgggctccacgtccgagttcatggtgcgccgctgtgctgggagctgcagtggtaatgtgtgggacaccttgaccaaaggggagctttgtctcgtgtgttttgaaaaaggcttaatgaagagaatgttgttcattcttagtagtatagtttgcaattcttaatggcaaataataagtttcagtagaaaacaaa

SEQ ID NO: 2602 - DNA, 1557 bp, Homo sapiens
  source 1..1557: mol_type = genomic DNA
gaccagaaaagccagactaatcaggacgagttcgggcgtggaattgggcctgaagccctcatgcccagccaggcctgaatgccccagaccccaccgtcacccccgtggcctggatggagcaggggacggccggcgaaggcgcggggtggaaggggagcggcgacgaaggcgcgaggagctgactgggaatccccaagctacccgaggcaagacactgaacttgagtcgcacttttcatgcctgtagaaatgagaatgacagctgtgataaaaaaaaaattcatctgggcggtatctggaacttggcggtggatgaggagggctgctcgctggctgcggctgaggctcggtcaccgtgtagagaggcccagggagagctgcttcactcaagtcctgtcaagtcaaggcagccgggatttgtccacatctaaggcgaaagagaatgaaagacgtagataacctcaaaagtataaaagaagaatgggtttgtgaaacaggatctgataatcaacctcttggtaataatcaacaatcaaattgtgaatattttgttgatagcctttttgaggaagctcagaaggttagttccaaatgtgtgtctcccgctgaacagaagaaacaggtagatgtaaatataaaattatggaaaaacggattcaccgtcaacgacgatttcagaagttattccgatggtgccagtcagcagtttttgaactccatcaaaaagggggaattaccttcagaattacagggaatttttgataaagaagaggtggacgttaaagttgaagacaagaaaaatgaaatatgtttgtctacgaagcctgtgttccagcccttttcaggacagggtcacagactaggaagtgccacaccaaaaattgtttctaaagcaaagaatattgaagttgaaaataaaaataatttgtctgctgttccactgaacaacttggaacccattactaatatacagatctggttggccaatggaaaaaggattgtccagaaatttaacattactcatagagtaagccatatcaaagacttcattgaaaaataccaaggatctcaaagaagtcctccgttttccctggcaacagctcttcctgtcctcaggttgctagatgagacactcacactggaagaagcagatttacagaatgctgtcatcattcagagactccaaaaaactgcatcttttagagaactttcagagcactgatttttgatagactaagtggaaaatttgcagagaaatgatggttgtaagtggacatgcaaaccaaaattggggattggagaagtcagactcactagacttttggttcgagtactattgaactctctcctgatgagaagatgtttagataagtacaagttaagaaagtagcatatgactggaaactatattcagtgcactttctccaaaagactacccagaaaaatagacttattttcaaataccagttatcaagatatattaaatagctgtattgtttagaatcttaatatggtataaattagcatatgtattcacaatattcattcagacatcatt

SEQ ID NO: 2603 - DNA, 2958 bp, Homo sapiens
  source 1..2958: mol_type = genomic DNA
gggcccgcggaggaaagatactggggagtgggagccgcggggttcagagcgatgattcccccacaggaggcatccgctcgacggcgggagattgaggacaagctgaagcaggaggaggagactctgtccttcatccgagacagcctggagaagagcgaccagctcactaagaacatggtgtctatcttatcatcctttgagagccgccttatgaagctggagaactccatcatccctgtgcacaagcagacggagaatctgcagcggctgcaggagaatgttgagaagacgctgtcctgcctggaccatgtcatcagctactaccatgtggccagtgacactgagaagatcatcagagagggccccacaggtaggctggaagagtacctgggaagcatggccaagattcagaaggcagtggagtatttccaggacaacagcccagacagcccggaactcaacaaagtgaaactgctctttgagcgcgggaaggaggccctggagtccgaatttcgcagcctgatgacgcggcacagtaaggtcgtctcgcccgtgctcatcttggatctgatcagtggtgacgatgatctggaggcccaggaggacgtgaccctggagcacctgcccgagagcgtgctccaggatgtcattcgcatctcccgctggctggtggaatatggccgcaaccaagatttcatgaacgtctactaccagatacgctccagccagctggaccgctccatcaaaggactgaaggagcatttccataagagcagttcttcctctggggttccctactcccctgctatccccaacaagaggaaagacacacctaccaagaagccagtcaagcggccaggtgagcccccatcctggcccatctctgcaacagccagaggctgactgggactgtactgctttagtccaatctagcgttcgcagcgtcaggcccctccagagcttgtcgtcgtggtaaccccgactgtaggtacacaggacagaaagcaagtgtctacccacccagtgaagccccccaagagcaagactcttccttccagctagcagagcctggggttacacagcttctttggagtaggggagtaacacaggtgctcagcgaatcccgcctgaggcagagcccctgcctaggcctcctccctcacacacacgtcgccctgtcagaaggccaggcacactactgcagccaggatgctgggatagcaaggggataggtgctccaaccttcaccttccagaaaggcagggtgatctgaagtgacgtgtagctgagagctggatggggagaatttcactttcccagttgatccagaaaggaaagaaaccccagagcatcctctcggaagaacttaaactggctttgggctccagtgcgagcgagtgacttgtggaaaggggcaccatgatgagaggccggggccggtgggtgttgctgtcctgggtgaacatctcgtcatctgtctgttctttctccccggcatcatatcccttatagtctgtgctccaggtaaacagtgtctctgccagccacagcttggcaagcccggctatgtctggccactgagagatgctgcccgcagctcgatgatgtgctgggatgttctggggtggggctgctgagattgcactgaaaaagaaagctggagaagccggggctgctcccacccaggctggccccctgtccagctgctgctgtgggcacatgccctagttgtggcctgtggcacctgcttatgacaacaagctttgggtagagcttacttacacccttggtttctccagtccctgcctgctcatgcccctcagagagtgaggtgtctgttccacaagagcacccgctcccctgcaggcctttgtttagggtttggagaaacaggcagagcaggggctgccctcagggagtagagcattagggagctggtgcctggggccttctccctccagtgtggaaatcctgcccaccagccaaaacctgctgcaaatggggactgccagcccagcctgtgggcgcagctgcctgcacagtggatggagcagctctgtgccttctgtgtggtggggagtggctgtctctatgaggctgctaggatgcttgggccccagccagtctgtgcttgcttcctcttctgcctggctccctgacaggtcccccagaagccccagagccctatttgcactgccttaagagtgcccgctggccatgcagctacctggcctttcaggcaggagggatctgatctcaggtggctcacagtggaccacatccatccttgggccagagacactagaggaaaactccagctgtggggtttcagagttgtcaggaactggtgggctcaggaccgatgtcaggctctagggagtcaggctctggggatgtcggttcccacttctgaggagagggacagggaggcctcccaggtggtgaagcaccgacctcagcatccctggaggcaattgggagcctgacgggtttggcggctgctagatccacatcggcgacccacatcctgccggcgtgcacctgcgtctgtgtctgctcctggtgggttgtggggcaggaatcagattcactcattagtaagccgcactcgctgaaggggagagcatgagcaagggagacgtgagccaggccttggttattaggagctaattatgggccaagtatggtggctcacgcctgtaatcctagcacttcgggaggccgaggcgggcggatcacctgaggtcaggagttcgagaccagcctggccaacatggtgaaaccctgtctctactaaaaatagaaaaaaaattagttgggtgtggtgacgcacgcctataatcccagctacctgggaggctgaggcaggagaatcacttgaacccaggaggcagaggttgcagtgagccgaggtcgtgccaccgtactccagcctgggcgacagagtgagactgtctc

SEQ ID NO: 2604 - DNA, 2183 bp, Homo sapiens
  source 1..2183: mol_type = genomic DNA
ggggagactccaaacagtgagcctagagctggagactagcgttaaccggcggggcggccggttttatgaatgaagctatggctacagattccccaagaagacccagtcgttgtactggtggagttgtggttcgcccccaggctgtcacagagcagtcctacatggaaagtgttgtgacttttctgcaggatgttgtgccacaggcttacagtggaacacctctaacagaagaaaaggagaaaatagtctgggtcagatttgaaaatgcagatttaaatgatacatcaagaaatctggaatttcatgaaatacatagtactgggaatgaaccgcctttgttgattatgattggctacagtgatggaatgcaggtctggagcatccctatcagtggtgaagcacaagagctcttctctgttcgacatggcccaattcgagcggctagaatcttgcctgctccacagtttggtgctcaaaaatgtgataactttgctgaaaaaagacccctccttggtgtttgtaagagcattggatcttctggcacaagcccaccgtactgttgtgtggatctgtattcacttcgtactggggagatggtcaagtccattcaatttaagacacctatttatgatctccattgcaataaacggatccttgtcgtagtcttgcaggagaaaattgctgcctttgatagctgtactttcacgaagaaattctttgttacaagctgctatccatgtccagggccaaacatgaatcctattgctcttgggagccgctggcttgcttatgcagaaaacaagttgattcgatgtcatcagtcccgtggtggagcctgtggagacaacattcagtcttatactgccacagtcattagtgctgctaaaacattgaaaagtggcctgacaatggtagggaaagtggtgactcagctgacaggcacactgccttcaggtgtgacagaagatgatgttgccatccacagtaattcacggcggagtcctttggtcccaggcatcatcacagttattgacaccgaaaccgttggagagggccaggtgcttgtgagtgaggattctgacagtgatggcattgtggcccacttccctgcccatgagaagccagtgtgctgcatggcttttaatacaagtggaatgcttctagtcacaacagacacccttggccatgactttcatgtcttccaaattctgactcatccttggtcctcatcacaatgtgctgtccaccatctgtatactcttcacaggggagaaactgaagccaaagtacaggacatctgcttcagccatgactgtcgctgggttgtggtcagtactctccggggtacttcccacgttttccccatcaacccttatggtggccagccttgtgttcgtacacatatgtcaccacgagtagtgaatcgcatgagccgtttccagaaaagtgctggactggaagagattgaacaagaactgacgtctaagcaaggaggtcgctgtagccctgttccaggtctatcaagcagcccttctgggtcacccttgcatgggaaactgaacagccaagactcctataacaattttaccaacaacaaccctggcaaccctcggctctctcctcttcccagcttgatggtagtgatgcctcttgcacaaatcaagcagccaatgacattggggaccatcaccaaacgaaccgggccttatctctttggagcggggtgtttttccataaaagccccatggagctacataatgacaaaatatatattttacataaaacctcctaacaaagttaaacctcctccacaaatttcacccagcaaatcgatgggcggagaattttgtgtggctgctatcttcggaacatccaggtcatggtttgcaaataatgcaggtctgaaaagagaaaaagatcagtccaaacaagttgtagttgagtccctgtacattatcagttgctatggcaccttagtggaacacatgatggagccgcgacccctcagcactgcacccaagattagtgacgacacaccactggaaatgatgacatcgcctcgagccagctggactctggttagaacccctcaatggaatgaattgcagccaccgtttaatgcaaaccaccctctgctcctcgctgcagatgcagtacagtattatcagttcctgcttgctggc

SEQ ID NO: 2605 - DNA, 2333 bp, Homo sapiens
  source 1..2333: mol_type = genomic DNA
agtccactgctgggcctggaacacggagcagtggctgccctgcgaggaggtcctagagcagctccagcaggatggcggctccagcgtctctaaggcctgcagggggtccagccccatggggggcgccctaggcctccgacagctccccatctgtgctcctgcctgccggccatcctcaggccactcgccatgggcggctgcttctccaaacccaaaccaggcgctgccttgcccacagtggagctcaagatcgaggtggtgctgcctgagaaggagcgaggcaaggaggagctgtcggccagtgggaagggcagcccccgggcctaccagggcaatggcacggcccgccacttccacacggaggagcgcctgtccacccctcacccctaccccagccctcaggattgcgtggaggctgctgtctgccacgtcaaggacctcgagaatggccagatgcgggaagtggagctgggctgggggaaggtgttgctggtgaaggacaatggggagttccacgccctgggccataagtgtccgcactacggcgcacccctggtgaaaggcgttctgtcccgtggtcgggtgcgctgcccctggcacggcgcctgcttcaacatcagcactggggacctggaggacttccctggcctggacagtctacacaagttccaggtgaagattgagaaggagaaggtgtacgtccgggccagcaagcaggccctacagctgcagcgaaggaccaaggtgatggccaagtgtatctctccaagtgctgggtacagcagtagcaccaatgtgctcattgtgggtgcaggtgcagctggcctggtgtgtgcagagacactgcggcaggagggcttctccgaccggatcgtcctgtgcacgctagaccggcaccttccctacgaccgtcccaagctcagcaagtccctggacacacagcctgagcagctggccctgaggcccaaggagtttttccgagcctatggcatcgaggtgctcaccgaggctcaggtggtcacagtggacgtgagaactaagaaggtcgtgttcaaggatggcttcaagctggagtacagcaagctgctgctggcaccagggagcagccccaagactctgagctgcaaaggcaaagaagtggagaacgtgttcactatccggacgccagaggatgccaatcgcgtggtgaggctggcccgaggccgcaacgtggtcgtcgtgggagccggcttcctggggatggaggtggccgcttacctgacggagaaggcccactctgtgtctgtggtggagctggaggagacgcccttcaggaggttcctgggggagcgcgtgggtcgagccctcatgaagatgtttgagaacaaccgggtgaagttctacatgcagacggaggtgtctgagctgcggggccaggagggaaagctgaaggaggttgtgctgaagagcagcaaggtcgtgcgggctgacgtctgcgtggtgggcattggtgcagtgcccgccacaggcttcctgaggcaaagcggcatcggtttggattcccgaggcttcatccctgtcaacaagatgatgcagaccaatgtcccaggcgtgtttgcagctggcgatgctgtcaccttcccccttgcctggaggaacaaccgcaaagtgaacattccacattggcagatggctcatgctcaggggcgcgtggcagcccagaacatgttggcgcaggaggcggagatgagcactgtgccctacctctggaccgccatgtttggcaagagcctgcgctacgcgggctacggagaaggcttcgacgacgtcatcatccagggggatctggaggagctgaagtttgtggctttttacactaaaggcgacgaggtgatcgccgtggccagcatgaactacgatcccattgtgtccaaggtcgctgaggtgctggcctcaggccgtgccatccggaagcgggaggtggagactggcgacatgtcctggcttacggggaaaggatcctgagctcacatgcagtagacttgggcaggcaaagggggcaccaagggcacaggccaagccttgggggcaggtgccaatctccagtcccaggatcccccagggcagaacctgagccctcccagtgcttgccttcagccacctggctcccctcctgggaggcctctgctggatccagaagatgctcaaccctcaaggcctctgctgccactgacagctggcactggaggcaggacaagccctgcctcttctccctctattgggactggtcccctgaagaaccctgcaacacgttaaacattaccgtaaaattaaaacgcacaaatttgcagatc

SEQ ID NO: 2606 - DNA, 2040 bp, Homo sapiens
  source 1..2040: mol_type = genomic DNA
agtgccaagatgtcgacggcggcggttccggagctgaagcagatcagccgggtggaggcgatgcgcctagggccgggctggagccactcgtgccacgccatgctgtacgccgccaaccctgggcagctcttcggccgcatccccatgcgcttctcggtgctgatgcagatgcgtttcgacgggctgctgggcttccccgggggcttcgtggaccggcgcttctggtcgctggaggacggcctgaaccgggtgctgggcctgggcctgggctgcctgcgcctcaccgaggccgactacctgagctcgcacctgaccgagggcccacaccgcgtcgtggcgcacctgtacgcgcggcagctgacgctggagcagctgcacgccgtggagatcagcgcggtgcactcgcgcgaccacggcctggaggtggggccgccgcccgggccccgccccccgccccggggtttggctctggccccgtggaaggcaccgatgggtaacacgtctcctgagggtcccctggccgggctgggtcgggtgtcgctgtctccagcaatggggtggggagaggggtctggggctgggaggccgggaaaggaggggcgggggtgggggccggcgctggggctccctcagggctgtgttacatccgccttgctgcctgccattgccaatcctgggagtgggggagtgggatcggtggggaggaagggatgggggaggagcggggattgcttggggagttgggaaacttgagcacagcgggggttgtaaaacttgggaacctcatgttgggcgtgaaggctcttgggatttgtactttgtggtctggaagggctggactgcgggtgttcaggcttcgttgggtggacggggggagcatggggtgcggaccccggggtggggtggcctgggtacgaggggggggagtgcatggggtcagcctccacacttgcttggggaggagggggctgcactgctccgagggagctggctggcttctgccaggccctgcgtgggtctcccattaagtccttggcaaagctggctgctcataccctggcctcatagcttccaggcccctcctgctggaggtgccattgtgtggcaggcctggccccaacccctacctcctgtctgcgcaggtgctgggcctcgtgcgggtcccgctgtacacccagaaggaccgagtcggaggcttccccaacttcctgagcaacgccttcgtgagcacggctaagtgccagctcctctttgccctcaaggtgctcaacatgatgcccgaggagaagctggttgaggccctggctgcagccaccgagaagcagaagaaggccctggagaagttgctcccggcctcctcttgagggctgcctgagctggtggcaccctcccctgggccggaagactgggaattcctgctaagtgtggcttctagagtgtttgtgtgtaccccgcttctgactgcctagggcgagtgggcatcctgtcatcatctccactgtcccaagcagtcactaggtggcggccgggccagctggaacccagcccatcctctcaggcagagcagggtggtccgggcacactgggcctgcctctccagcctcaggatgctcttgtttattctgggctcagaccctcctcttgtacgtctcatcacagctggtagagacccaggagtgcctgattgtcccacaggggtggcgcacagctctgggaccactcagaagatgggatgtgtgggtggaggatgccttgtctcggtcagctcattcctgcctccttcctgagccagttcagggcctgggggagagccagcttggggtaggaagttaataatactgttaatttgggttgttgttggatttactttgctagattttctctttcaccacgtgtgaactgtgggtgaggtttcaaagtagcttcaccccacgtggcttggttcccagggacagtcagggcctcgggggcccagctatgtacaacgaagctgtcgaaggagaagacaataaagtcgctccgcagctgctctgtgtgttt

SEQ ID NO: 2607 - DNA, 2013 bp, Homo sapiens
  source 1..2013: mol_type = genomic DNA
ctttggcctgccatctcccaagggcaaacctcacaactcaggcccaagtcacaggaatctgaatggtggggtgaccttctcctctagtttaatttcattgcaatactgagaaacttcaactgttttgtctttagaagggaaattcatgtttgtgccaggccagcctttgtaaaagcctttgattggattcactagaagtctgtcttcccgcagtacatatactgtgaattttctccttcggcatttcaaccacttggaatggccactaaagtggcttttgatctaaagtaaactctgattctgtgttgatggggaaccatttctctctaacatggtggtttctttaagatgtttgacttgggccacatgagaataacagatctttgggcagtccaagcaagagcctcctgatctagcagccaagactccccctgacctttggccatgtaccccaaccctctcatctactgcacctgctgggacccctggaacttgggaccacggaagctaatcaagacccctcaactaccacgcaagaactccacagggagttccaagctaactcctcttgtaccagctccaaaaaatcacaattacctccaaccaacaaaacctgttgtttccccaaaaatgaaaatccattcagcaaggcaagaagagactaataaatcattttatgaagtgatcaacgtgtcacctggctatcaacttgttcggaatcgggaacagatttctgtcaccttaggggatgagatgtttgataggaaaaagcggtgggaatcggagatcccggacaaaggcagattttccaggaccaacatcatttctgacctagaagagcaaatctcagagctgacagcaataattgaacaaatgaacagagaccaccagtctgcccagaaattgctctccagtgaaatggatctccgctgtgctgagatgaaacagaactttgaaaacaagaacagggagctcaaagaggcccatgaagcagaactcagtgagttggagaacaactacaaagcagccttgaaggcagagaagttggctgcccaagagaagctagaggagatgggaaaagaatacaagtatttgaagaatatgtttcgtacgtatcaggacagtatttatgatgaaatggaagagaagtggtcaaaacagaaggcgaaatggaagaaggatgagaagttcgagcgagaaaatatcctgctacagcaaaaaaaaaagatgaccaaaaaattcgaaatggagtcaggagaagaagataagaaaataaatgaatcctgcagtgctgtctttgagaacttcattcaagagaaggaggagctcttgaaacaacatcaaagtgacaccttgcaattagaagagctgagaaaaaccaaagaggtgccctggagaagagaccaaataaatagacattggcatgatgtcctgcaacagcttcttcttatgcaggtcatgcaggaagaattgcatgcacaagcccttatcctagagtcactgaacacaaacctctactatacccagttggaactccagaaagagaaagctatagtgggaaatctggagaaaatgcttcaaaccaagtttgctgaaactgaagaaaagtataagcacaccatacagatcctgacggaagagaacattcatctgaagcaaaagataatttctaagaatgaagaaatttgtgaaggatgttctgggagattggcctctattactgtttctaaggatgattctgacactgtgcaagatggtagcaagaaaggacaagaatcataaacaaaaagttgctctgcattgttgaagatggttggcacaccatttctgtaggcccaggaaactcctgggagggttttcttgagaaaatgcatataatgagtttagttcttgggttgctctgactctctgaatgtctgaaaatgtttgaattcgcatctgaatttcacagcttatcacggactcttcactgaaaaatgatgctctccatactgggagctgagctttctctga

SEQ ID NO: 2608 - DNA, 3346 bp, Homo sapiens
  source 1..3346: mol_type = genomic DNA
cgccgccgcgggctcaagcggggcggccgggccagcgcggggcggcggcgggcaggggcggcgagtgcgcgggcgctcgccgccgcccttctcggcgggcagcgcgcgaggaccaggccgaggaggaagtggcggcggcggcggcgggactgcgcgccccagctccgatccccgttccgcgtccccgccgccgggaggaggtgcccactcgctcgcggcgcgcgccggccgccagactcggcctgtgggcgatttcctccggacccaggctccccgcccgaggaggaagatgcagacctttctgaaagggaagagagttggctactggctgagcgagaagaaaatcaagaagctgaatttccaggccttcgccgagctgtgcagctgaaccttagccggccgatcgaggagcagggccccctggacgtcatcatccacaagctgactgacgtcatccttgaagccgaccagaatgatagccagtccctggagctggtgcacaggttccaggagtacatcgatgcccaccctgagaccatcgtcctggacccgctccctgccatcagaaccctgcttgaccgctccaagtcctatgagctcatccggaagattgaggcctacatggaagacgacaggatctgctcgccacccttcatggagctcacgagcctgtgcggggatgacaccatgcggctgctggagaagaacggcttgactttcccattcatttgcaaaaccagagtggctcatggcaccaactctcacgagatggctatcgtgttcaaccaggagggcctgaacgccatccagccaccctgcgtggtccagaatttcatcaaccacaacgccgtcctgtacaaggtgttcgtggttggcgagtcctacaccgtggtccagaggccctcactcaagaacttctccgcaggcacatcagaccgtgagtccatcttcttcaacagccacaacgtgtcaaagccggagtcgtcatcggtcctgacggagctggacaagatcgagggcgtgttcgagcggccgagcgacgaggtcatccgggagctctcccgggccctgcggcaggcactgggcgtgtcactcttcggcatcgacatcatcatcaacaaccagacagggcagcacgccgtcattgacatcaatgccttcccaggctacgagggcgtgagcgagttcttcacagacctcctgaaccacatcgccactgtcctgcagggccagagcacagccatggcagccacaggggacgtggccctgctgaggcacagcaagcttctggccgagccggcgggcggcctggtgggcgagcggacatgcagcgccagccccggctgctgcggcagcatgatgggccaggacgcgccctggaaggctgaggccgacgcgggcggcaccgccaagctgccgcaccagagactcggctgcaacgccggcgtgtcgcccagcttccagcagcattgtgtggcctccctggccaccaaggcctcctcccagtagccacggagccgggacccagaggggcagcgcagggcgcagagcacacccgctgggccagcagctcccaacggcgatgctactactaagaatccccagtgatctgattcttctgttttttaatttttaacctgattctctgatgtcatgatctaaatgaggggtagtgggggatggaagagagtaccaggtggtccaccgttggggagtggggccgtccgcctgctctctactgtgcagacctcctaactgagtttacacacgcttgtgtttgcaacactaggtctggatgggaggtgaggggtgtgcgtatggctgccatgccagtgtctgtgcacatccctgtctgttggtctccatggccactgtggaccgggacccttgggggaagcctgcccatgtcgggctgtgggaggctgatcggtgcatgtgagagtggcttcccttctgcctgactccccactccctgacctgccccttccttgtttttcctcctactggtctccaccaaggctttgttagcccccaccctgcctggtgtgcagctaacccctccctccccacagccagaggaggccacagacccctcaggggagttccgcgctggggtctgggctgtgctccctcactaaagggaaggaaaggaagctgggcgtcctctgggccccccaacacacgtcccatttagccctgcacagcggtctccttcccctaagccagcactgctgctccctggagcccgggaaggaggctgcctggctggaggcccgagccgatggcgcctgtgctgaggatttgtgctgtgatttgggcaaatcattccaggtctttgggcctccacccccttgtctctagtggacatttgagatcagagagcaccacagggctggctttgtgccctaacccctgggatgcagcctgcctttccataaagtcacctaggtgaggataggcgcgggagcctcggcatgacaccatggagatcggggccctcttcccagtgggttcactccttttcacacctgctgggtccctcctcacccagcaggcctggtccacctctcattgcaagccccaagcactgagccagcaggtgccagggagccacccgccccccatcgcttctgcacacctcagactcaccccatcaccttggcagcaaagcactggctctgccgtctgacccctgatccaggcagccccctctgcagagaaaagggttggggagaagcctctgcagtcctggaagatgtggggtgctgggtgagaggcatcagcccccacaagtatgtttttgtgtcttaagatagcagtttactttgaaaaagtgaaaaaggcttccgggctgtcctctgcccagtgagatggaggacgctagagaaagtgctgagtgtcccgagagaggcccccgagccagtgcatggaggtccttcggcctggctcagctgggctgcaggatgcccactttgaggagggaggcacagggcttgggcgaggggcagaggccatcagaactgcccggcttttttggaaactgaggacccaacaactaaccacgtttacacgacttgagttttgaaccccgattaatgtctgtacgtcacctttcctagttctgaccctgagccctggggaacaggaaagcgtggctggcctcttgcactgctttgtctccaaaataaactactgaaatcaaaccgcatttcacacgtgtttacacatgttgctcaagtttgttatgtcatactcccagtccttaaaagacgtttaataaaacagctttaccttttaaaaataaaatttcaatcccagtctgcctcaggtacgggtgggggtgtgc

SEQ ID NO: 2609 - DNA, 1484 bp, Homo sapiens
  source 1..1484: mol_type = genomic DNA
actctggcccggttctcggtggtgcgggagcgggcgggagcagcggccgctctggtcggcggacgtgctgccgagtagtcccggaagcgaagcagcgatggcggagagtccgactgaggaggcggcaacggcgggcgccggggcggcgggccccggggcgagcagcgttgctggtgttgttggcgttagcggcagcggcggcgggttcgggccgcctttcctgccggatgtgtgggcggcggcggcggcagcgggccgcgctgcttagccactgggaccccacgctcagctccgactgggacggcgagcgcaccgcgccgcagtgtctactccggatcaagcgggatatcatgtccatttataaggagcctcctccaggaatgttcgttgtacctgatactgttgacatgactaagattcatgcattgatcacaggcccatttgacactccttatgaagggggtttcttcctgttcgtgtttcggtgtccgcccgactatcccatccacccacctcgggtcaaactgatgacaacgggcaataacacagtgaggtttaaccccaacttctaccgcaatgggaaagtctgcttgagtattctaggtacatggactggacctgcctggagcccagcccagagcatctcctcagtgctcatctctatccagtccctgatgactgagaacccctatcacaatgagcccggctttgaacaggagagacatccaggagacagcaaaaactataatgaatgtatccggcacgagaccatcagagttgcagtctgtgacatgatggaaggaaagtgtccctgtcctgaacccctacgaggggtgatggagaagtcctttctggagtattacgacttctacgaggtggcctgcaaagatcgcctgcaccttcaaggccaaactatgcaggacccttttggagagaagcggggccactttgactaccagtccctcttgatgcgcctgggactgatacgtcagaaagtgctggagaggctccataatgagaatgcagaaatggactctgatagcagttcatctgggacagagacagaccttcatgggagcctgagggtttagaccctgctcccatctccccttcccccactcaagagtcccagcagaatcccttccccccaccccagggatggagaggcactgtgtatctccctccagactcgaagtcatcctgcaagatggcaagaaccaagcaagctccgatcccagggtgtgggagtgggggcctgttcccggtctgacctccttggcactggagcatctggggcttcgttcatccattcatcccgtatcaggggccaaggtacctttacaggagcacctagagcgagggcctttggcaaaaacaaaacaaccaacacacctctccacagggccagctccttagggataagtggaagatggaaattgcaattccaagagggagtgtgcccaaatgatttatggggatacctg

SEQ ID NO: 2610 - DNA, 975 bp, Homo sapiens
  source 1..975: mol_type = genomic DNA
ccgccttgcagtttgatctcagactgctgtgctggcaatcagcgagactccgtgggcgtaggaccctccgagccaggctgctatccatgtccagggccaaacatgaatcctattgctcttgggagccgctggcttgcttatgcagaaaacaagttgattcgatgtcatcagtcccgtggtggagcctgtggagacaacattcagtcttatactgccacagtcattagtgctgctaaaacattgaaaagtggcctgacaatggtagggaaagtggtgactcagctgacaggcacactgccttcaggtgtgacagaagatgatgttgccatccacagtaattcacggcggagtcctttggtcccaggcatcatcacagttattgacaccgaaaccgttggagagggccaggtgcttgtgagtgaggattctgacagtgatggcattgtggcccacttccctgcccatgagaagccagtgtgctgcatggcttttaatacaagtggaatgcttctagtcacaacagacacccttggccatgactttcatgtcttccaaattctgactcatccttggtcctcatcacaatgtgctgtccaccatctgtatactcttcacaggggagaaactgaagccaaagtacaggacatctgcttcagccatgactgtcgctgggttgtggtcagtactctccggggtacttcccacgttttccccatcaacccttatggtggccagccttgtgttcgtacacatatgtcaccacgagtagtgaatcgcatgagccgtttccagaaaagtgctggactggaagagattgaacaagaactgacgtctaagcaaggaggtcgctgtagccctgttccaggtctatcaagcagcccttctgggtcacccttgcatgggaaactgaacagccaagactcctataacaattttaccaacaacaaccctggcaaccctcggctctctcctctt

SEQ ID NO: 2611 - DNA, 4421 bp, Homo sapiens
  source 1..4421: mol_type = genomic DNA
gctgccacccattggctcaggccgataccacgcgccccgatacccggcacaggagccacctcccagagccccgcagtccatgcctcagtcggcctgcgctcctcagcctggcggttctacctccgagggttcgcccgcccttggttttccttacaccttagcctttggctcctttgaccactcgaagccccacagcgtgttccagcggacttcaccagcagacccagaagtggtgggtgaaacactgcctctgttcctccttgagcctgtcgggagctgctgcctgccaccaccatgtctgctgcaaatcctgagactccaaactcaaccatctccagagaggccagcacccagtcttcatcagctgcagctagccaaggctgggtgttaccagaaggcaaaatcgtgccaaacactgtttttgttggtggaattgatgctaggatggatgaaactgagattggaagctgctttggtagatacggttcagtgaaagaagtgaagataatcacgaatcgaactggtgtgtccaaaggctatggatttgtttcgtttgttaatgacgtggatgtccagaagatagtaggatcacagatacatttccatggtaaaaagctgaagctgggccctgcaatcaggaaacaaaagttatgtgctcgtcatgtgcagccacgtcctttggtagttaatcctcctcctccaccacagtttcagaacgtctggcggaatccaaacactgaaacctacctgcagccccaaatcacgccgaatcctgtaactcagcacgttcagtctgctgcaaatcctgagactccaaactcaaccatctccagagaggccagcacccagtcttcatcagctgcagctagccaaggctgggtgttaccagaaggcaaaatcgtgccaaacactgtttttgttggtggaattgatgctaggatggatgaaactgagattggaagctgctttggtagatacggttcagtgaaagaagtgaagataatcacgaatcgaactggtgtgtccaaaggctatggatttgtttcgtttgttaatgacgtggatgtccagaagatagtaggatcacagatacatttccatggtaaaaagctgaagctgggccctgcaatcaggaaacaaaagttatgtgctcgtcatgtgcagccacgtcctttggtagttaatcctcctcctccaccacagtttcagaacgtctggcggaatccaaacactgaaacctacctgcagccccaaatcacgccgaatcctgtaactcagcacgttcagtctgctgcaaatcctgagactccaaactcaaccatctccagagaggccagcacccagtcttcatcagctgcagctagccaaggctgggtgttaccagaaggcaaaatcgtgccaaacactgtttttgttggtggaattgatgctaggatggatgaaactgagattggaagctgctttggtagatacggttcagtgaaagaagtgaagataatcacgaatcgaactggtgtgtccaaaggctatggatttgtttcgtttgttaatgacgtggatgtccagaagatagtaggatcacagatacatttccatggtaaaaagctgaagctgggccctgcaatcaggaaacaaaagttatgtgctcgtcatgtgcagccacgtcctttggtagttaatcctcctcctccaccacagtttcagaacgtctggcggaatccaaacactgaaacctacctgcagccccaaatcacgccgaatcctgtaactcagcacgttcaggcttactctgcttatccacattcaccaggtcaggtcatcactggatgtcagttgcttgtatataattatcaggaatatcctacttatcccgattcagcatttcaggtcaccactggatatcagttgcctgtatataattatcagccatttcctgcttatccaagatcaccatttcaggtcactgctggatatcagttgcctgtatataattatcaggcatttcctgcttatccaaattcaccatttcaagtcgccactggatatcagttccctgtatacaattatcagccatttcctgcttatccaagttcaccatttcaggtcactgctggatatcagttgcctgtatataattatcaggcatttcctgcttatccaaattcaccatttcaagtcgccactggatatcagttccctgtatacaattatcaggcatttcctgcttatccaaattcaccagttcaggtcaccactggatatcagttgcctgtatacaattatcaggcatttcctgcttatccaagttcaccatttcaggtcaccactggatatcagttgcctgtatataattatcaggcatttcctgcttatccaaattcagcagttcaggtcaccactggatatcagttccatgtatacaattaccagatgccaccgcagtgccctgttggggagcaaaggagaaatctgtggaccgaagcatacaaatggtggtatcttgtctgtttaatccagagaagagactgataaattccgttgttactcaagatgactgcttcaagggtaaaagagtgcatcgctttagaagaagtttggcagtatttaaatctgttggatcctctcagctatctagtttcatgggaagttgctggttttgaatattaagctaaaagttttccactattacagaaattctgaattttggtaaatcacactgaaactttctgtataacttgtattattagactctctagttttatcttaacactgaaactgttcttcattagatgtttatttagaacctggttctgtgtttaatatatagtttaaagtaacaaataatcgagactgaaagaatgttaagatttatctgcaaggatttttaaaaaattgaaacttgcattttaagtgtttaaaagcaaatactgactttcaaaaaagtttttaaaacctgatttgaaagctaacaattttgatagtctgaacacaagcatttcacttctccaagaagtacctgtgaacagtacaatatttcagtattgagctttgcatttatgatttatctagaaatttacctcaaaagcagaatttttaaaactgcatttttaatcagtggaactcaatgtatagttagctttattgaagtcttatccaaacccagtaaaacagattctaagcaaacagtccaatcagtgagtcataatgtttattcaaagtattttatcttttatctagaatccacatatgtatgtccaatttgattgggatagtagttaggataactaaaattctgggcctaattttttaaagaatccaagacaaactaaactttactgggtatataaccttctcaatgagttaccattcttttttataaaaaaaattgttccttgaaatgctaaacttaatggctgtatgtgaaatttgcaaaatactggtattaaagaacgctgcagcttttttatgtcactcaaaggttaatcggagtatctgaaaggaattgtttttataaaaacattgaagtattagttacttgctataaatagatttttatttttgttttttagcctgttatatttccttctgtaaaataaaatatgtccagaagaggcatgttgtttctagattaggtagtgtcctcattttatattgtgaccacacagctagagcaccagagcccttttgctatactcacagtcttgttttcccagcctcttttactagtctttcaggaggtttgctcttagaactggtgatgtaaagaatggaagtagctgtatgagcagttcaaaggccaagccgtggaatggtagcaatgggatataatacctttctaagggaaacatttgtatcagtatcatttgatctgccatggacatgtgtttaaagtggctttctggcccttctttcaatggcttcttccctaaaacgtggagactctaagttaatgtcgttactatgggccatattactaatgcccactggggtctatgatttctcaaaattttcattcggaatccgaaggatacagtctttaaactttagaattcccaagaaggctttattacacctcagaaattgaaagcaccatgactttgtccattaaaaaattatccatagtttttttagtgcttttaacattccgacatacatcattctgtgattaaatctccagatttctgtaaatgatacctacattctaaagagttaattctaattattccgatatgaccttaaggaaaagtaaaggaataaatttttgtctttgttgaagtatttaatagagtaaggtaaagaagatattaagtccctttcaaaatggaaaattaattctaaactgagaaaaatgttcctactacctattgctgatactgtctttgcataaatgaataaaaataaactttttttcttcaaatgtg

SEQ ID NO: 2612 - DNA, 1938 bp, Homo sapiens
  source 1..1938: mol_type = genomic DNA
gggttccggtgttcgcggaggagtcgaggcacggagaggcttcgggggagggacggaaagaagggtggcccgccaggcgggcggggtccatggattcggggtgagggccgtccgcggcctcgctttcgcctcctccgagccgggccggcgatggccgcagctgtgaggcgaggtcgggtcccgtagcggcgcgcagcctccttgggggactcggggtcctgtatattttgaatacatctgtcttcataaaatacaccatgtccaaaatctaaaagggccaattccaaattattccaccagctttgaagggaattgaagcaagaataacaagacagaagaatagaaggaaggtgataggatgtgatgatagaatttgtgatagccaagcaacaacttttcctaattcggcatgttaaaaaataagggtcactcatctaagaaagataacttggcagtcaatgcagttgctttacaagatcacattttacatgatcttcaacttcgaaatctttcagttgcagatcattctaagacacaagtacaaaagaaagagaacaaatctctaaaaagagatacaaaggcaataatagatactggacttaaaaaaactacacagtgccccaaactagaagactcagaaaaagaatatgttcttgatcccaaaccgccgccgttgactttggcacagaagttgggcctcattgggcctccaccacctccactgtcatcagatgaatgggagaaggtgaaacagcgctctctcctgcaaggggactccgtgcaaccatgccccatctgtaaagaagaattcgagcttcgtcctcaggtgctgctttcatgctcccatgtgttccacaaagcatgtcttcaggcttttgaaaagttcacaaataagaaaacctgtcctctctgtagaaagaaccagtatcaaacccgagtgatacacgatggggcccgcctgttcagaatcaagtgtgtgaccagaatccaagcctactggagaggatgtgttgttagaaagtggtacagaaacctgaggaaaacagtacctcccacagatgccaagttaagaaaaaaattctttgaaaaaaagttcacagaaatcagccaccgcatcctgtgctcatacaacaccaacattgaagagctctttgcagaaatcgatcagtgcttggccataaatcgaagtgttcttcagcagttggaagaaaaatgtggccatgagatcacagaagaggaatgggagaaaatccaagtgcaggctctgcgccgggagacccacgagtgctccatctgcctggcccctctctccgctgctggcggtcagcgcgtgggtgcaggcaggcgttccagagagatggccctcctgtcctgctcacatgtgttccaccatgcgtgtctgctggcactagaggagttctccgtgggagacaggcctcctttccatgcctgtcctctctgccgctcctgctaccagaagaagattcttgaatgttgaattcatagtcaaggaaagttaggtaattctgaggaaaaaagtttaccatcattttggatgaactgcatgagttctgggttaagtactacaatgtaatctgtttcccagggaaataagctattggtagttgtaggaaatcttagtatattttaaaagctgacatcccacctaattttaatctttggtctctaaaaagtaaatttcaaatttatgagtttaatcacttcaaatatgaatagcaaaaaatgagagcttgcttacttctaaaaattgaggttaagatatagctagtgtctgaacgacactccttaaagtaagttccaaatgtaaaacactccttaagttccaaatgttttccgctaatagtctgtcctaaagcctttgccattcctaatactcgttttgtaataattgctgtatttctgtgtaataaaatataa

SEQ ID NO: 2613 - DNA, 3966 bp, Homo sapiens
  source 1..3966: mol_type = genomic DNA
gcggccggtgggctccgcccttaaccaagatggcgatacgcgtgggaccggaaagagtttatagatttcccgtctaccctacctctgaggtgaaggtgggactgccctgtggagcccaccctttccgttatgcgcccgcgcggcgcaatgacgtaacacaggcccgcccactgcccctgttgggttcctgagtcgtgctgcgtcgacaacggtagtgacgcgtattgcctggaggatggcggacgccggcattcgccgcgtggttcccagcgacctgtatcccctcgtgctcggcttcctgcgcgataaccaactctcagaggtggccaataagttcgccaaagcgacaggagctacacagcaggatgccaatgcctcttccctcttagacatctatagcttctggctcaagtctgccaaggtcccagagcgaaagttacaggcaaatggaccagtggctaagaaagctaagaagaaggcctcatccagtgacagtgaggacagcagcgaggaggaggaggaagttcaagggcctccagcaaagaaggctgctgtacctgccaagcgagtcggtctgcctcctgggaaggctgcagccaaagcatcagagagtagcagcagtgaagagtccagtgatgatgatgatgaggaggaccaaaagaaacagcctgtccagaagggagttaagccccaagccaaggcagccaaagctcctcctaagaaggccaagagctctgattctgattctgactcaagctccgaggatgagccaccaaagaaccagaagccaaagataacacctgtgacagttaaagctcagactaaagcccctcccaaaccagctcgagcagcacctaaaatagccaatggtaaagcagccagtagcagcagtagcagcagcagcagcagtagcagtgatgactcagaggaggagaaggcagcagccacccccaagaaggtctggaccataacttctgtcagggcagagactgtacctaaaaagcaagttgtggccaaggccccagtgaaagcagctaccacccctacccggaagagttctagcagtgaggattcctccagtgacgaggaagaggagcaaaaaaaacccatgaaaaataaaccaggtccctacagttcagtccccccgccttctgctcccccaccaaagaagtctctgggaacccagcctcccaagaaggctgtggagaagcagcagcctgtggaaagcagtgaagacagcagtgatgagtctgattcaagttctgaagaagagaagaaacccccaactaaggcagtagtctctaaagcaaccactaaaccacctccagcaaagaaagcagcagagagctcttcagacagctcagactctgacagctctgaggatgatgaagctccttctaagccagctggtaccaccaagaattcttcaaataagccagctgtcaccaccaagtcacctgcagtgaagccagctgcagcccccaagcaacctgtgggcggtggccagaagcttctgacgagaaaggctgacagcagctccagtgaggaagagagcagctccagtgaggaggagaagacaaagaagatggtggccaccactaagcccaaggcgactgccaaagcagctctatctctgcctgccaagcaggctcctcagggtagtagggacagcagctctgattcagacagctccagcagtgaggaggaggaagagaagacatctaagtctgcagttaagaagaagccacagaaggtagcaggaggtgcagccccttccaagccagcctctgcaaagaaaggaaaggctgagagcagcaacagttcttcttctgatgactccagtgaggaagaggaagagaagctcaagggcaagggctctccaagaccacaagcccccaaggccaatggcacctctgcactgactgcccagaatggaaaagcagctaagaacagtgaggaggaggaagaagaaaagaaaaaggcggcagtggtagtttccaaatcaggttcattaaagaagcggaagcagaatgaggctgccaaggaggcagagactcctcaggccaagaagataaagcttcagacccctaacacatttccaaaaaggaagaaaggagaaaaaagggcatcatccccattccgaagggtcagggaggaggaaattgaggtggattcacgagttgcggacaactcctttgatgccaagcgaggtgcagccggagactggggagagcgagccaatcaggttttgaagttcaccaaaggcaagtcctttcggcatgagaaaaccaagaagaagcggggcagctaccggggaggctcaatctctgtccaggtcaattctattaagtttgacagcgagtgacctgaggccatcttcggtgaagcaagggtgatgatcggagactacttactttctccagtggacctgggaaccctcaggtctctaggtgagggtcttgatgaggacagaagtttagagtaggtcctaagactttacagtgtaacatcctctctggtccttttctgtgttcctagttttgtacagacttgtttttgagtgttgagtagcagggacaaaataagggaatgttattttttaagaaaattcattttcattgttgtctccttccttttctgtgaaagtcctcatactgagaaatttgtatattttatattaaatcacttactattgatttttgttgtgattttcaaaggtggattcccacagataaaatcttggctattgcccaaaacatagtaaagggtcacgtgtgactttttataataggaagaaaattctgcctttgtgagtgcacatgtccacatttcatccctccttccctcaaaaccctagagaggggcattaaagaattgttgatgtatatgcaatgtctgttaagcatgcactatgtatttcatcctcatttattgggtctgggactgaagtttttagccagcatggacctaacctactttttgggataaaattctctgttttgttacaggcaaaattctggtatggcgtgaatgccatgggtcattctgaatatatttttttctgtaattttatcattacacgatgtttgcaatacgtgctttgttttttaatttgaaagcaaacttttctactgttgaaagacattttttgacaacttgacccttcctagtattgagttctaagttgaggactgcatcttctcgttttttacagtatagagaacaaaatgacatgagtttgaaaaatacatatcacttggtattgctgtcttggttgcagtggtgatacagaattggtttcattaattcctacatggttgagaatcactgatcaagaaagtggggggaaaaaaaacaaacgttaaaacctcaatcctcagtaggaaggtagattacattaggtgaaattataggtaatctatgtatgtgctaatggggttggaaagaaccttacagagcatattacctgataaactggagtgggtttgggagaacaaactaataggattattgtgtctcctagttggtacctgggagcaattgacatgcccccttcagaaccttaactgttagtagcagtggctgtaacaacacaaaccagtgaccagagataacagcttttaggccaagctggcctgacggtatggctgcaggaagtgactgagcagtagcggtactcagccagaccaagacggagagggaagagtccacagctttctggaagctaaggcattctggtggtagaaaagtgtgccccaagccttcatggacgagttataggtcttaagattagtctcctcttgtttggattccatacttgctaaataacctgataataacctggttttccatgtaactgcctctaggaagaaaatgtactgttcatgctgacacagatatttcagtctgcatggtaaaagttctaaatcttactacaaaataataaactggctggtttataatgtg

SEQ ID NO: 2614 - DNA, 1059 bp, Homo sapiens
  source 1..1059: mol_type = genomic DNA
atattccttatgccccccggctggagctgcagcgccagcctcccgccctaccgccgtttccgtgggctgagccgccctgcggccacccggtcccgcgccagtcagtgcgccgccttcccgggggacacctcactcgccccttgctgcgccgtcggctccccagcgcttccactcgacctcgcaccccactcgcctgctgggctcgagcgggggtgtgcggcgattatccgtgcaggcggtgcggggagtgggtctgggagagcggccctttgcgcgtgttcctcaggccctttctgccctggtttcccagccagtggacaggaagcttcattcaagcaaagctgggtgcaaacatgagtgtcgttcttggtagagggcggttggaagctacagaaagatctagaagaggtaaaggtgttgctggaaaaggctactaggaaaagagtacgtgatgcccttacagctgaaaaatccaagattgagacagaaatcaagaacaagatgcaacagaaatcacagaagaaagcagaacttcttgataatgaaaaaccagctgctgtggttgctcccattacaacgggctatacggtgaaaatcagtaattatggatgggatcagtcagataagtttgtgaaaatctacattaccttaactggagttcatcaagttcccactgagaatgtgcaggtgcatttcacagagaggtcatttgatcttttggtaaagaatctaaatgggaagagttactccatgattgtgaacaatctcttgaaacccatctctgtggaaggcagttcaaaaaaagtcaagactgatacagttcttatattgtgtagaaagaaagtggaaaacacaaggtgggattacctgacccaggttgaaaaggagtgcaaagaaaaagagaagccctcctatgacactgaaacagatcctagtgagggattgatgaatgttctaaagaaaatttatgaagatggagacgatgatatgaagcgaaccattaataaagcctgggtggaatcaagagagaagcaagccaaaggagacacggaattttga

SEQ ID NO: 2615 - DNA, 3531 bp, Homo sapiens
  source 1..3531: mol_type = genomic DNA
agatgctgaggaatatggcaagaagttggggttcaaagtctgatgccaaagctagcaacccgagaaataaaaccgctgatcaccagctccccactcaggcccagcccccttttagagcccccagactccccacgcagggccctagccccctagtcttccccgtcaatgccctgttggcaatacagccatcaggttctatcagagtgagctgtttttatatgattattttcccccctgggaagacggctttgtctgtgaaagtccccccaaccaggcgccttataaacgcctaaaacagacagagttgaggagaaaggaggggaaaggaggagggagcaaacccggaggggggccctgaggttcgcagcgggcaggatgggggtatgaggccggagtcggcggctcccaggcccccagccccgtcagggcgcccccgtccccaggcgccagagccggggtccgcagccccctagcactccctggacggccgcgggcctcccacaggcctcgaagtccagagactgatcctgcgaccggaaacgcccccctgcccagggggccctgccagcgacgcccctgccagcccccgagaccccctgcgcggggtcggcaaagcatctggacaccccagaagctccggacgccgaagagagaggccccacgaaaatttcaagacacctcctgggggctgcaggggcggccaagtctccccagcgccaggtgcccccggccacacgtctgcagatctccaggggagcccaccagcctagtcaacatggcctcggaagacattgccaagctggcagagacacttgccaagactcaggtggccgggggacagctgagtttcaaaggcaagagcctcaaactcaacactgcagaagatgctaaagatgtgattaaagagattgaagactttgacagcttggaggctctgcgtctggaaggcaacacagtgggcgtggaagcagccagggtcatcgccaaggccttagagaagaagtcggagttgaagcgctgccactggagtgacatgttcacgggaaggctgcggaccgagatcccaccagccctgatctcactaggggaaggactcatcacagctggggctcagctggtggagctggacttaagcgacaacgcattcgggcccgacggtgtgcaaggcttcgaggccctgctcaagagctcagcctgcttcaccctgcaggaactcaagctcaacaactgtggcatgggcattggcggcggcaagatcctggctgcagctctgaccgaatgtcaccggaaatccagtgcccaaggcaagcctctggccctgaaggtctttgtggctggcagaaaccgtctggagaatgatggcgccactgccttggcagaagcttttagggtcatcgggaccctggaggaggtccacatgccacagaatgggatcaaccaccctggcatcactgccctggcccaggctttcgctgtcaaccccctgctgcgggtcatcaacctgaatgacaacaccttcactgagaagggcgccgtggccatggccgagaccttgaagaccttgcggcaggtggaggtgattaattttggggactgcctggtgcgctccaagggtgcagttgccattgcagatgccatccgcggcggcctgcccaagctaaaggagctgaacttgtcattctgtgaaatcaagagggatgctgccctggctgttgctgaggccatggcagacaaagctgagctggagaagctggacctgaatggcaacaccctgggagaagaaggctgtgaacagcttcaggaggtgctggagggcttcaacatggccaaggtgctggcgtccctcagtgatgacgaggacgaggaggaggaggaggaaggagaagaggaagaagaggaagcagaagaagaggaggaggaagatgaggaagaggaggaagaagaggaggaggaggaggaagaagagcctcagcagcgagggcagggagagaagtcagccacgccctcacggaagattctggaccctaacactggggagccagctcccgtgctgtcctccccacctcctgcagacgtctccaccttcctggcttttccctctccagagaagctgctgcgcctagggcccaagagctccgtgctgatagcccagcagactgacacgtctgaccccgagaaggtggtctctgccttcctaaaggtgtcatctgtgttcaaggacgaagctactgtgaggatggcagtgcaggatgcagtagatgccctgatgcagaaggctttcaactcctcgtccttcaactccaacaccttcctcaccaggctgctcgtgcacatgggtctgctcaagagtgaagacaaggtcaaggccattgccaacctgtacggccccctgatggcgctgaaccacatggtgcagcaggactatttccccaaggcccttgcacccctgctgctggcgttcgtgaccaagcccaacagcgccctggaatcctgctccttcgcccgccacagtctgctgcagacgctgtacaaggtctagactcaaagcctctcccatcccttggcctggaccagtgagctggggagggactcggatgaactgaggcgcagcctacgccattgccttggacaggactctggccacaggcagggcgggtctgtgtcccatgtgtcctgtcagtcccctgagtatgtgtgtgggtgtggcgcatgtgcaggtctgtgcctcctgtcgggatttgggttttaacgtcttctgctggcccagccctgctctgttgtggggagttggcccccaggggaaagggctgtgagctgctccgccattaaactcacctccacctgagggcgctctgctgatctccgcctgggccctgatggccgtccccacccacctgccttccggcccggctccctggcggagccagaacccagggagttgcccgcgtgctgtccttcccctctgtgttgtgattgggttgtttcctgccctgcctggggctgcttctcgtcaccaagccctggtcctgcggcagctgtcacccctaccatccataccactgtgctgaccgctcagcctgaagagcagagaatgccatgggtgggactgtgggggtcggatcgtggggttgttggcagagggcaaccctgggccccacaccgtgtggacaggcagacaccagattgtccaggagcaggagctgctgggactgcgctggccccggacctagtgggccttctcctggctgctgagatgtcgtctgtgactggcctggctggagggggagtgttgacaacccaaagctgttctccagtctggggagggagaggcagggtccccaatgtccgagctgcatctggacgctgctcttaaaggacctcctggggcaggggagcggtagggtctggactgggcagatgctgtatgacctccctgagcacccgtgactgccccatgctttcccctttgtgctctgtgtgtgtctgggctgtgcccgggggcttcacaaataaagtcgtgtggcagcttca

SEQ ID NO: 2616 - DNA, 2440 bp, Homo sapiens
  source 1..2440: mol_type = genomic DNA
caattcgggagcccgttctcgcgggattttccaagaccgggttggaatttgcgggggttaggagacggaagtcagagcctaggaagatttgggggtcgccttgccggcctcctgtcctcctccggcggcggcggagcccgagagaactaggtgaacaccgctttgccagcctcacacagcgtcccctggctctgccgccgctccggacgtcgccctcccgttctgcttgggtccccttagtcgctacctttgctgggatccccctcctccatcctgtggcttcgggttgccgaagagcgatgctcggagggcggccggaagtggcgttggccgccattggcctgccggccagccaccttgctgtcctccgccgccttccgggtgttacatgcagccgggctcggcccctccccctggccggatggatccgtcggcgccacagccccgcgcggaaacctcaggcaaagacatatggcatccaggagaaagatgtcttgccccttctccagataatggaaaactttgtgaagcaagcataaaatctatcacagtggatgaaaatggcaagtcatttgcagtcgtcttatatgcagattttcaagaaaggaaaatacctcttaaacagcttcaagaagtgaaatttgttaaagattgccctaggaatcttatatttgatgatgaagatttagaaaaaccttatttcccaaaccgaaaatttccatcatcttctgttgcttttaaattatctgacaatggagactctattccttataccatcaataggtatttgagagactaccaaagagaaggaacccggtttctttatggacactacatccatggaggagggtgcattctgggtgatgacatgggacttggaaaaacagtacaggttatttcatttctggctgcagttttgcataaaaagggaactcgtgaggatattgaaaataacatgccagagtttttactaagaagtatgaaaaaggaacccctttcttctacagcaaaaaagatgttcttaatagttgctcctctttctgtcctctacaactggaaggatgaattggacacctggggatatttcagagtcactgttttacatggaaacagaaaagataatgaattaattcgtgtaaagcagaggaaatgtgaaattgctctaacaacttatgaaacactacgcttatgcctggatgaacttaacagtttggaatggtcagctgtcattgtggatgaagctcatagaatcaagaatccaaaagctagagtaacagaagttatgaaagctttgaaatgtaatgtccgcattggcctcactggaaccatccttcagaacaacatgaaggaactgtggtgtgttatggactgggctgtgccaggccttttagggagtgggacctacttcaagaagcagttttctgacccagtagaacatggtcagagacacacggcaacaaagagagaactagccactggccgaaaggccatgcaaagacttgccaaaaagatgtctggctggtttctcaggcgcaccaagactcttatcaaggatcagttgcctaagaaggaagaccggatggtgtattgttctttgacagatttccagaaagctgtctatcaaacagtgttagaaacagaggacgtgactttgatacttcaatcttctgagccttgtacctgtaggagtggccaaaaaaggagaaattgttgttataagaccaattctcatggtgaaacagtgaaaaccttgtatctcagttaccttacagtccttcagaaggtagctaaccatgtcgcgctactgcaagctgctagtacttccaaacaacaggaaacacttatcaaaaggatatgtgatcaggtattttccagattcccagattttgtgcagaaaagcaaagatgcagcctttgaaacactttctgaccctaaatacagtggaaaaatgaaggtccttcagcagcttttaaatcattgcaggaaaaacagagataaagttcttctcttttctttttccaccaagttgcttgacgtgctacagcagtactgtatggcgtctgggcttgattaccgacgacttgatggaagtacaaaatcagaggaaagactcaagattgtaaaagagttcaacagtacacaagatgttaacatttgccttgtctctacaatggctggtggactaggcctcaattttgtcggtgccaatgttgttgtattatttgatcctacttggaatccagccaatgatcttcaagccattgacagaacccaaacacattgtaggagagaaagggatgctgagcccctctcctctgctcctgggttgcagaatggaagtgagaatgcagtaccttacccctggtggtgctgtgtcacaggagcctccatttcctgctggagatgtgagatttgcaggatccaagatgtcctcgagtaa

SEQ ID NO: 2617 - DNA, 6932 bp, Homo sapiens
  source 1..6932: mol_type = genomic DNA
attctccagcaggcctgcttctggagttgggagatgtcagcctgctgggagggggtggggggaggaggaagaggtggggctctactctgattaattaccttaggcattcaggggtggggcttccttcagccatctgcctgagatatgggagggagctggagaaagaaggagggggagagactgccagagaggaagagaaaagaaaggaagaaacattagaaagaaaaaggaaggaaaacggtataaagagagatcaattacccacccttaaatagctagattggggggggaggggggtggaaaagaaagctgtggaggtgtgccccagcacggctgctttgaaaggtttatcatctatccgtttggtttatggagaaaaagaaaatggtaactcagggtaaccaggagccgacaacaactcctgacgcaatggttcagccttttactaccatcccatttccaccacctccgcagaatggaattcccacagagtatggggtgccacacactcaagactatgccggccagaccggtgagcataacctgacactctacggaagtacgcaagcccacggggagcagagcagcaactcacccagcacacaaaatggatctcttacgcagacagaaggtggagcacagacagacggccagcagtcacagacacaaagtagtgaaaattcagagagtaaatctaccccgaaacggctgcatgtctctaatattcctttccgcttccgggaccctgacctccggcagatgtttgggcagtttggcaaaatcctagatgtagaaataatctttaatgaacgtggctctaagggattcgggttcgtaactttcgagaatagtgctgatgcagacagggccagggagaaattacacggcaccgtggtagagggccgtaaaatcgaggtgaataatgctacagcacgtgtaatgaccaataagaagatggtcacaccatatgcaaatggttggaaattaagcccagtagttggagctgtatatggtccggagttatatgcagcatccagctttcaagcagatgtgtccctaggcaatgatgcagcagtgcccctatcaggaagagggggtatcaacacttacattcctttaatcattcctggcttcccttaccctactgcagccaccacggcagccgctttcagaggagcccatttgaggggcagagggcggacagtatatggtgcagtccgagcggtacctccaacagccatccccgcctatccaggggtggatatgcagcctacagatatgcacagcctgctactgcaaccgcagccaccgctgctgcagccgctgcagccgcttacagtgacggttatggcagggtgtacacagccgacccctaccatgcccttgcccctgccgctagctatggagttggcgctgtggcgagtttataccgaggtggctacagccgatttgccccctactgaagtgacgtgagacccctgcaaatgggacagccccccagttcatgaggcctggctattgcaatatttactagtagaggaactctatagcaagatgaagaggaaaaacaaacaaacaaacaaaaaaaaacacaaaaaaagaaagaatacttttttatacctcactatgttctttgaatatgtatttttcctttaaatttctgcctttaattcttttgttccaaagattgtgcatttttttctttttttttttaaactgtggtaaaaaaaaaaaaaataatgcatttccatgtctgtatgtccgtgcttagcttattctatcaatcacggaagaggcagtcaaggaggaaggagagacattaggagccgataaatgcatctgatcagaaatcagcagacagaattaccaaagtgtatctggtgctgaatgactgggggacaagcagaagtggaagagatctttctgcaacaggatattcttctagtcttctgagtttctggtctttgacaggcaattctggttggctgtggctggaatccacatgctgatagataggaatttgtgcttacaaagcaggagaattaaaaagacgctttcctctcctcttccctcctgtcttctccgttctttttacaatcatcttacacgcacagcctgagacagctggcatagtttttggaattatagtattgatatttccaaacgtgctctcagacagtggataataaacacctcattaggaaaccgatctcagaatgaactctggagtatgaaaaagatcatttctttttgttcctgtaacctagcattccttctaggcttcttctcctttaattgaaccacagcttagctcatgtattcttttattaacaccctgctctcatgtccataagattcaggaatttaggacccagggacagaaaagtgaataagccagtgaccagatttcccccagatgtcttgaggattagaagtacaaattgttgacagccattaaagagggtgaggaagggaaaaggaatattagaagatctggtatttcttacttttttcttgcctcagaaagtacaaagtttaaaaaatagaataaagaatctgctggggaaagatagagtaccaggtcctaggtcagtagtccctggaagttttggtgatgaggacatggaagggcaggcagaggcactttgtacttgctccaaagccataggaattttcatcttccagagcctttatgagtcacttctctatccacagtcttgagcctgtggctatcccgctgagcttctcactgtcctccaaaaacaccccgctgagcacccggaccactttgtacacattaacactacaggacataaaatgcagaggccctgagattgctgccctcccatattggaaggagggtctgcgatggcaagggtcttctatatcaccagaaagagtcgcgcagtgagtcactgccgttgccatctggctgtaattttctatgttatcaaggtaggagggagtgtttctcttctagctgttagatagaactgataaaagcaagtgtcctacagcatttcccaaatgaaggcattaggaaatagaaaagcacggtctttttggctccctggtctagtcacattggtactagggtgacctttcacccaagggacagctgctaaagggagtaattcagagacatggagcttctggttatgggtttgttttgggtttgtttttaactcctgcctccacacatgttcttgactgataactgactcatgtccctgaattaaaatgactgacctatgacagcatcaagcattctttgtaagcagagtgatatatctgagagggcgttgacctgttgtgtagaatacatatcctttcccccttcagaatcctgtctcgcctcgtaactgggagagaggctgtgcctgaaactaggggcgatgtcaaggaagctagaggcctcgatgcaattattactgactctggggaggaagacagagaataaggggacaccaactgcccagtccactggccatttttaagggtccccccaccccaagccaaagtttggtttgttgctgttaagacaatttttgttgtatgtatataaatattttagttagaggagcggggaatgggatgcgggctttcacagttctagggaatgggggcagggaggattttgcttttgcttttgctttgagggagaactttagctgactaaaaaaacagaagtttggggtcatgatcacaaaggggccattcccaaaagatggcaagccacgtattcagtggagactaggccaaattctaaatggttttatccatagcaggggagaataggagaatgagtttaagagtttttctcttcttttttcctagaaagaggtaaggataatgggaaaggtagagaaggcggctcccacagaccttttaagagaggcagaatcttgagcttgaggcaccttgagtgcatctcagttcagctggttctggctgaggcctccaaaggcaagctctgtgctttccagtggtttctgctgcatttccagggatggtgtttaacaccgcttcctccagctcccttttctaagaaagaataaatggagttctgctttttatgaaagggtctttggttttcagtgtcaacactgagaattggggctcttgcaagcatctggatttcacagtatcaacctccccgtcaccttttgaactttgagactccgtacggtcaacttcaccagaggcaggttgctcgaagcagcactgcttgtctgttcctgactctggttctcactgtattaaaaaagagagtcagaggagtctggcatttcgtgagtttgttagaggatgctggctgataattccagaaaacttactgatgctaaatcacagtacatgcatgattctttttcagctttactatagttcatgacctggactttctgtactcttggaagctgggctccttaaaggaggcctctagtgaacacctttatctccatgtccctcttagagcccagagagctgcccataggcattttccagaattcctcatgtcacctagttcaatttccattaactcagatcagccattgtgattcaccatttgtcaggctctcaggtttaacaaaacctactatcaccatcatccttcaacagccacagtctgaattgagccaacatttttttttctttgagaaagaagtggactggggcacaacttttagtctgaggggagctagtggaaatctagacaatagaagtcatcgatagcagcttttcctcaaatgtgtgactcctcaggggctaaactgctcttagcttagaattatgctttactagagatctagcagataagtgggttaatcactaccatcctgtaactagttatatagcttccagacatgagggagacatcaaacagggatggaagcaaccccaaggatatgcaagaagggcatgatgaacccccttccctctggcaggagaacaaggccaaccaagggacagactggaaagcacttagatgtttaaggaggagaaaggggaagctttgaccagtccttgccttttgccaagttcagccagttctccgctgcttgcaacctctagcgcagtaacatttgcagaattgcagattttcccccagatactaggaggaaagggactttggggggtggggaaggggtcgtggtgttttaaaagcataagttacctgtttgcactgttttaagataggaaaaaaaaatagtgggcaaggtgaacatcagacgtaaatttgtgtgtttttattttgtcatgctcttgaaaatgtttgaccatttgtagtatacacagtgaaacttgattctctgttgcataaaacactatatttttttggaaatgttactgtccaaaagcctcttccctccctttccttttcctatgtacttccttcatacttgctttactgatcagccaggcaatagccatccaagagctagagcatgaaacagggccctttccaagtaggctctgggtgtcctaagccagcgtgtgccctctggtttagtgagtgtaatagagtccctggcacctttctttgcaaatgaggctaacagaccagactgcagcaagttatcagattcctcaatcagatgcactaggagtgaggagcccagggatggagggggttcctgaagtattgcagttggctgtagtagctgagttcttttccatgttaccgaaactgtagccagttacagtttactcaggaaaacggtagatcaattcagccatggtagtgctggttggcagggattggtaacggagagaactgctcatcagccaaaactcaagccttgccttttaggaggccaccagcagagggacttggtcctccttgtctggtacttgtgtacatgccggtgacctgaggactccactcacactggcgagcaaaaagggagcagtgattctcttttctctccccaccccctgccctttgttaccaacaccagtttcccagggggtacatgagtttctgaatttttaaaaaatgtttttggtttggtttttctggggactgataagtgctttaagcaatgtccataccccgtcaagactcccagcttagtcattttcttgtatttttctgttcacagtatttgtgtgtgtgcttgttttggcagctcattttggctgtattatatattgagtgatgaattgatcctcttttttccctaagggatatgaattgtttttcttgtgttatattctgcttgtgaatagctggagcaaacctggggctgacacgcgtaagctagggctgcaaagcgagaagagagccggtggagtgtacttgtccctgacaggctgacctacctgagtctctgagcttttcagtccaaatctttgcaaggctcaaaatgccacagaacctctcctcttctccccactccccatggcagggaccggaccatccctacatgcaacatgctgttcctccagcccctcccattgccatggcaaaacaggtacctttggggcatgggggcattacatgggatgcttgtgtaatcgaccacctagccttctctctcccctcccgtcctcccccagaatcacttcctaggacacccgagctgcttgcccagggtcctgtttccctgctaactccagagaagcatcccagggctttgtgacagtctctaattcccttcccttctcgttaagaatcatattgtatagtagctttcagaccatacagtattcattgggttactcctattattatcaagtagctggaattgtgaaggtcggagtagttagatctttagcttttattccttatttttttgtattactctccatgtgtataaattattgatcatgttgctggcttttataaactctaagcgaaggaggagcactgcctcagcctttgcacatggtaatgaagcactgtttttaaataaaagagagaaacacca

SEQ ID NO: 2618 - DNA, 3469 bp, Homo sapiens
  source 1..3469: mol_type = genomic DNA
ctttccccgtcacctgcctggaacaggggtgcggggcgaggagggcgtggcgcccgtgtgcgccttctgcctgccccctcggccttcttcacttagccttcgacggccgagcgccccaggggtggcggtgggagtggggttgttgagcggcgctggctcctttcacaaatggggaaactgaggcttaaagggcgtctgactcgccagagcagctcagcctgcagctgctagcagtggcgtctcatattagcattgttgtcaaccggaggcggtgcgagtccgccggggattccagatggggctcctgcgccgcccgcctatcatttgcggcctgtattcgcgcgtcgctcccgcagagccacctcccagcaggcccacgcccgcgggggccccgggctggcgccgctgtccctggaatcgatagacggtctccttctgtcacccaggctggagtgtagtggaacgatcaccgctgaactgcagcgtcggcttcctgggctcaagcgatcctcccacctcaacctcccaagtcatggggactacagatgccatcacacctggctaatttttaaatttttctgtggagacagggtctcattctgttgcccaggcttgtctcgaaccctggtctaaagtgatcttcccgcctagcctcccaaaatgttggaattacagtctgcagatctccaggggagcccaccagcctagtcaacatggcctcggaagacattgccaagctggcagagacacttgccaagactcaggtggccgggggacagctgagtttcaaaggcaagagcctcaaactcaacactgcagaagatgctaaagatgtgattaaagagattgaagactttgacagcttggaggctctgcgtctggaaggcaacacagtgggcgtggaagcagccagggtcatcgccaaggccttagagaagaagtcggagttgaagcgctgccactggagtgacatgttcacgggaaggctgcggaccgagatcccaccagccctgatctcactaggggaaggactcatcacagctggggctcagctggtggagctggacttaagcgacaacgcattcgggcccgacggtgtgcaaggcttcgaggccctgctcaagagctcagcctgcttcaccctgcaggaactcaagctcaacaactgtggcatgggcattggcggcggcaagatcctggctgcagctctgaccgaatgtcaccggaaatccagtgcccaaggcaagcctctggccctgaaggtctttgtggctggcagaaaccgtctggagaatgatggcgccactgccttggcagaagcttttagggtcatcgggaccctggaggaggtccacatgccacagaatgggatcaaccaccctggcatcactgccctggcccaggctttcgctgtcaaccccctgctgcgggtcatcaacctgaatgacaacaccttcactgagaagggcgccgtggccatggccgagaccttgaagaccttgcggcaggtggaggtgattaattttggggactgcctggtgcgctccaagggtgcagttgccattgcagatgccatccgcggcggcctgcccaagctaaaggagctgaacttgtcattctgtgaaatcaagagggatgctgccctggctgttgctgaggccatggcagacaaagctgagctggagaagctggacctgaatggcaacaccctgggagaagaaggctgtgaacagcttcaggaggtgctggagggcttcaacatggccaaggtgctggcgtccctcagtgatgacgaggacgaggaggaggaggaggaaggagaagaggaagaagaggaagcagaagaagaggaggaggaagatgaggaagaggaggaagaagaggaggaggaggaggaagaagagcctcagcagcgagggcagggagagaagtcagccacgccctcacggaagattctggaccctaacactggggagccagctcccgtgctgtcctccccacctcctgcagacgtctccaccttcctggcttttccctctccagagaagctgctgcgcctagggcccaagagctccgtgctgatagcccagcagactgacacgtctgaccccgagaaggtggtctctgccttcctaaaggtgtcatctgtgttcaaggacgaagctactgtgaggatggcagtgcaggatgcagtagatgccctgatgcagaaggctttcaactcctcgtccttcaactccaacaccttcctcaccaggctgctcgtgcacatgggtctgctcaagagtgaagacaaggtcaaggccattgccaacctgtacggccccctgatggcgctgaaccacatggtgcagcaggactatttccccaaggcccttgcacccctgctgctggcgttcgtgaccaagcccaacagcgccctggaatcctgctccttcgcccgccacagtctgctgcagacgctgtacaaggtctagactcaaagcctctcccatcccttggcctggaccagtgagctggggagggactcggatgaactgaggcgcagcctacgccattgccttggacaggactctggccacaggcagggcgggtctgtgtcccatgtgtcctgtcagtcccctgagtatgtgtgtgggtgtggcgcatgtgcaggtctgtgcctcctgtcgggatttgggttttaacgtcttctgctggcccagccctgctctgttgtggggagttggcccccaggggaaagggctgtgagctgctccgccattaaactcacctccacctgagggcgctctgctgatctccgcctgggccctgatggccgtccccacccacctgccttccggcccggctccctggcggagccagaacccagggagttgcccgcgtgctgtccttcccctctgtgttgtgattgggttgtttcctgccctgcctggggctgcttctcgtcaccaagccctggtcctgcggcagctgtcacccctaccatccataccactgtgctgaccgctcagcctgaagagcagagaatgccatgggtgggactgtgggggtcggatcgtggggttgttggcagagggcaaccctgggccccacaccgtgtggacaggcagacaccagattgtccaggagcaggagctgctgggactgcgctggccccggacctagtgggccttctcctggctgctgagatgtcgtctgtgactggcctggctggagggggagtgttgacaacccaaagctgttctccagtctggggagggagaggcagggtccccaatgtccgagctgcatctggacgctgctcttaaaggacctcctggggcaggggagcggtagggtctggactgggcagatgctgtatgacctccctgagcacccgtgactgccccatgctttcccctttgtgctctgtgtgtgtctgggctgtgcccgggggcttcacaaataaagtcgtgtggcagcttca

SEQ ID NO: 2619 - DNA, 3294 bp, Homo sapiens
  source 1..3294: mol_type = genomic DNA
ctcgccagccgcgggttcgggcgtcttcggaccagcggggcgccgcaggcccctcgcagcgtccgtcggcaggcgggcagacgggcgggggagtcgccccggcggggcaagtccgtaccgcgacatgggcgcgccgagcacgtccgtaccgcaagatggctgctcggacggggacagagctcgcctctgccgcctcgacaactgctcctgggtcctctaagaggaggaagcgccacccatggcacacagtgtcccgtcggacagcagaaccagccgtcgtcccacgacacgaccccatgccgcccgcagggcgccccggggctcgcgtcggcccggccgtacgccaaaatggcggctcccgcgtatttccgctcgcgcgccgtatcgtcttcgccgcctgcgccggcacacctattggcccccgcggcgtcccgtcgccgcgtcgcgttgctggcccgtcggagcgacgccgctcgggtcagtcggcggccggactgggaagatggacgcagctactctgacctacgacactctccggtttgctgagtttgaagattttcctgagacctcagagcccgtttggatactgggtagaaaatacagcattttcacagaaaaggacgagatcttgtctgatgtggcatctagactttggtttacatacaggaaaaactttccagccattggggggacaggccccacctcggacacaggctggggctgcatgctgcggtgtggacagatgatctttgcccaagccctggtgtgccggcacctaggccgagattggaggtggacacaaaggaagaggcagccagacagctacttcagcgtcctcaacgcattcatcgacaggaaggacagttactactccattcaccagatagcgcaaatgggagttggcgaaggcaagtccataggccagtggtacgggcccaacactgtcgcccaggtcctgaagaagcttgctgtcttcgatacgtggagctccttggcggtccacattgcaatggacaacactgttgtgatggaggaaatcagaaggttgtgcaggaccagcgttccctgtgcaggcgccactgcgtttcctgcagattccgaccggcactgcaacggattccctgccggagctgaggtcaccaacaggccgtcgccatggagacccctggtacttctcattcccctgcgcctggggctcacggacatcaacgaggcctacgtggagacgctgaagcactgcttcatgatgccccagtccctgggcgtcatcggagggaagcccaacagcgcccactacttcatcggctacgttggtgaggagctcatctacctggacccccacaccacgcagccagccgtggagcccactgatggctgcttcatcccggacgagagcttccactgccagcacccgccgtgccgcatgagcatcgcggagcttgacccgtccatcgctgtggggtttttctgtaagactgaagatgacttcaatgattggtgccagcaagtcaaaaagctgtctctgcttggaggtgccctgcccatgtttgagctggtggagctgcagccttcacatctggcctgccccgacgtcctgaacctgtccctaggtgagagctgccaagtccagattcttctgatgtagagcgactggaaagattcttcgactcagaagatgaagactttgaaatcctgtccctttgaaaatcctggggtcgggggtggcacctgtgagagcctggggctcctggtgccgctgcgtttcatccatcccgcccgctcgcctgccgagggctgcgccccgtgctgcctccccccagagggccacccgctgtgctcgtggactgaggctgcgctgcccgggaggccttactgcttggtgtcagactgcccagctcagagtgcccgtcagggcctgtgcatccgcacgcggagccgtctgttaggagcttccagagtgttctctcgacactgccagccccgtgttagcacctgggcctcagtcccacttgctcccaggcgccggttctgtggttggtttggaattaaagtcctgtttgaagttgtcagacacagacatgaatttctgggcgctccctgagtcagagtctcagaagacctgtgcaggctggcgtgagaggagcggcagccacactgcggccccacgcccaaggactgggctgctctcgaggggggcgcgcccaccgctgtgtcctctctgcccagcctggcttaccaagggctacctcagtgggagatgaggttggaggaacgaaggcgaggttcctccttgctttggggagaaaagtattcaggaagtgggtgtgtgggaaacctgaagatggcgtgcacaggacacagcgtgggcggcctgggcagaagggcggctggctgtcctggagctgctgctggagcctgccctcagagtgtccctttccagtgctgtggcattctgtggcagcttccccaggtgtggtgacggggggggggcggggcctccacctgtgacagccaggcttgagggtggacggcgtgcctctcccaggagccttccccatgtccttgccttgctgagaattgccctcccatgccgctgaggtgttaggtggtttagggccaaaaggggaaaaccacttgagtcttgtggtgtgtggtgggcagacaccacagggtggcatcacctggtggcatttccagaacctcagccccgattccagcacccaccaccgcctgaccctgtgtaacctgctgtcccgggtcccagagtgcactctgccccgctgctctgctgcctgtcctgggaaagtatctttgccccactaggaaatgtaaacaggagggcttggggagcgtgggcacttttctcatgagcagctactgcggcgttggcaggactcgctgctgctgctgctgcttgtgtaggtcggggagccagagatccccgaggacgcgcgccggacagtcggcactgaccggcccacctggtagcagaggacacccccagccccccaagcattgaagacatagtgtatttcctcgtatcctttctcccttgggtgtagttggggtggggaagcagggaaggctggtgcgatctccattccttgggctccacgtccgagttcatggtgcgccgctgtgctgggagctgcagtggtaatgtgtgggacaccttgaccaaaggggagctttgtctcgtgtgttttgaaaaaggcttaatgaagagaatgttgttcattcttagtagtatagtttgcaattcttaatggcaaataataagtttcagtagaaaac

SEQ ID NO: 2620 - DNA, 2248 bp, Homo sapiens
  source 1..2248: mol_type = genomic DNA
ggtgggcccgcggaggaaagatactggggagtgggagccgcggggttcagagcgatgattcccccacaggaggcatccgctcgacggcgggagattgaggacaagctgaagcaggaggaggagactctgtccttcatccgagacagcctggagaagagcgaccagctcactaagaacatggtgtctatcttatcatcctttgagagccgccttatgaagctggagaactccatcatccctgtgcacaagcagacggagaatctgcagcggctgcaggagaatgttgagaagacgctgtcctgcctggaccatgtcatcagctactaccatgtggccagtgacactgagaagatcatcagagagggccccacaggtaggctggaagagtacctgggaagcatggccaagattcagaaggcagtggagtatttccaggacaacagcccagacagcccggaactcaacaaagtgaaactgctctttgagcgcgggaaggaggccctggagtccgaatttcgcagcctgatgacgcggcacagtaaggtcgtctcgcccgtgctcatcttggatctgatcagtggtgacgatgatctggaggcccaggaggacgtgaccctggagcacctgcccgagagcgtgctccaggatgtcattcgcatctcccgctggctggtggaatatggccgcaaccaagatttcatgaacgtctactaccagatacgctccagccagctggaccgctccatcaaaggactgaaggagcatttccataagagcagttcttcctctggggttccctactcccctgctatccccaacaagaggaaagacacacctaccaagaagccagtcaagcggccagggacgatccgtaaggctcagaaccttctgaaacagtattcccagcatggtctagatgggaaaaaggggggctctaacctcattcctctggaaggtcacgagcatgatttccgagttaagcacctgtccgaggccttgaacgacaagcacgggccgctggccgggagagatgacatgctggacgtggagaccgatgcctacatccactgcgtcagtgccttcgtcaagctggcgcagagcgagtaccagctgctggccgacatcatccccgagcaccaccagaagaagaccttcgactccctgatacaggatgccctggatgggctgatgcttgaaggggagaacatcgtgtctgctgcccggaaggccattgtgcgacacgacttctccacggtgctcaccgtcttccccatcctgcgacacctcaagcagaccaagcctgagtttgaccaggtgctccagggcacggctgccagcacaaagaacaagctgcctggcctcatcacatccatggagaccatcggtgccaaagcgctggaggacttcgcagacaacatcaagaatgacccggacaaggagtacaacatgccgaaggacggcaccgtacacgagctcaccagcaatgccatcctcttcctgcagcagcttttggacttccaggagacggcaggcgccatgctggcctcccaagagaccagctcttcggccaccagctacagctctgagttcagcaagcggctgctaagcacctatatctgtaaagtgctgggcaacctgcagttgaacttgctgagcaagtccaaggtgtacgaggacccagctctgagcgccatcttcctgcacaacaactacaattacatcctcaagtccctggagaagtctgaactgatccagctggtggcagtgacacagaagactgctgagcgctcctaccgggagcacattgagcagcagatccagacctaccagcgcagctggttaaaggtgactgattacatcgcagagaagaatctacctgtgttccagccgggagtcaagctccgggacaaggagcggcagattatcaaggagcgttttaagggcttcaatgatggcctcgaagaactgtgcaaaatccagaaggcctgggctattccagacacagagcagagggacaggattcgccaggcccagaagaccattgtcaaggagacctacggggcctttctacagaagtttggcagcgtgcccttcaccaagaacccggagaagtacatcaagtacggggtggagcaggtgggcgacatgatcgatcgccttttcgacacctctgcctgagcctgctgctagccctgcctggttccaccagactggcgtgtcattggacagataaaccagtgttagcttg

SEQ ID NO: 2621 - DNA, 1601 bp, Homo sapiens
  source 1..1601: mol_type = genomic DNA
cgctgctcttggttctggttctggaggctgggttgagaggtcgccggtccgactgtcctcggcggttggtcagtgtgaatttgtgacagctgcagttgctccccgcccccgagcagccgaggagtctaccatggctcaagaatctcccaaaaattcagcagcagaaattccagtgactagtaatggagaagttgatgactctcgtgaacatagctttaatagggatttgaagcattcattaccatctggacttggtctctcagaaacccaaattacatctcatggctttgacaataccaaagagggtgttattgaagcaggagcatttcaaggtggccagagaacacagacaaaaagtggaccagttattctagcagatgaaattaaaaatcctgcaatggaaaagttagaacttgttagaaaatggagtctaaacacctataagtgtactcgacagattatctctgagaagctaggccgtggctcaagaactgtggaccttgaacttgaagctcagattgatatattaagggataacaagaaaaaatatgaaaatattttaaaactggctcaaacattgtcgacccagcttttccagatggtacatacccaaaggcaacttggagatgcatttgctgacctgagtttgaagtcactagaacttcatgaagaatttggctataatgccgatacccagaaactgctggctaaaaatggagagactcttcttggggccattaattttttcattgctagtgtgaacactttggtgaataaaaccattgaagatacattaatgactgtgaaacagtatgaaagtgccaggattgaatatgatgcatatcgcactgatttggaagaactgaatcttggaccacgtgacgcaaacactctgccaaagattgagcagtcacagcatctcttccaagcacataaggaaaaatatgataaaatgcgcaatgatgtttctgtcaaattgaaatttctagaagaaaataaggttaaagtattgcacaatcagctggtccttttccacaatgccattgccgcttactttgctgggaatcagaagcagcttgaacagacacttaaacagttccatatcaaattgaaaacccctggagtggatgccccatcttggcttgaagaacagtaaaatcacagcggaaaataaaaagaaagtcgcgttgttatatttctaaaccaacctaacaagaattaagcagagttgggggaagtgggaggggtgacaagcattatagtgattcttgcacaaacagctttaatttttccctttttcatactttaacaattgaactgttaagggtggttttaatgtaaacatagtttctataatctgaacacaataattttcctttttgagaaatccttttgtattgtgagggttgatggctatttctgtagtttgaaaacatctaatagagatttgcactgacaagataaaaattcaaggtttttggtcctggaaatgagggccgattgtaacttttccaaagggaggtttacatgatttgtatcaacatcagatattttatatgtgaatatattaaacatctttaagagattcattttcatgtatt

SEQ ID NO: 2622 - DNA, 2011 bp, Homo sapiens
  source 1..2011: mol_type = genomic DNA
gtgcgcgctacatggccggagtcgggcgaagcgggggaccgtggggaagaacgcgaggagggaggagtgggaggttgggggtgtcgctaggcgcccttagctccctccctctggaggagctgccgcggccactctgctgccgccgctgccgccgccattttgggttcgctttgcgaggggaaacgatcccagtgtcggttgcgggatccgcctcctctcagtttgcccctttagccctccacctttcccttctcctctctcgcatttccgccagtcggcttacccgctggccgcctcctgacaagcgggagggatccgcggtggacccagggaagcggaggagcctggcggccaccccctcttcctcacttccctgtactctcatcgctctcggcctccgacacgaaaaggaagcaaatgagctgatggaagatctgtttgaaactttccaagatgagatgggattctccaacatggaagatgatggcccagaagaggaggagcgtgtggctgagcctcaagctaactttaacacccctcaagctctacggtttgaggaactactggccaacctactaaatgaacaacatcagatagcgaaggaactatttgaacagctgaagatgaagaaaccttcagccaaacagcagaaggaggtagagaaggttaaaccccagtgtaaggaagttcatcagaccctgattctggacccagcacaaaggaagagactccagcagcagatgcagcagcatgttcagctcttgacacaaatccaccttcttgccacctgcaaccccaatctcaatccggaggccagtagcaccaggatatgtcttaaagagctgggaacctttgctcaaagctccatcgcccttcaccatcagtacaaccccaagtttcagaccctgttccaaccctgtaacttgatgggagctatgcagctgattgaagacttcagcacacatgtcagcattgactgcagccctcataaaactgtcaagaagactgccaatgaatttccctgtttgccaaagcaagtggcttggatcctggccacaagcaaggttttcatgtatccagagttacttccagtgtgttccctgaaggcaaagaatccccaggataagatcctcttcaccaaggctgaggacaatttgttagctttaggactgaagcattttgaagggactgagtttcttaaccctctaatcagcaagtaccttctaacctgcaagactgcccgccaactgacagtgagaatcaagaacctcaacatgaacagagctcctgacaacatcattaaattttataagaagaccaaacagctgccagtcctaggaaaatgctgtgaagagatccagccacatcagtggaagccacctatagagagagaagaacaccggctcccattctggttaaaggtacagccctcttcctcgaagtctgtaggaggcagaaggtcactgaaagttctgagagaatatcaaggacttccttaatcgtctaatgctttagttgtagaactaggacttcaggaatcttcctgattcacctttcttcccttacttttctgcccttctccgggtgattctacaacattttcaaaataatgggtaaaatggtaatttgctaaaggaaattcagagaagagtttctaaagtgtataattggactgtggtctttgtagaaatttcatatgcagagtcccttggaaagatgccttgagcttgtctcaggtccctaaacttagaaagtcctattctttttcccaaattctgacatgtgctggatcagagtgttctcatttccaataggccagtctgccatccatccaggaagaactgcggcacatggctgatggtgctagagaggtaggaaatatgactggaaccactgagatcaactcagatcaaggcctagaaaaagacaactcagagttggggagtgaaactcggtacccactgctattgcctaagggtgtagtcctgaaactgaagccagttgccgaccg

SEQ ID NO: 2623 - DNA, 936 bp, Homo sapiens
  source 1..936: mol_type = genomic DNA
taggccggggccggcggggcccggaaggcgacgggaaggagccgagcttgggttatggcggcgccgggcgcgctgctggtgatgggcgtgagcggctcggggaactgggatggaaattctatgatgctgatgattatcacccggaggaaaatcgaaggaagatgggaaaaggcataccgctcaatgaccaggaccggattccatggctctgtaacttgcatgacattttactaagagatgtagcctcgggacagcgtgtggttctagcctgttcagccctgaagaaaacgtacagagacatattaacacaaggaaaagatggtgtagctctgaagtgtgaggagtcgggaaaggaagcaaagcaggctgagatgcagctcctggtggtccatctgagcgggtcgtttgaggtcatctctggacgcttactcaaaagagagggacattttatgccccctgaattattgcagtcccagtttgagactctggagcccccagcagctccagaaaactttatccaaataagtgtggacaaaaatgtttcagagataattgctacaattatggaaaccctaaaaatgaaatgacaatgattttgtatcagtggtccaaacagaactaagcataaatcattgtgccatcccaaacctcgttccagccgccttgcccatactagattctaaatgtttctaaaggcaaaccccaatgtgtcaagacagacttgtttaggtgtaattttaggaattatgctggttcatcaggaagcagagggggagttttaaaagtcaagcttaaattgaagtttaaattcatctataaccaaatcaaatgatcagaggaaattctgtaatcaatgctggaaatcgttacattgtttagaacattcttgctcatgcctgtatttgcacaaataaatgaaacttcgctgtccttggc

SEQ ID NO: 2624 - DNA, 631 bp, Homo sapiens
  source 1..631: mol_type = genomic DNA
aaattctcgtcaacgtccggtgagggggcaggacttccttgctggttgctaagacactcttgtttcgctccttgacaaccctggcgggggttcgctggctgcggccccggctccggcccccgcaggagcagcaccccccggggaaagacattttctgctcccaccgagttggcagggcctgcttcctgaatctcctgggtgtgtcttaactgccagtcccagcacctcctgaaagccccactctcctccagtggtcacagtggaaggatcatgggagaaacagaagggaagaaagatgaggctgattataagcgactgcagaccttccctctggtcaggcactcggacatgccagaggagatgcgcgtggagaccatggagctatgtgtcacagcctgtgagaaattctccaacaacaacgaggtattgccagcagtgcaggcggcccctcgtgcttttgatggcccctgtgggtgaataaagtggcccctgttccctgcagttggctccagacagtactgctaggatgaggccagagccttccttggaagcattcagtctggggaaagtcagtgagtgagaggctggcgctgactccaggcactgacggtcacacccagccctagaggag

SEQ ID NO: 2625 - DNA, 6746 bp, Homo sapiens
  source 1..6746: mol_type = genomic DNA
ttgtttgatggttttgatgtttcagattcgttatatttcacaaacacaaggcttgccagctgaatatcttctcagtgccggaacaaaaacaaccaggtttttcaacagagatcctaatttggggtacccactgtggaggcttaagacacctgaagaacatgaactggagactggaataaaatcaaaagaagctcggaagtacatttttaattgcttagatgacatggctcaggtgaatatgtctacagacctggagggaacagacatgttggcagagaaggcagaccgaagagaatacattgatctgttaaagaaaatgctcacaattgatgcagataagagaattacccctctaaaaactcttaaccatcagtttgtgacaatgactcaccttttggattttccacatagcaatcatgttaagtcttgttttcagaacatggagatctgcaagcggagggttcacatgtatgatacagtgagtcagatcaagagtcccttcactacacatgttgccccaaatacaagcacaaatctaaccatgagcttcagcaatcagctcaatacagtgcacaatcaggccagtgttctagcttccagttctactgcagcagctgctactctttctctggctaattcagatgtctcactactaaactaccagtcagctttgtacccatcatctgctgcaccagttcctggagttgcccagcagggtgtttccttgcagcctggaaccacccagatttgcactcagacagatccattccaacagacatttatagtatgtccacctgcgtttcaaactggactacaagcaacaacaaagcattctggattccctgtgaggatggataatgctgtaccgattgtaccccaggcaccagctgctcagccactacagattcagtcaggagttctcacgcagggaagctgtacaccactaatggtagcaactctccaccctcaagtagccaccatcacaccgcagtatgcggtgccctttactctgagctgcgcagccggccggccggcgctggttgaacagactgccgctgtactgcaggcgtggcctggagggactcagcaaattctcctgccttcaacttggcaacagttgcctggggtagctctacacaactctgtccagcccacagcaatgattccagaggccatggggagtggacagcagctagctgactggaggaatgcccactctcatggcaaccagtacagcactatcatgcagcagccatccttgctgactaaccatgtgacattggccactgctcagcctctgaatgttggtgttgcccatgttgtcagacaacaacaatccagttccctcccttcgaagaagaataagcagtcagctccagtctcttccaagtcctctctagatgttctgccttcccaagtctattctctggttgggagcagtcccctccgcaccacatcttcttataattccttggtccctgtccaagatcagcatcagcccatcatcattccagatactcccagccctcctgtgagtgtcatcactatccgaagtgacactgatgaggaagaggacaacaaatacaagcccagtagctctggactgaagccaaggtctaatgtcatcagttatgtcactgtcaatgattctccagactctgactcttctttgagcagcccttattccactgataccctgagtgctctccgaggcaatagtggatccgttttggaggggcctggcagagttgtggcagatggcactggcacccgcactatcattgtgcctccactgaaaactcagcttggtgactgcactgtagcaacccaggcctcaggtctcctgagcaataagactaagccagtcgcttcagtgagtgggcagtcatctggatgctgtatcacccccacagggtatcgagctcaacgcggggggaccagtgcagcacaaccactcaatcttagccagaaccagcagtcatcggcggctccaacctcacaggagagaagcagcaacccagccccccgcaggcagcaggcgtttgtggcccctctctcccaagccccctacaccttccagcatggcagcccgctacactcgacagggcacccacaccttgccccggcccctgctcacctgccaagccaggctcatctgtatacgtatgctgccccgacttctgctgctgcactgggctcaaccagctccattgctcatcttttctccccacagggttcctcaaggcatgctgcagcctataccactcaccctagcactttggtgcaccaggtccctgtcagtgttgggcccagcctcctcacttctgccagcgtggcccctgctcagtaccaacaccagtttgccacccaatcctacattgggtcttcccgaggctcaacaatttacactggatacccgctgagtcctaccaagatcagccagtattcctacttatagttggtgagcatgagggaggaggaatcatggctaccttctcctggccctgcgttcttaatattgggctatggagagatcctcctttaccctcttgaaatttcttagccagcaacttgttctgcaggggcccactgaagcagaaggtttttctctgggggaacctgtctcagtgttgactgcattgttgtagtcttcccaaagtttgccctatttttaaattcattatttttgtgacagtaattttggtacttggaagagttcagatgcccatcttctgcagttaccaaggaagagagattgttctgaagttaccctctgaaaaatattttgtctctctgacttgatttctataaatgcttttaaaaacaagtgaagcccctctttatttcattttgtgttattgtgattgctggtcaggaaaaatgctgatagaaggagttgaaatctgatgacaaaaaaagaaaaattactttttgtttgtttataaactcagacttgcctattttattttaaaagcggcttacacaatctcccttttgtttattggacatttaaacttacagagtttcagttttgttttaatgtcatattatacttaatgggcaattgttatttttgcaaaactggttacgtattactctgtgttactattgagattctctcaattgctcctgtgtttgttataaagtagtgtttaaaaggcagctcaccatttgctggtaacttaatgtgagagaatccatatctgcgtgaaaacaccaagtattctttttaaatgaagcaccatgaattcttttttaaattattttttaaaagtctttctctctctgattcagcttaaatttttttatcgaaaaagccattaaggtggttattattacatggtggtggtggttttattatatgcaaaatctctgtctattatgagatactggcattgatgagctttgcctaaagattagtatgaattttcagtaatacacctctgttttgctcatctctcccttctgttttatgtgatttgtttggggagaaagctaaaaaaacctgaaaccagataagaacatttcttgtgtatagcttttatacttcaaagtagcttcctttgtatgccagcagcaaattgaatgctctcttattaagacttatataataagtgcatgtaggaattgcaaaaaatattttaaaaatttattactgaatttaaaaatattttagaagttttgtaatggtggtgttttaatattttacataattaaatatgtacatattgattagaaaaatataacaagcaatttttcctgctaacccaaaatgttatttgtaatcaaatgtgtagtgattacacttgaattgtgtacttagtgtgtatgtgatcctccagtgttatcccggagatggattgatgtctccattgtatttaaaccaaaatgaactgatacttgttggaatgtatgtgaactaattgcaattatattagagcatattactgtagtgctgaatgagcaggggcattgcctgcaaggagaggagacccttggaattgttttgcacaggtgtgtctggtgaggagtttttcagtgtgtgtctcttccttccctttcttcctccttcccttattgtagtgccttatatgataatgtagtggttaatagagtttacagtgagcttgccttaggatggaccagcaagcccccgtggaccctaagttgttcaccgggatttatcagaacaggattagtagctgtattgtgtaatgcattgttctcagtttccctgccaacattgaaaaataaaaacagcagcttttctcctttaccaccacctctacccctttccattttggattctcggctgagttctcacagaagcattttccccatgtggctctctcactgtgcgttgctaccttgcttctgtgagaattcaggaagcaggtgagaggagtcaagccaatattaaatatgcattcttttaaagtatgtgcaatcacttttagaatgaatttttttttccttttcccatgtggcagtccttcctgcacatagttgacattcctagtaaaatatttgcttgttgaaaaaaacatgttaacagatgtgtttataccaaagagcctgttgtattgcttaccatgtccccatactatgaggagaagttttgtggtgccgctggtgacaaggaactcacagaaaggtttcttagctggtgaagaatatagagaaggaaccaaagcctgttgagtcattgaggcttttgaggtttcttttttaacagcttgtatagtcttggggcccttcaagctgtgaaattgtccttgtactctcagctcctgcatggatctgggtcaagtagaaggtactggggatggggacattcctgcccataaaggatttggggaaagaagattaatcctaaaatacaggtgtgttccatctgaattgaaaatgatatatttgagatataattttaggactggttctgtgtagatagagatggtgtcaaggaggtgcaggatggagatgggagatttcatggagcctggtcagccagctctgtaccaggttgaacaccgaggagctgtcaaagtatttggagtttcttcattgtaaggagtaagggcttccaagatggggcaggtagtccgtacagcctaccaggaacatgttgtgttttctttattttttaaaatcattatattgagttgtgttttcagcactatattggtcaagatagccaagcagtttgtataatttctgtcactagtgtcatacagttttctggtcaacatgtgtgatctttgtgtctcctttttgccaagcacattctgattttcttgttggaacacaggtctagtttctaaaggacaaattttttgttccttgtcttttttctgtaagggacaagatttgttgtttttgtaagaaatgagatgcaggaaagaaaaccaaatcccattcctgcaccccagtccaataagcagataccacttaagataggagtctaaactccacagaaaaggataataccaagagcttgtattgttaccttagtcacttgcctagcagtgtgtggctttaaaaactagagatttttcagtcttagtctgcaaactggcatttccgattttccagcataaaaatccacctgtgtctgctgaatgtgtatgtatgtgctcactgtggctttagattctgtccctggggttagccctgttggccctgacaggaagggaggaagcctggtgaatttagtgagcagctggcctgggtcacagtgacctgacctcaaaccagcttaaggctttaagtcctctctcagaacttggcatttccaacttcttcctttccgggtgagagaagaagcggagaagggttcagtgtagccactctgggctcatagggacacttggtcactccagagtttttaatagctcccaggaggtgatattattttcagtgctcagctgaaataccaaccccaggaataagaactccatttcaaacagttctggccattctgagcctgcttttgtgattgctcatccattgtcctccactagaggggctaagcttgactgcccttagccaggcaagcacagtaatgtgtgttttgttcagcattattatgcaaaaattcactagttgagatggtttgttttaggataggaaatgaaattgcctctcagtgacaggagtggcccgagcctgcttcctattttgattttttttttttttaactgatagatggtgcagcatgtctacatggttgtttgttgctaaactttatataatgtgtggtttcaattcagcttgaaaaataatctcactacatgtagcagtacattatatgtacattatatgtaatgttagtatttctgctttgaatccttgatattgcaatggaattcctactttattaaatgtatttgatatgctagttattgtgtgcgatttaaactttttttgctttctccctttttttggttgtgcgctttcttttacaacaagcctctagaaacagatagtttctgagaattactgagctatgtttgtaatgcagatgtacttagggagtatgtaaaataatcattttaacaaaagaaatagatatttaaaatttaatactaactatgggaaaagggtccattgtgtaaaacatagtttatctttggattcaatgtttgtctttggttttacaaagtagcttgtattttcagtattttctacataatatggtaaaatgtagagcaattgcaatgcatcaataaaatgggtaaattttctga

SEQ ID NO: 2626 - DNA, 3094 bp, Homo sapiens
  source 1..3094: mol_type = genomic DNA
gggcggacggtcggagtccggaagaaaaacagtccgcgacagctaggcgcgtgagaccggccgcccgcagggctgctctggccgggacccgctggccgggagacgcgaacctgccggaccaccgcgcggggacgacggcggccatgagctcgcggaagctgagcgggccgaaaggcaggaggctcagcacatacatcaggaggtctgcctgatcccatggtgaaccccgggaatccgaaatcagattgagataagatcctttagggaagtgacttagcctggtctcttgcctgctctttcacggggaacaacgctaatcgcccacttagtctaagtcacgatgcttggatttgctgctaatcgtcggatttgagagtgggaacaagaaatccggacttttgctctccatcctcttagaatctccagctgctgcaggtactcctcatcgtgtgcctaggactcatgctaggctgttcctggtctctgcagggtctgtagctcctgcccgctctgtgctccgcacagtctgaggcttcttgaagagctgctgtgactgactgttccactaaagacatctcatacacgtcgtgacttggaacgtggcttcggcagcgccccctctagatctcagtgacctgcttcagctgaacaaccggaacctcaatcttgacatatatgttattggtttgcaggaattgaactctgggatcataagcctcctttccgatgctgcctttaatgactcgtggagcagtttcctcatggatgtgctttcccctctgagcttcatcaaggtctcccatgtccgtatgcaggggatcctcttactggtctttgccaagtatcagcatttgccctatatccagattctgtctactaaatccacccccactggcctgtttgggtactgggggaacaaaggtggagtcaacatctgcctgaagctttatggctactatgtcagcatcatcaactgccacctgcctccccacatttccaacaattaccagcggctggagcactttgaccggatcctggagatgcagaattgtgaggggcgagacatcccaaacatcctggaccacgacctcattatctggtttggagacatgaactttcggatcgaggactttgggttgcactttgttcgggaatccattaaaaatcggtgctacggtggcctgtgggagaaggaccagctcagcattgccaagaaacatgacccgctgctccgggagttccaggagggccgcctactcttcccgcccacctacaagtttgataggaactccaacgactatgacaccagtgagaaaaaacgcaagcctgcatggaccgatcgcatcctgtggaggctgaagcggcagccctgtgctggccccgacactcccataccgccggcgtcacacttctccttgtctctgaggggctacagcagccacatgacgtacggcatcagcgaccacaagcctgtctccggcacgttcgacttggagctgaagccattggtgtctgctccgctgatcgtcctgatgcccgaggacctgtggaccgtggaaaatgacatgatggtcagctactcttcaacctcggacttccccagcagcccgtgggactggattggactgtacaaggtggggctgcgggacgttaatgactacgtgtcctatgcctgggtcggggacagcaaggtctcctgcagcgacaacctgaaccaggtttacatcgacatcagcaatatccctaccactgaagatgagtttctcctctgttactacagcaacagtctgcgttctgtggtggggataagcagacccttccagatcccgcctggctccttgagggaggacccactgggtgaagcacagccacagatctgagccaggatgggagtgaatcccaggcggaggccagagctggcagccagctctgcctttccactgccgggagtgctgggggcccagcctggccccctgaagagacagccaagtgtcgtccacatactcctcccagagtgagctctaaccaggctcatttgctctctccactactcatctctggaattagccgcttaaatacaggtttttgttgctgagatgtgagtgaaaccagctagtgtgtcaacagtgaagacctggggacagttctgcgtctcatttctggattcctaccccctcttctagtcttgcccaagtagtcctgccaggcacatgccccatttggcacaggcctgcattcttgtcgtgccgtcctgggcctcaggctgtctgggaggggagatgctcacatttgtacaggctacatagactggtgcaagcagtgctggattccaggagtcttggcatctcatagcttgtccccgtgaggagtgagcagagggtctgggatttctgctttcagcaaaagcagtctgactcagtgggcagaatggaggggcccctctagccaggctcttacgccatggttatgagcaggttgatgagggtccttcggccagcacaaccttcctccctactcacggcatggagtctgactgcatggaagttccagatcctgacagagagaactgggaaggatccaggttcgcttccgttggtagcttgagtcccatgcctccaccctgccatctgaggaaggggtgacaagtggtcaaggagctgtggccacagacttttccagggtggtccttggcaggtgaggtgcgtctgtgccacccttgtcaggagccattgacgacgggccccccctggaccccccgggacctcagagtgggggcaggcagaagggagaaccagctcaagacattttggaggatctggccctggggttcttcagagaacaccctctaggggctttggggacatggcctgtccccacatccagcacttgcctccgccatggtcactcggcagcccttttcccaggagaagacacctctgggagcctgctcagtgcttgtcctgccatcctgtgtcctgggactgagggttactccagttgctctgtgttgcatactctcccccgcaagcctgtgtatgaagaattgtcccctggcttccagcaggccatggctggctgttttgtgactgttaca

SEQ ID NO: 2627 - DNA, 718 bp, Homo sapiens
  source 1..718: mol_type = genomic DNA
gaggaaagatactggggagtgggagccgcggggttcagagcgatgattcccccacaggaggcatccgctcgacggcgggagattgaggacaagctgaagcaggaggaggagactctgtccttcatccgagacagcctggagaagagcgaccagctcactaagaacatggtgtctatcttatcatcctttgagagccgccttatgaagctggagaactccatcatccctgtgcacaagcagacggagaatctgcagcggctgcaggagaatgttgagaagacgctgtcctgcctggaccatgtcatcagctactaccatgtggccagtgacactgagaagatcatcagagagggccccacaggtaggctggaagagtacctgggaagcatggccaagattcagaaggcagtggagtatttccaggacaacagcccagacagcccggaactcaacaaagtggtaaggggtccgcagaataacgtgagaagcttggggatatcagtctctgccctggtctcatgagggacatggagccagcttgaggatgtatgcagtagaatacacagaaggatatagcacagtacatcctataggcattaggatctctgcttcaagaattgcacattttttattattaaaaattctttattataaaacttgttaatgtattataaaaattaaattataaattacatataaaatataaacttaacatttg

SEQ ID NO: 2628 - DNA, 243 bp, Homo sapiens
  source 1..243: mol_type = genomic DNA
atggcttcagaagagctacagaaagatctagaagaggtaaaggtgttgctggaaaaggctactaggaaaagagtacgtgatgcccttacagctgaaaaatccaagattgagacagaaatcaagaacaagatgcaacagaaatcacagaagaaagcagaacttcttgataatgaaaaaccagctgctgtggttgctcccattacaacgggctatacggatgggatcagtcagataagtttgtga

SEQ ID NO: 2629 - DNA, 1133 bp, Homo sapiens
  source 1..1133: mol_type = genomic DNA
actcccagactccttgcggagctcgccgcctgattctaggctggtcactactccgagcctgtgacgtttgcggcagccaggccgtcgacgatgcccagtgaaactctctgggaaattgcaaaagctgaagtggaaaaaaggggaattaatggaagtgaaggtgatggagctgaaattgcagaaaaatttgttttcttcattggcagtaaaaatgggggaaagactactattattctaaggtgtcttgacagagatgaaccaccaaaaccaaccttagctttggaatatacatatggaagaagagcaaaagggcacaacacaccaaaagatatcgctcacttttgggaactcggtggaggaacctctttattggacttaatcagcatacccatcacaggtgacaccttacggacgttttctcttgttctcgttctggatctttcaaaacctaatgatctctggcccaccatggaaaatctcttgcaagccacaaaaagccatgtagacaaagtgataatgaaactgggaaagacaaatgctaaagcagtttctgaaatgagacagaagatctggaataatatgccgaaggatcatcctgtgagttgctgtttgggattattactggaatccttagtcccatttatagttaatgataacatcacaaacaacttctttagatttttatgcatgacttgaaattcatttgatgtagatgaacctgttcactggaaaattacagcaatttattaaaacctcagtaagagcaaaacaaggaagaagattccttatatcttcttgttagacatcttctgtgattgttatggcatattacaccaatcagagaaatagagttttaaagtagtggtttgatattgattttataatctctgtaaaaatgaagataaaaagccagattgtacaaaagtcacctgacaaagactagatgaagctacaactttaagcaaggggtagagttgtaatagccttcaccatcactctgtattttacattcatttcgtttctgtcacttattcagtatctttttatcatctgacagctaattaaattataaagttgctatgatggtaacacaagttcttcaaatacaataataaatatcatcatctggaaaa

SEQ ID NO: 2630 - DNA, 2282 bp, Homo sapiens
  source 1..2282: mol_type = genomic DNA
aggtaaggtggccgtaagggcgcggtgggctccacgacggggtgatctctgggaccactggatgtgggtcccggcgcgaggcagcttccgggtcgcggccagctccggccgacctcccgcccggccctcaggctgctcccacagttcccggtccctagacaaccctggctctgcccgcccacttcgcgtgttcgattggcttgtccttcccctttctaagaccggagactaaggcctgttagacgtttctgtgtttctgcacctgagtttttttggtctaggctccgtctggtcaaatctcgctgattcccacagcctcttgtcctttgctccacctcattgcacccgtaatgttgtattgtcattgtctgtttactgtcccttttctctaaggcgtgtgagttcctcaaaggcaggcacagtgtcttattcgcctctgtatccttagctctctgcttggcatctagactctaggatgagcgttttgaattcacgacttggcggctgtccttgactgtgtctctttccttctaggcggcttatgacccctacgcttatcccagcgactatgatatgcacacaggagatccaaagcaggaccttgcttatgaacgtcagtatgaacagcaaacctatcaggtgatccctgaggtgatcaaaaacttcatccagtatttccacaaaactgtctcagatttgattgaccagaaagtgtatgagctacaggccagtcgtgtctccagtgatgtcattgaccagaaggtgtatgagatccaggacatctatgagaacagatgctgtcttcctgattttatacaaagaattatactacaggcacatatatgccaaagtcagtgggggaccttccttggagcagaggtttgaatcctattacaactactgcaatctcttcaactacattcttaatgccgatggtcctgctccccttgaactacccaaccagtggctctgggatattatcgatgagttcatctaccagtttcagtcattcagtcagtaccgctgtaagactgccaagaagtcagaggaggagattgactttcttcgttccaatcccaaaatctggaatgttcatagtgtcctcaatgtccttcattccctggtagacaaatccaacatcaaccgacagttggaggtatacacaagcggaggtgaccctgagagtgtggctggggagtatgggcggcactccctctacaaaatgcttggttacttcagcctggtcgggcttctccgcctgcactccctgttaggagattactaccaggccatcaaggtgctggagaacatcgaactgaacaagaagagtatgtattcccgtgtgccagagtgccaggtcaccacatactattatgttgggtttgcatatttgatgatgcgtcgttaccaggatgccatccgggtcttcgccaacatcctcctctacatccagaggaccaagagcatgttccagaggaccacgtacaagtatgagatgattaacaagcagaatgagcagatgcatgcgctgctggccattgccctcacgatgtaccccatgcgtattgatgagagcattcacctccagctgcgggagaaatatggggacaagatgttgcgcatgcagaaaggtgacccacaagtctatgaagaacttttcagttactcctgccccaagttcctgtcgcctgtagtgcccaactatgataatgtgcaccccaactaccacaaagagcccttcctgcagcagctgaaggtgttttctgatgaagtacagcagcaggcccagctttcaaccatccgcagcttcctgaagctctacaccaccatgcctgtggccaagctggctggcttcctggacctcacagagcaggagttccggatccagcttcttgtcttcaaacacaagatgaagaacctcgtgtggaccagcggtatctcagccctggatggtgaatttcagtcagcctcagaggttgacttctacattgataaggacatgatccacatcgcggacaccaaggtcgccaggcgttatggggatttcttcatccgtcagatccacaaatttgaggagcttaatcgaaccctgaagaagatgggacagagaccttgatgatattcacacacattcaggaacctgttttgatgtattataggcaggaagtgtttttgctaccgtgaaacctttacctagatcagccatcagcctgtcaactcagttaacaagttaaggaccgaagtgtttcaagtggatctcagtaaaggatctttggagccag

SEQ ID NO: 2631 - DNA, 1913 bp, Homo sapiens
  source 1..1913: mol_type = genomic DNA
caagtctctggacaaacctgaacagttcctttatgaactgtcactaatccccaacttttcagagcgagtcttttgcatcctgttccagtccacattttcagaaagcatttgctcaattcgtcgcaaactggaattactacagaaattgtgtgagacattaaaaaatggcccaggggttatgcaggttctaggtttggttcttgcctttggcaactacatgaatggaggaaataagactcgaggacaggcagatggctttggattagacattcttccaaaactgaaagatgtcaagagcagtgacaatagcagaagccttttgtcatatattgtttcgtattatctccgaaattttgatgaggatgctggaagaacagtgcctctttccactgccagaaccccaggacctttttcaggcctcacagatgaagtttgaagattttcaaaaagatctcagaaaactgaagaaagacttgaaagcctgtgaagttgaagcagggaaagtataccaggtctcctcaaaagagcatatgcagcctttcaaggaaaacatggaacaatttattattcaagccaaaattgaccaagaggcagaggaaaattcactgacagagactcataaatgctttttggagaccacggcatatttcttcatgaaaccaaaacttggagagaaggaggtgtccccaaatgctttcttcagtatctggcatgaattcagctctgactttaaagacttctggaagaaagagaacaaacttcttctacaagagagagtaaaagaagccgaagaggtgtgtagacagaagaaaggaaaatcactttataaaataaaaccaagacatgactctggaattaaagcaaagataagcatgaaaacttgaacaatgaaaagcagaatgaaaatgagtcattgcaacgactttcacaaaattcagctgacctgagagtgggagggaaactaccgtcattctgctcatgtttcttcttgacctcttgcataatctttttgttttctagacagttcactaattgttgaattttactgtatattcatataaaaatgcaaacgtactagaccagtggagaatttgacaccttttctttttgtaaaagtttatggtattataccgatagaccaaaacagcatgtgtaagaggcagtatctgcactaattctcaacatgctaaacattaactacaattcactgttgtgagaatattcctcgtcacagcaaaaacactttcctttctactgacaaccagtcctccacatcacagcatttagacatatgggtaaaatgttatttctagtgaattgtttgtatcagtttcatgtctaagtataaattttctattttaaaatttaagaaccgtttataatcagtgctttcccaactcttgggttgctctccataactatgtatttgtgaaagaaaatggtcattttttttactgaagtcatataatgacttgggtcagctcgtaatgcattgtgatggttttgtatgagctgggtgtttttttccattacttttaatgatcttcgttgcaagttatagttgtggataaaggggagaatttattgctcttgcaaaccaattatggaaagcaacttaagaaaaccaatgttctaaatcataattgtttgtatttatgtaaagtatggtctcttactttttagtttgtagtttaagtgcaaagaaacagtagtggttttttttctattgttttgtagtcttcctgtccccttcagtccctccagtgtgtatattaccattctccaatgaaataatagggcatttaacaaagatcgctatgtgcaatactgtatttagtgtttctatttcaatttttctaggatgttaatttatatgaaaataaaatgaataataaaagaataaagatacttgc

SEQ ID NO: 2632 - DNA, 1078 bp, Homo sapiens
  source 1..1078: mol_type = genomic DNA
gccaaatcttaaaggatccgggagctaagccagacccgggtggcggtggcagctgcgaaacccagggagccgatgccacgtgacccaatgtggacttcttttaaacctttctaatgcccataacccagcctcagacccatggagcccacgagagactgcccgctgttcgggggcgccttttccgccatcctccccatgggggccattgacgtaagcgacctccgaccggtcccggacaatcaagaagttttctgccatcccgtgacggaccagagcctgatagtggaacttctcgagctgcaggcccacgtacggggcgaagcggctgcgcggtaccactttgaggatgttggtggcgtgcagggggctagggctgtccatgtggagtctgttcagcctctcagtttggagaacctggccctgaggggccgctgtcaagaagcctgggtcctctctggcaagcagcagatagctaaggaaaaccagcaggtagcaaaggacgtgacacttcatcaggccttgctgaggctgccccagtaccagactgatctcttgcttaccttcaatcagcccccgtaaggaggaaggaacgggcgggtatctcatgactgggttcccaggagaatcgggctgggagggacagaacagggagactcactggtgggatcctccaaggaagcaggagtgggccagaggtttggggtaactgatacccaggtcctctggggaacaggaattggcaatttccaaacctcaggcctggatgatgttctgtctccatctgttcccccaccccaagccctgacaacaggtcatctcttggccccgaaaatctgtcacctgcaccctggagcctgggtgactttgaacagctggtgaccagtctgacccttcacgatcctaacatctttggtccccagtaaaggcgctgaagcactgcatgatgttgctgagaacttggggactcggttctgtgagggggaaaagaggttgaaaagagggtttcctcttatttcttccctgtgcgtaaacataagacaatccctcttcagaataaacttgctttataatcaatata

SEQ ID NO: 2633 - DNA, 4047 bp, Homo sapiens
  source 1..4047: mol_type = genomic DNA
ccccggctctctttctcctctctgtcctgctgtcgcctcctctcctcactccagcctccttccctggcttattctgcccaggaaagtttggaacccccgccccccctccccaatcaggtcaacctgactaggagtagggggagatgtaggaaggcctgagagttcggggggggggaagctggaagctggtttcccagaaaatttccccccatcttctccatttagggtggtgggaattttttttaatcctgtttttgaggaggtggtaggtgtttagaaaaggatgtgggaatggaaggggtagatgagtcaaccctctttcaagattccaagggtggtgtgttacctgatccttttcgtgtgtggagttcagggggtcgggaggtttggcctttattcccacattcaaagttggaacctcccccaaattaagaatggagttttagtacccacttgtggcaggaatcctggggggaaggggtccttttttcctttttcttttcttttttcccttttttttccttttggcaacccacacccttccacacacgctcaccccaaaattaaacaccaagatcctctaacttgtttggattgactgatgaagacataaagctctatgttttttgaggtggagtgagtggtttttcttcatttttaaatggccaaatgacagcttgacccagtttgctttccaatcaaagggcatttattttgaatgtctctttgtggcgcaagagccaacgcaaaaatgatggcggcttacaatggcggtacatctgcagcagcagcaggtcaccaccaccaccatcaccaccaccttccacacctccctcctcctcacctgcaccaccaccaccaccctcaacaccatcttcatccggggtcggctgccgctgtacaccctgtacagcagcacacctcttcggcagctgcggcagccgcagcagcggctgcagctgcagccatgttaaaccctgggcaacaacagccatatttcccatcaccggcaccggggcaggctcctggaccagctgcagcagccccagctcaggtacaggctgccgcagctgctacagttaaggcgcaccatcatcagcactcgcatcatccacagcagcagctggatattgagccggatagacctattggatatggagcctttggtgttgtctggtcagtaacagatccaagagatggaaagagagtagcgctcaaaaagatgcccaacgtcttccagaatctggtctcttgcaaaagggtcttccgggaattgaagatgttgtgtttttttaagcatgataatgtactctctgcccttgacatactccaacctccacacattgactattttgaagaaatatatgttgtcacagaattgatgcagagtgacctacataaaattatcgtctctcctcaaccactcagctcagatcatgtcaaagtttttctttatcagattttgcgaggtttgaaatatctccattcagctggcattttacatcgagacattaagccagggaatctccttgtgaacagcaactgtgttctaaagatttgtgattttggattggccagagtggaagaattagatgaatcccgtcatatgactcaggaagttgttactcagtattatcgggctccagaaatcctgatgggcagccgtcattacagcaatgctattgacatctggtctgtgggatgtatctttgcagaactactaggacgaagaatattgtttcaggcacagagtcccattcagcagttggatttgatcacggatctgttgggcacaccatcactggaagcaatgaggacagcttgtgaaggcgctaaggcacatatactcaggggtcctcataaacagccatctcttcctgtactctataccctgtctagccaggctacacatgaagctgttcatctcctttgcaggatgttggtctttgatccatccaaaagaatatccgctaaggatgccttagcccacccctacctagatgaagggcgactacgatatcacacatgtatgtgtaaatgttgcttttccacctccactggaagagtttataccagtgactttgagcctgtcaccaatcccaaatttgatgacactttcgagaagaacctcagttctgtccgacaggttaaagaaattattcatcagttcattttggaacagcagaaaggaaacagagtgcctctctgcatcaaccctcagtctgctgcttttaagagctttattagttccactgttgctcagccatctgagatgcccccatctcctctggtgtgggagtgatggtggaagataatgtactactgaagatgtaatgtagctttccactggagtctgggatttgcaattctggaggttaatcatgcttgtactgtaattttactaatgaagttttaaattaacaaccactacttgtatgatatgaataatatttagaaatgttactagacttttaatcttgtaaagtggttgtgcttttagaagaaaaatattttacccagagttgcacatgttttatgaatttagtgcagctgttatggctcacctcagaacaaaagagaattgaaccaaatttgggagtttggggttttatgttttgtttttcttttctaaaatgaagtgagattgttcacacacacacacacacacacacacacacacaaacacaaaggacagtcatacattttgatatttgagccattcctaaagatttggggttttctaaaactaaagaatctaggaaccttgcctgcgaccaatcatggagccacgtgagctgatcgtggctgcacctggggggagggtagggaggaggggcatgccacctaatgatcaagccctataattagcttctcattagagccgtgatggtgatgtgtgctgtctaaaatccaatgttgtgggtagagagaatgagtttgtgactaggagagactaaacttttgttttccttacccagtataaatatatatatatatatttaatctatttttattagaagtttttctgctctttcttacataaaagaaccccaagcatgcatctttcatgtgtgtaaataattcatttctgggctaatttcaaaagaatcccaatattgctgtatagaaagagaactagcttgcacattttaggtctgtgaaattttgtgagacttttcctgcactggacagtaaaaaaataataaaagacaaaaacaaatttaaaaaaaaatttaagccacaaaaaaaggcacatagggaattatgtcaaatgtgtttgtgtccttaggcaaagctgtgggagtcttgaaatgtcacagtagtaaataacttattactttttgacaagttctttttttctgttggaacactgaattcttctgtgcatatgtacatatgaatacaaatcgaaggcctctacctcctggagttatacaacttggcttgtttacctccacatgctgatgatgactattttttttttttgagttcagtgtggagacttgaaacttgaatgtcccttccaacttttatattaaaaataaaaagacaagaaaattgaagatcatttttcacctgtacaaggaatactaatggatcgtcttaaaattggtctaggaaaaaaccttggtgtgtgttatggacaattaactgttaaagttattgtaagttatctgtatttagcagagtattttcaacttgagtgatctgagctgaatttgaagactattaataagttatgtttggaagttttaacttcaatgaagtaattatttgctgtgaaagaaacaaacattgaattactaaacaaagatggtgcaatatctttgttttttttttatgaggctcctgagaatcaacccaactgaagcatttcaattcacttgaatgagaaacgtgtttagtatcaaaagagcccaagaagacactggtgtgaaaggtacaatctcagaggttggtcaattaccgtggcacactttctggtcactttgtacaatgtagatttgaagtacagtggtgaaaacattaaatgtgacatttgaaaaa

SEQ ID NO: 2634 - DNA, 3563 bp, Homo sapiens
  source 1..3563: mol_type = genomic DNA
ggttccgctgaggcgtggtaggaagtggctgccgtcaatcactcggggagactccaaacagtgagcctagagctggagactagcgttaaccggcggggcggccggttttatgaatgaagctatggctacagattccccaagaagacccagtcgttgtactggtggagttgtggttcgcccccaggctgtcacagagcagtcctacatggaaagtgttgtgacttttctgcaggatgttgtgccacaggcttacagtggaacacctctaacagaagaaaaggagaaaatagtctgggtcagatttgaaaatgcagatttaaatgatacatcaagaaatctggaatttcatgaaatacatagtactgggaatgaaccgcctttgttgattatgattggctacagtgatggaatgcaggtctggagcatccctatcagtggtgaagcacaagagctcttctctgttcgacatggcccaattcgagcggctagaatcttgcctgctccacagtttggtgctcaaaaatgtgataactttgctgaaaaaagacccctccttggtgtttgtaagagcattggatcttctggcacaagcccaccgtactgttgtgtggatctgtattcacttcgtactggggagatggtcaagtccattcaatttaagacacctatttatgatctccattgcaataaacggatccttgtcgtagtcttgcaggagaaaattgctgcctttgatagctgtactttcacgaagaaattctttgttacaagctgctatccatgtccagggccaaacatgaatcctattgctcttgggagccgctggcttgcttatgcagaaaacaagttgattcgatgtcatcagtcccgtggtggagcctgtggagacaacattcagtcttatactgccacagtcattagtgctgctaaaacattgaaaagtggcctgacaatggtagggaaagtggtgactcagctgacaggcacactgccttcaggtgtgacagaagatgatgttgccatccacagtaattcacggcggagtcctttggtcccaggcatcatcacagttattgacaccgaaaccgttggagagggccaggtgcttgtgagtgaggattctgacagtgatggcattgtggcccacttccctgcccatgagaagccagtgtgctgcatggcttttaatacaagtggaatgcttctagtcacaacagacacccttggccatgactttcatgtcttccaaattctgactcatccttggtcctcatcacaatgtgctgtccaccatctgtatactcttcacaggggagaaactgaagccaaagtacaggacatctgcttcagccatgactgtcgctgggttgtggtcagtactctccggggtacttcccacgttttccccatcaacccttatggtggccagccttgtgttcgtacacatatgtcaccacgagtagtgaatcgcatgagccgtttccagaaaagtgctggactggaagagattgaacaagaactgacgtctaagcaaggaggtcgctgtagccctgttccaggtctatcaagcagcccttctgggtcacccttgcatgggaaactgaacagccaagactcctataacaattttaccaacaacaaccctggcaaccctcggctctctcctcttcccagcttgatggtagtgatgcctcttgcacaaatcaagcagccaatgacattggggaccatcaccaaacgaaccggcaaagttaaacctcctccacaaatttcacccagcaaatcgatgggcggagaattttgtgtggctgctatcttcggaacatccaggtcatggtttgcaaataatgcaggtctgaaaagagaaaaagatcagtccaaacaagttgtagttgagtccctgtacattatcagttgctatggcaccttagtggaacacatgatggagccgcgacccctcagcactgcacccaagattagtgacgacacaccactggaaatgatgacatcgcctcgagccagctggactctggttagaacccctcaatggaatgaattgcagccaccgtttaatgcaaaccaccctctgctcctcgctgcagatgcagtacagtattatcagttcctgcttgctggcctggttccccctggaagtcctgggcccattactcgacatgggtcttacgacagtttagcttctgaccatagtggacaggaagatgaagaatggctttcccaggttgaaattgtaacacacactggaccccatagacgtctgtggatgggtccacagttccagttcaaaaccatccatccctcaggccaaaccacagttatctcatccagttcatctgtgttgcagtctcatggtccgagtgacacgccacagcctcttttggattttgatacagatgatcttgatctcaacagtctcaggatccagccagtccgctctgaccccgtcagcatgccagggtcatcccgtccagtctctgatcgaaggggagtttccacagtgattgatgctgcctcaggtacctttgacaggagcgtgaccctgctggaggtgtgcgggagctggcctgagggcttcgggctgcggcacatgtcctccatggagcacacggaggagggcctccgggagcgacttgccgacgccatggccgagtcacctagccgggacgtcgtgggatccggaacagaacttcagcgagagggaagcatcgagactctgagtaacagctcaggctccaccagcggcagcataccaagaaactttgatggctaccgatctccgctgcccaccaatgagagccagcccctcagcctcttcccgactggcttcccgtaggtaccagcaacctgcttctgactggccagccccctcccctgctggaggaggggagaagccccgctctggtcctacccttcagtctctgctcttccttcatcaaccaccttccccaagcttagtgacagcagccgcccatcctacctggatggagaagagacccttctccaagcacctcagcgcacttgccctctgccacacctgtcggtggaggctgtggccaggagagactgtagaagctcggtccctgtgtatgtttgcatatgacatcctgcattggatccgcttttgtattttttaaccatacccacggtggggcgggtggggggagcctggaacagtgaccagatctgggggcctgagtggggacagagttgatcgtccacctggccattttgaccctgagtggacagtcacagcctcagctcatgtctggctgtgacacacactgcccccagcttcccttggtcagccccactccagcacggggtgaacggaggcccagagtactagggaaggaggaagggaggacatgcctcttcttcctcctttctttccccatctgttcatgggaagagtttgtctttcttatctttaagcccctttaccctggtcctgtactgatcagtgaaggaaaccgtggttactgaggccctgttgaaaagtgcacgtcttgtccaataaatcacgctgcagttggtgtccatccctg

SEQ ID NO: 2635 - DNA, 2705 bp, Homo sapiens
  source 1..2705: mol_type = genomic DNA
gtagggtgggggtgctggcggcggctgctttggcggcggttggtggccgtgcgggcggggagggagggggaggagagaagaggaggtggagaaggcttgggctcgcgccgctgaagtcggcttacccgctggccgcctcctgacaagcgggagggatccgcggtggacccagggaagcggaggagcctggcggccaccccctcttcctcacttccctgtactctcatcgctctcggcctccgacacgaaaaggaagcaaatgagctgatggaagatctgtttgaaactgtgagtaatgatcctcaagtgagaacatgggattttccaagatgagatgggattctccaacatggaagatgatggcccagaagaggaggagcgtgtggctgagcctcaagctaactttaacacccctcaagctctacggtttgaggaactactggccaacctactaaatgaacaacatcagatagcgaaggaactatttgaacagctgaagatgaagaaaccttcagccaaacagcagaaggaggtagagaaggttaaaccccagtgtaaggaagttcatcagaccctgattctggacccagcacaaaggaagagactccagcagcagatgcagcagcatgttcagctcttgacacaaatccaccttcttgccacctgcaaccccaatctcaatccggaggccagtagcaccaggatatgtcttaaagagctgggaacctttgctcaaagctccatcgcccttcaccatcagtacaaccccaagtttcagaccctgttccaaccctgtaacttgatgggagctatgcagctgattgaagacttcagcacacatgtcagcattgactgcagccctcataaaactgtcaagaagactgccaatgaatttccctgtttgccaaagcaagtggcttggatcctggccacaagcaaggttttcatgtatccagagttacttccagtgtgttccctgaaggcaaagaatccccaggataagatcctcttcaccaaggctgaggacaacaagtaccttctaacctgcaagactgcccgccaactgacagtgagaatcaagaacctcaacatgaacagagctcctgacaacatcattaaattttataagaagaccaaacagctgccagtcctaggaaaatgctgtgaagagatccagccacatcagtggaagccacctatagagagagaagaacaccggctcccattctggttaaaggccagtctgccatccatccaggaagaactgcggcacatggctgatggtgctagagaggtaggaaatatgactggaaccactgagatcaactcagatcaaggcctagaaaaagacaactcagagttggggagtgaaactcggtacccactgctattgcctaagggtgtagtcctgaaactgaagccagttgccgaccgtttccccaagaaggcttggagacagaagcgttcatcagtcctgaaacccctccttatccaacccagcccctctctccagcccagcttcaaccctgggaaaacaccagcccaatcaactcattcagaagcccctccgagcaaaatggtgctccggattcctcacccaatacagccagccactgttttacagacagttccaggtgtccctccactgggggtcagtggaggtgagagttttgagtctcctgcagcactgcctgctatgccccctgaggccaggacaagcttccctctgtctgagtcccagactttgctctcttctgcccctgtgcccaaggtaatgatgccctcccctgcctcttccatgtttcgaaagccatatgtgagacggagaccctcaaaaagaaggggagccagggcctttcgctgtatcaaacctgcccctgttatccaccctgcatctgttatcttcactgttcctgctaccactgtgaagattgtgagccttggcggtggctgtaacatgatccagcctgtcaatgcggctgtggcccagagtccccagactattcccatcgccaccctcttggttaaccctacttccttcccctgtccattgaaccagccccttgtggcctcctctgtctcacccttaattgtttctggcaattctgtgaatcttcctataccatccacccctgaagataaggcccacatgaatgtggacattgcttgtgctgtggctgatggggaaaatgcctttcagggcctagaacccaaattagagccccaggaactatctcctctctctgctactgttttccccaaagtggaacatagcccagggcctccaccagtcgataaacagtgccaagaaggattgtcagagaacagtgcctatcgctggaccgttgtgaaaacagaggagggaaggcaagctctggagccgctccctcagggcatccaggagtctctaaacaactcttcccctggggatttagaggaagttgtcaagatggaacctgaagatgctacagaggaaatcagtggatttctttgagctaggagaataagagtctggagactgggagccttcacttcggcctccgattggtggcgcatagggtgtaaccaataggaaacccctaaagggtacttaaaccccagattttgcaactggggctcttgagcagcttgctttagcctgctcccactctgtggaatatacttttgcttcaataaatctgtgcttttattgcttcattgtttca

SEQ ID NO: 2636 - DNA, 818 bp, Homo sapiens
  source 1..818: mol_type = genomic DNA
tcagggcggtttgaaagatcggcgcgcaccgcaggagcaacggttggtcctgcggctgtgatgtcggtgttgaggcccctggacaagctgcccggcctgaacacggccaccatcttgctggtgggcacggaggatgctcttctgcagcagctggcggactcgatgctcaaagaggactgcgcctccgagctgaaggtccacttggcaaagtccctccctttgccctccagtgtgaatcggccccgaattgacctgatcgtgtttgtggttaatcttcacagcaaatacagtctccagaacacagaggagtccctgcgccatgtggatgccagcttcttcttggggaaggtgtgtttcctcgccacaggtggtggaaggctttagggccaccatggcgcagcgcctggtgcgcgtgctgcagatctgtgctggccacgtgcccggtgtctcagctctgaacctgctgtccctgctgagaagctctgagggcccctccctggaggacctgtgagggtggctggcccctgggctgccccttctcatggcttcgtgctgactccataaacattctctgttgaggatgtccagtcagggcttgacaggcccaggctcagcccgccgtggctgggaaggttccctgcagtgccagtgctgcagcagggagagctgggcagaagcagcgagggggcccagctggcgagactgtagccccctcccactcccacactcactcttgcagagcctgtgtctttaagcagctggcgtgttacatctccatttaaggtttcctttgaacaaaaggtctgtggctaaaaaaa

SEQ ID NO: 2637 - DNA, 1792 bp, Homo sapiens
  source 1..1792: mol_type = genomic DNA
atttgcccaggagcaagctcccctgcactttccatgtttgtattgggcatccctttgtgccctgccctttctttctcaggaggggatgatagccagactcaactttttgtttcatctaaagatgtgattaaagagattgaagactttgacagcttggaggctctgcgtctggaaggcaacacagtgggcgtggaagcagccagggtcatcgccaaggccttagagaagaagtcggagttgaagcgctgccactggagtgacatgttcacgggaaggctgcggaccgagatcccaccagccctgatctcactaggggaaggactcatcacagctggggctcagctggtggagctggacttaagcgacaacgcattcgggcccgacggtgtgcaaggcttcgaggccctgctcaagagctcagcctgcttcaccctgcaggaactcaagctcaacaactgtggcatgggcattggcggcggcaaggtcatcgggaccctggaggaggtccacatgccacagaatgggatcaaccaccctggcatcactgccctggcccaggctttcgctgtcaaccccctgctgcgggtcatcaacctgaatgacaacaccttcactgagaagggcgccgtggccatggccgagaccttgaagaccttgcggcaggtggaggtgattaattttggggactgcctggtgcgctccaagggtgcagttgccattgcagatgccatccgcggcggcctgcccaagctaaaggagctgaacttgtcattctgtgaaatcaagagggatgctgccctggctgttgctgaggccatggcagacaaagctgagctggagaagctggacctgaatggcaacaccctgggagaagaaggctgtgaacagcttcaggaggtgctggagggcttcaacatggccaaggtgctggcgtccctcagtgatgacgaggacgaggaggaggaggaggaaggagaagaggaagaagaggaagcagaagaagaggaggaggaagatgaggaagaggaggaagaagaggaggaggaggaggaagaagagcctcagcagcgagggcagggagagaagtcagccacgccctcacggaagattctggaccctaacactggggagccagctcccgtgctgtcctccccacctcctgcagacgtctccaccttcctggcttttccctctccagagaagctgctgcgcctagggcccaagagctccgtgctgatagcccagcagactgacacgtctgaccccgagaaggtggtctctgccttcctaaaggtgtcatctgtgttcaaggacgaagctactgtgaggatggcagtgcaggatgcagtagatgccctgatgcagaaggctttcaactcctcgtccttcaactccaacaccttcctcaccaggctgctcgtgcacatgggtctgctcaagagtgaagacaaggtcaaggccattgccaacctgtacggccccctgatggcgctgaaccacatggtgcagcaggactatttccccaaggcccttgcacccctgctgctggcgttcgtgaccaagcccaacagcgccctggaatcctgctccttcgcccgccacagtctgctgcagacgctgtacaaggtctagactcaaagcctctcccatcccttggcctggaccagtgagctggggagggactcggatgaactgaggcgcagcctacgccattgccttggacaggactctggccacaggcagggcgggtctgtgtcccatgtgtcctgtcagtcccctgagtatgtgtgtg

SEQ ID NO: 2638 - DNA, 2900 bp, Homo sapiens
  source 1..2900: mol_type = genomic DNA
gaactgggccaagcgcccccggaggcgctaagcttgcgccctgaggcggtttccgttcccggacgtttggactctgtcctggagaaggggaaggaaaaagtaagacgtagaagtacactgagacttcgtcacacataaaacaagcacgacaaagaaagagggcgcgaagggactcctggaagaaattgagtctacatttaagatcaccctaaaagtagtgacggcctcttcattactccaaaccccagatttaagtcggtaggacgtcttcgcgttgacttgtggggaatgtagtttcgatgctgccggcgcgttttgtttgcgacagaaactacaacccccaggggccaccgcgacgttgcctgtgggtgcccgcgaaccaacggttagcggtggcaggggctgactgagagcgtctgcttgtgcctggtacctagtacaaacttaataaatgtgtgacgcaagaataaaggaatgaatgaatggaagaatgatataatgccacagaactttcaaagatgggactgtctagttgcaaaaacaagctcagggatcccactgattctactttacgataatggattctgaattaatgcatagtatagtaggaagctatcataaacctccagaaagagtatttgttccctcattcacccagaatgaaccatctcagaattgccatcctgcaaacttagaagttacctctcctaagatacttcatagcccaaatagccaagctcttattttagccttaaaaactcttcaggaaaaaattcatcgtttagagctggagagaacacaagctgaagataacctgaacattctttccagagaagcagcacagtataagaaggccttagagaatgaaacaaatgagagaaatctggcacaccaggagctgataaagcagaaaaaagatataagtatacagttaagctcagcccagtctcgttgtactcttctagagaagcaactagaatatacaaagagaatggttctcaacgtagagcgagaaaagaacatgatcctagaacaacaggcccagcttcagagggaaaaagaacaagatcagatgaagctgtatgcaaaacttgaaaagcttgatgtcttagaaaaagagtgtttcagacttacaacaactcagaaaactgctgaggacaagattaaacatttagaagaaaaacttaaggaagaagaacatcagcgtaagctatttcaagacaaagcttctgagcttcaaactggacttgaaatcagtaaaattataatgtcttcagtttcaaatctaaagcactccaaggaaaagaagaaatcttcaaagaaaactaaatgtataaagagacgaccaccttggcaaatttgttcaaagtttggagcactgccttttgtggctgaaaagatgaggcaacatcgtgacccacatatccttcagaaaccttttaacgtgactgagactagatgtctccccaagccttctagaacaacttcctggtgtaaagctattcctcctgactcagaaaagtccatttccatttgtgacaatttatctgaacttttgatggcaatgcaagatgagctggaccaaatgagcatggagcaccaagaactactgaaacaaatgaaggaaactgaaagtcattcagtctgtgacgacatagaatgtgaactagagtgtttactcaagaaaatggaaattaaaggagaacaaatctccaaactgaagaagcatcaagacagtgtctgtaaactgcagcaaaaagttcaaaactcaaagatgagtgaagcttcaggtattcagcaagaagacagctaccctaaaggatcaaagaacataaaaaatagccccagaaaatgtttgactgacactaacctttttcagaaaaacagcagctttcatccaatacgagttcataatcttcaaatgaaattgagaagagatgatatcatgtgggaacagtaacaaaacagcaaaactgtcaccttaatgaactttgtcagtgagaccttgaattgtctaaagtggttttaatttaatataactttgtgacattttgaatcatgtttctagtttctataaaacatgaagttgcagtatttaaaaattaatgcctaatgacctggtgggttccaaataataaattaattgcttttttatttttcttattgattgaagcccgtaacctcatcttgtcttagaaacattgttggctttgcagatatcttaagctaaatttaagaaattgtactagattgacaatattcaaaattgagttaaatccaagctacaagtaccattcattccacttttcatttagtaggtttggaaccttaaaaaccaatgttcaatgaacagagttcagaaagatcatttagctttcctggtgccttctttctattttgttttagagctgtgaaatgtttttctcttttggaaaaggaaaaacttaatagttacacagttttgtgaagaagcctttaatccaagttttatgagacagtaggaacctatagctacttaatttttaggagacagtaattcagttgcagaagctttcctctgctattcccattctcttttacaaaactagttttttttaaaaaatcaatgatcaattttatcttactactttataacttttgctgacttttattctttgcattgtatgtaatgtccatcagtataaattgagactgtgaatttctaggacccacaaaagtggtattttttttttgtacaagaaagtatagaggaagaggaagctgggcattaaattacctcatccagcagaaattcacggtagtatggtatatttttattttttatattttaaaatcaataatgtcaaatgtcattgtgtatgcatgctttataataaatttacacttgatcatttttctgg

SEQ ID NO: 2639 - DNA, 1978 bp, Homo sapiens
  source 1..1978: mol_type = genomic DNA
acggaagcggtgagactgtctctcggctgcagccctggtgcgacccggcccgttgccgtagagatgggcagggctggatggagtggggtgcggtgagctgagctgaccctgcttcgccacggggactgcagtgaccccggcttgccggcagggcgggtaacaggttgagccagggtggggctgctcaggggcgtggagccgaggccaggatttctctgaagacccggcacaggctattcctttctgcgacgagcccattgctatggaaaccaaagcgttaggccagcggggattgaggctgcgggatcatgacgggtctctctcccgaagaaccttgcctaaggcttccccaagcggctacttcctgagcgaacccgcccacccgcctgaaggagagaggtaaaaccctgggggtcctgacactaagcaggcgaagaagcctattccaatgccagctcccctaggaaacctacccggcccacccctagaagtgatgcttcgctctcgttaactcttggactttgttccatgtttataacttagtatttcacgaacgccccgcggtgtttgttcatttttcccacacataatggaccataaaggtcggcttctttgctttatgactcgttctgaacaagtccttttccgcgctgtgtctcactttcctcttttgtaaaatggaaatattaactctagacgccggtctgattaggttgctttgaagatcgaaccagatgagggaagccaaatacttcataggctgtaaagtggtgaagctgaactgctaccgagttgctatttttttctcctcctccctctcaagctaaacgttctttagatcttttgtgatttcttcaggtggtctttgcgactccctaggctccgacctggaagaaatcttttttacacttccctttcacagagccctgcattttaacttccctatcagaagcgagaaaaatagttatcattttgagagggcttactctatgccaagccctgagaaaactctttacgtggattatctcgtttaatttcacaacatccttttaagttttccatggacacagcctagcagaaagacgcagccttcgtgcttcgctgactgctgaccactgacccaccgccttgatgacagcaccctcgtgtgccttcccagttcagttccggcagccctcagtcagcggcctctcgcagataaccaaaagcctgtatatcagcaatggtgtggccgccaacaacaagctcatgctgtctagcaaccagatcaccatggtcatcaatgtctcagtggaggtagtgaacaccttgtatgaggatatccagtacatgcaggtacctgtggctgactcccctaactcacgtctctgtgacttctttgaccctattgctgaccatatccacagcgtggagatgaagcagggccgtactttgctgcactgtgctgctggtgtgagccgctcagctgccctgtgcctcgcctacctcatgaagtaccacgccatgtccctgctggacgcccacacgtggaccaagtcatgccggcccatcatccgacccaacagcggcttttgggagcagctcatccactatgagttccaattgtttggcaagaacactgtgcacatggtcagttccccagtgggaatgatccctgacatctatgagaaggaagtccgtttgatgattccactgtgagccatcccacgagcccctgcattggagtcagagcccctgcccttgatggatcagctggcaccacccagattgataaactggctcgtctgatcttgtggcccccacccaggaactgactgggcactagaaaacagcttcaacatcctgtgatttcatccctgaccaatcagcactcctgtctcactggcttcccccaacccaccaagttgtccttaaaactctgctccctgaatggtcggggagactgatttcagtaatagtaaaactctggtctcctgca

SEQ ID NO: 2640 - DNA, 2109 bp, Homo sapiens
  source 1..2109: mol_type = genomic DNA
cagaaattagataacatcctaaatccaaaagaaaagcatattttttataaaagtgagaagattttagaacagaatatttcttccaagtctgacgagaaaaaaattaaaaatacagataaacattgcattttacagaatgtcacagaatcagaagatagtgatgtcatctgtcctacacaatacacaactgagagattccccgacaatagtataaggtttaagccacccttggaaggatctgaggattctgaaacagaacacactgtaaaaacaagaaataatgataatagtcgaaacactgatgacaaaagaaatggaataatttcaaaaaagttaagtcctgagaacacaaccctgaaatctattttgaaaagaaaaggcaccagtgatatcagtgatgaatctgatgacattgaaatttcttccaagtcaagagtaagaaagagagctagttcattgaggtttaagagaataaaagaaaccaaaaaagaacttcacaattctcccaaaacaatgaacaaaacaaaccaagtgtatgcagcaaatgaggatcataactctcagtttattgatgattattcatcctcagatgagagtttatccgtcagccacttcagtttctctaaacagagccacagaccaagaactataagagacagaactagtttttcttcaaaattgcctagccataataagaaaaatagcacttttattccaagaaaaccaatgaaatgttcaaatgagaaagttgttaatcaagagcagtcgtatgaatcaatggataaatttttagatggcgttcaggaagtggcttatattcactcaaaccagaatgtaattggatcgagcaaagctgaaaatcacatgagccgatgggcagcacatgacgtatttgagttgaagcagttttctcagctgcctgctaacatagctgtttgcagttctaagacatataaagaaaaagtggatgcagatacattgccacacacaaagaaaggccagcaaccgagtgaaggcagcatttcacttcctctttacatttcaaatcctgtaaaccagaagaagaaaaaagtctaccatacaaaccagaccaccttcataattggagaaacaccaaaaggaatccgcagaaaacaatttgaagaaatggcctcttattttaactcgtcttctgtaaacgaatttgctaaacatataaccaatgccacatcagaagaacgacagaaaatgctaagagacttttatgcttctcaatatccagaggtaaaagaattttttgtggattctgtgtcacaattcaacaattcttcctttgagaaaggagagcagcgcacccggaagaaatctgataaaagagaatctcttataaaaccaaggctgtcagattctgaaaccttgtcatttaaagattctaccaacaaaatttctcaagtttgcagcctaaaaacatataaaagaaaatcagttaagtttcagaatcatatttcctatagagaagaggtgttttttaatgatgcagaaactaagaaatcacctgttagttctactcaagagattgacagtgggaaaaacagccaggcatccgaagatactgtgacatcccgttctctgaacagtgagtctgaaacacgtgagagaaggttagaaaataccatgaaagaccaacaggacctcacaagaacgggcatttcaagaaaagaaccccttctcaaattggaaaacaaaaagatagaaaatccagtgctggaaaatacttctgtgataagcttacttggtgatacctctattcttgatgacctttttaaaagtcatgggaacagtcccacacaactgccaaagaaagttctttcagggcccatggaaaaagcaaaacagagaccaaaagatttctgggacatcttgaatgagcagaatgatgagagtcttagtaaactcacagacttggcagtaatagagactctgtgtgaaaaagcacctctagcagcaccctttaaaaggagagaagagccagcaacttctctttggaaatcaaatgagaaatttttatggaagaaatttagcccaagtgatacagatgaaaacgcaaccaatacacagagtaccacataa

SEQ ID NO: 2641 - DNA, 1395 bp, Homo sapiens
  source 1..1395: mol_type = genomic DNA
gagcagccggtcctccagtggctccgctccccgttctctgtgggctcaaaatgacagggcatactcggtccagcttaccacgttgtacaggaattgtcttgctgataaaattgcgtttctcggagaggctcacaggacacctgcatgcccaaggcactccaccgtatgtgatcaacctggatccagcagtacatgaagttccctttcctgccaatattgatattcgtgatactgtaaagtataaagaagtaatgaaacaatatggacttggacccaatggcggcatagtgacctcactcaatctctttgctaccagatttgatcaggtgatgaaatttattgagaaggcccagaacatgtccaaatatgtgttgattgacacacctggacagattgaggtattcacctggtcagcttctgggacaattatcactgaagcccttgcatcctcatttccaacagttgtcatctatgtaatggacacatcgagaagtaccaacccagtgaccttcatgtccaacatgctctatgcctgcagcatcttatacaaaaccaagctgcctttcattgtggtcatgaataaaactgacatcattgaccacagctttgcagtggaatggatgcaggattttgaggctttccaagatgccttgaatcaagagactacatacgtcagtaacctgactcgttcaatgagcctggtgttagatgagttttacagctcactcagggtggtgggtgtctctgctgttctgggtactggattagatgaactctttgtgcaagttaccagtgctgccgaagaatatgaaagggagtatcgtcctgaatatgaacgtctgaaaaaatcactggccaacgcagagagccaacagcagagagaacaactggaacgccttcgaaaagatatgggttctgtagccttggatgcagggactgccaaagacagcttatctcctgtgctgcacccttctgatttgatcctgactcgaggaaccttggatgaagaggatgaggaagcagacagcgatactgatgacattgaccacagagttacagaggaaagccatgaagagccagcattccagaattttatgcaagaatcgatggcacaatactggaagagaaacaataaataggagactttagcacacttcacttgtttctagaagtccagaattttggacctccacgtgaaagaactgttcttacctctgaactgggggctcccataagggataattttcctcagagtagcaaagtttctcttattagagaaatcttgtgactcagatgaagtcagggatagaagacccttggacctggcaggttaatgctgattattccttggcctttcccttgtatttatgcaaggaaggatatactgagctgata

SEQ ID NO: 2642 - DNA, 3080 bp, Homo sapiens
  source 1..3080: mol_type = genomic DNA
agaggtcagacatgccagcagggttggaaagaggcaggtacggaagctgagctgcagagttagccggcatctgacagaaaaatgtttgtctacagattttgagcgttcgaagttgacccctgactaagtatactttgctgctccctcagcctttgaaaaaatgtctgtcacatatgatgattccgttggagtagaagtgtccagcgacagcttctgggaggtcgggaactacaagcggactgtgaagcggatcgacgatggccaccgcctgtgcagcgacctcatgaactgcctgcatgagcgggcgcgcatcgagaaggcgtatgcgcagcagctcactgagtgggcccggcgctggaggcagctcgtggagaaagggccccagtacgggaccgtggagaaggcctggatggccttcatgtccgaggcagagagggtgagcgagctgcacctcgaggtgaaggcctcactgatgaacgatgacttcgagaagatcaagaactggcagaaggaagcctttcacaagcagatgatgggcggcttcaaggagaccaaggaagctgaggacggctttcggaaggcacagaagccctgggccaagaagctgaaagaggtagaagcagcaaagaaagcccaccatgcagcgtgcaaagaggagaagctggctatctcacgagaagccaacagcaaggcagacccatccctcaaccctgaacagctcaagaaattgcaagacaaaatagaaaagtgcaagcaagatgttcttaagaccaaagagaagtatgagaagtccctgaaggaactcgaccagggcacaccccagtacatggagaacatggagcaggtgtttgagcagtgccagcagttcgaggagaaacgccttcgcttcttccgggaggttctgctggaggttcagaagcacctagacctgtccaatgtggctggctacaaagccatttaccatgacctggagcagagcatcagagcagctgatgcagtggaggacctgaggtggttccgagccaatcacgggccgggcatggccatgaactggccgcagtttgaggagtggtccgcagacctgaatcgaaccctcagccggagagagaagaagaaggccactgacggcgtcaccctgacgggcatcaaccagacaggcgaccagtctctgccgagtaagcccagcagtgtgagcagctacgagaagacccagagctatcccaccgactggtcagacgatgagtctaacaaccccttctcctccacggatgccaatggggactcgaatccattcgacgacgacgccacctcggggacggaagtgcgagtccgggccctgtatgactatgaggggcaggagcatgatgagctgagcttcaaggctggggatgagctgaccaagatggaggacgaggatgagcagggctggtgcaagggacgcttggacaacgggcaagttggcctatacccggcaaattatgtggaggcgatccagtgatgagtcggggacaggccagcggggggacggaggcggcgggcccaggagcctcagccagccacgtgggcatccactccttttcctgcaagagatgatggttccattgctcttggcttcatggtgttcctggaaggcagatgagctggtcatttcgcctgggactcggcacctttccgagtgcagctggagggatctgagcgcaggaagacgcagaacaacagaaatagccgcccctccccgcccactgtgcctgttggcctatcatagatctctatgttcttgactttgtctctcctttccgagtcaatggtgggttacactgatcttgttccactgattactctctctgacgagtccatcacctgcaacttaaatgaacaagcttacatcccattttgagtgaagattttgaggtttttaatttaaaggctgtgtacagttatacttttttatacacctgttcatttctacttaaattatggcacagattgatgcgcaccagtcttgaggaaacgatctccctattcccttaccctgttactcagccacgccgtgtgtaggcttagcctcaggtggcagatgtttgaggaaaggaattatgccaggaaggtgggaccgggttatggtcgggtttctattgggaatgctctttgtgcttttgggcatctgaatggaagctttacatagaaccttaggtagaactcccccaaatcgccatatttaaaaattattttcactctattcttgcttaaaactgtactcttttgcaaattaacaattttatcactgattcagagttaaaaagaagactaacttttcaagcaaatgcatctgtaaagatgctttagattagactgtcatgtctcagtgtctatctgtatatattatttgatattcagagaatctaaagcactcgtctactgttttaatgagatttaacagcttttaacagtgagtttcgtttgtaaactgcttgaagtctgtggcattcaggcacacgtctggctggccggctgggtctcctcccgggctcagtgggcctggggcctctctgacgtggtgcctgctggagggaggctcgtcgtcaccagctgactgctggtccggcttctgaccggcctttgtcctggctccgtagcagaacactgtaaaagtgcccgcgtctttgcagtagttgcagatttcagtcgtcgtgttacttgtgcacaaacagaagctgggtcttacccgcagcacgagtgtctcgggctgcccggagtcgcccgggagcaggtgctgcagccagagttacgcgggggccacgcgggccggcgggggtggggggaacgtgggggaacctgtgtttcacgtgactcagcagtgcccgccgccgtcaccagctatgcattcactccgtttccagtgagcagatgtcttgcttggaaagtggacctgtgtctgtgtctgtcctgagaacttaccagcagaaatcctcatttctgtgctacggatttaccaaaaattgtcaagtctttttcagtttaacagttcctttacatgtgtagtatttgaggaaaaaaatcaataaacagttgatctcgtg

SEQ ID NO: 2643 - DNA, 521 bp, Homo sapiens
  source 1..521: mol_type = genomic DNA
agagcgatgagtgagaacgccgcaccaggtctgatctcagagcttctcctgcaaagaggaaccacgaaggtggccacaggtctggttctgaacagagaccagaggctcgcctgggcagagaacagcattgacttcatcagcagggagctgtgtgcgcattccatcaggaagctgcaggcccatgtcctgttgatcaaagcagtccacggatattttgattcaagacagaattactctgagaaggagtccctgtcgttcatgatagacacgatgaaatccaccctcaaagagcagttccagtttgtggaagtcccaggcaatcactgtgtccacatgagcgaaccccagcacgtggccagtatcatcagctccttcttacagtgcacacacatgctcccagcccagctgtagctctgggcctggaactatgaagacctagtgctcccagactcaacactgggactctgagttcctgagccccacaacaaggccagggatggtggggacaggcctcactagtc

SEQ ID NO: 2644 - DNA, 517 bp, Homo sapiens
  source 1..517: mol_type = genomic DNA
gtaagatggcggcggcgttggtggtggcagtggacggggcggctgggcctggaacagtcggagcagccgctagcagaaggatgacccaagacgggaagcgggctgctgagcctcgccgattcccgtgcttgtaactgccccagccggacaccccccctcccttgacctacccggctggctacagcaaacatcattcaagatgtccagcaaagggagcagcacagatggcagaacagacttagctaatggaagcctgtctagcagtccagaggagatgtctggagctgaagaggggagggagacatcctcaggcattgaagtggaggcctcagacctgagtttgagcttgactggggatgatggtggccccaaccgcaccagcacagaaagtcgaggcacagacacagagagctcaggtgaagataaggactctgacagcatggaggacactggtcattactccattaatgatgaaaatcgagtccatgaccgctcagaggaagaggaagaggaggaa

SEQ ID NO: 2645 - DNA, 1407 bp, Homo sapiens
  source 1..1407: mol_type = genomic DNA
atgcacacatacgcgcgcgcacatgcacataggcacacagagatacgcgcacacacacacacaaacgcactcagatttcccggaccctggttttcctcctgtgaccctttcggggccgggctctcaccctaaagaagcagccccgccctggggtggccccaccctctcttgggacctgtcataagtcggaccccgggcgcccggctgcgcagtcccagccgccttccccaggcagtggaaccttcgggctcctgagcttcaggatggttcgtactaagacatggaccctgaagaagcactttgttggctatcctactaatagtgactttgagttgaagacagctgagctcccacccttaaaaaatggagaggtcctgcttgaagctttgttcctcaccgtggatccctacatgagagtggcagccaaaagattgaaggaaggtgatacaatgatggggcagcaagtggccaaagttgtggaaagtaaaaatgtagccctaccaaaaggaactattgtactggcttctccaggctggacaacgcactccatttctgatgggaaagatctggaaaagctgctgacagagtggccagacacaataccactgtctttggctctggggacagttggcatgccaggcctgactgcctactttggcctacttgaaatctgtggtgtgaagggtggagaaacagtgatggttaatgcagcagctggagctgtgggctcagtcgtggggcagattgcaaagctcaagggctgcaaagttgttggagcagtagggtctgatgaaaaggttgcctaccttcaaaagcttggatttgatgtcgtctttaactacaagacggtagagtctttggaagaaaccttgaagaaagcgtctcctgatggttatgattgttattttgataatgtaggtggagagttttcaaacactgttatcggccagatgaagaaatttggaaggattgccatatgtggagccatctctacatataacagaaccggcccacttcccccaggcccacccccagagattgttatctatcaggagcttcgcatggaagcttttgtcgtctaccgctggcaaggagatgcccgccaaaaagctctgaaggacttgctgaaatgggtcttagagggtaaaatccagtacaaggaatatatcattgaaggatttgaaaacatgccagctgcatttatgggaatgctgaaaggagataatttggggaagacaatagtgaaagcatgaaaaagaggacacatggaatctggaggccatttagatgattagttaatttgtttttcaccatttagcaaaaatgtatactaccttaaatgtcttaagaaatagtactcataatgagtttgagctacttaataaaatacatttaagtggtatgtaa

SEQ ID NO: 2646 - DNA, 2315 bp, Homo sapiens
  source 1..2315: mol_type = genomic DNA
gctgctgctccagatgaggtgatggcaacggccaacttcggcaagatccagatcgggatttacgtggagatcaagcgcagcgatggccgaatacatcaagcaatggtaacatctttaaatgaagataatgaaagtgtaactgttgaatggatagaaaatggagatacaaaaggcaaagagattgacctggagagcatcttttcacttaaccctgaccttgttcctgatgaagaaattgaacccagtccagaaacacctccacctccagcatcctcagccaaagtaaacaaaattgtaaagaatcgacggactgtagcttctattaagaatgaccctccttcaagagataatagagtggttggttcagcacgtgcacggcccagtcaatttcctgaacagtcttcctctgcacaacagaatggtagtgtttcagatatatctccagttcaagctgcaaaaaaggaatttggacccccttcacgtagaaaatctaattgtgtgaaagaagtagaaaaactgcaagaaaaacgagagaaaaggagattgcaacagcaagaacttagagaaaaaagagcccaggacgttgatgctacaaacccaaattatgaaattatgtgtatgatcagagactttagaggaagtttggattatagaccattaacaacagcagatcctattgatgaacataggatatgtgtgtgtgtaagaaaacgaccactcaataaaaaagaaactcaaatgaaagatcttgatgtaatcacaattcctagtaaagatgttgtgatggtacatgaaccaaaacaaaaagtagatttaacaaggtacctagaaaaccaaacatttcgttttgattatgcctttgatgactcagctcctaatgaaatggtttacaggtttactgctagaccactagtggaaactatatttgaaaggggaatggctacatgctttgcttatgggcagactggaagtggaaaaactcatactatgggtggtgacttttcaggaaagaaccaagattgttctaaaggaatttatgcattagcagctcgagatgtctttttaatgctaaagaagccaaactataagaagctagaacttcaagtatatgcaaccttctttgaaatttatagtggaaaggtgtttgacttgctaaacaggaaaacaaaattaagagttctagaagatggaaaacagcaggttcaagtggtgggattacaggaacgggaggtcaaatgtgttgaagatgtactgaaactcattgacataggcaacagttgcagaacatccggtcaaacatctgcaaatgcacattcatctcggagccatgcagtgtttcagattattcttagaaggaaaggaaaactacatggcaaattttctctcattgatttggctggaaatgaaagaggagctgatacttccagtgcggacaggcaaactaggcttgaaggtgctgaaattaataaaagccttttagcactcaaggagtgcatcagagccttaggtagaaataaacctcatactcctttccgtgcaagtaaactcactcaggtgttaagagattctttcataggtgaaaactctcgtacctgcatgattgccacaatctctccaggaatggcatcctgtgaaaatactcttaatacattaagatatgcaaatagagtaaaggagtttggaattagtccatcagacattcccttctcacagggtagtggcagtcgccctgatctctctccttcttatgaatatgacgacttttctccttcagttaccagggtcaaagaattgactgtagatccaactgctgctggtgatgttcgtccaataatgcaccatccaccaaaccagattgatgacttagagacacagtggggtgtggggagttcccctcagagagatgatctaaaacttctttgtgaacaaaatgaagaagaagtctctccacagttgtttactttccacgaagctgtttcacaaatggtagaaatggaagaacaagttgtagaagatcacagggcagtgttccaggaatctattcggtggttagaagatgaaaaggccctcttagagatgactgaagaagtagattatgatgtcgattcatatgctacacaacttgaagctattcttgagcaaaaaatagacattttaactgaactgcgggataaagtgaaatctttccgtgcagctctacaagaggaggaacaagccagcaagcaaatcaacccgaagagaccccgtgccctttaaaccggcatttgctgctaaaggatacccagaaccctcactactgtaacatacaacggttc

SEQ ID NO: 2647 - DNA, 2090 bp, Homo sapiens
  source 1..2090: mol_type = genomic DNA
actacccagactgcctctgcttcagccatcgaggactcgggcggaactaagctacaaatccttcttcaaaccacaccaaaaacctattgcaaacgtaaatgctgccccattggaaagaaaggaaggctgggaactaagaagctattggttggtgatccctggaccaatcggaggagccgtgatttggcgggagtcttgaccgccgccgggctcttggtacctcagcgcgagcgccaggcgtccggccgccgtggctatgttcgtgtccgatttccgcaaagagttctacgaggtggtccagagccagagggtccttctcttcgtggcctcggacgtggatgctctgtgtgcgtgcaagatccttcaggccttgttccagtgtgaccacgtgcaatatacgctggttccagtttctgggtggcaagaacttgaaactgcatttcttgagcataaagaacagtttcattattttattctcataaactgtggagctaatgtagacctattggatattcttcaacctgatgaagacactatattctttgtgtgtgacacccataggccagtcaatgtcgtcaatgtatacaacgatacccagatcaaattactcattaaacaagatgatgaccttgaagttcccgcctatgaagacatcttcagggatgaagaggaggatgaagagcattcaggaaatgacagtgatgggtcagagccttctgagaagcgcacacggttagaagaggagatagtggagcaaaccatgcggaggaggcagcggcgagagtgggaggcccggagaagagacatcctctttgactacgagcagtatgaatatcatgggacatcgtcagccatggtgatgtttgagctggcttggatgctgtccaaggacctgaatgacatgctgtggtgggccatcgttggactaacagaccagtgggtgcaagacaagatcactcaaatgaaatacgtgactgatgttggtgtcctgcagcgccacgtttcccgccacaaccaccggaacgaggatgaggagaacacactctccgtggactgcacacggatctcctttgagtatgacctccgcctggtgctctaccagcactggtccctccatgacagcctgtgcaacaccagctataccgcagccaggttcaagctgtggtctgtgcatggacagaagcggctccaggagttccttgcagacatgggtcttcccctgaagcaggtgaagcagaagttccaggccatggacatctccttgaaggagaatttgcgggaaatgattgaagagtctgcaaataaatttgggatgaaggacatgcgcgtgcagactttcagcattcattttgggttcaagcacaagtttctggccagcgacgtggtctttgccaccatgtctttgatggagagccccgagaaggatggctcagggacagatcacttcatccaggctctggacagcctctccaggagtaacctggacaagctgtaccatggcctggaactcgccaagaagcagctgcgagccacccagcagaccattgccagctgcctttgcaccaacctcgtcatctcccaggggcctttcctgtactgctctctcatggagggcactccagatgtcatgctgttctctaggccggcatccctaagcctgctcagcaaacacctgctcaagtcctttgtgtgttcgacaaagaaccggcgctgcaaactgctgcccctggtgatggctgcccccctgagcatggagcatggcacagtgaccgtggtgggcatccccccagagaccgacagctcggacaggaagaacttttttgggagggcgtttgagaaggcagcggaaagcaccagctcccggatgctgcacaaccattttgacctctcagtaattgagctgaaagctgaggatcggagcaagtttctggacgcacttatttccctcctgtcctaggaatttgattcttccagaatgaccttcttatttatgtaactggctttcatttagattgtaagttatggacatgatttgagatgtagaagccattttttattaaataaaatgcttattttaggctccgtcccca

SEQ ID NO: 2648 - DNA, 902 bp, Homo sapiens
  source 1..902: mol_type = genomic DNA
agaagaccgccccactctcgtcgcactagggaccccgaaatccgaccgcccatgggaagccactcgccagagtcttacctgaggggattccttaccccatcaccatgtgcacctcagaaactttccaagcgctggacaccttcgaagccagacatgatgacatcgtgctagcatcttatccaaagtgcggttcaaactggattctccacattgtcagtgaattaatatatgctgtttctaaaaaaaagtataaatatccagaattcccagttcttgaatgtggggattcagaaaaatatcagagaatgaaaggctttccatcaccaaggattttggcaactcacctccactatgacaaattacctgggtctatcttcgagaataaagccaagatattggtgatatttcgaaaccctaaagatacagcagtatcttttttgcatttccacaacgatgtccccgatattccaagctatggctcttgggatgaattcttcagacagttcatgaaaggacaagtttcttggggaaggtattttgattttgcaatcaattggaacaaacatcttgatggcgacaatgttaagttcatattatatgaagacctgaaagagaatctggctgctggaataaaacagattgctgagttcttgggattctttctaactggggagcaaattcaaactatctcagtccagagcaccttccaagccatgcgtgcgaagtctcaggacacacacggtgctgtcggcccattccttttccgcaaaggtgaagttggtgattggaaaaatttgttcagtgaaattcagaaccaggaaatggatgaaaaattcaaagagtgcttagcaggcacctccctcggagcaaagttgaagtatgaatcatattgccagggttga

SEQ ID NO: 2649 - DNA, 2808 bp, Homo sapiens
  source 1..2808: mol_type = genomic DNA
atgaatgaagctatggctacagattccccaagaagacccagtcgttgtactggtggagttgtggttcgcccccaggctgtcacagagcagtcctacatggaaagtgttgtgacttttctgcaggatgttgtgccacaggcttacagtggaacacctctaacagaagaaaaggagaaaatagtctgggtcagatttgaaaatgcagatttaaatgatacatcaagaaatctggaatttcatgaaatacatagtactgggaatgaaccgcctttgttgattatgattggctacagtgatggaatgcaggtctggagcatccctatcagtggtgaagcacaagagctcttctctgttcgacatggcccaattcgagcggctagaatcttgcctgctccacagtttggtgctcaaaaatgtgataactttgctgaaaaaagacccctccttggtgtttgtaagagcattggatcttctggcacaagcccaccgtactgttgtgtggatctgtattcacttcgtactggggagatggtcaagtccattcaatttaagacacctatttatgatctccattgcaataaacggatccttgtcgtagtcttgcaggagaaaattgctgcctttgatagctgtactttcacgaagaaattctttgttacaagctgctatccatgtccagggccaaacatgaatcctattgctcttgggagccgctggcttgcttatgcagaaaacaagttgattcgatgtcatcagtcccgtggtggagcctgtggagacaacattcagtcttatactgccacagtcattagtgctgctaaaacattgaaaagtggcctgacaatggtagggaaagtggtgactcagctgacaggcacactgccttcaggtgtgacagaagatgatgttgccatccacagtaattcacggcggagtcctttggtcccaggcatcatcacagttattgacaccgaaaccgttggagagggccaggtgcttgtgagtgaggattctgacagtgatggcattgtggcccacttccctgcccatgagaagccagtgtgctgcatggcttttaatacaagtggaatgcttctagtcacaacagacacccttggccatgactttcatgtcttccaaattctgactcatccttggtcctcatcacaatgtgctgtccaccatctgtatactcttcacaggggagaaactgaagccaaagtacaggacatctgcttcagccatgactgtcgctgggttgtggtcagtactctccggggtacttcccacgttttccccatcaacccttatggtggccagccttgtgttcgtacacatatgtcaccacgagtagtgaatcgcatgagccgtttccagaaaagtgctggactggaagagattgaacaagaactgacgtctaagcaaggaggtcgctgtagccctgttccaggtctatcaagcagcccttctgggtcacccttgcatgggaaactgaacagccaagactcctataacaattttaccaacaacaaccctggcaaccctcggctctctcctcttcccagcttgatggtagtgatgcctcttgcacaaatcaagcagccaatgacattggggaccatcaccaaacgaaccggcaaagttaaacctcctccacaaatttcacccagcaaatcgatgggcggagaattttgtgtggctgctatcttcggaacatccaggtcatggtttgcaaataatgcaggtctgaaaagagaaaaagatcagtccaaacaagttgtagttgagtccctgtacattatcagttgctatggcaccttagtggaacacatgatggagccgcgacccctcagcactgcacccaagattagtgacgacacaccactggaaatgatgacatcgcctcgagccagctggactctggttagaacccctcaatggaatgaattgcagccaccgtttaatgcaaaccaccctctgctcctcgctgcagatgcagtacagtattatcagttcctgcttgctggcctggttccccctggaagtcctgggcccattactcgacatgggtcttacgacagtttagcttctgaccatagtggacaggaagatgaagaatggctttcccaggttgaaattgtaacacacactggaccccatagacgtctgtggatgggtccacagttccagttcaaaaccatccatccctcaggccaaaccacagttatctcatccagttcatctgtgttgcagtctcatggtccgagtgacacgccacagcctcttttggattttgatacagatgatcttgatctcaacagtctcaggatccagccagtccgctctgaccccgtcagcatgccagggtcatcccgtccagtctctgatcgaaggggagtttccacagtgattgatgctgcctcaggtacctttgacaggagcgtgaccctgctggaggtgtgcgggagctggcctgagggcttcgggctgcggcacatgtcctccatggagcacacggaggagggcctccgggagcgacttgccgacgccatggccgagtcacctagccgggacgtcgtgggatccggaacagacacagcccttgacgtagcagtaaaaaccttcccccctgagagacacgtggcagtgaagtgttttgaacttcagcgagagggaagcatcgagactctgagtaacagctcaggctccaccagcggcagcataccaagaaactttgatggctaccgatctccgctgcccaccaatgagagccagcccctcagcctcttcccgactggcttcccgtag

SEQ ID NO: 2650 - DNA, 1226 bp, Homo sapiens
  source 1..1226: mol_type = genomic DNA
gggcccagcccgaggaggcactcagggttaggaggtctgggcgagaagcaactagggccctcatcacttcgccgccgaatccccggcgccgcccagcggggcagagccaggccagggccgcccgcccaacctggtccgctgcctcttcggccatggaagctgccggcagccctgcggctacggagacaggcaagtatatcgcgtcaacacagcgacctgacgggacctggcgcaagcagcggagggtgaaagaaggatatgtgccccaggaggaggtcccagtatatgaaaacaagtatgtgaagtttttcaagagtaaaccagagttgcccccagggctaagccctgaggccactgctcctgtcaccccatccaggcctgaaggtggtgaaccaggcctctccaagacagccaaacgtaacctgaagcgaaaggagaagaggcggcagcagcaagagaaaggagaggcagaggccttgagcaggactcttgataaggtgtccctggaagagacagcccaactccccagtgctccacagggctctcgggcagcccccacagctgcatctgaccagcctgactcagctgccaccactgagaaagccaagaagataaagaacctaaagaagaaactccggcaggtggaagagctgcagcagcggatccaggctggggaagtcagccagcctagcaaagagcagctagaaaagctagcaaggaggagggcgctagaagaggagttagaggacttggagttaggcctctgaggcctttggggaatagggaatggactgcagaacaaaccgtggggctctctggggtctgggggaatacgggcaacagcagtcaggaggggtaccccccatactggcttacttccacctcctgcggcccagctctgtcctccagagcctagcgtctccctcaatccttcccttttcttcccaacttctactttttggactttccccctcccattcccagtgttcaaaatctcagtgactaccccaggtacctttgctgctgatttgggtgtcttgtttaaaagaaaatcaggtgggtgggaatctcttggagaactgaggctgagggtagagggagtatgcccaagtcttggagtcttggttcctgttcgcggtgtttatgggttatttccctctccatccctcattttttttttttttttaaaaaaagcaaaaatgagaataaacacaagtagacatgtc

SEQ ID NO: 2651 - DNA, 847 bp, Homo sapiens
  source 1..847: mol_type = genomic DNA
gcgggcgctgcggcccctgctctacctcctagcgccggtgcgcggccgaggccgcactacctgtctgcgggaaagcgggatccaccccaggacgtcgggtcgctgccgacataatgtcaagtggaaactatcagcagtcagaggctcttagcaaacccactttcagtgaggaacaagcctctgcgttagtggagtcagtgtttgggttgaaagtttccaaggtccggccacttcctagctatgatgaccaaaactttcatgtctacgtttcaaaaaccaaagatggcccaactgaatatgtcctcaaaataagcaacaccaaggctagcaaaaatccagacctgattgaagtgcagaatcacatcatcatgtttctgaaagccgctggatttccaacagcctctgtgtgtcacactaaaggagacaacacagcttctctcgtgtctgtagatagtggctctgaaatcaaaagctacttggtgaggctgctgacttacctcccaggaagacccatcgctgagcttcccgtcagcccccagctattgtatgaaattggaaaactagctgccaaattggataagacactgcagagattccatcacccaaagttaagtagtcttcatcgggagaacttcatctggaatctgaaaaatgttcctcttctggagaaatacctgtatgccctgggccagaatcgaaaccgagagattgttgagcatgtcattcatctgttcaaggaggaagtaatgaccaaattaagtcattttcgagaatgacctagcaccgtgccaggcccctagaagacccagtaaagatctgttgaataaactgtaagaatgaacacacc

SEQ ID NO: 2652 - DNA, 663 bp, Homo sapiens
  source 1..663: mol_type = genomic DNA
atggtagctgtgtgcaaggggagagcagcagggtttagaattccaggaaggaagagagagtgatgtcatcagattccatggaccagcccaggaacccctgtgagaacgagcctctgactccaggttatcatggattcccagcgcgggacagccagggtaaccaggagccgacaacaactcctgacgcaatggttcagccttttactaccatcccatttccaccacctccgcagaatggaattcccacagagtatggggtgccacacactcaagactatgccggccagaccggtgagcataacctgacactctacggaagtacgcaagcccacggggagcagagcagcaactcacccagcacacaaaatggatctcttacgcagacagaaggtggagcacagacagacggccagcagtcacagacacaaagtagtgaaaattcagagagtaaatctaccccgaaacggctgcatgtctctaatattcctttccgcttccgggaccctgacctccggcagatgtttgggcagtttggcaaaatcctagatgtagaaataatctttaatgaacgtggctctaagggattcgggttcgtaactttcgagaatagtgctgatgcagacagggccagggagaaattacacggcaccgtggtagagggcc

SEQ ID NO: 2653 - DNA, 998 bp, Homo sapiens
  source 1..998: mol_type = genomic DNA
cgcgctcttcctttccaacttggacgctgcagaatggctcccgcaaagaagggtggcgagaagaaaaagggccgttctgccatcaacgaagtggtaacccgagaatacaccatcaacattcacaagcgcatccatggagtgggcttcaagaagcgtgcacctcgggcactcaaagagattcggaaatttgccatgaaggagatgggaactccagatgtgcgcattgacaccaggctcaacaaagctgtctgggccaaaggaataaggaatgtgccataccgaatccgtgtgcggctgtccagaaaacgtaatgaggatgaagattcaccaaataagctatatactttggttacctatgtacctgttaccactttcaaaatttctgtgctaaacagtgttacagtcgccaagagcccataaagggagccctcctggaagtggatgaggccttgggtctcggctcttcattgcttcctgagctgcagcagatgcctttacaaccaagctcaccgaggacgtctgtctcccatattaccctggcagagggccaggcctgttctacacggccggggtttcaacaaggtactgatgtcttctgcccttgcctcttcgacaggcaagtaataagacttaagtgaagagaattctttaggcacacaaattcacatttgatgtaatctcattatacttcctgatctgtgattgaaaactttcatttcgtaactagtatgtctgtcccacctttaaaaagtttttcattatgaaagtaagtatttgttagaattaagtctatttaaatgaaaaaaacttagatatgagtctgcatggcctcaggaaaatgatgttttaaaatagagattttaggttgtctgcactctagcttttttgtcgttttcttaaggcttttttaactgcatcaaaaattcagatacgaaacatacactaaaaaataatacatcatatcttaatttccactgaacttgatttaaattcagagt

SEQ ID NO: 2654 - DNA, 817 bp, Homo sapiens
  source 1..817: mol_type = genomic DNA
ctttccaacttggacgctgcagaatggctcccgcaaagaagggtggcgagaagaaaaagggccgttctgccatcaacgaagtggtaacccgagaatacaccatcaacattcacaagcgcatccatggagtgggcttcaagaagcgtgcacctcgggcactcaaagagattcggaaatttgccatgaaggagatgggaactccagatgtgcgcattgacaccaggctcaacaaagctgtctgggccaaaggaataaggaatgtgccataccgaatccgtgtgcggctgtccagaaaacgtaatgaggatgaagattcaccaaataagctatatactttggttacctatgtacctgttaccactttcaaaagtcttcaaaacgatgatctcttcaaaacagattgtcaccatcagtgagaaaccgaacaagaagaggaaagcaaatggcattttcttctctacttggtgaaaagtcattatagaggattcgaacggttccaatgctcgcaattctacttcaagcatgtgctcattctacatatcaacccctttttcactgacaaatgtaatgttgacaatctaggctaatgggactagattttgaatccaatcaacactttttcatataaagttttcagaataacaaagctttccctcattcatacagatattgctgtactaatctataattatgttttagaattcaaattataacactgactaaacatcactaatgaaacatttgtgacctccttttttccgaagtttaatttttgctttgaattcatattttatcagtatgtgttaatataatgtca

SEQ ID NO: 2655 - DNA, 1845 bp, Homo sapiens
  source 1..1845: mol_type = genomic DNA
atctggctttgttttttctttacgtcacttagcgccagtttgttctggccgtgtctcccactagaatgagttaagcccagagtcaacacatccagatttccgaatgtggctaacgagttacccatctccaaatttccctgtgtcagtactgcagaatggagtgaaaatgaccaatgaagcaccaaaaggtttacgggctaatatcattcgatcatacctcatggacccgatctctgatccggagttctttggcagctgcaaaaagcctgaggaattcaagaaattgctttatggcctgtgtttctttcatgctttggtacaagaaagacggaaatttggacccctagggtggaatattccttatgagttcaatgagacagatctgagaatcagcgtacagcagctccacatgttcctgaaccagtatgaggaactgccgtatgaggctctgcggtacatgactggcgaatgcaattacggaggcagagtgaccgatgactgggaccggcgcacgctgcgcagcattctaaacaaattcttcaatcccgaattagttgaaaattcagactataagttcgactcaagtggcatctattttgttcctccttctggtgatcacaaaagctacatcgaatacacaaagactctgccactgaccccagcaccagaaatctttgggatgaatgccaatgcagatatcactaaggatcagtcagaaactcagctgctatttgataacattcttcttacacagtctcgttcagcaggtgctggtgcaaaatcatcagatgaagtagtgaatgaggtcgctagtgacatcttgggcaaacttccaaacaacttcgacatcgaggctgccatgaggaggtacccaacaacttatactcagagcatgaacactgtacttgtccaagagatgggacggttcaataagttactgaagaccataagagattcgtgcgtaaatattcaaaaagcaatcaaggggcttgcagtcatgtctacagatcttgaagaagtggttagcagcattttgaatgtcaaaattccagaaatgtggatgggtaaatcctacccaagccttaaaccacttggcagctatgtgaatgacttccttgcaagactaaaattcttgcagcaatggtatgaggttggtcctcctccagtcttctggctttctggcttcttcttcacacaagccttcctgaccggtgcccagcagaactacgccaggaaatacacaattcctattgatcttcttgggtttgactatgaagtgatggaagacaaagaatacaagcatcctcctgaggatggtgttttcattcacggattatttctggatggagcttcctggaatagaaagatcaagaaacttgcagaatcgcatcccaaaattctttatgatacagtgcctgtgatgtggctaaagccctgtaagagggcagatataccaaaacggccaagttatgttgctccattgtataagacaagtgagcggagaggagtattatccaccactggccattccacgaattttgtgattgccatgactcttccctctgaccaacccaaggaacactggattggacgaggtgtagcactgttatgtcaacttaattcataaccagaagacatcatttccttgttcctatttcttgttggctggctgagtagagaaagcatattttactacttaaacctttttttttgtttgtttaaatacatttgactaaagttataattatgaatttacttatgagcaaatgcagctaaacttaatatgactcatacttaaatgtaaggaaatgttctgaaataaagactaaagaaaacacactggca

SEQ ID NO: 2656 - DNA, 1783 bp, Homo sapiens
  source 1..1783: mol_type = genomic DNA
gcgctgcccggctcccggccctgccggcctcctcccttggcgccgcggccatggcggccagcgcgaagcggaagcaggaggagaagcacctgaagatgctgcgggacatgaccggcctcccgcacaaccgaaagtgcttcgactgcgaccagcgcggccccacctacgttaacatgacggtcggctccttcgtgtgtacctcctgctccggcagcctgcgaggattaaatccaccacacagggtgaaatctatctccatgacaacattcacacaacaggaaattgaattcttacaaaaacatggaaatgaagtctgtaaacagatttggctaggattatttgatgatagatcttcagcaattccagacttcagggatccacaaaaagtgaaagagtttctacaagaaaagtatgaaaagaaaagatggtatgtcccgccagaacaagccaaagtcgtggcatcagttcatgcatctatttcagggtcctctgccagtagcacaagcagcacacctgaggtcaaaccactgaaatctcttttaggggattctgcaccaacactgcacttaaataagggcacacctagtcagtccccagttgtaggtcgttctcaagggcagcagcaggagaagaagcaatttgaccttttaagtgatctcggctcagacatctttgctgctccagctcctcagtcaacagctacagccaattttgctaactttgcacatttcaacagtcatgcagctcagaattctgcaaatgcagattttgcaaactttgatgcatttggacagtctagtggttcgagtaattttggaggtttccccacagcaagtcactctccttttcagccccaaactacaggtggaagtgctgcatcagtaaatgctaattttgctcattttgataacttccccaaatcctccagtgctgattttggaaccttcaatacttcccagagtcatcaaacagcatcagctgttagtaaagtttcaacgaacaaagctggtttacagactgcagacaaatatgcagcacttgctaatttagacaatatcttcagtgccgggcaaggtggtgatcagggaagtggctttgggaccacaggtaaagctcctgttggttctgtggtttcagttcccagtcagtcaagtgcatcttcagacaagtatgcagctctggcagaactagacagcgttttcagttctgcagccacctccagtaatgcgtatacttccacaagtaatgctagcagcaatgtttttggaacagtgccagtggttgcttctgcacagacacagcctgcttcatcaagtgtgcctgctccatttggagctacgccttccacaaatccatttgttgctgctgctggtccttctgtggcatcttctacaaacccatttcagaccaatgccagaggagcaacagcggcaacctttggcactgcatccatgagcatgcccacaggattcggcactcctgctccctacagtcttcccaccagctttagtggcagctttcagcagcctgcctttccagcccaagcagctttccctcaacagacagctttttctcaacagcccaatggttttgcagcatttggacaaacaaagccagtagtaaccccttttggtcaagttgcagctgctggagtatctagtaatccttttatgactggtgcaccaacaggacaatttccaacaggaagctcatcaaccaatcctttcttatagccttatatagacaatttactggaacgaacttttatgtggtcacattacat

SEQ ID NO: 2657 - DNA, 2572 bp, Homo sapiens
  source 1..2572: mol_type = genomic DNA
ggtgccccccgggcgcaggccagggaggcccgagcgccttccccacgccccgctcgcccgcgcgtgtgaggggagggcggcccagccgtttcgcgccgggagattttgtggaagtataatactttgtcattatgagatgtcgtctctcggtgcctcctttgtgcaaattaaatttgatgacttgcagttttttgaaaactgcggtggaggaagttttgggagtgtttatcgagccaaatggatatcacaggacaaggaggtggctgtaaagaagctcctcaaaatagagaaagaggcagaaatactcagtgtcctcagtcacagaaacatcatccagttttatggagtaattcttgaacctcccaactatggcattgtcacagaatatgcttctctgggatcactctatgattacattaacagtaacagaagtgaggagatggatatggatcacattatgacctgggccactgatgtagccaaaggaatgcattatttacatatggaggctcctgtcaaggtgattcacagagacctcaagtcaagaaacgttgttatagctgctgatggagtattgaagatctgtgactttggtgcctctcggttccataaccatacaacacacatgtccttggttggaactttcccatggatggctccagaagttatccagagtctccctgtgtcagaaacttgtgacacatattcctatggtgtggttctctgggagatgctaacaagggaggtcccctttaaaggtttggaaggattacaagtagcttggcttgtagtggaaaaaaacgagagattaaccattccaagcagttgccccagaagttttgctgaactgttacatcagtgttgggaagctgatgccaagaaacggccatcattcaagcaaatcatttcaatcctggagtccatgtcaaatgacacgagccttcctgacaagtgtaactcattcctacacaacaaggcggagtggaggtgcgaaattgaggcaactcttgagaggctaaagaaactagagcgtgatctcagctttaaggagcaggagcttaaagaacgagaaagacgtttaaagatgtgggagcaaaagctgacagagcagtccaacaccccgctgctgccttcctttgagattggtgcatggacggaagacgatgtgtattgttgggttcagcagctcgtcagaaaaggtgactcttcagcagagatgagtgtatatgcaagcttgtttaaagaaaacaacattacagggaagcggctgctgctgctggaggaagaagacctgaaagacatgggcattgtctccaaggggcatatcattcacttcaagtcagccattgagaaattaacccatgattacataaatttgtttcacttcccaccactaattaaggactcaggaggtgaacctgaagaaaatgaggaaaaaatagtgaacctggaactggtttttggttttcacttgaaaccaggaactggcccacaggattgtaagtggaaaatgtatatggagatggatggggatgaaattgcaataacctacataaaagatgtgacattcaacactaacctacctgatgcggagattttaaagatgacaaagccaccatttgtaatggagaagtggattgtaggaatagcaaaaagtcagactgtggagtgcactgtcacatatgagagtgatgttagaactccaaaaagcactaaacatgtccattcgattcagtggagtagaacaaaacctcaggatgaagtgaaagcagtccaacttgccattcagacattattcaccaattcagatggcaaccctggaagcaggtccgactcaagtgctgattgccagtggttagatactctgaggatgcggcagattgcatccaacacttctttacagcgttcccagagcaatcctattctggggtcaccgttcttctcacactttgatggccaggattcctacgctgctgctgtgagacggccccaggtgcccattaagtatcaacagattacacctgtgaaccagtccagaagctcgtctcctactcagtatggactgaccaaaaacttctcttccctacatctcaactctagggacagtggcttttccagtggcaatactgacacctcttcagagaggggtcgatactcagacagaagcaggaacaaatatggacgtggtagtatatcactcaattcttctcctagaggaagatacagtggaaagagtcagcattccactccttcaagaggaagataccctggaaagttctacagggtttctcagtcagcactcaatcctcaccagtcgcctgacttcaagagaagccccagggacctccaccaacccaacaccataccagggatgcctttgcaccctgagactgactcaagagccagtgaagaggacagcaaagtcagcgaagggggctggacaaaagtggaataccggaaaaagccccacaggccatctcccgccaaaaccaataaagagagagccagaggggaccaccgtggatggagaaacttttgatgaattgaactacatagcttttctaagcaggtt

SEQ ID NO: 2658 - DNA, 689 bp, Homo sapiens
  source 1..689: mol_type = genomic DNA
gcggcggcgcctgacgagggtgccgcggccgctgggcgcagcgttcgggggttgcacggcccgcggcggcgacgaaaacaacgaccaggacgctcggcgcccctgtccgcagagtcgccactcccgcctcttctccggtctctagcgacgcgggcccgcggcttcctcctttcctgcccagttcccgcgggcctcggggttgcagcggctagaagtgccgaggagcgccaggaggacccggccggctgcgaggattcacgcgcccgccaccccgcccggcccgggcttcatgtgaaagagggacgggcctggccccaaggcccgcgcccgactcctcgcgcgcccctccggtccccgggggccctgcggcagcccccgacctggggccgcggtgacaggccgcgctggggcggaggggcgggctcggcgggggcggcccctccttgggcctgcggctctctacgtccctgcggagcagccggccataaagaatgctgatgggagaaccattttcctaattttcaaattgttgagctgtttgccataatggatgatcagcaagctttgaactcaatcatgcaagatttggctgtccttcataaggccagtcgaccagcattatccttgcaggaaaccagaaaagcaaaatcttcatcaccaaaaaaacagaatgatgtccgagtcaaatt

SEQ ID NO: 2659 - DNA, 2455 bp, Homo sapiens
  source 1..2455: mol_type = genomic DNA
cgggtggggaggtggggtccgggtgtgcgccgcggcgctggctgcgaaggcagtggccgaggcgggctccctctgggccgtgcccggcctggctaacaaagccgccgcggcctctgttgtgtgatggtgtcttttatgaataatcaaaagcagcaaaagccaacgctatcaggccagcgttttaaaactagaaaaagagatgaaaaagagaggtttgaccctactcagtttcaagactgtattattcaaggcttaactgaaaccggtactgatttggaagcagtagctaagtttcttgatgcttctggagcaaaacttgattaccgtcgatatgcagaaacactctttgacattctggtggctggtggaatgctggccccaggtggtacactggcagatgacatgatgcgtacagatgtctgcgtgtttgcagcccaagaagatctagagaccatgcaagcatttgctcaggtttttaacaagttaatcaggcgctacaaatacctggagaaaggttttgaagatgaagtaaaaaagctgctgctgttcttgaagggtttttcagagtcggagaggaacaagctagctatgttgactggtgttcttctggctaatggaacacttaatgcatccattcttaatagcctttataatgaaaatttggttaaagaaggagtttcagcagcttttgctgtgaagctctttaaatcatggataaatgaaaaagatatcaatgcagtagctgcaagtcttcggaaagtcagcatggataacagactgatggaactctttcctgccaataagcaaagtgttgaacacttcacaaaatattttactgaggcaggcttgaaagagctttcagaatatgttcggaatcagcaaaccatcggagctcgtaaggagctccagaaagaacttcaagaacagatgtcccgtggtgatccatttaaggatataattttatatgtcaaggaggagatgaaaaaaaacaacatcccagagccagttgtcatcggaatagtctggtcaagtgtaatgagcactgtggaatggaacaaaaaagaggagcttgtagcagagcaagccatcaagcacttgaagcaatacagccctctacttgctgcctttactactcaaggtcagtctgagctgactctgttactgaagattcaggagtattgctatgacaacattcatttcatgaaagccttccagaaaatagtggtgcttttttataaagctgaagtcctgagcgaggagcccattttgaagtggtataaagatgcacatgttgcaaaggggaagagtgttttccttgagcaaatgaaaaagtttgtagaatggctcaaaaatgctgaagaagaatctgaatctgaagctgaagaaggtgactgaattttgaaactacaccctcagtaaagcaaacaggagttgtagataaaatgtcatgtctcatgtgtcctggttcttacatcttcctacctccctgtatcaagcatgatataagggctttcatggcaaattttattttaactgtttctatggttgctggaaatgttgggtttagtttctaaaaccatgttttaagtagctacaggagctatagatttgaatctaatgttgcattagtcttttcagttatcttctacctcctgtattttctactgtaataatgtaatttaaggccttccacaatgaacagttcactttattccctgggttttctataaacagttttaaggatatgatttggttaaaaaataatttgttataaaaattctgtttgcaaattaaactggaaaagtatccagagtctcaaaaggcaatgatttgtgagataatatggcatgcccggagccctgctcatcaatgaaaaacccatatgtaataatcgaattcatttaacatgaatcttgagtacgtggaccattgcttgcatgttaactttttgttttgttttgttttgttttgttttgcatttttaactccagatatcctaaagctcaattgtttggtctctggttttcatccttagagaagccatggagaacagacttgaaaagtttaggaaatcataatgtggcagaggtggtgggaagaagaaagttgagctttttccccttgagaaacttctgcatttagtttctatctttccaggcaaaacaaatgggtattcttttcatacaaccattttcaaatgaaccttagaaaagtcttaacatttaaggtattttatgcacagaatacacttagattgataggaaagaactcgtaatggagtttgagtaaagaaaatgactgatgtactaaacccagtaaaaattgttgaaaatgttaaaggtcagcatgttctaattgggaatctagatatagcttagatttcctattggcttagagtatttgctataacaaatgaagtgcaatgacaattatatattcctactcggtcatactg

SEQ ID NO: 2660 - DNA, 1441 bp, Homo sapiens
  source 1..1441: mol_type = genomic DNA
ctctttctctctcacagcttctcacgaggtagaactttagagcctggtgtgtttgtggctggagcatagcagctcttctacaactttactgtagtttctactgaatattttggtttgcaaatataaaggattctctgaagcacaaccttaaataacgtgtggtagacacctgggagaggaaaactgcagacagaaaaatgtggccggatgctctgtgggcgggcggcagcgatgttcggccaggtggctccaaggagaggaagcagtgatgcattgaggtaaaaataagtgactaaagaagcagacctgggaatcacctaacatgtcgaggaggagatttgattgccgaagtatttcaggcctactaactacaactcctcaaattccaataaaaatggaaaactttaataatttctatatacttacatctaaagagctagggagaggaaaatttgctgtggttagacaatgtatatcaaaatctactggccaagaatatgctgcaaaatttctaaaaaagagaagaagaggacaggattgtcgagcagaaattttacacgagattgctgtgcttgaattggcaaagtcttgtccccgtgttattaatcttcatgaggtctatgaaaatacaagtgaaatcattttgatattggaatatgctgcaggtggagaaattttcagcctgtgtttacctgagttggctgaaatggtttctgaaaatgatgttatcagactcattaaacaaatacttgaaggagtttattatctacatcagaataacattgtacaccttgatttaaagccacagaatatattactgagcagcatataccctctcggggacattaaaatagtagattttggaatgtctcgaaaaatagggcatgcgtgtgaacttcgggaaatcatgggaacaccagaatatttagctccagaaatcctgaactatgatcccattaccacagcaacagatatgtggaatattggtataatagcatatatgttgttaactcacacatcaccatttgtgggagaagataatcaagaaacatacctcaatatttctcaagttaatgtagattattcggaagaaactttttcatcagtttcacagctggccacagactttattcagagccttttagtaaaaaatccagagaaaagaccaacagcagagatatgcctttctcattcttggctacagcagtgggactttgaaaacttgtttcaccctgaagaaacttccagttcctctcaaactcaggatcattctgtaaggtcctctgaagacaagacttctaaatcctcctgtaatggaacctgtggtgatagagaagacaaagagaatatcccagaggatagcagcatggtttccaaaagatttcgtttcgatgactcattacccaatccccatgaacttgtttcagatttgctctgttag

SEQ ID NO: 2661 - DNA, 1730 bp, Homo sapiens
  source 1..1730: mol_type = genomic DNA
cggggctctggccatataaacagagggacgcacgcccatgcggctgtagacgccatgatggatgtgtctggtgtgggtttcccaagcaaggttccttggaagaagatgtctgcagaggagctggagaatcagtactgtcccagccgatgggttgtccgactgggagcagaggaagccttgaggacctactcacagataggaattgaagccaccacaagggcccgggccaccaggaagagcctgctgcatgtcccctatggagacggcgaaggggagaaagtggacatttacttccccgacgagtcgtctgaagccttgcctttcttcctgttctttcacggaggatactggcagagcggaagtaaggatgagtctgccttcatggtccacccgctgacggcacagggagtggccgtggtaatagtggcttacggcatcgcccccaaaggcaccctggaccacatggtagaccaggtgacccgcagcgttgcgtttgtccagaagcggtatccaagcaacaagggaatttacctgtgtggacactcagccggggcccacctggctgccatgatgctcctggccgactggaccaagcatggggtcacgcccaacctcagaggctttttcctggtgagtggggtctttgacctggagcccatcgtgtatacttcacagaacgttgctctccagctgaccctggaggacgctcagaggaatagcccccagctgaaggtggcccaggcacagccggtggaccccacctgccgtgtgctggtggtcgtgggccagttcgactcccccgaattccaccgacagtcctgggagttttaccagaccctgtgtcaaggagagtggaaagcctcatttgaagagctccacgatgtggaccactttgaaattgttgagaatctgacccagaaggacaacgtgctcacccagattatcttgaaaacaatcttccagtagttctgacgatacttggagcctggtccacgtgcatcccaccttgggaagcctctccaaagagctttcggagctgacactgacagcttcagtttcccccagcacccaggagagccttgctgtgtctgtctgcccggcaagagtccattctcactgctgggacactcatgaaaatctccacgtcctccctcttcccagcctggatggagctccagggctggggaacgtccgcaagtcaatgctcagagatgcccggagctgcctcttagactcgtctggcccatctacctgctgacagagcatgacaaagatgacgctcaaaagtaatgccattacttcttttttttttttttttttttttttttttgagatggagtcttactctgtcacccaggctggagtgcagtggcgtgatcttggctcactgcaacctccacctcccgggttcaagcaattctcctgcctcagcctcctgagcagctgggactacaggcgcctgccatcatgcctggctaatttttgtatttttagtagagacggggtttcaacatattggccaggctggtctcaaactcctaaccttgtgattcgcccgccttggcctcccaaagtgctgggattccaggcgtgagccactgcgcccggccagaatggcattatatttaaatagttcataaagaagcacaaaagaatattatttcataacatgtaaaaattatataaaacgtaaatttccatgttgataaataaagttgtattggaacacg

SEQ ID NO: 2662 - DNA, 1045 bp, Homo sapiens
  source 1..1045: mol_type = genomic DNA
tttctccctgtttgctggcccagacaggcctgtgctagagggctggatagtgtggtagtgtggtggatagagtgctgcctctatccacaacgcagccatatgctgactgaagataactttgtgtctggaagagccctctgatttcttacactaatggccttacacgacatggaggattttacatttgatggaacaaagcgcttaagtgtcaactacgtgaagggaattcttcaaccgacagacacctgtgacatctgggataagatctggaacttccaagccaagcctgatgacctgcttatttctacctatcctaaagcaggaacaacatggactcaggagatagtggaattaatacaaaatgaaggtgatgtggagaaaagtaaacgggcaccgactcatcaacgatttcctttcctcgaaatgaaaatcccatccttaggatctgtgtgctggggctcctggcatgaacatgtgaaaggatggtgggaagccaaagacaaacaccgtattctctatctcttctatgaggacatgaagaagaacccaaagcatgaaattcagaagctggcagaatttattgggaagaaattagatgacaaagttctagataaaattgtccattacacttcgtttgatgtcatgaaacagaatccaatggcaaactattcatcgattcctgctgaaatcatggaccactccatttctccattcatgagaaaaggggcagtgggagactggaagaaacacttcaccgtggctcagaatgagagatttgatgaagattacaagaagaaaatgactgataccagactaactttccacttccagttctagtaaggaagaaaaactgaaaatgttttagtttattacccagtatatttgggtaataatgaaagtttaattctcataacaaatgatatcagattccagttatcagaatagtttactgtgtttgctcttattcactctactaaaaaattattttaaaaggctggaggcaaggtggtgacaggcagcagggtggcgacatggagagagggaa

SEQ ID NO: 2663 - DNA, 716 bp, Homo sapiens
  source 1..716: mol_type = genomic DNA
ctttccaacttggacgctgcagaatggctcccgcaaagaagggtggcgagaagaaaaagggccgttctgccatcaacgaagtggtaacccgagaatacaccatcaacattcacaagcgcatccatggagtgggcttcaagaagcgtgcacctcgggcactcaaagagattcggaaatttgccatgaaggagatgggaactccagatgtgcgcattgacaccaggctcaacaaagctgtctgggccaaaggaataaggaatgtgccataccgaatccgtgtgcggctgtccagaaaacgtaatgaggatgaagattcaccaaataagctatatactttggttacctatgtacctgttaccactttcaaaagtaagttctccatcccataaagccatttaaattcattagaaaaatgtccttacctcttaaaatgtgaattcatctgttaagctaggggtgacacacgtcattgtaccctttttaaattgttggtgtgggaagatgctaaagaatgcaaaactgatccatatctgggatgtaaaaaggttgtggaaaatagaatgcccagacccgtctacaaaaggtttttagagttgaaatatgaaatgtgatgtgggtatggaaattgactgttacttcctttacagatctacagacagtcaatgtggatgagaactaatcgctgatcgtcagatcaaataaagttataaaattgc

SEQ ID NO: 2664 - DNA, 572 bp, Homo sapiens
  source 1..572: mol_type = genomic DNA
ctttctttccgcgccgatagcgctcacgcaagcatggttaacgtccctaaaacccgccggactttctgtaagaagtgtggcaagcaccaaccccataaagtgacacagtacaagaagggcaaggattctctgtacgcccagggaaagcggcgttatgacaggaagcagagtggctatggtgggcaaactaagccgattttccggaaaaagctacaccaaaattgcattgagccaaacttgccaccaagagcccaacaatcaccatgatgctgagcacggaaggcagggaggggttcgtggtgaaggtcaggggcctaccctggtcctgctcagccgatgaagtgatgcgcttcttctctgattgcaagatccaaaatggcacatcaggtattcgtttcatctacaccagagaaggcagaccaagtggtgaagcatttgttgaacttgaatctgaagaggaagtgaaattggctttgaagaaggacagagaaaccatgggacacagatacgttgaagtattcaagtctaacagtgttgaaatggattgggtgttgaagcatacaggtccgaat

SEQ ID NO: 2665 - DNA, 1447 bp, Homo sapiens
  source 1..1447: mol_type = genomic DNA
acttttcttgtcgggcaactaggtgccgagcagtgctgcgcccggaagctggccgccactgcggggaggttgggccgaggcggcaggcgggcgggctggggcactggtgcccggcctgctcttccggagctgcagcccctcaatttggctgaggcggtggcggccgccgtgaggcctgcggagctccgacccaggggatttctataattggcctgatgaatcctttgatgaaatggacagtacactagctgttcaacagtatattcaacagaacataagagcagattgctccaatattgacaaaattcttgaaccacctgaaggccaagatgaaggtgtgtggaagtatgaacatttaaggcagttctgccttgagctaaatggacttgctgtcaaacttcagagtgaatgccatccagatacttgcactcaaatgacagcaactgaacaatggatttttctttgtgcagctcataaaactccaaaagagtgtcctgctatagactatactagacacacacttgatggtgctgcatgtcttctgaatagcaataaatattttcccagcagggttagcataaaggaatcatctgtagcgaaactaggatcagtatgccgtaggatttacagaatattttcacatgcttattttcatcatcggcagatatttgatgaatatgaaaatgaaacatttttgtgtcatcggtttactaagtttgtgatgaaatacaatttgatgtccaaggataacctgattgtaccaattttagaagaggaagtacagaattcagtttctggggaaagtgaagcatgaagggaatcataggaaaaatgtactgatcatataattaacattatgtactgtatatatcattttagacacatcaatcatgtatccatattatagcttctttgtttagtataggtttttgtatgctgggtttgccttttaaaatgggaaatactttttaagttattcataagctgtatattcaccagtgtggcactcatggtttttaaataagattagtattatctgtttataatgcctgttaataaaagaatttacagtttggtaaaattgctgctaaacaatcattggatcacaatcctcatcagacaaacccatctgtaaaaaaaatgagggagagcttgaggtttcacacaagccatttactaaagaggtagaaatgttttctattggttttaccttgagtttagatatcctaaaaaattctgtagtacgtagttttgtcttacctgttaactttccccaattgagataaaagtgttttaaaattctgtttatagtttttgatatgcatatataattatgtgtatatctaaatacaaatgcaaatgaagcattagtaatacttaaataattttactgtgctacataaagtataacatacttggaaaggatttaccgttctgcaacaacgga

SEQ ID NO: 2666 - DNA, 4502 bp, Homo sapiens
  source 1..4502: mol_type = genomic DNA
gggaagtccggatcccgcggcgatccgagcatgagcctggagcgcgagcttcgccagctgagcaaggcgaaagccaaggcgcagagggccgggcagcggcgcgaagaggccgcgctgtgccaccagctgggggagctcctggccggccatggccgctacgccgaggctctggagcagcactggcaggagctgcagcttcgggagcgcgctgacgaccctctgggctgtgccgtggcccaccgcaagatcggagagcgcctggccgagatggaggactacccggctgccttgcagcaccagcaccagtacctggagctggcacattccctgcgcaaccacacggagctgcagagggcctgggccaccatcggccgcacccacctggacatctatgaccactgccagtcgagggatgctttgctgcaggcacaggctgcctttgagaagagcttggctattgtggatgaggagctggaggggacactggcccagggagagctgaatgagatgaggacccgcctctatctcaacctgggcctcacctttgagagcctgcagcagacagccctgtgcaacgattacttcaggaagagcatcttccttgcggagcagaaccacctttacgaggacctattccgcgcccgctacaacctgggcaccatccactggcgcgcgggccagcactcccaggctatgcgctgcttggagggtgcccgggagtgtgcgcacaccatgaggaagcggttcatggagagcgagtgctgcgtggttattgcacaggtcctccaagacctgggagactttttggctgccaagcgagccctgaagaaggcctacaggctgggctcccagaagcctgtgcagagggcagccatctgtcagaacctccagcatgtgctggcagtggtccggctgcagcaacagctggaagaggctgagggcagagaccctcagggtgccatggtcatctgtgagcagctaggggacctcttctccaaggcaggagactttcccagggcagctgaggcttaccagaagcagctgcgttttgctgagctgctggacagaccgggtgctgagcgggccatcatccacgtgtccctggccaccacactgggagacatgaaggaccaccatggggccgtgcgccactatgaggaggaactgaggctgcgcagcggcaacgtgctggaggaggccaagacctggctgaacattgcactgtcccgcgaggaggccggcgatgcctacgagctgctggccccgtgcttccagaaagcgctcagctgtgcccagcaggcccagcgtccccagctgcagaggcaggtcttgcagcatctccataccgtgcagctgaggctgcagccccaggaggcccctgagaccgaaaccagactacgggagctcagtgtagctgaagatgaagatgaggaggaggaggcggaggaggcggcagccacagcggagagcgaagccctggaggccggcgaggtggagctctcagagggcgaggacgacaccgatggcctgaccccgcagctggaggaggacgaggagcttcagggccacctgggccggcggaaggggagcaagtggaaccggcgaaacgacatgggggagaccctgctgcaccgagcctgcatcgagggccagctgcgccgcgtccaggaccttgtgaggcagggccacccccttaaccctcgggactactgtggctggacacctctgcacgaggcctgcaactacgggcatctagaaattgtccgcttcctgctggaccacggggccgcagtggacgacccaggtggccagggctgcgaaggcatcacccccctccacgatgccctcaactgtggccacttcgaggtggctgagctgctgcttgaacggggggcgtccgtcaccctccgcactcgaaagggcctcagcccgctggagacgctgcagcagtgggtgaagctgtaccgcagggacctggacctggagacgcggcagaaggccagggccatggagatgctgctccaggcggctgcctcgggccaagatccccacagctcccaggccttccacaccccaagcagccttctgtttgaccccgagacctctcctcctttgagcccctgcccagaacccccctctaatagcactagactcccagaggcctctcaggcccatgtcagggtctccccagggcaggcggcaccagccatggccaggcctcggaggagcaggcatgggccagccagcagcagcagcagctcagaaggcgaggacagcgcaggccccgcacggccgtcccagaagaggcctcggtgctcggccacagcacaacgggtggcagcctggacgcctggccccgccagcaacagggaagcagccacagccagcaccagccgggcagcctaccaggcagccatccggggtgtgggcagtgctcagagccggctggggcctggcccaccgcggggccacagcaaagcccttgccccccaggcagcgctcatcccggaggaggagtgcctggccggggactggctggagctggacatgcccctgacccgcagccgccggccccgcccccggggcactggagacaaccgcaggcccagtagtacctctgggtcggacagtgaggagagcaggccccgtgcccgagccaagcaggtccgcctgacctgcatgcagagttgcagtgcgccagttaacgcagggcccagcagcctggcttcagaacctccagggagccccagcacccccagggtctcagagcccagtggggacagctctgcggcaggccagcccttgggtccggccccgccccctcccatccgggttcgagttcaagttcaggatcatctcttcctcatccctgtcccacacagcagtgacacccactctgtggcctggctggccgagcaggcggcccagcgctactaccagacctgcgggctgctgcccaggctcaccctacggaaagagggggccctgctggccccacaggacctcatccctgatgtgctgcagagcaatgacgaggtgttggctgaggtgacttcgtgggacctgcccccgttgactgaccgctaccgcagggcctgccagagcctggggcaaggggagcaccaacaggtgctgcaggccgtggagctccagggcttgggcctctcgttcagcgcctgctccctggccctggaccaggcccagcttacacccctgctgcgggccctcaagctgcacacagcactccgggagctgcgcctggcagggaaccggctgggggacaagtgtgtggctgagctggtggctgccctgggcaccatgcccagcctggccctccttgacctctcctccaatcacctgggtcccgaaggcctgcgccagcttgccatggggctcccaggccaagccaccttgcagagtttggaggagctggacttaagcatgaaccccctgggggacggctgtggccagtccctggcctccctcctgcacgcctgccccttactcagcaccctgcgcctgcaggcgtgtggcttcggccccagcttctttctgagccaccagacagcactgggtagtgctttccaagatgctgagcacctgaagaccctgtccctgtcctacaacgccctgggagcccctgccctggccaggaccctgcagagcctgcccgccggcaccctcctgcacttagagctcagctccgtggcagccggcaagggtgattcggacctcatggagcctgtattccgatacctggccaaggaaggctgtgctctagcccacctgaccctgtctgcaaaccacctgggggacaaggctgttagagacctgtgcagatgtctctctctgtgcccctcactcatctcactggatctgtctgccaaccctgagatcagctgtgccagcttggaagagctcctgtccaccctccaaaagcggccccaaggccttagcttccttggcctgtcaggctgcgccgtccagggtcccctgggcctgggcctgtgggacaagatagccgcgcagctccgggaactgcagctgtgcagcagacgcctctgcgctgaggacagggacgccctgcgccagctgcagcccagtcggccgggccccggcgagtgcacgctggaccacggctccaagctcttctttcggcgcctctgaccctggcgctgcctttccccaccctcaccgaagcccctaataaatgaagctgctggccgggcgcggtggctcacgcctgtaatcccaacactttgggaggcccaggcgggcggatcacgaggtcaggagatcgagaccatcctggctaacatggtgaaaccccgtctctactaaaaataccaaaaattagccgggcgtggtggtggaagcctgtagtcccagctactccggaggctgaggcaggagaatggcgtgaacccgggaggcggagcttgcagtgagccgagatcgcaccactgcactccagcctgggcgacagaccgagactccgtctc

SEQ ID NO: 2667 - DNA, 2165 bp, Homo sapiens
  source 1..2165: mol_type = genomic DNA
ggcgctcggagcgggctccgcggcttgcaaggcgcctgcgactcggtcccaggtcggcgggcggcgcacggcgggctcgcgcgggggccccggcgcgccgggcggcgcagtacgcagcgcgcggacccacgccacggccaggagcccagagcagcgcggccacactgcccaggggtcggccctcggccccggcgctcggagcgcggcggctgcctgggctttaatggctgctccgcggagcagcgcctagggctggaaggcggctgcggctcaggaagtcacccgagcaagcctccttcggggccggccgcacccgccgcggcgcgctccatgggggcgcgctccccccgggcggcccgctgacccgggacgccggggcccgctcgctcgccggccgcgcgtcccggccatgaactgagcccgcgggccagccccgcgcctgctccgcccgcgcctttcttctcgcgcctcctccgcccgccgccggcgggcccggctccccgggggctgcggcgccccgggctcggcggcccgcgggccccggggcgcggggcggcggcggcggggggcgcgcggctccgggcgcggcgcctgcaccatgaactaccagcagcagctggccaactcggctgccatccgggccgagatccagcgcttcgagtcggtccaccccaacatctactccatctacgagctgctggagcgcgtggaggagccggtgctgcagaaccagatccgggagcacgtcatcgccatcgaagatgccttcgtgaacagccaggaatggacgctgagtcgatctgtcccggagctcaaagtgggaattgtgggtaacttggccagcggcaagtctgccctggtgcaccggtacctgacgggcacatatgtccaggaggagtctccggaaggtggcaggttcaagaaagagattgtcgttgatggacagagctatctgctgctgatcagagatgaagggggccccccggaggcgcagtttgccatgtgggtggacgctgttatatttgtcttcagcttggaggatgaaataagtttccagaccgtttaccactactacagtcgaatggccaactatcggaacacgagcgagattcctctggttctggtgggaacccaggatgccataagttctgctaacccgagggtcatcgatgacgccagggcgaggaagctctccaacgacctgaaacggtgcacgtactacgagacgtgtgctacatacgggctgaatgtggagagggtcttccaggacgttgcccagaagattgttgccacaaggaagaagcagcagctgtccataggaccctgcaagtcgctacctaattctcccagccattcctccgtctgttccgcgcaggtgtctgccgtgcacatcagccagacaagtaatggaggtgggagtttaagcgactattcctcctccgttccatcgactcccagcaccagccagaaggaacttcggatcgatgttcctcccactgccaacacgcccacgcccgttcgcaagcagtctaagcgccggtccaacctgttcacctctcggaaagggagcgacccagacaaagagaagaaaggcctggagagtcgtgcggacagcattgggagcggccgagccatcccaattaaacagggcctgcccttctttgtccttgcactgacagccagcacttatctcaggcctgctggagcccgtgcccgtcagtcctccccctggccagggccgaggggtggtcagaccagcccgcattgtgctgaaggcccacaatcagcccagctgtccggggccatgatgaattagcggtgggagttaacatagaggtgaactccagatcggccgatagcttgcaggccgctgctgtttgtcctgacttcagcgcatctctgatagacctttgacaccttccaacaaagaggttacaggagggagagctggagaaatggagcgctcctccagaaagttcggcaactcacaaaagaccccttaatttctatagcgggcaattcagtccacaaaggaaggaaatcaatgagcgtttacgctctttctttgaggaacctttttttaaagaaaaaaacatttactggcgctttgcatgttttgggtacaagcagtggtagaaacataaaacattaaaatccaagattga

SEQ ID NO: 2668 - DNA, 1732 bp, Homo sapiens
  source 1..1732: mol_type = genomic DNA
attaaacaatatctggtctcggtggctctgtcattccactgcaggcgtcccaccttcatttgccagctgggatctcttaatgagctagctgtgcacagttcaatagtaaaacccttttagctggtgaaatatgtttgaagaactcactgttggagtgttccatgtgaggcctgcttccactcttgctggcattctcttttcaggatggctgcagctcctccaagttactgttttgttgccttccctccacgtgctaaggatggtctggtggtatttgggaaaaattcagcccggcccagagatgaagtgcaagaggttgtgtatttctcggctgctgatcacgaaccggagagcaaggttgagtgcacttacatttcaatcgaccaagttccaaggacctatgccataatgataagcagacccgcctggctctggggagcagaaatgggagccaatgaacatggagtgtgcatagccaatgaagccatcaacaccagagagccagctgccgagatagaagccttgctggggatggatctggtcaggcttggtttagaaagaggggaaacagctaaagaagccttagatgtcattgtctccttgttggaagaacatggacaaggtgggaattactttgaagatgcaaactcctgccacagcttccaaagtgcatatctgattgtggatcgtgatgaagcctgggtgctcgagaccatagggaagtactgggctgccgagaaagtcacagagggagtgaggtgcatttgcagtcagctttcgctcaccactaagatggatgcagagcatccggaactcaggagttacgctcagagccaaggttggtggacgggagagggcgagttcaatttttccgaagtcttttctccagttgaggatcatctagactgcggtgctggcaaagacagcttagaaaaacaagaagaaagcatcacagtgcagactatgatgaacaccttacgggacaaagccagcggagtgtgcatagactctgagtttttcctcaccacagccagtggagtgtctgtcctgccgcagaatagaagctctccgtgcattcactacttcactggaacccctgatccttccaggtccatattcaagcctttcatctttgttgatgacgtaaaacttgtccccaaaacacagtctccctgttttggggatgacgaccctgccaaaaaggagcctcggttccaggagaaaccagaccgccggcatgagctgtacaaagcccacgagtgggcacgtgccatcatcgaaagtgaccaggagcaaggtcgcaagctgaggagcaccatgctggagctggagaagcaaggcctggaagccatggaagaaatcctgaccagctccgagccactggaccctgcggaagtgggggaccttttctatgactgtgttgacacggagattaagttctttaagtgaagtaagcgttccctttccccttcttatttaagacttcccaccttactaaattaccagcaaaacaaaccactctcctgtttgagtaaaatgagaaagttaatatgtggcctccttttctgaagccagatcaaactgttaccttgtgttccaccttgaatctcacagcgtccccttctgcaatgtaggtctccttcctgtgcagtgtaacatgtatcccgttgcctgttgttcggttgtgtgactaattgtggattttaagctgctattattgtatttcagtggc

SEQ ID NO: 2669 - DNA, 888 bp, Homo sapiens
  source 1..888: mol_type = genomic DNA
ccaggcaggcccagaagctgggcagcctctgccgggttccgggaaaaggagctcctgctgccactgctcttccggagcctgcagcatggggcccctgccgcgcaccgtggagctcttctatgacgtgctgtccccctactcctggctgggcttcgagatcctgtgccggtatcagaatatctggaacatcaacctgcagttgcggcccagcctcataacagggatcatgaaagacagtggaaacaagcctccaggtctgcttccccgcaaaggactatacatggcaaatgacttaaagctcctgagacaccatctccagattcccatccacttccccaaggatttcttgtctgtgatgcttgaaaaaggaagtttgtctgccatgcgtttcctcaccgccgtgaacttggagcatccagagatgctggagaaagcgtcccgggagctgtggatgcgcgtctggtcaagggctgcagagaaggctggtatgtctgcagaacaagcccagggacttctggaaaagatcgcaacgccaaaggtgaagaaccagctcaaggagaccactgaggcagcctgcagatacggagcctttgggctgcccatcaccgtggcccatgtggatggccaaacccacatgttatttggctctgaccggatggagctgctggcgcacctgctgggagagaagtggatgggccctatacctccagccgtgaatgccagactttaagattgcccggaggaagcaaactcttcgtataaaaaaagcaggccatctgcttaacccttggctccaccataaggcactgggactcggatttctctatctgatagaggtattttctgtggccctgggagctgtctgtctttcccctacccccaaggatg

SEQ ID NO: 2670 - DNA, 4813 bp, Homo sapiens
  source 1..4813: mol_type = genomic DNA
agactaccggcggcgacgaccacaggagcatggcggacaccgacctgttcatggaatgtgaggaggaggagttggagccatggcagaaaatcagtgatgtcattgaggactctgtagttgaagattataattcagtggataaaactaccacagtttctgtgagccagcagccagtctcggctccagtgcccatcgctgcccatgcttctgttgctgggcacctctctacatccaccaccgttagtagcagcggggcacagaacagcgacagtacaaagaagactcttgtcacactaattgccaacaacaatgctggcaatcctttggtccagcaaggtggacagccactcatcctgacccagaatccagccccaggtctgggcacaatggttactcaaccagtattgaggcctgttcaggtcatgcagaatgccaatcatgtgactagttcccctgtggcctcacaaccaatatttatcactacgcagggatttcctgtaaggaatgtccggcctgtacaaaatgcaatgaatcaggttgggattgtgctgaacgtacagcaaggccaaacggttagaccaattacactagttccagccccaggtacccagtttgttaagccgacagttggagttccacaagtgttctcccagatgacccctgtgaggccaggctccacaatgcctgtgaggcccaccaccaacaccttcaccaccgtcatcccggccactcttaccattcgaagcaccgtcccacagtcccagtcccagcagaccaagtccactcccagcacttctaccactcccactgccacacagccaacctcactggggcaactagctgttcagtctccaggccagtcaaaccagaccacgaatcccaagctagtgagcattgccagctttgtcactgtgaagcgacctggtgttacaggcgaaaatagcaatgaagtggccaaattggtgaatacccttaacaccatcccttccctgggccagagtcctgggccagtggtggtgtccaacaacagctctgctcatggctctcaaagaaccagcggacctgagtcttcaatgaaagtgacctcttccatcccagtatttgacctccaggatggtggacggaaaatatgtccacgatgtaatgctcaatttcgtgttactgaagctttgagaggtcacatgtgttactgttgcccagaaatggttgaataccagaagaaaggaaagtccctggattcagaacccagtgtcccatcagcagcaaagcccccatcccctgagaaaacagctcctgttgcttccacaccctcttctacacctattcctgctctgtcaccgcctaccaaagtaccagaaccaaatgagaacgtgggcgatgccgtccagaccaaactcattatgcttgtagatgacttctactatggacgggatggtggcaaagtagcccagctcacaaatttccctaaggtcgccacatctttccgatgcccacattgtaccaaaaggctaaaaaacaatattcgattcatgaaccatatgaaacaccacgtagaactcgatcagcagaacggtgaggtagatggtcacactatctgccagcactgttaccgccagttttccactcccttccagcttcagtgccacttggaaaatgttcatagtccctatgaatctactaccaagtgcaagatctgtgaatgggcgtttgaaagtgagccactatttctccagcatatgaaggatactcataagcctggagagatgccttatgtttgccaggtgtgtcaatatcgctcctcactctactctgaggtagatgtccattttcggatgatccatgaggatacccggcatctgctctgcccttattgcctgaaggtcttcaaaaatggcaatgcattccaacagcattacatgaggcaccagaagagaaatgtttatcactgcaacaaatgccggctgcagtttctctttgccaaggacaaaattgaacacaagcttcaacaccataaaaccttccgtaaacccaagcagctggagggcttgaaaccaggcaccaaggtgacaatccgggcttcccgagggcagccacgaactgttcctgtatcctctaatgatacacctcccagcgccttgcaggaggcagcaccgctgacctcctcaatggaccctctgcctgtcttcctttatccccctgtccagcgcagcatccagaagagagctgttaggaaaatgagtgtcatgggccggcagacatgcctggagtgcagcttcgagatcccagacttccctaatcatttccctacttacgtacactgctctctgtgtcgctatagcacctgctgttctcgagcttatgccaaccacatgatcaacaatcatgttccacggaagagccccaagtatttggctttgtttaaaaattctgtgagtggaatcaagctggcctgcacttcatgtacctttgttacctctgtgggcgatgctatggccaagcatttggtattcaacccctctcacagatccagcagcatcctgccacggggactcacttggatagctcactcaaggcatggccagactcgtgaccgagtgcatgaccggaacgtgaagaatatgtaccctcctccttccttccccactaacaaagctgccactgtgaaatctgcgggggccaccccagctgagcctgaagagctactaactcccttagccccagcactcccatcaccagcctcaactgcaaccccaccaccaacccccactcacccgcaggctttagcccttccaccgctggctacagagggagccgaatgtctgaatgttgatgatcaggatgaagggagcccagtcacccaagaacctgagctagcatcaggtggtggtggtagtggtggagttggcaaaaaggagcagctgtctgtgaagaagcttcgagtagtactgtttgctctatgctgcaatacagaacaggcagctgaacacttccgaaatccccagcgacgtattcgccgttggcttcgacgtttccaggcctcccagggggagaatctagagggcaaatatctgagctttgaggcagaagagaaactggctgagtgggtgctaacccagcgcgaacaacagctacctgtaaatgaggagaccttgttccagaaggccaccaaaataggacgttctttggaaggggggtttaagatctcctatgagtgggctgtgcgtttcatgctgcggcaccacctgactccccatgcccggcgagctgtggcccacaccctacctaaggatgtagcagagaatgcaggactcttcattgattttgtacaacggcagattcacaaccaggacttacccttgtctatgattgtggctattgatgagatctctttgttcctggatacagaggtgctgagcagtgatgatcgaaaggagaatgccctgcagacagtgggcacaggggaaccttggtgtgatgtagtcctagccattctggcagatggcactgtccttcccaccctggttttctacagagggcagatggatcagcctgctaacatgccagactccatattgctagaggcaaaggagagtggctacagtgatgacgagatcatggagctgtggtcaactcgagtgtggcagaagcacacagcttgccagcgcagcaaaggcatgcttgtgatggactgtcatcgcactcacttgtcagaagaggtactggctatgcttagtgcctctagcactttgcctgcagtggtcccagcaggctgtagctccaaaattcagccattagatgtatgcatcaaaagaactgtcaagaacttcctgcataaaaaatggaaggaacaggctcgggaaatggcagatactgcatgtgattctgatgtcctgcttcagctggtgcttgtctggctgggtgaagtgctaggtgtcattggggactgtccagagctagttcagcgctccttcctggtggctagtgttctgcctggccccgatggcaacattaactcacctacaagaaatgctgacatgcaggaggagctaattgcctccctagaggagcaactgaagctgagtggggaacattctgagtcttccactccacgacccagatcatctcctgaagagacaattgagcctgaaagtcttcaccagctctttgagggtgaaagtgagaccgagtctttctatggctttgaagaagctgacctagatctgatggagatttgagtgttggggtcatgagggggtgtggagtgagggtgggaacatgtgagggagggtaaaggggcttagggaaaagggggcataccaggtggggtatttggtttctattttttaattttataccaccactcccccctgaagttgacttacacttccctgtggatttgtggattaattaggaaaaccaatagtaatcacgtctgagccaaggagctggcccattggtcattcacttctgctaaaaacaggtttttgtgactttttttttttttaaatttaaatcactgtgtttggtatttttctgacaaaattaagaaaaagaaaaaaaattatttgtgggcaaatgttaaatttttttgtttccccttttacctcaattgtatcatagtactgggtttttttgtttgttttattgtgtggccaatgtctttgggcatgatgctatctaatcattgttaatgtgagaacatttctgaagatgggaaagacaaattatgtagctcacaaactggtttattatatatatggataaaaaacttttttcattgtggtcttaacacttttatataaaaatgaaaatg

SEQ ID NO: 2671 - DNA, 1576 bp, Homo sapiens
  source 1..1576: mol_type = genomic DNA
acattttcaaggaattcttgagaggttcttggagagattctgggagccaaacactccattgggatcctagctggaatataaagaatggcttatcagtggagaccatcgacagttgagaaaagaagaagcccaaaaagtacaagaatgaaaatcgagagtttttagagaacaacttgtaatggagccttcatctcttgagctgccggctgacacagtgcagcgcattgcggctgaactcaaatgccacccaacggatgagagggtggctctccacctagatgaggaagataagctgaggcacttcagggagtgcttttatattcccaaaatacaggatctgcctccagttgatttatcattagtgaataaagatgaaaatgccatctatttcttgggaaattctcttggccttcaaccaaaaatggttaaaacatatcttgaagaagaactagataagtgggccaaaatagcagcctatggtcatgaagtggggaagcgtccttggattacaggagatgagagtattgtaggccttatgaaggacattgtaggagccaatgagaaagaaatagccctaatgaatgctttgactgtaaatttacatcttctaatgttatcattttttaagcctacgccaaaacgatataaaattcttctagaagccaaagccttcccttctgatcattatgctattgagtcacaactacaacttcacggacttaacattgaagaaagtatgcggatgataaagccaagagagggggaagaaaccttaagaatagaggatatccttgaagtaattgagaaggaaggagactcaattgcagtgatcctgttcagtggggtgcatttttacactggacagcactttaatattcctgccatcacaaaagctggacaagcgaagggttgttatgttggctttgatctagcacatgcagttggaaatgttgaactctacttacatgactggggagttgattttgcctgctggtgttcctacaagtatttaaatgcaggagcaggaggaattgctggtgccttcattcatgaaaagcatgcccatacgattaaacctgcattagtgggatggtttggccatgaactcagcaccagatttaagatggataacaaactgcagttaatccctggggtctgtggattccgaatttcaaatcctcccattttgttggtctgttccttgcatgctagtttagagatctttaagcaagcgacaatgaaggcattgcggaaaaaatctgttttgctaactggctatctggaatacctgatcaagcataactatggcaaagataaagcagcaaccaagaaaccagttgtgaacataattactccgtctcatgtagaggagcgggggtgccagctaacaataacattttctgttccaaacaaagatgttttccaagaactagaaaaaagaggagtggtttgtgacaagcggaatccaaatggcattcgagtggctccagttcctctctataattctttccatgatgtttataaatttaccaatctgctcacttctatacttgactctgcagaaacaaaaaattag

SEQ ID NO: 2672 - DNA, 6138 bp, Homo sapiens
  source 1..6138: mol_type = genomic DNA
gcgcgtttccattttaaaccgccgcccgccgcccgccacccgccacccttcggccgcagccggtgcagctgtccgcgcgtcccggagcccagggagtggcggaggctgcggaaccgccgagctgtgcagccggagcgggaggatgcgcacgggccccgcgtcgtagacaatgaagccgcgggcgccgccgcctgccctgggccctgcgcaccgcggccgcacctgccggcgagagcgctctagcgcctgaccggccgcctcgcttggccccgccggcccatggctcggcgccccgggcccggaccccggcactcgggcggcgcggcgcacgggccggcgggtgccaggggcgccgtccccgcagcctgagtgcggccctcgcggtcagcggggggcgtgggccacactcccggcccgcctgccctccccgcttggcccggcgccctcccggcccgcgggctcgctggatgcggcggggccccagcgcgcgggcgacatgtacttgttggacggcagtggcgagcccgcgtcgccacccgcggacgcgatgccgcgcgggacgccccccagaaagactgtctaccgcatctccgtgaccatggtcaggaaggagcagctggccgcgccgggctccggcggcccggacccacgcccggttcggcggccccggcccgcgcgctccccggacgcgcccgggaggcttgaggaggaggccgaggaggcggagggcgccgaggaaccggagggtccccggccgcgcgcttgggatttccgcaccttccgcacccgcagcaccgggcagctggaactggggcggctccggccgtgcgcacgcggcctggaacccgcggacctggccggcagcgccccggccgaggaggagggacgcggctcgcccgcgtccggcagccccgacgtggagggggcccgggccgcgcccctgcggcggagcctgagcttcaggcactggagcgggcctgaggcgccgcaaggccggacactgggcggcggaaggcgccacagcagctccgggagcctggcctgggcgccgtgcgacgaggccgcggccgggaccaccctggagcccgcgaccgccacgcagcccgcctcggagaagcgcaacaccctggacgtgggcgaggtgctcagcaagaacgacgcgctctcggacctggagcgttgggaacgcagtaagagcaagaaccgcacgctggacaacagcgacctgcagcggctggagcgcgcgcgggcggcggccggggccggcgcggcctcggagcaccggctgctgcgcttcttcagcggcatcttcgcgcgcagggacgggggcccgggcggcgggccctcgccacggagcggagcctcgcggccacgcggctacttcagcctgcggcgggccccggccgaagcgcactcgtccagcgccgagagcatcgacggctccccgcgcagagatgccttcgtgaacagccaggaatggacgctgagtcgatctgtcccggagctcaaagtgggaattgtgggtaacttggccagcggcaagtctgccctggtgcaccggtacctgacgggcacatatgtccaggaggagtctccggaaggtggcaggttcaagaaagagattgtcgttgatggacagagctatctgctgctgatcagagatgaagggggccccccggaggcgcagtttgccatgtgggtggacgctgttatatttgtcttcagcttggaggatgaaataagtttccagaccgtttaccactactacagtcgaatggccaactatcggaacacgagcgagattcctctggttctggtgggaacccaggatgccataagttctgctaacccgagggtcatcgatgacgccagggcgaggaagctctccaacgacctgaaacggtgcacgtactacgagacgtgtgctacatacgggctgaatgtggagagggtcttccaggacgttgcccagaagattgttgccacaaggaagaagcagcagctgtccataggaccctgcaagtcgctacctaattctcccagccattcctccgtctgttccgcgcaggtgtctgccgtgcacatcagccagacaagtaatggaggtgggagtttaagcgactattcctcctccgttccatcgactcccagcaccagccagaaggaacttcggatcgatgttcctcccactgccaacacgcccacgcccgttcgcaagcagtctaagcgccggtccaacctgttcacctctcggaaagggagcgacccagacaaagagaagaaaggcctggagagtcgtgcggacagcattgggagcggccgagccatcccaattaaacagggcatgctgttgaagcgaagtggcaaatcgttgaataaagagtggaaaaagaaatatgtcaccctgtgtgacaatggcgtgctgacctatcatcccagtttacatgattacatgcagaatgttcatggtaaggagattgaccttctgagaaccactgtgaaagtcccagggaagaggccaccccgagccacgtcagcctgcgcacccatctccagccctaaaaccaatggcctatccaaggacatgagcagtttacacatctcacccaattcagacacagggctgggtgactccgtatgctccagccccagtatctccagcaccaccagccccaagctcgacccgcccccctcccctcacgccaacagaaagaagcaccgaaggaagaaaagcactagcaacttcaaagccgacggcctgtccggcactgctgaagaacaagaagaaaattttgagtttatcattgtgtccctcactggccaaacatggcactttgaagccacgacgtatgaggagcgggacgcctgggtccaagccatcgagagccagatcctggccagcctgcagtcgtgcgagagcagcaagaacaagtcccggctgacgagccagagcgaggccatggccctgcagtcgatccggaacatgcgcgggaactcccactgtgtggactgcgagacccagaatcccaactgggccagtttgaacttgggagccctcatgtgcatcgaatgctcagggatccaccggaatcttggcacccacctttcccgagtccgatctctggacctggatgactggccagtcgagctcatcaaggtgatgtcatccatcgggaacgagctagccaacagcgtctgggaagagagcagccaggggcggacgaaaccatcggtagactccacaagggaagagaaggaacggtggatccgtgccaagtacgagcagaagctcttcctggccccgctgccctgcacggagctgtccctgggccagcacctgctgcgggccaccgccgacgaggacctgcggacggccatcctgctgctggcacacggctcccgggacgaggtgaacgagacctgcggggagggagacggccgcacggcgctgcatctggcctgccgcaaggggaatgtggtcctggcgcagctcctgatctggtacggagtggacgtcacggcccgagatgcccacgggaacacagctctggcctacgcccggcaggcctccagccaggagtgcatcgacgtgctgctgcagtacggctgccccgacgagcgcttcgtgctcatggccacccctaacctgtccaggagaaacaataaccggaacaacagcagtgggagggtgcccaccatcatctgaggaacagccgtgcccgcctgctcgccgcacctgggacgcggcagcctcgccgcattctcgctcagaagtcgcagcacgtgagtcccgtcgcatcccctccctcttcctggtggccacctccctcccgcccacccactctcaccccaaacaaaatcacaaaacctggacatccctcaaggggcgaagaggcggccgggagactgcagaagtggctccttttcataaactcccctaaaccacacacaggagagagcgacgggcctcggccctttgatgatagcacatggcgcaggacccttgtcctggtggcacaagggatggggacgcgagggggaggggaggcgaggaacaaggagaaggggcaactttccttaactggcagttgagcacatagtacatttcccctctaccaaacggaacacttggattccatctcttctctgaggagctcgacggcataaatcagaagcaagcacagagtttgtcaggtttgaagcccctatgatggtgtgtgtcaaatcagttgtagctaatctgtccagggagaatactggcttcattacacttgtacagccgagttcttcccgcattactgctgtttaatagaacgtgattagtcatcgccgagaagaaagcatattagccgaggaggtagtcacgcggcacgcgccggtgattgccacgatgtgattgcaatactcttagaagcaccatattatcccagacatgttctttcaagcccttggagccctctctaaattcactgtcatcatttagtatctgtttaatttttcagtccaaagagaggaaatcagtcgctgagtattatttgactccggtctccttggtgcaaaaacaaaatgggaaaaataaataagaataactcagaaactcaaaaggaaaccacaaattcagctaataatagcatttcgagtatatttcgtaaactaaggaaatacacaaaaggctgttttttccgactgtaagagatatttgatgtccttttgccgaggtggatgtgttagtctcaggccctcctggaccacgttgcccaagtcacacaggcttctgtgttatgtatttagataagatgtgtgaaaatatatttgaataaaagaagttcataaatatgcattgatttttgtacagacaaatggcacctctcttaatttataaattgaactggatgtgaactaataatgtgcaactagttgagataagagggttacagatcattgtacatggaaaatattcccagcagtaaacacttccattaatgtgatctacggcttttgaaaaggagcatctcagaataagatggtggtacaatttgcttattaaaattgagaaagaaaaaaaaagacacactggagtatattagaaaggaaaaagaaggaatgtggtctctcatgattgaaagcatgatttagatcggatacggcttttgctaaccaaggaccaagggactctggcaagatggggtggttttccgaatgccagaccgaggtgccttacgaaggcagctgccaatggttctgtggcacagactggctcctgagaacccagacgaccttgacctggcagcccggccctccacgctagtacctcgcctgattttccatcgttgcggtatccagccgcttcagacgtccgccgccttcagtggtggtagtcaaatgtagtcaaccaaaccacagcatcccttaggttaaaagcaaacggggcagctttgcctagagctcattgacagtgtgatggggggagaagggttgtcacaatggaagatgaggacactagactcatgtagcacagaaacatgaagccacacgcaccggcagcctccggggtgttcctcgctctctcgtatgttaaaccttatattttataagagtttttcctcttatttcactttttaaaaaaaattaaagtaggtggggaaaaaaataaagctttacacagaatttatatgtgggtaagtgtttcatggaaatttctaatcttaacgaagctaagtggagctcactcgtatccaaaagtataacaggtgcagaagccacaagtctgagaaccttgacgacagttccatcgtcctgccatttgatttttcagtctgcgtttcatcactgtgtagctattgtaaatgtgaatagaaaaaaacaggtcattgcctatttttgaagaacgcgttggtgttcgagtccactagacacactcgctccacacagccttcaccgtagactctgtagtggacacagatatagcataaatgaaattgttaaattatttcattgtagttaattcccactataggaatgctttatcatagtgaagtttcttttgagaagaaacggaactccttgaggcttctctttgggatgtatatgagcgtgtacatattattctatgtgtttataatataatattttcccaaa

SEQ ID NO: 2673 - DNA, 3383 bp, Homo sapiens
  source 1..3383: mol_type = genomic DNA
gacttccggtgctggaggagggggccggcggcgagggactccaggaggacgcgtccaacttcgagaccggcgggggccggctccgctcttccaacccctccatgtgtgaagagggcggacgacgcagcgggggaagaaaaataagctagtctaggacaagtgtccaggcgacgtggaacccagtaagggaataaagaagactggaaacgtctctcccctcccctatcccagtccctcaccctaatccgcgcgcaatagaaaaggcggaagcgcctgtccacgatcagggcggggcaaggggaagaaatctcgcgataggagagcggtccgggcgggggtggcacctctccctcctcctggcgttagttccggtcgcagaggagacaccgccgcagttgccggtacatcggggatttctggctctttcctcttcgccttaaattcgggtgtcttttatgaataatcaaaagcagcaaaagccaacgctatcaggccagcgttttaaaactagaaaaagagatgaaaaagagaggtttgaccctactcagtttcaagactgtattattcaaggcttaactgaaaccggtactgatttggaagcagtagctaagtttcttgatgcttctggagcaaaacttgattaccgtcgatatgcagaaacactctttgacattctggtggctggtggaatgctggccccaggtggtacactggcagatgacatgatgcgtacagatgtctgcgtgtttgcagcccaagaagatctagagaccatgcaagcatttgctcaggtttttaacaagttaatcaggcgctacaaatacctggagaaaggttttgaagatgaagtaaaaaagctgctgctgttcttgaagggtttttcagagtcggagaggaacaagctagctatgttgactggtgttcttctggctaatggaacacttaatgcatccattcttaatagcctttataatgaaaatttggttaaagaaggagtttcagcagcttttgctgtgaagctctttaaatcatggataaatgaaaaagatatcaatgcagtagctgcaagtcttcggaaagtcagcatggataacagactgatggaactctttcctgccaataagcaaagtgttgaacacttcacaaaatattttactgaggcaggcttgaaagagctttcagaatatgttcggaatcagcaaaccatcggagctcgtaaggagctccagaaagaacttcaagaacagatgtcccgtggtgatccatttaaggatataattttatatgtcaaggaggagatgaaaaaaaacaacatcccagagccagttgtcatcggaatagtctggtcaagtgtaatgagcactgtggaatggaacaaaaaagaggagcttgtagcagagcaagccatcaagcacttgaagcaatacagccctctacttgctgcctttactactcaaggtcagtctgagctgactctgttactgaagattcaggagtattgctatgacaacattcatttcatgaaagccttccagaaaatagtggtgcttttttataaagctgaagtcctgagcgaggagcccattttgaagtggtataaagatgcacatgttgcaaaggggaagagtgttttccttgagcaaatgaaaaagtttgtagaatggctcaaaaatgctgaagaagaatctgaatctgaagctgaagaaggtgactgaattttgaaactacaccctcagtaaagcaaacaggagttgtagataaaatgtcatgtctcatgtgtcctggttcttacatcttcctacctccctgtatcaagcatgatataagggctttcatggcaaattttattttaactgtttctatggttgctggaaatgttgggtttagtttctaaaaccatgttttaagtagctacaggagctatagatttgaatctaatgttgcattagtcttttcagttatcttctacctcctgtattttctactgtaataatgtaatttaaggccttccacaatgaacagttcactttattccctgggttttctataaacagttttaaggatatgatttggttaaaaaataatttgttataaaaattctgtttgcaaattaaactggaaaagtatccagagtctcaaaaggcaatgatttgtgagataatatggcatgcccggagccctgctcatcaatgaaaaacccatatgtaataatcgaattcatttaacatgaatcttgagtacgtggaccattgcttgcatgttaactttttgttttgttttgttttgttttgttttgcatttttaactccagatatcctaaagctcaattgtttggtctctggttttcatccttagagaagccatggagaacagacttgaaaagtttaggaaatcataatgtggcagaggtggtgggaagaagaaagttgagctttttccccttgagaaacttctgcatttagtttctatctttccaggcaaaacaaatgggtattcttttcatacaaccattttcaaatgaaccttagaaaagtcttaacatttaaggtattttatgcacagaatacacttagattgataggaaagaactcgtaatggagtttgagtaaagaaaatgactgatgtactaaacccagtaaaaattgttgaaaatgttaaaggtcagcatgttctaattgggaatctagatatagcttagatttcctattggcttagagtatttgctataacaaatgaagtgcaatgacaattatatattcctactcggtcatactggactggcttcgttctcttaatatactcagtaatgactcaagcctctggctattaacataccctagttgccgttttttaattgccatgagccaaatacttcttggtatacaattgatccatttattttaatggctgccttttcattttcatcttttcttgctgctacccatctatgtatgtagtcattggggggaaaatgtagccacattttttatgggaagactttgtgttaaaagtgaacattttgaaggtttttaactggtgaaactagcctggaataatgccaccagagactgagtggaaatcgccccttttgaaggtgccattcttatgagccaaaagtttgtcatttaaaagttcattttgagggaataacatgtaatataatttgaaataaaggtatagtaaccttaaaaagaacattataactgattgttgtgaatggggtgaatttgttaaaatgagtaactttgataaagtttttcatgcacaggcaaaatgtattcactagatttctacgtagtgatctgcttttactttgtaatttgtagttctcaaaagacttttttttaaaaaaataaagtccatacttacacttaggctttata

SEQ ID NO: 2674 - DNA, 2901 bp, Homo sapiens
  source 1..2901: mol_type = genomic DNA
tgaggaggcgactgactgagcagcgcacccggggagcaaggaggcgcggtgaactgagcggcccctgagctgacagatacactgcgcagctggaacggcgagcgagccgacgggcgagtgaggggcgcagccatgatcacctcggccgctggaattatttctcttctggatgaagatgaaccacagcttaaggaatttgcactacacaaattgaatgcagttgttaatgacttctgggcagaaatttccgagtccgtagacaaaatagaggttttatacgaagatgaaggtttccggagtcggcagtttgcagccttagtggcatctaaagtattttatcacctgggggcttttgaggagtctctgaattatgctcttggagcaggggacctcttcaatgtcaatgataactctgaatatgtggaaactattatagcaaaatgcattgatcactacaccaaacaatgtgtggaaaatgcagatttgcctgaaggagaaaaaaaaccaattgaccagagattggaaggcatcgtaaataaaatgttccagcgatgtctagatgatcacaagtataaacaggctattggcattgctctggagacacgaagactggacgtctttgaaaagaccatactggagtcgaatgatgtcccaggaatgttagcttatagccttaagctctgcatgtctttaatgcagaataaacagtttcggaataaagtactaagagttctagttaaaatctacatgaacttggagaaacctgatttcatcaatgtttgtcagtgcttaattttcttagatgatcctcaggctgtgagtgatatcttagagaaactggtaaaggaagacaacctcctgatggcatatcagatttgttttgatttgtatgaaagtgctagccagcagtttttgtcatctgtaatccagaatcttcgaactgttggcacccctattgcttctgtgcctggatccactaatacgggtactgttccgggatcagagaaagacagtgactcgatggaaacagaagaaaagacaagcagtgcatttgtaggaaagacaccagaagccagtccagagcctaaggaccagactttgaaaatgattaaaattttaagtggtgaaatggctattgagttacatctgcagttcttaatacgaaacaataatacagacctcatgattctaaaaaacacaaaggatgcagtacggaattctgtatgtcatactgcaaccgttatagcaaactcttttatgcactgtgggacaaccagtgaccagtttcttagagataatttggaatggttagccagagccactaactgggcaaaatttactgctacagccagtttgggtgtaattcataagggtcatgaaaaagaagcattacagttaatggcaacataccttcccaaggatacttctccaggatcagcctatcaggaaggtggaggtctctatgcactaggtcttattcatgccaatcatggtggtgatataattgactatctgcttaatcagcttaagaacgccagcaatgatatcgttagacacggtggcagtctgggccttggtttggcagccatgggaactgcacgtcaagatgtttatgatttgctaaaaacaaacctttatcaggatgatgcagtaacaggggaagcagctggcctggccctaggtttggttatgttgggctctaaaaatgctcaggctattgaggacatggttggttatgcacaagaaactcaacatgagaagattctgcgtggtcttgcagttggcatagctttagtaatgtatgggaggatggaagaggctgatgctctcattgaatctctctgtcgtgacaaggacccaattcttcgaaggtctggaatgtatactgtagccatggcttattgtggctctggtaacaacaaagcaattcgacgcctgctacatgttgctgtaagtgatgttaatgatgatgtcaggagggcagcagtagaatcacttgggttcattctattcagaacccctgaacagtgcccaagtgttgtctctttgttgtcagagagttacaaccctcatgtgcgctacggagctgcaatggccttggggatatgctgtgctggtacaggaaacaaggaagccattaatttgctagaaccaatgacaaacgaccccgtgaactacgtgaggcaaggggcactcatagcttcagctctcatcatgatccagcagactgaaatcacttgtccaaaggtgaatcagttcagacagctgtattccaaagtcatcaatgataagcatgatgatgtcatggccaagtttggcgctattctggcccagggcatactggatgcaggtggtcataatgtcacaatctccttgcagtccaggactgggcatactcatatgccttctgtggttggcgtccttgtatttacccagttttggttctggtttcctctttcacacttcctgtcattggcttatacccctacctgtgtcattggccttaacaaggacttaaaggtttctactgctgtattatctataactgccaaggctaaaaagaaggaaaaagaaaaggaaaaaaaggaggaggagaaaatggaagtggatgaggcagagaaaaaggaggaaaaagagaagaaaaaagaacctgagccaaacttccagttattggataacccagcccgagttatgcctgcccagcttaaggtcctaaccatgccggagacctgtagataccagcctttcaaaccactctctattggaggcatcatcattctgaaggataccagtgaagacattgaggagctggtggaacctgtggcagcacatggcccaaaaatcgaggaggaggaacaagagccagaacccccagaaccatttgagtatattgatgattaa

SEQ ID NO: 2675 - DNA, 770 bp, Homo sapiens
  source 1..770: mol_type = genomic DNA
ctttccaacttggacgctgcagaatggctcccgcaaagaagggtggcgagaagaaaaagggccgttctgccatcaacgaagtggtaacccgagaatacaccatcaacattcacaagcgcatccatggagtgggcttcaagaagcgtgcacctcgggcactcaaagagattcggaaatttgccatgaaggagatgggaactccagatgtgcgcattgacaccaggctcaacaaagctgtctgggccaaaggaataaggaatgtgccataccgaatccgtgtgcggctgtccagaaaacgtaatgaggatgaagattcaccaaataagctatatactttggttacctatgtacctgttaccactttcaaaaattgtcaccatcagtgagaaaccgaacaagaagaggaaagcaaatggcattttcttctctacttggtgaaaagtcattatagaggattcgaacggttccaatgctcgcaattctacttcaagcatgtgctcattctacatatcaacccctttttcactgacaaatgtaatgttgacaatctaggctaatgggactagattttgaatccaatcaacactttttcatataaagttttcagaataacaaagctttccctcattcatacagatattgctgtactaatctataattatgttttagaattcaaattataacactgactaaacatcactaatgaaacatttgtgacctccttttttccgaagtttaatttttgctttgaattcatattttatcagtat

SEQ ID NO: 2676 - DNA, 1058 bp, Homo sapiens
  source 1..1058: mol_type = genomic DNA
tcgcggcggtggctttgtgccacttttcccagggcttgggcatcattctggacccatgttcggtgaaccggttactctcagagctgctttcgggcgcagctcctgctgcagccagggcccgttttaagagaggcttccaggtccagccctcccgctgcagcctgcagggagcgagccggcctgtcccgatgacatagacactaggtttttacagcaattctctgatgaccttgatatggtagaacgctgtgtatttcaagagtaagctctcgtttgaggagactaacaattcctgttttcgccagtgccacctgtgatatatgtgaagttcctgaaatacctaagtccaagttacagctctgtcatattctactgattatttgttcctgtacctgtacaagatttcttcttgaatggcaacctaaatgccagtccaaagaggcccccaatagacttgttcacccttcatgtcctcaactctggggaagttaagtaatcaagttgaagaaacacttccactacttaaaaaggtacctgcaaattactttcacatttgttcagctatcctaatgggattttcacttagtaaatctgctactcaggtatctgctatacatatggattcaaaagtggatgatcacttaatacgagggactgaaaaaagcaggttggaaccagcgactcagttatttcaaaacaccaagaaaataagattagaagacacaaatcaagaaaactttacaaggattgaagggactggcacaggatctctttctgggaaagccttgggttcagtggtatatgtcaaagaaagtgatggactagaaatgacagatgtggaatgaagcaatttgtacgtattaccaaagaaaccaaaaactgcctttgactaaggggggtgttgaaagagaacttaaccttattaggaaaccctgacaaaatgatggaagactattgccttattttgcactatttgtgaatcatcttacactgcatttttttatgatgcttattcaaaaggcagttgctttagggtgaaaaagccttccaagattcaa

SEQ ID NO: 2677 - DNA, 1500 bp, Homo sapiens
  source 1..1500: mol_type = genomic DNA
atgtctactccttctggaatatccacctggctcagcctgcctgtttcgactcctgcctccatcacatccatcagagtgacccagaagtcctctggcccctgggccttcagcagctgcacctacgtgagtgggcctggcgtctgcatcagctccttgagctgctcccgagtggggagcagcagctttcggggtggcctgggtggaggctatggtggggccagtggcatgggaggcatcatcgccatcatggtcaaccagagcctgttgagcccccttaacctggaggtggaccccaacatccaggccgtgtgtacccaggagaaggagcagatcaagaccctcaacaacaagtttgcctccttcatcgacaaggtatggttcctggagcagcagaacaaggtgctggagaccaagtggagcctcctgcagcagcagaagatggctcggagtaacatggacaacatgttggagagctacatcaacaaccttaggcggcagctggagactctgggccaggagaagctgaagctggaagcagagcttggcaacatgcaggggctgggggaggacttcaagaacaagtatgaggatgagatcaataagcatacggaggtggagaatgaatttgtcctcatcaagaaggatgttgatgaagcttacatgaacaaggcagaactggagtccctcctggaagggctgactgacgagatcaacttcctcaggcagctgtatgaagaggagatccgggagctgcagtcccagatctccgacatgtctatggtgctgtccatggactacagctgctctcgggacatggacagcatcatccctgaggtcaaggtgcagtatgaggagattgccaactgcagccgggctgaggctgagagcatgtaccagatcaagtatgaggagctgcagacgctggctgggaagtacggggatgacctaagccgcacaaagactgagatctccgagatgaaccggaacatcagctggctccaggctgagaccgagggcctcaaaggccagagggcttccctggaggccgccatcacagatgccgagcagcgtggggagctggctgttaaggatgccaacgccaagctgtccgagctggaggccgccctgcagcgggccaagcaggacatgatggggcagctgcgtgagtaccaggagctgatgaacgtcgggcttaccctggacatcgagattgccacctacaggaagctgctggagggcgaggagagccggctggaatctgggatgcagaacgtgagtatccatacgaagaccaccagcagctatgcaggtgggctgagctcggcctatgggggcctcacaagccccggcatcatctaccgcctgggctccagctttggctctgccgcgggctccagctccttcagccgcaccagctccaccagggccgtggttgtgaggaagatcgagacccatgatggcaagctggagtccgagtcctctgacgtcctgtccaagtga

SEQ ID NO: 2678 - DNA, 2201 bp, Homo sapiens
  source 1..2201: mol_type = genomic DNA
gggcgggcgaggagctgcgcacgcgcggggacgcgcgcccggcctgtcgctgtggaaaccgctaggccagcgctcgccgggacctggaatccctgtacgccgaggtgggagccggtggaccggtcccccagccggcccccacctccgcttcccggtgtttgagggttcgggcctcccgccggggagttcacccctcgggctcgtcagtagggctgtggctgtcgcctcttcctgcagcgccaggctccgcccggtctcacagtcggcttaggggctttgcgtgcactgcggttgggtggaaaaacccactcctggttgtttagacgttggcctgcagacgatgtcatttctgtattcctctaaggcaggaagtcattatgcaacttacacatattcatcagatttcctctgacttacccggacatgtacatgggaatgatgtgcactgccaagaaatgtgggattaggtttcagcctccagctattatcttaatctatgagagtgaaatcaaggggaaaattcgccagcgcattatgccagttcgaaacttttcaaagttttcagattgcaccagagctgctgaacaattaaagaataatccgcgacacaagagttacctagaacaagtatccctgaggcagctagagaagctattcagttttttacgaggttacttgtcggggcagagtctggcagaaacaatggaacaaattcaacgggaaacaaccattgatcctgaggaagacctgaacaaactagatgacaaggagcttgccaaaagaaagagcatcatggatgaactttttgagaaaaatcagaagaagaaggatgatccaaattttgtttatgacattgaggttgaatttccacaggacgatcaactgcagtcctgtggctgggacacagagtcagctgatgagttctgataccaaacactcaaaacatgcattgggctagcagaatatccatgtttattaccagactggttctggaagaagctgtaaagaatactaaatatgttgggttataggggattgaccatgttacttttcaaaaccaggacatttaaagcatctactatgtaggtgcatgaggagtatgggaaaaacagaataaaggaatctgcctttaaggagcttacaatcatgccgggtgcggtggctcacgcctgtaatcccagcactttgggaggctgaggcgggtggatcacctaaggtcaggagttcgagaccagcctagccaacatggtgaaacctcgcctctactaaaaatacaaaaattagccaggcgtggtggcgggtgcctgtaatcccggctactcaggaggctgaggcaggagattcgcttgaacctgggaggctgaggttgcagtgagccgagatcgcgccattgtactccagcctgggcgatgagcaaaactccatctcaaaaaaaaaaaaaaaaaaaagcttacaatctgactggaagatgtcaaaacctgtgaaaagctaattagcagtattaagcaacacaaacattagtgccaaatgcatgataaaggctaaagaaggccagagcatatattactgtagagtagaatagtaagggaagactttgtcctttagtaaagagataggaggtggcctggcccttgaaatagtagtgtttaggtagatgcttgtgtaggattcctgataagagcaactgaaaagaaggagaggggaagtagtaaagggacaagaaacaattttttttttgaggaaccataagcaaattatagtttgacaagacaagattgggggacatatatggttaccagggaattacctcttatgtgttatatctttatattatttatctctggaaaagagtaccctgcaaaattccctacagctgcaagcagatgtcacttgatggacagagggggaattctgcccctccggtatcgggaaatacatactaaagacattgcgaaacgctgaacctcttcccataaataaaaggtttgtttgtaaaatgggaaatccacccataataaatgaacaataggcactgccagtttaggcctgttcatgaatggatctgcaagacagcatcttcgtttaacaacattatctgtgatttgatacatttatccttattacaatattgtttagttggtagaaattctatgttttctacaaggaaattgatgtttattaaataaaactgaaaataatta

SEQ ID NO: 2679 - DNA, 825 bp, Homo sapiens
  source 1..825: mol_type = genomic DNA
ctttccaacttggacgctgcagagtgagtatgggtggcggagtctgggctcctggaatccagccccatcctcctttgggattgtgctaactgggaccgcaaaatctctcccgagccagcccggggctccggttgtggggagatgggaatacaccctgcttttaaaggctcccagagcctgaggaagaaagtgaccaggcttaggggagccggagcggcagggatttccgggtcggaggcatctgaggggcgcaggggcgcgggtgcgtgggccactgggtgaccgacttagcctggccagactctcagcacctggaagcgccccgagagtgacagcgtgaggctgggagggaggacttggcttgagcttgttaaactctgctctgagcctccttgtcgcctgcatttagatggctcccgcaaagaagggtggcgagaagaaaaagggccgttctgccatcaacgaagtggtaacccgagaatacaccatcaacattcacaagcgcatccatggagtgggcttcaagaagcgtgcacctcgggcactcaaagagattcggaaatttgccatgaaggagatgggaactccagatgtgcgcattgacaccaggctcaacaaagctgtctgggccaaaggaataaggaatgtgccataccgaatccgtgtgcggctgtccagaaaacgtaatgaggatgaagattcaccaaataagctatatactttggttacctatgtacctgttaccactttcaaaaatctacagacagtcaatgtggatgagaactaatcgctgatcgtcagatcaaataaagttataaaattgcc

SEQ ID NO: 2680 - DNA, 3000 bp, Homo sapiens
  source 1..3000: mol_type = genomic DNA
agtggcagtcaggcctccccgctctgtgctacctgcggcccggctctcctccgcgcccccactcgcgctgcgatgacgcgctcactgttcaagggaaacttttggagtgcagacatcctcagcaccatcggctatgacaacattatccaacatctgaacaatggccgcaagaactgcaaagagtttgaagactttctaaaagaaagggcagcaattgaagagaggtatggcaaagatctgctcaacctctctaggaagaagccgtgtggacagtctgaaatcaacaccctgaagcgggcccttgaagtcttcaagcagcaagtagacaatgtggcacaatgtcacattcagcttgcacagagtttaagagaagaggccaggaagatggaagaattcagggaaaagcaaaaactacaacgaaaaaagacagagctcataatggatgctatccataaacaaaagagcttacaattcaagaaaaccatggatgcaaagaagaactatgagcagaaatgccgggacaaagatgaggcagaacaggccgtcagccggagtgccaacctggtgaacccgaagcaacaagaaaagctttttgtgaaactggcaacttcaaagaccgcagtagaggactcagacaaagcatacatgctgcacatcggcaccctggataaggtccgagaagagtggcagagtgagcacatcaaggcctgcgaggcatttgaggctcaagaatgtgaacgaataaacttcttccggaatgcattgtggttacatgtgaatcagctgtcacaacaatgtgtcaccagtgatgaaatgtacgaacaagtccgaaagagtttagaaatgtgcagcattcagagggacattgaatactttgtgaatcaacgcaaaactggacagattccaccagcacccatcatgtatgagaatttctactcctcccagaagaatgcagtcccagcaggaaaggctacagggcctaacttggcaaggagaggacccctcccaattcctaaaagctcaccagatgatcccaattactctttggttgatgactacagtttgctctatcagtaaaatcaatgaaaccagagctttttccggctagtgcttctgtgatatggaaagggcacccagagcagcaggacctatagccacgttatgtcagcaatgaagactttgaagtgaacccttgctataattttttagagatttaaaatttatggtagacatttaggacaacataagcaagtagagttctgcagttttttgaagtttacaaattgccccattctgaagaattattctttcccagttactcaggttatgaatgaattaggttttcaacatgggaagcatgaaatccacttctggatttggagcatccacttgaggagcagaggtggcagcagaggattctgagccaccaactgcagtagtggctcctttggctttgggcagcctggctgtggagtttccacggcgacacacagcctcagtggtgcaagatttaaaattaccttcctttttggctggaagacttagaagccgcctgatcatactttctcattttacagatgaggaaataaagcctacaagtgtgaaattaatttccttacagttttcctagctgatgagggacagaaccagaactagagcctgagcccaacccacatcactattcttctaacccttcctgaagttgtgatgctcatgctgaaatttaagatgccaaatatttttgccagcactttttcagttgggagaatcaccagggtttaaatgtcagatttatttttatgtggatccctgtgtatgctgaactacagagcatgatgtttaatctaatttaaggagccactgattgtaaaacatgccattattttatgttgcactaagaaggtggggtcgaggagttgccaataaacttgggacagactattgatggccaagcccatctgaatttaagatgctaaagtatgaaaaaaatacatcttagaatcaatgaaataccatattttgattccattcctcaagataattttagagttataaaaccagtcctcaattttgggtcttcacagagaatctttcccttgctagaccccagaattttaaatgcatccgtcttacactttcacaaatatttgggttttcctttttcactcacaaacagcagggaggtcatgtactttttgtacaacacctgtgcactatgagaaaatggtaccttttagttattgacaagttaaaatagcactctcagtttttcagtattacagagagcaaatagtttcctctcctgctctgtgcagtagcttttccagaactatggacaaattgatcagaagaagattgattatttcctcatctttttttcttttttttgagacagagtctctctctgtcccccaggctgaagtgcagcggcatgatctcagctcactgcaacctctgcctcccgggttcaagtgattctcctgcctcagcctcctgagtagctgggattacaggcacccaccaccacacctggctaattttttgtatttttagtaaagacagggttttaccatgttggtcaggctggtctcaaactcctgacctcaggtgatccacctgcctcggcctcccaaagtgctgggattacaggcgtgagccactgcgcccggcctatttccccacctttcgtgtaaggtgctactgaacatgacagcttcttgtcatgacaggaaacttgcatcagttggatatccttttgagaaactgaattttgcaaagggccaaatttccccaaactgaacgggctcaggaaatgttcctttacactcagaacattctattttaagtatattatttattgttggcagttcctcagggatttcccttttctctgtattggtcagtgtagttgatgtaaaaccgttttgtggatggaaaatatttttattttattgctcttttagtttggtaggttaaataaaggttcttggtaatttggga

SEQ ID NO: 2681 - DNA, 936 bp, Homo sapiens
  source 1..936: mol_type = genomic DNA
gcttccggcaccggccgaggtgcgggtcgcctccagagatcctgtgccttcaaaccctacgagtccatactttaaaacaaaatgaagaaagtaaggcttaaggaactagagagtcgcctgcaacaagtggatggatttgaaaagcccaagctacttctggaacagtatcctaccaggccgcacattgcagcatgtatgctctatacaatccataacacttatgatgacattgaaaataaagtcgttgcagatctaggatgtggttgtggagtacttagcatcggaactgcaatgttaggagcagggttgtgtgttggatttgacatagatgaagacgcattggaaatatttaataggaatgcagaagagtttgagttaacaaatattgacatggttcaatgtgatgtgtgcttattatctaacagaatgtccaagtcattcgatacagtaattatgaatcctccctttgggaccaaaaataataaagggacagatatggcttttctaaagactgctttggaaatggcaagaacagcagtatattccttacacaaatcctcaactagagaacatgttcaaaagaaagctgcagaatggaaaatcaagatagatattatagcagaacttcgatatgacctgccagcatcatacaagtttcacaaaaagaaatcagtctgatcatctaaatcacccgaaaatttcagcaagcatccaatcttttcttctagagatttctataaaaatatacaaagtgatcaaaaagtttcttaaaagcaacaacagaccagaaatgactcacaccaccttatagctatacaagaaaaagactagaaaccaaaatgctattttaaagtagtttcttccgccggggcagcaagagcgaaactccatctcaaaaaataataataataataaataaataaagtagtttcatag

SEQ ID NO: 2682 - DNA, 2221 bp, Homo sapiens
  source 1..2221: mol_type = genomic DNA
gggacttcaccagtgctgccatgctggccccaggctgtgagttggacccagaccaagaagtggtgaggacaaggcctgaagatgtgcctgcttccccttcaacttccaccatgattgtaagtgtcctgaggcctcccagccatgcttcctgtacagcctgtggaactgtgacttttcacatagtagagagaatggcttcagttatacctgcctccaataggtccatgagatctgacaggaatacatatgttggaaaaaggtttgttcacgttaaaaatccttacttggatttgatggatgaagacattctctatcacttggatttgggaacaaaaacacacaacctaccagcaatgtttggagatgtaaagtttgtctgtgtcggtgggagccccaacagaatgaaagcatttgcactgtttatgcacaaggagctcgggtttgaggaagctgaagaagacataaaagacatctgtgctgggacagacagatactgtatgtacaaaaccgggcctgtgctcgccatcagtcacggcatgggcatcccctccatttctattatgcttcatgaactcatcaaattactccaccatgcacggtgctgcgatgtcaccattattagaatcggtacatcagggggaatagggattgcaccagggactgttgtaataacggatatagctgtagactccttctttaagccccggtttgaacaggtcattttggacaacattgtcacccgaagtactgaactggacaaagaactgtctgaagaactgttcaactgtagcaaagaaatccccaacttcccaaccctcgttggacatacaatgtgtacctatgatttttatgaaggccaaggccgactagatggagcactgtgctccttttccagagaaaaaaagttagactacttgaagagagcatttaaagctggtgtcaggaatattgaaatggaatctacagtgtttgcagctatgtgtggactctgtggtctaaaagctgctgtggtctgtgtgacacttctcgacagactcgactgtgatcagatcaacttgcctcatgatgtcctggtggagtaccagcaacggcctcagctcctaatctccaacttcatcagacggcggcttggactttgtgactagacgtcctaactgggcagcccaaccctcccctgcaagtttgtagctcaagttgtaatgtgaaagtcatattttatttgtggcatttttatatagttctcatccacatgctaaatggaaagactttatgaaatccttctctcttaaaaaggaatttattgtaaaagaatactcacactaaattaaattcaaatttcattttagaataagttaactaaatcagtctaataattaaaattttaaaactcctggattatgacatttggagtttcatatgcagcattaattaagctcacatcaaaatagaccagccatttgcacatagttaccagtcactctgtttctgaaaccaatccagaaattcatgttagaacattgtcaggcacttctaggtattggacaagtgacagaaactgatcatccatattcaaaatatttacagaaaaaagtgtcagtgaaatgtaggtctatatggaaaagttaccattaggaaaatatggccatactgcttttttacccctgcactatttcagtgcaccacagaataggattcgagatttacatatgcctgtttgtgattttatctcagaatataacaactctggattacattttcctctcaactgaaaaccctcagtaatgcaaagaaaggccttcctttttcttcagaatcacaagtgactaaattgccttctagccattttttcttgtaaaaaaagtgttttgaggaggctgtattttttattccatttcaatattaaccaaataggctgagaaattcatagcaattgaattaagacttgagttcaagatgttaaaggaatccttttgtatgacttgtccagaccggcctattgccctacccgtttgattctctgggaggcatggtgctcctcctggctgcacatgctctctgtgaactgatcgcatcttgggttcttctcaatttgacatacttgggagtcggaatgactggatgggggatgggtagaggatgactggcacacttgtatagtatgtaatgttgtgtacatattatttatatggttgtggctcaaataaagtttaattccaacaca

SEQ ID NO: 2683 - DNA, 4782 bp, Homo sapiens
  source 1..4782: mol_type = genomic DNA
gccgcggagacccggcagttgggggatgccgacgcctgggccttgaggatgctgcggaagctcaccatcgagcagatcaacgactggttcaccatcggcaagacggtgaccaatgtggagctgctgggcgcgccgcccgccttcccggcaggggcggccagggaggaggtgcagcgccaggacgtggcccccggcgctggtcccgcggcccaggctccggctctggcccaagctccggcccggccggccgctgcgttcgaaaggtcactcagccaaaggagctcagaagtagagtatattaacaaatacagacagctcgaagcacaagagcttgatgtgtgtcgcagtgtccaaccaaccagtgggccaggtccaaggccatctttggctaaattaagcagtgtgacatgcatcccagggacaacttataaatatcctgatttgcctataagtcgatacaaggaagaggttgtgtctttgatagaaagtaattccgtggtgattatccatggggccacgggaagcggtaaaagcactcagctcccgcagtatatcttggaccactacgttcagcgctccgcctactgcagcattgtggtcacccagccccggaagataggggcaagcagcatcgccaggtggatcagtaaagagcgtgcctggaccctgggaggtgtggtgggctaccaggtagggctagagaaaatagcaacagaggacaccaggctaatttatatgacaactggagtcctgcttcagaaaatagttagtgccaagagtttgatggaattcacacatatcatcattgatgaagtacacgaacgaacagaagaaatggatttcctgctattggtagtccgcaaactcttaagaacaaattcacgttttgtgaaggtggtcctgatgtcggctaccatcagctgtaaagagtttgcagactactttgctgttcctgttcaaaacaagatgaatcctgcatatatttttgaagtggaaggcaagccccattcagttgaagagtattatcttaatgatttggagcacattcatcatagcaagctctctcctcatctcctggaggaaccggtgataactaaggatatatatgaagttgctgtctctctcattcagatgtttgatgacttggatatgaaggagagtgggaacaaggcttggtcgggggcccagtttgtgttggagcgaagcagtgtgttggtgtttttgccaggtctgggtgaaataaattatatgcatgaacttctcacaagcctggttcataaaaggttgcaggtctatccactccattcaagtgtggctttagaagaacagaataatgtctttttaagtccagtccctgggtacagaaagattattctgtccaccaatattgcagagagttctgtcacagttccagatgtcaaatatgttatagatttttgtttgactagaactttggtctgtgatgaagatacaaattatcagagtctgcgattgagttgggcttctaaaaccagctgtaatcagagaaaaggccgtgctggacgagtgtctagagggtactgttaccggctggtacacaaggatttctgggacaactccatccctgatcatgttgttcctgagatgttgcgttgtccattaggaagcacgatcttgaaagtgaaattacttgacatgggtgagccgagagctctgctggccactgccctttccccgcctggtctgagtgacattgagcgcaccatccttctactaaaggaggttggagcacttgcagtgagtgggcagagagaagatgaaaacccccatgatggtgaattgaccttcttaggaagagttttagcccaacttcctgtaaatcagcaacttggtaaactcatagtccttggacatgtatttggatgtctagatgaatgtcttattatagcggcagctctttctttgaagaatttttttgcaatgcctttccggcagcatctcgatggatataggaacaaagtgaatttctctggcagtagcaagagtgactgtattgcacttgttgaggcatttaaaacatggaaggcttgcagacagacaggggagctgcggtacccgaaggatgaacttaattggggacggttaaattacattcaaatcaagagaattagagaggtggctgaattatatgaagaattgaagactagaatctcacagttcaacatgcatgttgattctcggcgacctgtcatggaccaagagtatatatataagcagcgattcatcctacaggttgtattggcaggtgctttctatccaaattactttacttttggacagccggatgaggagatggcggtgagggagctggctggcaaggaccccaagacaactgtcgtgttgaaacacattcctccctatggatttctttactataaacaactacagtctctctttagacagtgtggtcaagtcaaatccattgtatttgatggtgcaaaagcctttgtggaattctcacgaaatccaacagagagatttaaaacccttcctgcagtatatatggcaattaagatgtctcaactaaaagtttcacttgaactcagcgttcattctgcagaggaaattgaagggaaggtgcaaggcatgaacgtctcaaagctcaggaacacaagggtgaatgtggacttccagaagcagacggtagatcctatgcaagtctcctttaacacatcagacaggtcccagacagttacagatctccttctaactattgatgtcacagaggtggttgaagtgggacacttttggggatacaggattgatgaaaacaactcagagattctgaaaaagcttactgctgaaatcaaccaactgacgctggtgcccttgcccactcacccacatccagacttggtctgtctggcaccttttgctgattttgataaacaacgctactttagagctcaagtcctttatgtttctggaaattctgctgaggtattctttgtagattatggcaataagtctcatgtagatctacatcttttgatggagattccctgtcaatttcttgaacttcctttccaggctttggaatttaagatttgcaaaatgagaccatcagcaaagtctcttgtttgtggcaagcactggagtgacggggccagccagtggttcgcctctctggtgagcggctgcaccctccttgtgaaggtcttctctgtggtgcacagcgtcctgcacgtggatgtgtaccagtactcaggggtccaggatgccatcaacataagagacgtcctcatccagcagggctatgccgagctcacggaggagtcctacgagtccaagcaaagccatgaagttctcaagggcctcttttccaagtcagtagaaaacatgacagatggctctgtgccctttcccatgaaagacgacgagaaatatctcatccggattttgttagagagcttttctaccaataaactgggtactccaaactgtaaggcagaacttcacgggccttttaacccttatgaactaaagtgccatagtttgaccagaatatccaaattcaggtgtgtttggattgagaaggagagcatcaactctgtcattatcagtgacgcccctgaagaccttcaccagagaatgctggttgcagcttccctttccatcaatgcgactggatctacgatgctgctgagagaaacctctctgatgcctcatatccctggcctcccggctctcctcagcatgttattcgcaccggtgatagagttaaggattgatcagaatggcaagtactatactggagtcctttgtggtttggggtggaatccagctacaggggcttccatactgcccgagcacgacatggagcttgcgtttgacgttcaattcagcgtggaggatgtcgtcgaggttaatattctcagggctgctattaacaagctagtctgtgatggaccaaatggatgcaagtgtcttgggccagagagagttgcgcagcttcaagacattgcccgtcagaagcttttaggtttgttctgtcagtcaaaaccaagggagaagattgttcccaagtggcatgaaaagccctacgagtggaatcaggttgatccaaagctggtcatggagcaggccgaccgtgagagcagcagagggaagaacacctttctctaccagctccacaaactggttgtgctcggcacctgagcatgtccacaggtggcctccagcacacccctcaggaagctgtggaggctggattccaggctccctccgcagactgactttcctctgtgtctgggtgttacagtctgtgcccactgcatcctaaaggccttttctttcttcttttctctttgggtgatagtcagagagtggtgtttttgttcaggtgggaaggattggaaactctagtcttttctagaaacagaaaatcactgtattaaatattttggaaagattgttctgaaagaagtctgtttggataaagagctgtattttgctttaaatttattaaggtaaatataagtagttaatcttagatgtaaggttccagaatgtgcttacatattctgttctgttacagtgatttaaaccagtagtataggaaaaaacttaaaaaaacaaaaaaaccatgtagtattttctgatttttttttccatgagggaaaatatctaatttttataagactaagttgagttatacttcttggttcacattttggaaatcagagattacagattacatggccatagcttatctgtgttaaaacaataaaagcattaaatgaa

SEQ ID NO: 2684 - DNA, 944 bp, Homo sapiens
  source 1..944: mol_type = genomic DNA
cagcagccgcgatggacgtgttcctcatgatccggcgccacaagaccaccatcttcacggacgccaaggagtccagcacggtgttcgaactgaagcgcatcgtcgagggcatcctcaagcggcctcctgacgagcagcggctgtacaaggatgaccaactcttggatgatggcaagacactgggcgagtgtggcttcaccagtcaaacagcacggccacaggccccagccacagtggggctggccttccgggcagatgacacctttgaggccctgtgcatcgagccgttttccagcccgccagagctgcccgatgtgatgaagccccaggactcgggaagcagtgccaatgaacaagccgtgcagtgaggacccccaagaggcccatttcccccaataaaagagatttgggagtctgcctggttgctgcctctttttcccgcccctccctgggatgggtcccactccctgtgggctccttttggggcttgtgcttggcagttcctgtgctgtcctgtctcccagatcctgagaccctggctgagaacttggcccagcctgctgcttaaaggcaccatggggacctgggttgccctgagacccaagccattgttagcagctagccagccacaccaaccacgccagggggaggaaagggaaggactgggagagacacaaagaccagagccagcctcagggacaagagattccagttttaggcctttctccttctaagtgccccccacccccatagcctgcatgtccactcccagacgatggccaagagcagaaacacaagctggagccagtgtcctggtttgacagcatgttcaacgagggaaccccaagacggacccacacaggtccacccacgctgggggctgtaatcacggagggaagtggctgcccccttaacacacctttaataaacagtctacagaccca

SEQ ID NO: 2685 - DNA, 3842 bp, Homo sapiens
  source 1..3842: mol_type = genomic DNA
gcgggagcttctcctgccaggcaggaagacgagtagaagggagcggcatgctggaggctggagcctgagcccctggggctcgccttgctgtgtttggtggtgacgtgggacactgcagctcggccagagtggtagaaatgtcctggtgtaggcttttctggctttgcccgtctagctgctccaagccaggctggaggaggaggagaaggaatcacctgtggtacgctggagcctgcatgtggcgtgactctgcagctcgcctcgtgtgactgatggcagccacggagactgcagctcgacaggagtgattggaaacccggagttacctgctagttggtgaaactggttggtagacgcgatctgttggctactactggcttctcctggctgttaaaagcagatggtggttgaggttgattccatgccggctgcctcttctgtgaagaagccatttggtctcaggagcaagatgggcaagtggtgctgccgttgcttcccctgctgcagggagagcggcaagagcaacgtgggcacttctggagaccacgacgactctgctatgaagacactcaggagcaagatgggcaagtggtgccgccactgcttcccctgctgcagggggagtggcaagagcaacgtgggcgcttctggagaccacgacgactctgctatgaagacactcaggaacaagatgggcaagtggtgctgccactgcttcccctgctgcagggggagcagcaagagcaaggtgggcgcttggggagactacgatgacagtgccttcatggagcccaggtaccacgtccgtggagaagatctggacaagctccacagagctgcctggtggggtaaagtccccagaaaggatctcatcgtcatgctcagggacactgacgtgaacaagcaggacaagcaaaagaggactgctctacatctggcctctgccaatgggaattcagaagtagtaaaactcctgctggacagacgatgtcaacttaatgtccttgacaacaaaaagaggacagctctgataaaggccgtacaatgccaggaagatgaatgtgcgttaatgttgctggaacatggcactgatccaaatattccagatgagtatggaaataccactctgcactacgctatctataatgaagataaattaatggccaaagcactgctcttatatggtgctgatatcgaatcaaaaaacaagcatggcctcacaccactgttacttggtgtacatgagcaaaaacagcaagtcgtgaaatttttaattaagaaaaaagcgaatttaaatgcactggatagatatggaagaactgctctcatacttgctgtatgttgtggatcagcaagtatagtcagccttctacttgagcaaaatattgatgtatcttctcaagatctatctggacagacggccagagagtatgctgtttctagtcatcatcatgtaatttgccagttactttctgactacaaagaaaaacagatgctaaaaatctcttctgaaaacagcaatccagaacaagacttaaagctgacatcagaggaagagtcacaaaggttcaaaggcagtgaaaatagccagccagagaaaatgtctcaagaaccagaaataaataaggatggtgatagagaggttgaagaagaaatgaagaagcatgaaagtaataatgtgggattactagaaaacctgactaatggtgtcactgctggcaatggtgataatggattaattcctcaaaggaagagcagaacacctgaaaatcagcaatttcctgacaacgaaagtgaagagtatcacagaatttgtgaattactttctgactacaaagaaaagcagatgccaaaatactcttctgaaaacagcaacccagaacaagacttaaagctgacatcagaggaagagtcacaaaggcttaaaggcagtgaaaatggccagccagagaaaagatctcaagaaccagaaataaataaggatggtgatagagagctagaaaattttatggctatcgaagaaatgaagaagcacagaagtactcatgtcggattcccagaaaacctgactaatggtgccactgctggcaatggtgatgatggattaattcctccaaggaagagcagaacacctgaaagccagcaatttcctgacactgagaatgaagagtatcacagtgacgaacaaaatgatactcagaagcaattttgtgaagaacagaacactggaatattacacgatgagattctgattcatgaagaaaagcagatagaagtggttgaaaaaatgaattctgagctttctcttagttgtaagaaagaaaaagacatcttgcatgaaaatagtacgttgcgggaagaaattgccatgctaagactggagctagacacaatgaaacatcagagccagctaagagaaaagaaatatttggaggatattgaaagtgtgaaaaaaaggaatgataatcttttaaaggctctacaattgaatgagctcaccatggatgatgataccgctgtgctcgtcattgacaacggctctggcatgtgcaaggccggctttgcgggcgacgatgccccccgggctgtcttcccttccatcgtggggcgccccaggcagcagggcatgatggggggcatgcatcagaaagagtcctatgtgggcaaggaggcccagagcaaaagaggcatcctgaccctgaagtaccccatggaacacggcatcatcaccaactgggatgacatggagaagatctggcaccacaccttctacaacgagctgcgtgtggctcccgaggagcaccccgtcctgctgaccgaggccaccctgaaccctaaggccaaccgcgagaagatgacccagatcatgtttgagaccttcaacaccccagccatgtacgtggccatccaggctgtgctgtccctgtacacctctggccgtactactggcatcgtgatggactctggtgacggggtcacccacactgtgcccatctatgaggggaatgccctcccccatgccaccctgcgcctagacctggctgggcgggaactgcctgactacctcatgaagatcctcaccgagcatggctataggttcaccaccatggccgagcgggaaatcgtgcgtgacatcaaagagaagctgtgctatgttgccctggacttcgagcaggagatggccacggtggcctccagctcctccctagagaagagctacgagctgcccgatggccaggtcatcaccatcggcaacgagcggttccgctgccccgaggcgctcttccagccttgcttcctgggcatggaatcctgtggcatccatgaaactaccttcaactccatcatgaagtctgatgtggacatccgcaaagacctgtacaccaacacagtgctgtctggcggcaccaccatgtaccctggcatggcccacagaatgcagaaggagatcgctgccctggcgcctagcatgatgaagatcaggatcattgctcctcccaagcgcaagtactccgtgtgggtcggtggctccatcctggcctcgctgtccaccttccagcagatgtggatcagcaagcaggagtatgatgagtcaggcccctccattgtccaccgcaaatgcttgtaggtggactctgacttagttgcgttacaccctttcttgacaaaaccaaacttctcagaaaacaacatgagattggcatggctttatttgttttcttgtttcattttttgttttgttttttattggcttgactcaggatttaaaaaccggaatggtgaaggtgacagcagtcggttggaggaagcttcctccaaagttctacaatgtggccaaggac

SEQ ID NO: 2686 - DNA, 829 bp, Homo sapiens
  source 1..829: mol_type = genomic DNA
cgcaggttctatagaatttgccaagactgctggcctgttttctaccctgattccttaggtggcttctgggacagaattacggttctctaagtatttgcttgcagtatattcaacagaacataagagcagattgctccaatattgacaaaattcttgaaccacctgaaggccaagatgaaggtgtgtggaagtatgaacatttaaggcagttctgccttgagctaaatggacttgctgtcaaacttcagagtgaatgccatccagatacttgcactcaaatgacagcaactgaacaatggatttttctttgtgcagctcataaaactccaaaagagtgtcctgctatagactatactagacacacacttgatggtgctgcatgtcttctgaatagcaataaatattttcccagcagggttagcataaaggaatcatctgtagcgaaactaggatcagtatgccgtaggatttacagaatattttcacatgcttattttcatcatcggcagatatttgatgaatatgaaaatgaaacatttttgtgtcatcggtttactaagtttgtgatgaaatacaatttgatgtccaaggataacctgattgtaccaattttagaagaggaagtacagaattcagtttctggggaaagtgaagcatgaagggaatcataggaaaaatgtactgatcatataattaacattatgtactgtatatatcattttagacacatcaatcatgtatccatattatagcttctttgtttagtataggtttttgtatgctgggtttgccttttaaaatgggaaatactttttaagttattcataag

SEQ ID NO: 2687 - DNA, 2811 bp, Homo sapiens
  source 1..2811: mol_type = genomic DNA
atggagccagacatcattcgaatgtactcttcatccccaccaccattagacaatggagcagaggatgatgatgatgatgaatttggggaatttggtgggttttcagaagttagcccttctggtgtagggtttgttgatttcgatacaccagattatactcgtcccaaggaagagtttgtaccttcaaaccattttatgccaattcatgaattctcagaaaatgtagatagccttacaagctttaagtccattaaaaatggtaatgataaggacatcactgctgaactttctgctcctgtgaaaggacagtctgatgttttactttctaccaccagcaaagaaataatttcatctgaaatgttagctacttccattgatggcatggaaagaccaggaaatttaaataaagtagtggagcagagacagaatgttggaacacttgaaagtttctctccaggagattttagaactaatatgaatgttgttcatcaaaacaagcagttagagagctgcaatggtgaaaagcctccttgtctggagattctaacaaatgggtttgcagtgttggaaactgtaaatcctcagggaacagatgatctggacaatgtagctgattcaaagggacggaagcctcttagcactcatagcactgagtataatttagactctgtacctagtcctgctgaggaatttgcagattttgccacattttccaaaaaggaaaggatacaattagaagaaatagaatgtgcagttttaaatgatagagaagcactaaccattcgggaaaacaataaaattaatagagtcaatgaactgaattctgtaaaagaagtggctttgggtagaagcttggataacaaaggagacactgatggagaggatcaggtttgtgtttcagaaataagcatagtgactaacagaggtttcagtgttgaaaaacaaggccttccaacactgcaacaggatgaatttttacagtcaggtgttcagtcaaaggcttggagtttggtagactcagctgataattcagaagccattaggagagaacaatgtaaaactgaagaaaaacttgacttacttacttctaaatgtgctcacctatgcatggattctgttaaaacttctgatgatgaagttggttctcccaaagaagaaagtagaaagtttactaatttccaaagcccaaacattgaccccacagaagaaaatgatttggatgattctttaagtgtaaaaaatggtgatagtagtaatgactttgtgacttgcaatgatatcaatgaagatgattttggtgattttggtgactttggctctgccagtggctcaactccaccttttgttactggtactcaagattcaatgagtgatgccacttttgaagagtcttcagagcactttccacattttagtgaaccaggtgatgactttggagaatttggggatataaatgctgtttcttgccaagaggagacaatattaacaaagtcagacctaaaacagacttctgataatttatcagaagaatgtcaattggcaagaaaatctagtggaacaggcactgaacctgttgcaaaacttaaaaatgggcaagaaggtgagattggacattttgattctgtgccaaatattcaggatgactgcaatggttttcaagactctgatgattttgcagacttcagttcagctggtcctagccaagttgtagattggaatgcttttgaggatgaacaaaaagatagttgttcttgggctgcttttggagaccagcaggctactgaatctcatcatcgaaaggaagcctggcagtcacataggacagatgaaaatattgatactccaggaacccccaaaacgcacagtgtaccttcagcaacttccaaaggagcagttgctagtggccatttacaggaatcagccacttcagttcagacagctttattaaaccgcctggagcgaattttcgaagcatgttttccttccatacttgtccctgatgctgaagaggaagttacttccctgaagcacttgctggaaacaagcactttgccaataaaaacgagagaggccttacctgaaagtggggaattgctagatgtgtggactgagctacaggatatccatgatgcacatggcttgagataccagtggggcggctcccatagcaacaagaagcttttgtcctccttgggaatagacacccgaaacattctcttcacgggcaataagaagcagcctgttatagtgcccatgtatgcagcaggattgggtatgttagagcccaccaaggaaccactgaaaccactttctgctgcagaaaaaatagcttccatcggtcagacagccaccatgtcaccagatatgaacacatgtacatctgatcagttccaggagtctctaccacccgtccagtttgactggagtagcagtggccttactaaccctttagatgctagtggaggttccactcttctgaaccttgatttctttgggcccgtggatgacagtagctctagcagcagcaccacaatcccaggtgtggatccggagttgtatgagttaacaacttctaagctggaaatctccacctcaagcctcaaagtgactgatgcatttgcaagactcatgtctacagtagagaagacaagcacatctaccaggaaaccgaaaagagaagagcacctaagtgaagaagctatcaaggtgatcgctggccttcctgacttaacattcatgcatgccaaggtgttgatgttcccagccacgttaacaccttccacaagctctcaagaaaaagcagacggataa

SEQ ID NO: 2688 - DNA, 10992 bp, Homo sapiens
  source 1..10992: mol_type = genomic DNA
tttctaaagtccctcaggaaaaaaattctgaaacttgagccacaaattaagaggcagacggcttttctccttgcaaatgacctgccacacagtccgtcactgcctctgctagctctgctacccttgggccctgtccacagcccacgtgggagaccttttcacgggatctactcggatgtctgggatctggccactaccgcaggctcgagacaacccaggccataaagaatgctgatgggagaaccattttcctaattttcaaattgttgagctgtttgccataatggatgatcagcaagctttgaactcaatcatgcaagatttggctgtccttcataaggccagtcgaccagcattatccttgcaggaaaccagaaaagcaaaatcttcatcaccaaaaaaacagaatgatgtccgagtcaaatttgaacatagaggagaaaaaagaatccttcagttccccagaccagttaaactggaagatctgagatctaaagctaaaattgcctttggacagtctatggatctacattataccaataacgagttggtaattccattaactactcaagatgacttggacaaagctgtggaactgctggatcgtagtattcatatgaagagcctcaagatattacttgtaataaatggaagtacacaggctactaatttagaaccattgccatcactagaagatttggataatacagtatttggagcagagaggaaaaaacggctatctataataggtcctactagtagagatagaagttctcctcccccaggttacattccagatgaattacaccaggttgcccggaatgggtcattcactagtatcaacagtgaaggagagttcattccagagagcatggaccaaatgctggatccattatctttaagcagccctgaaaattctggctcaggaagttgtccatcacttgatagtcctttggatggagagagctatccaaaatcacgaatgcctagggctcagagctacccagataatcatcaggaattttcagactatgataaccctatctttgagaaatttggaaaaggaggaacatatccaagaaggtatcatgtttcatatcatcatcaagagtataatgatggtcgtaaaacttttccaagagctagaaggacccaggggaccagcttacggtctcctgtgagtttcagtcctactgatcattccttaagcactagtagtggaagcagtatctttaccccagagtatgatgatagtcgaataagaagaaggggaagtgacatagacaatcctactttgaccgtaatggacatcagcccacccagccgttcacctcgagctccgaccaactggagattgggcaaactgcttggccaaggagcctttggaagggtctacctctgttatgatgttgatacaggaagagaattggctgttaagcaagttcaatttgaccccgatagtcctgagaccagcaaggaagtaaatgcacttgagtgtgaaattcagttgctgaaaaacttgctacatgagcgaattgttcagtattatggctgtttgagggatccccaggaaaaaacactttccatatttatggaatatatgccagggggttcaattaaggaccaattaaaagcatatggcgctcttactgagaatgtgactaggaaatacacccgtcagattctggagggtgtccattatttgcacagtaatatgattgtccatagagatatcaaaggcgcaaatatcctgcgagattcaacaggcaacgtcaaactaggagattttggggccagcaaacggcttcagaccatctgtctctcagggacaggaatgaagtctgtcacgggcacaccatactggatgagccctgaagtcatcagtggagaaggctatggaagaaaagcagacatctggagtgttgcatgtactgtggtagaaatgctaactgaaaagccgccttgggctgaatttgaagcaatggctgccatctttaaaatcgccactcagccaacaaacccaaagctgccacctcatgtctcagactatactcgagatttcctcaaacggatttttgtagaggccaaactgagaccttcagctgatgaactcttaaggcacatgtttgtgcattatcactagcagccagtaacctctcctgtgcctctacctagctcccatctattcattcaccttctctctgactgcacttttcttttttataaaaaaagagagatgggggagaaaaaagacaagagggaaagtatttctcttgattcttggttaaatttgtttaataataataatatcctaaattttttatatttaatctttttttcccttacaagaacttgaagtttttttttttaatttttataatgtactgatgtggttcagagagataaagcactttagtacatagtcactctttttagtacaaacaaatcatttggaatacctaaagattgtagagtcattccctctatcactgacacatcagtgacgatgggaagacatggaaaacaaggagaagaaaatgatgtataatttgtagtttttagtgatagtatttaaaatatatcctcatttgtggggttgagccctaaactttagtttagggtaggtactcaacttaaagaatataggtttcttcttatatctgtattctttagatcctaacctctgtctaccaacctttttgctcagtaggagtcttgatagaagatatgaatctctgagaggtatgtttatttgttaatcctaaccagtataataagcaaatacactataatagatccacgttactggaatctgtaaaccttgagggatagctttctgcttaaaaacacacacacacacacacacacacacacggaaaacctttattttaaagtcaagttgtgagcaaatagaaataaaagacaaaaggacatcactcttatcaaatgtgtgagcagtagaagagaccacatttacagtcaatagaaataatgaaaaaaaattaggtgtttagtgtattttaaacagttttgttttgttttacttgagggggacgtcccaaaattaaaggaatggagaaataatcaaaatcatgtataccatcttctatttccagctcctgattccccataggtaacatcccttaggagcgaagagttcaattagtaatgtttatgtgttatgtcaggagatgaaacccttgttcttaggatcacagaatactaaagcacctcaaaaaaacaggtatcatgtgaaacagtggttgccaaaagtggagcgaggatgatttcactaggcatttggcaattcttagagacatttccggttgtcacaattggagggatactagtaacatgaattgggtagaggccagggatgttgctaaatagattataatacacaaggaaagcagcctcaaagaattacccctcccaaaatgtcagaagtgctgaggctgagaaaccctgatgtaaagatcagtcccagttataaactgaaaacagctatttacaaagcagtaaatgcaagaaagaaaaggaagtcgcaaagagaaagtgatgtaatgcaaattgaggattttacaagatcagatactgctgctttaagtcaagggtgaataatctcaacaaacagcaaatagcaatcactttaccagctgcatattgcacccacataggtaactcttcattttaggaacaaactgaatttgaacactgagccttttgaactcagccatctctatatattctttccttaaaattcatgattttgggcaaaaaaaaaaaaaaaagcatatcaaaacaaaattttaactactaatgggaaggttaaaaagctgccacgtatttctagtacaatgtatccaataagagcaaggacattgttaaatggaacaagacagctgggaaaggccccactatctctaatagaattgtgctactataaaacatgaagatatcagcaatttggccacttgcagtttttttcagcatgttaaagcaagtgctaagtactttattagtactttatttagtactttattttaaaggtctagaaaacaacagtcttcctggaggccccagaatccctttcatgggattcataagggactcaggtattcttattttctgccaaaaggtgtgcttatttagggactcttttacgatactttgtttctgaagttaggtagatcttggtttactgtgccaaggtcctacctagcattccctgtaggaatatttgaaattccactagctagtctaagaagtcaaagcacaaaattaattgtcaacgcttctctcatattcttaaaattgaagcagtttgcagggaagaacaagaatgaggtgtccctgccttggtaaagcaactgccaaattttgttctagaaagaatccccaagtgtgtggatctattataatttctttatcttttatgaatgagggcatcttttctacttgagcaagatcatggtccttgaccagtgggcttttccttcatatctgtcttgtgtagttgtgcttttcctttggctcgtttttggtctgtcagggtaaccagcagtgcacaatatgagacaaatgctctttagagagaaatctggtgagactgtagaacccagagcaaaactgtttttttttcagtctctgttttcttttctaaatgctatagaaaataaaggcacctgaaaagaaactactactttaacactgctgtggaaggcctttgctttataagaaaaatattattagctatgggaaagtaatgttctttatgtaaagacttaaaaatagactaatagtttacagagttattatataaaatacgatgtgaatttatttcaaacaagttgtgaaggtaccaaaaaccacaataaaagttaatatatataaaaactactagaacaaaaaagcttgaaggtgtgggggtggagggtatggaagaccaaaagtaaatttaaaaaagaaatttttgaaaggaaacagctttatcaggggaagttaaatataacactccgtttttttcttctttctaataatgatatggatcaacaaatgcaatttgaactttttaagataactctaaatgtgttttgtttcttaaatgcacaattgattcttctatactgtaatgcttctttgctgacgctggaaaatggtcagactgctgactttgtgcctttaaaatgcattctgctttgacagtggcagactttttggtgctggagaagattcactagcagtcttatatgtgcttttcaggaaatatctttctacttaaggccttgagagattcaaagtggcatgacttaggcttggaccaaatataagatcttttacattgcaaacaaaatgttgtattgaataaaagggttaaaaaaatcataatgactagtggaaattttgatgggttgttaattatttaaaatgtatttgaaagtatacagactgaaaatttcagtatgaatatcttgaaaattttcagcacttttccttgtttacaaaacatctttctaacttaaaaaaatgactattgccttagaaagttttaaaaggcacagttacccttacataacatatataaggaattaaaatattaatgcatttgctgaactgtaaaagaaaattttaaaccttgatttcagagtgaattggattggctttcacttgagagagtctttaccttattcccaaagaaactgcattaaaaagatgaaactatttctttagactaagtctctgctactccagctcatatatatgtcagatctgctctgtagtatttctgacatggagttgttataagatatgtgaaatcacttagaaaataaaatcagatgtgaatagtttagcaggatgaccaagccagatgcagactccttggcctatggcaaagttctgtgccagtgattttatttggagtctgggaactgatagcttgatataaaatcacctggtgtcaattaaatatacaaatctatcttttttaatagaatgaatcttctttgtttgttcaataattgtaacttattatgtcaggtactaaattaacatccttaaggaggtcacaatctaggaggaacatgggcaaacagttacttattttatggcatacgctaactctgaaagttcagcaatgatgttttaaaatgttattttttattaagggaaaagcaattttaggtaatcattggctgttataaacggaaatgtcactgacaacagggattagagtaaaagtatctccaaactagagggatcccctccccaaccaggtcacatagcatctctctcaggaccccctcttactgcaaaacccagcctctactcaacagttctggtgatggggagcatttattccataacagtgtttttttgttcttttttttttttttccccagtgtctcttttaaagaaaacatactttattttggtctaaattgtgaaaatacccaaaacatttgatagaaattgaactctgtcaacagtgttatttatactaagatcaggacagttccttgagatcatactgttttattactaagtttggcctttgttttacaaatgtaatgttcatatttatttgaattttaagattggttaaatgttaatgaaaagcaatccaattgttaatttttagtagtgccttttctctgtatgccttaattttattttatattaataattcaagttacccaccaaaatgaagattttttccaaaatcagtaggcttcacaagttcatttggccttagactgtgtattggtccttaaatgtttcttaatgcctgcctcctcctacccttttctacctcctttttaaaaaaataaataaataaataaataaatgttaggagagaaacattaggatttgtctgtgatagacatgctgcagcttccactagacatgaattcccaacacaagcatagaaagaggtattctcgttctaaagagacatgtaaatgttttctgggttgaatatttgattttcaatcacattggcactgtccaagttcttggcatattatagttcagttatgattttcatggtagagttacaatacttgtttttgccctaaagaagtcattcacatggtttacaaatgttaaggcaatgagataggacagtgagtaggaaatccagggatagcagattctagtccttaattctcagctaacattttgggtaatactcacagaaaagttacttttctgtgaagtgtgtgcatgtgtgcatgtatgtgtgcgtttgcatgcatgtgtgtgtgtgtgtgtgtgtggttagagttggaggcagggatgggaaggaagaaggggaaaggtatgagtgttcaattaggtcagtttctggttttggaagaacaactcaaatgtatgacctactgatgacatacagtgagtgtagtcatccttgggtaggaacaccagtacattttccagaagtagctagtacaaatgattgtataataatattgattgtaaattgccatactcttggttgctaaaggtagattaaaattcaatttgtgtatatgtaaaataatcttatatataattcttaaatagaaagtaattgattttacatagttcttcctgaactttttggaactgaaattctgccaaacattatcaaaataagcttccttagcttaccaagtattcacaaggaaattctcttgtacctctttttggttggctaggggaagcatgctgtgaagcagctattcctacttatagttgtctttggcttggctttgacttctgccatggtttggacaggatgccatggtaggtgtgggaagtatcagggcctcccatcttcccatactcaccttccagagctgttgatggaaatgagctcttgggggagcctagagattcttttttcagtggtcctgtaagcattcaaggttgagcttcagaaagatgagggaggagtcatagctacagtaaagaaaagaatagattttatctgttgcctgtatacagtctcatagaattcttatttttcataattgtgcattttaattgatagtcatatggtatttttgttaataacagcaaaggcattaaatcagtaccattgttccttctgcctgatgacttcttgtttgtaacacaatctgtattatcagaatcactttaaaccaaagcttttatattccctgtacacatagccaaaataattagcactgttacttctgtccacttgtaagctaatagtataaaaattataaagcagatactagtagaatttgtattctggtatatccttcaaggaaaaggacaggtgatcagtgcatttagacatccagaagttacttccactattgaggaactatgtagacatgaatttaagcttgtacatgtgccaatcttgttaatgtcacttgaccactgattcacatagacagacattaacgtctgatgcctcaggttgatggcgaactttcttcctagtgtcttaacatttatgaacttatgtttgacttgaggggcatttcagcaaagctgtgaggaaaagtaggttctggactgatgtctgctttgtgccatagacattttggaacataaggaagtatctgcttctactatatgtacaggacttgtccccaaataatttctgaatcccttaatgcagttgagaatcccttaatgcagttgagaacagtaaagttcatgaccataccgaaaagcacttttaagttcacttctttttaaatatttttttagaatttattttttaaaagcatatgtaactagtgatgattttagcattagctttacttggaggggagaagaaacaaaattacaccttaaactctattagatagactacaaaatggatttgatgtattcttacttttccaaagaattttttccacctggaataagaagagaggactagttgaaacatttgagctggagaggcttatgggcaatatgaagtgggccaaattcttgcaatacaccctattcaattgaaagtacagtgtctaaggataagaatacttctttaaagaccaacaattgttttaatgcaatcttaattagtaaatggtttacattttttctattgttattggttttaaaatttgctaccctgaattctgaaatattataagagttaataccaaaaatacttttaatgtctgacatctcttacatttcacatggttctttttattcattgtaaataaaagtaaacttggataaatttgagaataaactttgaattgttgcaaactatgattatcaatttgtaaatttaccctttgacataataatgtacatttttaaatgtagccattaaattctctatatttaacctattggtttctctctaaatgtttttaatctcagttgaatgctgggcagtttataattatgtacaaagggtttttttcctattaagattgacatttttgcacatttttggaaatgtttaatttgtacactgatttactactctgaccaataattgttgatgagtgtatgagcatcatgaatgcgtgcattgaactactgtctgtgtctttatgttttaacttctttcaagatgtagccatcagttactgcactgctattactgacttaaatggacctttttgcttttacaaactatacttatctatggttctttgttgaagaactcaggagttcgacattaatagaaattagaaaattttataatgtattataaaatccattactaagttgaaagtatgcttttaactgtgtatcaggggatgtatgtttgtgtggagatgtttttttctgtctgtaggcacatgtatatatcccagtaagttcttattttcatttcatttctacatttttatgaacttgttttataagggtactgtttagttgtgataattaaatatatataaaagctttctgagagattatttactatatgaatatattttcagctggctgatcaaaagtatttttaaaattttgtttttagccattcaaaatgtatttgtattttcagaattgaatgcaagtcatacttagagctcaattaaaatactcttgcaagaaaaagcattaaattctctttgagaattccgtgaaatgcaaattaagggaaaaataggttttaagcagtagcaaaaacacaccgctaaaaatggcctttgaattctcagagctatggaaaaatgtgagaaactaaattgtctcgagatgtcaagatttttctatctccagttgctattggcctgtcctactgttgtctttgaatatttcctgtattccaccccaaaagatttcaacttttagtttttctatcactgggcaaggtcagactgggtttataaaacaatatattggcatattgtgattctttgtaattgactataaattggttttgaaatgtccaaacatacgttgtgtgtctttatattgtactgtgtgttttaagtaactggcagaaaaagaattggaaatgaaatttccaatcagacaatgtagtattaaagaaaactttgttttaaatatgcggtaccatgtaaaattactcgtgttaggaataaagtccactgttgaagttgaatgtcactaagcttattatgttaaaaggaaccagtgtgattaggaaaacctaccagaagccagatacagtgtggtacgtgcaacatttcatgcacattttgattttgtttgtcattcaaaattgtgcttgtaaaaatgtatacaatttctgagttttataatttctaggtacttgttttttcttgctggtaaatagcttttttttaaaaaaaaatctaatataaaagaaaccatgtttatattttgttagtgatcaatgactttgtttatatggaaatttgtatattgttggcacacattttgttgaggtttacgtgcatgaaggcctgcaataattagcacaatgaaaactgctttttcttacatgttcatttttttgaaagattgtggtgcaaaggcttactctaataagtaaccttctggactatg

SEQ ID NO: 2689 - DNA, 1032 bp, Homo sapiens
  source 1..1032: mol_type = genomic DNA
agaacgaggggacgtaacggaggcaggttggagccgctgccgtcgccatgacccgcggtaaccagcgtgagctcgcccgccagaagaatatgaaaaagcagagcgactcggttaagggaaagcgccgagatgacgggctttctgctgccgcccgcaagcagagggtgggagtacagcagccaaacgctgaacttagtcccatccacttccatcttatcctttgtgcccttcatccccctgcatcttgtcctttttgccctctggtacctcccagtgccccatcatctctacccccagggactcggagatcatgcagcagaagcagaaaaaggcaaacgagaagaaggaggaacccaagtagctttgtggcttcgtgtccaaccctcttgcccttcgcctgtgtgcctggagccagtcccaccacgctcgcgtttcctcctgtagtgctcacaggtcccagcaccgatggcattccctttgccctgagtctgcagcgggtcccttttgtgcttccttcccctcaggtagcctctctccccctgggccactcccgggggtgagggggttaccccttcccagtgttttttattcctgtggggctcaccccaaagtattaaaagtagctttgtaattccttgagcgcctggtttgactggggacttggggggatggggttggaagaatgactgccctttcccaccaaaaaagggagaactctttagattcagattgtgggtatgtagacttaataagtgaaacatcacagaagaagcctttattatacaatgacaaccaaacaagtactccggatatgcagtagaggaatcctctaagaaccatagagacttcttttctgtgatttttgttccccacccttgaacaccatctctaggatggagttggcctaagagtgaatgctgcaagatctgtgtttatgcctcttttcctcattcttcctcagtttgttcgtctgcttgaaagttggccaaaaaatcctgctgctcaccgacttcccgtggtcagctgctgtca

SEQ ID NO: 2690 - DNA, 880 bp, Homo sapiens
  source 1..880: mol_type = genomic DNA
gtgcgcgcgtgcggcctggcgcttccggcaccggccgaggtgcgggtcgcctccagaggtgcgtggtcgtggcgcgagggatcctgaggctgctccagcagtgcgccgccgccgtctcctggggcggcttgggttagccgggagatcctgtgccttcaaaccctacgagtccatactttaaaacaaaatgaagaaagtaaggcttaaggaactagagagtcgcctgcaacaagtggatggatttgaaaagcccaagctacttctggaacagtatcctaccaggccgcacattgcagcatgtatgctctatacaatccataacacttatgatgacattgaaaataaagtcgttgcagatctaggatgtggttgtggagtacttagcatcggaactgcaatgttaggagcagggttgtgtgttggatttgacatagatgaagacgcattggaaatatttaataggaatgcagaagagtttgagttaacaaatattgacatggttcaatgtgatgtgtgcttattatctaacagaatgtccaagtcattcgatacagtaattatgaatcctccctttgggaccaaaaataataaagggacagatatggcttttctaaagactgctttggaaatggcaagaacagcagtatattccttacacaaatcctcaactagagaacatgttcaaaagaaagctgcagaatggaaaatcaagatagatattatagcagaacttcgatatgacctgccagcatcatacaagtttcacaaaaagaaatcagtggacattgaagtggacctaattcggttttccttttaaaagccccgcaaacaaaagtcgtttaaaacctatttaaaatgaataaaaaattggtttactaaa

SEQ ID NO: 2691 - DNA, 2089 bp, Homo sapiens
  source 1..2089: mol_type = genomic DNA
ttttcccctcaggagaagtcgggaaggtggcggcggcggcggcggttgtcccggctgtgccggttggtgtggcccgtcagcccgcgtaccacagcgcccgggccgcgtcgagcccagtacagccaagccgctgcggccgggtccggcgcgggcggcgcgcgcagacggagggcggcggccgcggccagggcggcccgtgggaccgcgggcccccggcgcagcgctgcccggctcccggccctgccggcctcctcccttggcgccgcggccatggcggccagcgcgaagcggaagcaggaggagaagcacctgaagatgctgcgggacatgaccggcctcccgcacaaccgaaagtgcttcgactgcgaccagcgcggccccacctacgttaacatgacggtcggctccttcgtgtgtacctcctgctccggcagcctgcgaggattaaatccaccacacagggtgaaatctatctccatgacaacattcacacaacaggaaattgaattcttacaaaaacatggaaatgaagtctgtaaacagatttggctaggattatttgatgatagatcttcagcaattccagacttcagggatccacaaaaagtgaaagagtttctacaagaaaagtatgaaaagaaaagatggtatgtcccgccagaacaagccaaagtcgtggcatcagttcatgcatctatttcagggtcctctgccagtagcacaagcagcacacctgaggtcaaaccactgaaatctcttttaggggattctgcaccaacactgcacttaaataagggcacacctagtcagtccccagttgtaggtcgttctcaagggcagcagcaggagaagaagcaatttgaccttttaagtgatctcggctcagacatctttgctgctccagctcctcagtcaacagctacagccaattttgctaactttgcacatttcaacagtcatgcagctcagaattctgcaaatgcagattttgcaaactttgatgcatttggacagtctagtggttcgagtaattttggaggtttccccacagcaagtcactctccttttcagccccaaactacagcatttagaatgctttcatctagctgcagttttggtgaatttacttcagcttttcctcttcaggctacccacagtggaagtgctgcatcagtaaatgctaattttgctcattttgataacttccccaaatcctccagtgctgattttggaaccttcaatacttcccagagtcatcaaacagcatcagctgttagtaaagtttcaacgaacaaagctggtttacagactgcagacaaatatgcagcacttgctaatttagacaatatcttcagtgccgggcaaggtggtgatcagggaagtggctttgggaccacaggtaaagctcctgttggttctgtggtttcagttcccagtcagtcaagtgcatcttcagacaagtatgcagctctggcagaactagacagcgttttcagttctgcagccacctccagtaatgcgtatacttccacaagtaatgctagcagcaatgtttttggaacagtgccagtggttgcttctgcacagacacagcctgcttcatcaagtgtgcctgctccatttggagctacgccttccacaaatccatttgttgctgctgctggtccttctgtggcatcttctacaaacccatttcagaccaatgccagaggagcaacagcggcaacctttggcactgcatccatgagcatgcccacaggattcggcactcctgctccctacagtcttcccaccagctttagtggcagctttcagcagcctgcctttccagcccaagcagctttccctcaacagacagctttttctcaacagcccaatggttttgcagcatttggacaaacaaagccagtagtaaccccttttggtcaagttgcagctgctggagtatctagtaatccttttatgactggtgcaccaacaggacaatttccaacaggaagctcatcaaccaatcctttcttatagccttatatagacaatttactggaacgaacttttatgtggtcacattacatctctccacctcttg

SEQ ID NO: 2692 - DNA, 1103 bp, Homo sapiens
  source 1..1103: mol_type = genomic DNA
tcccagcatcccctgcactcggttcctctgtaacttagactccagtgtgccgcgcagtgtgcgcaaattcacaaacccgcccgctgagttggtcgtttcggaatcccgagacttgaaacccaacgggaagacccttctcaccctcaaaagaagatgacagcccgcagagagttaacttctgtttacatggaactcagacatctgcaaatcatgatttcaaggccagagaatggcaggggaacagaaaccctcaagtaatctcctggagcagtttattttactagccaaaggtaccagtggctcagccctcactgctctcataagccaggtcttagaggctcccggagtgtatgtctttggagaacttctggagctggccaacgtgcaggagcttgcggaaggagctaatgctgcttatttgcagttgttgaacctgtttgcctatgggacatacccagattacatagccaacaaggagagcctgccagaactgagcacagctcagcagaacaagctgaagcatcttaccatcgtgagcttggcatcaagaatgaagtgtatcccctactccgtgttgctgaaagacctggagatgcggaatctccgggaactagaagaccttatcattgaggctgtctacactgacatcatccagggcaagctggaccagcgaaaccagctgctggaagtggatttctgcattggccgtgacatccgaaagaaggatatcaataatattgtcaagaccctgcatgaatggtgtgatggctgtgaagcagttctactgggcatcgagcagcaagttctgagagccaaccagtacaaagagaaccacaaccgaactcagcagcaggtagaagcagaggttaccaacatcaagaagacactcaaagccaccgcatcctcctcggctcaggagatggagcagcagctggctgaacgggagtgtccccctcacgctgagcagaggcagcccaccaagaagatgtccaaagtgaaaggtctggtctccagccgccactagggccggctggggcagctggcactcaccaggcctgggtcaggtggggaggggacaccaagggcccatttcctcccctctc

SEQ ID NO: 2693 - DNA, 1937 bp, Homo sapiens
  source 1..1937: mol_type = genomic DNA
gagaccgctgcaagtcccggggccctgcctctatcgtcctaggggttccgcgggcaggagcaacccagaagcaccggtgaggccagcgcgtcctcgcagccatgagcagtgagcaggataaatcggccagcaaagaaaaatccaagaaaccagtaagatttctaccacagctgtctatggagaaattagccagcaaagaaaagttcaaggcaccagcaagagctttaccacagctgtctatggtgagtacaaagccccactggcagcaggcagctccatcattccatttgagtgtaaagcaggatgatgagagtccagaaccatttagtgttaaaaatgaacagtcccatgctgaatacatggaacgttttggaaaaaagggcaaattaccccaccaagttgatgatagttatgttggaccatctacttccaaatcaaagggcaaatctccacataaagaacgagaaaactttagaagtactcttgttaatgtcattatgcaacaagatgctgacttagactcagctgtccctgatggaagcacaattccaaaaccgaccgcttctgctatagagaaagacatcttgagatattactattatattcaccatggaattgatacagaccatgtagccccaatggaagattcttggctagaacacgtactggatttagttccacaacatctgaaagtcttcactgacagcatagttacattatctgatgaaatgagagaggattatcttcttagtgtaaggaaatccatagttgattttgttttaaaagatcctcgagagaaaggagatgataagaagacagatgaacttccagcccatcgtgctgaaatggaaattctgccaaaaccttggaggaaatcttttttagctgcaagcagttatattagggatcacttgaatgcaatgaaccccacaatgctggctgtactagatttgtggcacactaattttaaaaaattacgtttagttgatatcaaagaatttcataattgccaggatgcattagagctgtcaagttttcagaacattatcatgagacacatggactctgccaaagagactctacttaaaatgtggtttccagaagtgcagaatatttattaccaaggtaataaaaaaaagcaattgccaactggtgacagcagtgccaaattggaatcttttttcaactgtgctgctgcacttatgactttacagctgcaggacctcactttagtctccatgcaagatttcacggacttaattgcacaacccccagattctgttagagcttttgaacatccaggtttcatcatgaggctgattcttgataatgacaccattaagtttgaacctgagttgagtgactatatagatatctttctaaatgtttatgacgtcatgattaaagctgtcagttttgtgccaagagttgagacaaaattgtattccaagtggagaaacaaagcaaaaccaggacatttttacttttctcatattcaaaggtctgtcacctttcagcattctgaagtttcgtctcctcagaactctcattttaagattgtgtcacccttcagtgttcttggctttacatggagatgccaattatgacttccaactttgctcgaccttgaggctttgtttcctggcagcccctcccatgcatccaccttgccggaaactcattaaagcaaagcttagaccaccaaggatcagcagggtccccagggcagctgctcacttctgcacataatgacctttcaactcatgctttctctcattttggtcccttagacttttttttttgttgttatttccttagctatacgttataaaagataaagtcagctttattatcctggcatatttatgtgttttgaattgagtagttgttttctggatatctattcctcatactaccatgaatagaagtctctcaag

SEQ ID NO: 2694 - DNA, 3793 bp, Homo sapiens
  source 1..3793: mol_type = genomic DNA
gatgcctttaactctgccagggaactggcaagcaacaaagaaggtggtgattggctggattcttgctcatggctcctggcagatctgacaaatcctcttgcttttgctctaatctctgtctggatacttttaggaaaagaaccttgttattatgtactaaagtgaataatttgtgctcttagagtaggagttggaactataggacttgaaggcaagagcaggtatcttatcaaggatctactcactcagtttccctaaagctctctctccagatcggattcaaccgcacatcatgacagatgttccggctacatttacccaggctgagtgtaatggggataaaccacctgaaaacggtcaacaaacaatcactaaaatcagtgaggaattgactgatgtggacagccccctgccacactacagggtagaacccagtctggaaggtgcactcaccaaaggaagtcaggaggaaagaagaaaattacaagggaacatgctgctcaactcatccatggaggacaaaatgctaaaagaaaacccagaagagaaactctttattgttcataaggctatcacagatctttctctccaagaaactagtgctgatgaaatgacattcagagaagggcatcagtgggagaagattcctctgagtggcagtaaccaggaaataagaagacagaaggagaggattactgagcagcctctcaaagaggaagaagatgaggacaggaagaacaaaggtcaccaggcagctgaaattgaatggctgggatttcgaaaacctagccaagctgacatgttacattctaaacatgatgaggagcagaaggtttgggatgaagaaattgatgatgatgatgatgataattgcaataatgatgaagatgaagttcgagtgatagaatttaagaaaaaacatgaagaggtttctcaatttaaagaggaaggtgatgcaagtgaggactccccactgagcagtgccagttcccaagctgtgacacctgatgagcagccaaccttagggaagaagagtgatatctccagaaatgcttattccagatacaatacaatatcctatcggaaaatcagaaagggaaataccaagcaaagaattgatgaattcgagtctatgatgcatttataaactaactggaactgagaaattctcatgcccactaaaggaaaagctaattctattgccccagggtgcatatttctatgccttatttgagttatcacttggagggaggtggaagttgactctctttttcactgtagaataatgtggaaataaccctagataaaaattcagtctgataacctcaaatcaaaaagctttaaataaattcttgggcatttatcttttaaaacttcactaatatagcattgtgtgataagcactaagcagtcagtcccctgggggaatctggcataattcggctataaatgtagcaatgcttggaaaggtagtcatcaaatgagactatttgaggggactatttgaaatgattctggtatttcttttggtatctttcttcctgtacattggagtgatggaaagtctggtattaaaacctctcttacttttaaacttgattttgcagactctggcaataagccttccaaaattctgtgccttttctattatcaccaaacaatatgttaagtggctttccttggcatctacagagaaaacattctatagccctccttcctaggtgttaccattcactgaatcttctctcagagggagatgagcaattgtcagtcaggataattctgtttgctaaatgttgcctttatgctttcaaactgaattaaacccattgtgaggttgacactgggaggggctagaagattggtgggcagcagactaaagagttatgttggatagttttatttctgtggctgaaaataaaatcttgtctagcacagttaaagtcattaaaaataaaaatgacagctttagcacaattttaagaaaatgcccctctctattaccacattttctcttattaacagtatctcagaataattttctttccttagaaacctgagagaatgctagtcataactgtactagttactatgaaaatggaaataattatcttagaatattttcaaagtagagcgtgagcatgtatttttagtgggagagctctgatagttgttgggaatatataatttactggacctcagcccaaatcaagatgcttaaaattgtacttgtggagcttcactcaaaccaatgtgtcaaataacgtattgaatatttatgaaaagagagactatatttatattcttagatagtttgttccacaatttttcatttcatgcttccatatatattaccctgaactttctatcaccacagataaagattttgttttgccctgcaaataaaaagacaattccttattgtctgaatgtaatacagtcttcattgtactattcaaccctttgtttctttctttttcattttgtgaaaaactccatgttagtcctcttagatgactgcttatttatgtgtaacataaatcccacatattctaatgacaacttctttaatccttccgggtcatatattatatttccatagtatcacatactattatttagttgtttacaagactccaatttgaattcaggattacagtgctcctttcattctttcaaacagataacataaaagttctgttaccctcattctatacaacctatggatttcatgtgttacaatatcagtttccagaataaagtgagggaaatcaggtctttattgataaagttagggagaagattgatgcaataggacaatttccaatttaatttagatcctctaatctttctacatggacaagctgttttcttttctaggttactgataacccctacaattttcgacttaacttcaaaacacagtattgtgttatctatcacataacaggaccatgtttttaacctaccatcaagagcctgtattttgagttattccaacagagatgatggattcctgtagaactagaggtgggtgacctatggttatgtggcacggcaaagcaagtacctcttaagggactctaatatatgctaacgctggtcctcttagctctgtgctctcaccagacaatgaatgaactatgaaagatttagtcaacagaaactattttagggtatgtttagttggtaaatgcttcatgttcatggatgacacaatgtttttgcaaaaaaaccctgaaactattctttggcattggtgtccatggccctataccgccatcttacacgaaagccacagagttgaaagccacagagttgaaagccacagagttaagtgacctcaggtaacataatggtgatggttggccatttgagtctttgtaacctaggaaagacaaaggtctgattcagattgcatgggggatttttaacatatttgaaactcagggggaacatgattaagaacacaaactggtagctacacatgaaggtttacttgagcttttgtgattcaaagttcaggggtggtaaggactctggtaccagggaagagggagaattaatttattgtgcaaatgctggtatttcttacatgattttttgttttcctctgttgctagataaatagaaactaataatagctctatttctctgccaatataaaatctacctttcatataatgctacattgaaggcacagaatttgctaccatctctctctccccctacctaccaaactatccacaatttaaataaagaactgctgtgtctgacttactctcaataaaag

SEQ ID NO: 2695 - DNA, 1370 bp, Homo sapiens
  source 1..1370: mol_type = genomic DNA
tccagaggtgcgtggtcgtggcgcgagggatcctgaggctgctccagcagtgcgccgccgccgtctcctggggcggcttgggttagccgggagatcctgtgccttcaaaccctacgagtccatactttaaaacaaaatgaagaaagtaaggcttaaggaactagagagtcgcctgcaacaagtggatggatttgaaaagcccaagctacttctggaacagtatcctaccaggccgcacattgcagcatgtatgctctatacaatccataacacttatgatgacattgaaaataaagtcgttgcagatctaggatgtggttgtggagtacttagcatcggaactgcaatgttaggagcagggttgtgtgttggatttgacatagatgaagacgcattggaaatatttaataggaatgcagaagagtttgagttaacaaatattgacatggttcaatgtgatgtgtgcttattatctaacagaatgtccaagtcattcgatacagtaattatgaatcctccctttgggaccaaaaataataaagggacagatatggcttttctaaagactgctttggaaatggcaagaacagcagtatattccttacacaaatcctcaactagagaacatgttcaaaagaaagctgcagaatggaaaatcaagatagatattatagcagaacttcgatatgacctgccagcatcatacaagtttcacaaaaagaaatcagtaagtctcttgattttggctggtctacattcggtattgaaaagctttctgggccggatgtggtggttcatgcctgtaatcccagctactcgggaggctgaggcaagagaatcgcttgaactcaggaggcagaggttgcagtgagctgagattgccccactgaactccagcctgcgcgataagagtgagactcagtctcgaaaaagaaaaaaaaaggaaagctttgtgacaagtaattatttctagtgttaccaactttcctgtgtaaatatacaaagccagcctaggagacaccataaatggcctgtgggaaaggcccatcgtcaatagctaatattctagttctttcctaaatgctttgggtacaaaaagaaaaaaaaaatcaaaaactgtttttgctcttttcatatagtatatattttattagttagtttgtactaatacattctcatattacaaaggcaatttaatggaagaatcttccttttgatatttgaatcatctgaaataacacaaacagaacaatacattcaaagaaatctcatttgcataacaaaaagacaagttaaacaacaaaaaaatttttcctttctcacaggtggacattgaagtggacctaattcggttttccttttaaaagccc

SEQ ID NO: 2696 - DNA, 1075 bp, Homo sapiens
  source 1..1075: mol_type = genomic DNA
gacttccggtgctggaggagggggccggcggcgagggactccaggaggacgcgtccaacttcgagaccggcgggggccggctccgctcttccaacccctccatgtgtgaagagggcggacgacgcagcgggggaagaaaaataagctagtctaggacaagtgtccaggcgacgtggaacccaggtgtcttttatgaataatcaaaagcagcaaaagccaacgctatcaggccagcgttttaaaactagaaaaagagatgaaaaagagaggtttgaccctactcagtttcaagactgtattattcaaggcttaactgaaaccggtactgatttggaagcagtagctaagtttcttgatgcttctggagcaaaacttgattaccgtcgatatgcagaaacactctttgacattctggtggctggtggaatgctggccccaggtggtacactggcagatgacatgatgcgtacagatgtctgcgtgtttgcagcccaagaagatctagagaccatgcaagcatttgctcaggtttttaacaagttaatcaggcgctacaaatacctggagaaaggttttgaagatgaagtaaaaaagctgctgctgttcttgaagggtttttcagagtcggagaggaacaagctagctatgttgactggtgttcttctggctaatggaacacttaatgcatccattcttaatagcctttataatgaaaatttggttaaagaaggagtttcagcagcttttgctgtgaagctctttaaatcatggataaatgaaaaagatatcaatgcagtagctgcaagtcttcggaaagtcagcatggataacagactgatggaactctttcctgccaataagcaaagtgttgaacacttcacaaaatattttactgaggcaggcttgaaagagctttcagaatatgttcggaatcagcaaaccatcggagctcgtaaggagctccagaaagaacttcaagaacagatgtcccgtggtgatccatttaaggatataattttatatgtcaaggaggagatgaaaaaaaacaacatcccagagccagttgtcatcggaa

SEQ ID NO: 2697 - DNA, 2135 bp, Homo sapiens
  source 1..2135: mol_type = genomic DNA
gtgtttcaccacacggagatgtggtcacgtgacttgtcaactttcacccaggatgtctcccttctgacttccccttagcaaccaagtcgcggcgcttggttccccagcaaccgggagacgcgtctgctgcgtggaaccgccgagttcccagcgcttgagaagggtcttcctatgttgcccgggctggtcttgaactcctgaactcaagcagtccttccacctcggcctcccaaagagctgggattacaggtgaaaattctggatctgttatctgtgaggaggccactccgttgacagttgtgtaaaactctgctgctttccccagctccaacctctctggtcttcaacaacactatcatcagggaaaacgtgggggaagatgaaccagccgtgcaactcgatggagccgagggtgatggacgatgacatgctcaagctggccgtcggggaccagggcccccaggaggaggccgggcagctggccaagcaggagggcatcctcttcaaggatgtcctgtccctgcagctggactttcggaacatcctccgcatagacaacctctggcagtttgagaacttgaggaagctgcagctggacaataacatcattgagaagatcgagggcctggagaacctcgcacacctggtctggctggatctgtctttcaacaacattgagaccatcgaggggctggacacactggtgaacctggaggacctgagcttgttcaacaaccggatctccaagatcgactccctggacgccctcgtcaagctgcaggtgttgtcgctgggcaacaaccggattgacaacatgatgaacatcatctacctccggcggttcaagtgcctgcggacgctcagcctctctaggaaccctatctctgaggcagaggattacaagatgttcatctgtgcctaccttcctgacctcatgtacctggactaccggcgcattgatgaccacacaaaaaagcttgcggaggctaagcaccagtacagcatcgacgagctgaagcaccaggagaacctgatgcaggcccagctggaggacgagcaggcgcagcgggaggagctagagaagcacaagactgcgtttgtggaacacctgaatggctccttcctgtttgacagcatgtacgctgaggactcagagggcaacaatctgtcctacctgcctggtgtcggtgagctccttgagacctacaaggacaagtttgtcatcatctgcgtgaatatttttgagtatggcctgaaacagcaggagaagcggaaaacagagcttgacaccttcagtgaatgtgtccgtgaggccatccaggaaaaccaggagcagggcaaacgcaagattgccaaattcgaggagaagcacttgtcgagtttaagtgccattcgagaggagttggaactgcccaacattgagaagatgatcctagaatgcagtgctgacatcagtgagttgttcgatgcgctcatgacgctggagatgcagctggtggagcagctggaggagactataaacatgtttgaaaggaacattgttgacatggtaggactgtttatcgaaaatgtccaaagcctgatggctcagtgccgggacctggagaatcaccaccacgagaagctcctggagatctctatcagcaccctggagaagattgtcgagggcgacctggacgaggacctgcctaacgacctgcgcgcgggtcgtttccaaaagttcaattatgtggaggcttctggcactttctaagagaagcagttacaggtagaggttgaagtctgagatttcccctggaggtcttcttaaccttagagtctgtataatgagtactgtgggggtgttggaaccaccatttctgatcctgcacaatgccatccggtttgcaccagcacatccactgatgaatggtcacaaaatcagcagggtcggcctgaggaacctggctccatccctggggtctgcacgctaagaaggctctcccggatgtctgcgctgggtcccgcggcagcatgtctatgtctctggaaggagtgtgggcatcaagggcccagacagagatactatgttgtcagggcccagacagagatactatgttgtcagggcctgctttagtgcatgcatcattcactcc

SEQ ID NO: 2698 - DNA, 1883 bp, Homo sapiens
  source 1..1883: mol_type = genomic DNA
gttgagtcaagatggcggccaaggtggcgaagcagcagccgcggcggcggcggcggctggagtgagcgtccgactcgccgcgccgaacgaggtcccggtgtagggccgcgcgccgtggccgcgtcccactcctcaggccggggcgcacgtcggctcccacgcttagccagctcccggtggtttcctagaaacatgattgtttattggcattgatctcacagtctggtgaggacttctttactgataatgtcaagttcaggttatcctcccaaccaaggagcattcagcacagaacaaagtcgttatcctcctcactctgtccagtatacatttcccaacacccgccaccagcaggagttcgcagtccctgattatcgttcctctcatcttgaagtgagtcaggcatcacagcttttgcagcaacagcagcagcaacagcttcgaaggcgaccttccttgctttcagaatttcacccaggttctgacaggcctcaagaaaggagaactagttatgaaccgtttcatccaggcccatccccagtggatcatgattcactggaatcgaagcgaccacgtctggaacaggtttctgattctcattttcagcgtgtcagtgctgcggttttgcctttagtgcacccgctgccagaagggctgagggcttctgcagatgctaagaaggatccagcattcggaggcaaacatgaagctccatcctctccaatttcggggcaaccatgtggagatgatcaaaatgcttcaccttcaaaactctcaaaggaagagttaatacagagtatggatcgtgtagatcgagaaattgcaaaagtagaacagcagatccttaaactgaaaaagaaacaacaacagcttgaagaagaggcagctaaacctcctgagcctgagaagcccgtgtcccctcctcctgtggagcagaaacaccgcagtattgtccaaattatttatgatgagaatcggaaaaaagcagaagaagctcataaaatttttgaaggtcttggcccaaaagttgaactgccactgtataaccagccatcagataccaaggtgtaccatgagaacatcaagacaaaccaggtgatgaggaaaaaactcattttattttttaaaagaagaaatcatgcaagaaaacaaagggaacaaaaaatctgccagcgttatgatcagctcatggaggcatgggagaaaaaagtggacagaatagaaaataatcctcggaggaaagctaaagaaagcaaaacaagggaatactatgaaaagcagtttccagaaattcgaaaacaaagagaacagcaagaaagatttcagcgagttgggcagaggggagctggtctttcagccaccattgctaggagtgagcatgagatttctgaaattattgatgggctctctgagcaggagaataatgagaaacaaatgcggcagctctctgtgattccacctatgatgtttgatgcagaacaaagacgagtcaagttcattaacatgaatgggcttatggaggaccctatgaaagtgtataaagataggcagtttatgaatgtttggactgaccatgaaaaggagatctttaaggacaagtttatccagcatccaaaaaactttggactaattgcatcatacttggagaggaagagtgttcctgattgtgttttgtattactatttaaccaagaaaaatgagaattataaagccctcgtcagaaggaattatgggaaacgcagaggcagaaaccagcagcaaattgctcgaccctcgcaagaagaaaaagtagaagaaaaagaagaggataaagcagaaaaaacagaaaaaaaagaagaagaaaagaaagatgaagaggaaaaagatgaaaaagaagactccaa

SEQ ID NO: 2699 - DNA, 991 bp, Homo sapiens
  source 1..991: mol_type = genomic DNA
tcacctcttaacagaagcccaccctccatccctgacaccatgacccactgttgctccccttgctgtcagcctacctgctgcaggaccacctgctggcagcccaccactgtgaccacctgcagcagcacaccctgctgtcagccctcctgctgtgtttccagctgctgccagccttgctgccacccaacttgctgtcaaaacacctgctgtaggaccacctgctgccagcccatctgtgtgaccagctgctgccagccttcctgctgtagcacaccctgctgccagcccacatgctgtgggtccagctgtggtcagagcagctcctgtgcacctgtgtactgcagaagaacctgctaccaccccacaagtgtttgtctgcctggttgcctaaaccagagctgtggctccaactgctgccagccctgctgccgcccagcctgctgtgagaccacctgctgcaggaccacttgtttccagcccacctgtgtgtacagctgctgccagccttcttgctgctaatcaactcccaagagaactaccatcctcacacaacaaccttcagctcaactgacttgtcttttgagggactaatttactttgctgctgacagccaccatgctctcacccaaatttttatgaattctctacatgtttaaaatcttgggaatctgcttgagggagggcagaatacttcatcctcattccctctttccttacaccttgtggatcatgtgccagcttcgtctgttcttaatttggagtcatgatctcagctttgtctcaaaaatcaagagcttcattctttgcttctaaggaatttaggtttctgcaactgatcaatcatctttgcaattatattttcattttaaatatccttctcatggttcttgtatccttctttcttcttttcacgataactttgggttatgtctctggtagcagagattcttacctatatgtttctgaataaactctgaaccatcttcatctc

SEQ ID NO: 2700 - DNA, 3113 bp, Homo sapiens
  source 1..3113: mol_type = genomic DNA
ctctcggtcccatattgaactcgagttggaagaggcgagtccggtctcaaaatggagggccatgatccaaaggaaccagagcagttgagaaaactgtttattggtggtctgagctttgaaactacagatgatagtttacgagaacattttgagaaatggggcacactcacagattgtgtggtaatgagagacccccaaacaaaacgttccaggggctttggttttgtgacttattcttgtgttgaagaggtggatgcagcaatgtgtgctcgaccacacaaggttgatgggcgtgtagtggaaccaaagagagctgtttctagagaggattctgtaaagcctggtgcccatctaacagtgaagaaaatttttgttggtggtattaaagaagatacagaagaatataatttgagagactactttgaaaagtatggcaagattgaaaccatagaagttatggaagacaggcagagtggaaaaaagagaggatttgcttttgtaacttttgatgatcatgatacagttgataaaattgttgttcagaaataccacactattaatgggcataattgtgaagtgaaaaaggccctttctaaacaagagatgcagtctgctggatcacagagaggtcgtggaggtggatctggcaattttatgggtcgcggagggaactttggaggtggtggaggtaattttggccgtggtggaaactttggtggaagaggaggctatggtggtggaggtggtggcagcagaggtagttatggaggaggtgatggtggatataatggatttggaggtgatggtggcaactatggcggtggtcctggttatagtagtagagggggctatggtggtggtggaccaggatatggaaaccaaggtggtggatatggtggaggtggaggatatgatggttacaatgaaggaggaaattttggcggtggtaactatggtggtggtgggaactataatgattttggaaattatagtggacaacagcaatcaaattatggacccatgaaagggggcagttttggtggaagaagctcgggcagtccctatggtggtggttatggatctggtggtggaagtggtggatatggtagcagaaggttctaaaaacagcagaaaagggctacagttcttagcaggagagagagcgaggagttgtcaggaaagctgcaggttactttgagacagtcgtcccaaatgcattagaggaactgtaaaaatctgccacagaaggaacgatgatccatagtcagaaaagttactgcagcttaaacaggaaacccttcttgttcaggactgtcatagccacagtttgcaaaaagtgcagctattgattaatgcaatgtagtgtcaattagatgtacattcctgaggtcttttatctgttgtagctttgtctttttctttttcttttcattacatcaggtatattgccctgtaaattgtggtagtggtaccaggaataaaaaattaaggaatttttaacttttcaatatttgtgtagttcagtttttctacattttagtacagaaactttaacaaaatgcagtttcgaaggtgtttccttgtgagttaacaagtaaagaagatcattgttaattactattttgtatgaattttgctaaagttaactgtaaagaaacacctgctgacttgcagtttaaggggaatctattctccccatttccaaaccatgatatgaatgggcgctgacatgtggagagaatagataatttgtgtgtttgcaatgtgtgttttagataaataggattgggtatttaaattagcatttgtgaatttaatagcattaagattaccttcaaatgaaaaaaaatctcaaaatttctatttggtttttgtgcattttcttttaaaatgtaatcatatgattttagtgtgttagacttgctgagtcctagctgtgtttagaacatctctattctacatttaccttggtcaaatttgaactgctgccataggttttgggtgtaaagaatgtttactgccctccatttaaattctgaaaagggatggtggatgttttccctctcctacgttagaaaccattcttaaaaacttttgaaaatatagaaccattaagcctgctatatctgagcaaattagtgggtaccttttttttcttatttaaagcacaagaggcccataaatcttgagttactttaaattcttttttttgatacaagttttcagagcaagagaataaaaatcatgtgttattaaacccctaactggctggcatgctttcctgtttgtattctatacattttgctggatgaaaccaaggatagttcaggtataattgtccaaaataacctaactgcagcagaaatgtagcacagttgcttagtacaggcttctcacttcctacagacctgaattcaaatttggatagtctgagttcttaaattcccaaagaacacactgttatttcttgtgtatatttcaacataaatcatgttgttaccaatttgtttggaaggccctggttgagaagagttttagttaataaggtcatatatacatatattaatataaaccaatgtctactgttttgctccagctagtgcttacagtttcattcgagccctgagtatgtgccctgctgttactctctttggtagttgaacgttgaattcaagtcttttgttttaagaagtactaagcaaacaagcaataaaaaggggaatggggtgtgctagtgtttgaatatgctctcttgttgctctaattctgtgcctctgtgcattaatatttggatgcatgcaatgccagcatggaaattggtcttcacacatactgcagttttccagaaacattcacaaaccaataaatgtaacagacattccatttgttaatgggcatatatgtgaaaagcagtgtagaaaataggctaatattagaaaatggttaagtcctaaataacttcaagtgtggttatataatggacactgtcaatgttcataacttaaacctgggtacctggtcaaaataatgcttgggaaacattaaaattgagctaaattgtctcaagttcttttattcatataaataaagtttaaaggaatgggggagattaa

SEQ ID NO: 2701 - DNA, 615 bp, Homo sapiens
  source 1..615: mol_type = genomic DNA
gcgcgtggcgggcaggcggcaggaggcgggtgggtcaaggtaactctgggctacagagtccttgctgggggttcggggagcgcttggaccccggcttctgggacgcgtcaggtcgccgtgaagatgattgcatgagatcgtgcgtgtgaacgtttgttgacagctgttacttgagtccgacagccctgggggccgtgcatctgcgtaacatggctacctctgaactccttgggggacacgtatatctttgagaatccgatgaaaaccagagattccgcccttgttttcttagaattaaaattaccacagactgggtaatttataaagaaaagaagtttatttggctcacagttctggagactgggaagtccaagagcatggtgcaagtatctggagaagggagcactggctttgctttcatcaggccaaagatgcctttctttgggaatacgttcagtccgaagaagacacctcctcggaagtcggcatctctctccaacctgcattctttggatcgatcaacccgggaggtggagctgggcttggaatacggatccccgactatgaacctggcagggcaaagcctgaagtttgaaaatggccagtggatagcag

SEQ ID NO: 2702 - DNA, 1103 bp, Homo sapiens
  source 1..1103: mol_type = genomic DNA
cgcggctccagggccacgttccagggtcgggtttggtggattcctcagtccctgccgccgcggggcgccctgggatagcggcggggcctcctgaacagatctcggcccctttccaaacactcctgatgcctcatttgcctctcgcctcttttcgaccaccattttgggggctgaggcactcacggggcctccccaggtttcactccgtttctacacagtcggagccccatggatctcccatctcccggaggaaccgtgaagccaaacagaagcgcctgcgagagaagcaggcgactctggaggctgagatagcaggggagagcaagtcacctgcagaatccattaaggcctggaggcctaaggagttagtattgtatgaaatccctacgaaacccggtgaaaagaaagatgtctctgggcccctgcctcctgcatacagcccccgatatgttgaggctgcctggtacccgtggtgggtacgagagggcttcttcaaaccagaatatcaggcccggctgccccaagctacaggggagaccttttccatgtgtatcccacctcccaatgtcactggctccctgcacattggccacgcactcacggtggccatacaggatgccctcgtgcgctggcaccggatgcgtggggatcaagtgctgtgggtccctggttcagatcatgcaggaattgctacacaagctgtggtggagaaacaactgtggaaggaacggggagtgaggagacatgagctgagccgggaggccttccttagggaggtgtggcagtggaaggaggcgaaaggtggagagatctgtgagcagctgcgagctctgggtgcctccctggactgggatcgagagtgttttaccatggatgttggctcctcagtggctgtgactgaagcttttgtgcggctctacaaggcggggttgctgtaccggaaccatcagcttgtcaactggtcatgtgctttaagatcagccatctcggacattgaggtggagaaccggcccctgcctggccacacacagcttcgactgcctggctgccccacccccgtgtcttttggcctcctattttctgttgccttccccgtggatgga

SEQ ID NO: 2703 - DNA, 2031 bp, Homo sapiens
  source 1..2031: mol_type = genomic DNA
atgattcccccacaggaggcatccgctcgacggcgggagattgaggacaagctgaagcaggaggaggagactctgtccttcatccgagacagcctggagaagagcgaccagctcactaagaacatggtgtctatcttatcatcctttgagagccgccttatgaagctggagaactccatcatccctgtgcacaagcagacggagaatctgcagcggctgcaggagaatgttgagaagacgctgtcctgcctggaccatgtcatcagctactaccatgtggccagtgacactgagaagatcatcagagagggccccacaggtaggctggaagagtacctgggaagcatggccaagattcagaaggcagtggagtatttccaggacaacagcccagacagcccggaactcaacaaagtgaaactgctctttgagcgcgggaaggaggccctggagtccgaatttcgcagcctgatgacgcggcacagtaaggtcgtctcgcccgtgctcatcttggatctgatcagtggtgacgatgatctggaggcccaggaggacgtgaccctggagcacctgcccgagagcgtgctccaggatgtcattcgcatctcccgctggctggtggaatatggccgcaaccaagatttcatgaacgtctactaccagatacgctccagccagctggaccgctccatcaaaggactgaaggagcatttccataagagcagttcttcctctggggttccctactcccctgctatccccaacaagaggaaagacacacctaccaagaagccagtcaagcggccaggtcacgagcatgatttccgagttaagcacctgtccgaggccttgaacgacaagcacgggccgctggccgggagagatgacatgctggacgtggagaccgatgcctacatccactgcgtcagtgccttcgtcaagctggcgcagagcgagtaccagctgctggccgacatcatccccgagcaccaccagaagaagaccttcgactccctgatacaggatgccctggatgggctgatgcttgaaggggagaacatcgtgtctgctgcccggaaggccattgtgcgacacgacttctccacggtgctcaccgtcttccccatcctgcgacacctcaagcagaccaagcctgagtttgaccaggtgctccagggcacggctgccagcacaaagaacaagctgcctggcctcatcacatccatggagaccatcggtgccaaagcgctggaggacttcgcagacaacatcaagaatgacccggacaaggagtacaacatgccgaaggacggcaccgtacacgagctcaccagcaatgccatcctcttcctgcagcagcttttggacttccaggagacggcaggcgccatgctggcctcccaagagaccagctcttcggccaccagctacagctctgagttcagcaagcggctgctaagcacctatatctgtaaagtgctgggcaacctgcagttgaacttgctgagcaagtccaaggtgtacgaggacccagctctgagcgccatcttcctgcacaacaactacaattacatcctcaagtccctggagaagtctgaactgatccagctggtggcagtgacacagaagactgctgagcgctcctaccgggagcacattgagcagcagatccagacctaccagcgcagctggttaaaggtgactgattacatcgcagagaagaatctacctgtgttccagccgggagtcaagctccgggacaaggagcggcagattatcaaggagcgttttaagggcttcaatgatggcctcgaagaactgtgcaaaatccagaaggcctgggctattccagacacagagcagagggacaggattcgccaggcccagaagaccattgtcaaggagacctacggggcctttctacagaagtttggcagcgtgcccttcaccaagaacccggagaagtacatcaagtacggggtggagcaggtgggcgacatgatcgatcgccttttcgacacctctgcctga

SEQ ID NO: 2704 - DNA, 590 bp, Homo sapiens
  source 1..590: mol_type = genomic DNA
agagatgtcttccaaggacaagggagaggggattatacaagagtgaggtgttgtccctgatatagacctgaatgggctcagccctagacacacttttaaagctctctctccagatcggattcaaccgcacatcatgacagatgttccggctacatttacccaggctgagtgtaatggggataaaccacctgaaaacggtcaacaaacaatcactaaaatcagtgaggaattgactgatgtggacagccccctgccacactacagggtagaacccagtctggaaggtgcactcaccaaaggaagtcaggaggaaagaagaaaattacaagggaacatgctgctcaactcatccatggaggacaaaatgctaaaagaaaacccagaagagaaactctttattgttcataaggctatcacagatctttctctccaagaaactagtgctgatgaaatgacattcagagaagggcatcagtgggagaagattcctctgagtggcagtaaccaggaaataagaagacagaaggagaggattactgagcagcctctcaaagaggaagaagatgaggacaggaagaacaaaggtcacc

SEQ ID NO: 2705 - DNA, 873 bp, Homo sapiens
  source 1..873: mol_type = genomic DNA
gaggggagtggaggggaggcctcgcctggcccaccttcctcctgcccctctaccatgtggcccttcccgagccgctctctcttcccacccccgactcaggcctggctccagacggtctcctcagaccctgaggcccagggctggggggcctggaacgagaccaaggagattctggggccagagggtggggaagggaaggaggagaaagaggaggaagaggatgcagaggaagaccaggatggggatgcaggctttctgctgtctctgctggagcaagagaacctggctgagtgcccattgcctgaccaggagctggaggccatcaagatgaaggtgtgtgccatggagcaggccgaggggacgccacggcctccaggagtgcagcaacaggccgaggaagaggagggcaccgcggccgggcagctgctgagccctgagaccgtgggctgccccctctctgggacccccgaggagaaggtggaggctgaccacagatccgtctacgtgggcaacgtggactacgggggctccgccgaggagctggaggcccacttcagccgctgtggggaggtccaccgagtcacgatcctgtgtgacaagttctctggacaccccaaggggtgctgccgaaaagaaccaacttccctgggatcagctccacagaccgcgggggccttcgaggacacccaggctccaggggggcacccttcccccacagcggcctccagggcaggccccggctcagaccacaagggcagaaccgggcccgtggaaaattctcaccatggttttcaccgtattaaagggaagacccgattttgagagaggggctggggcctggatcaggagtaaaccacttgtgctccatcctgg

SEQ ID NO: 2706 - DNA, 3678 bp, Homo sapiens
  source 1..3678: mol_type = genomic DNA
gaggcggtggcggcggaggcggcaccgattgctgtgtcggccccagtgcggccgaagtcgcggtagagcgtagccccacgcccctcccccgtccgcgccctccctctttccctggggatggagaaggcgacggttccggtggcggcggcgacggctgcagaaggagaagggagccccccggcggtggcggctgtggcgggcccccccgcggcggcggaggtcggcggcggcgttggcggcagcagcagagctcgctcggcctcgtctcctcgtgggatggtgcgagtctgcgacctgctcctgaagaagaagccgccgcagcagcagcaccacaaggccaagcgtaaccggacttgccgaccccccagcagcagcgaaagcagcagcgacagcgacaacagcggcggcggtggaggcggcggtggaggcggaggtggcggcggcggcaccagcagtaacaacagcgaggaagaagaggacgacgacgacgaggaagaggaggtttctgaggtggagtctttcattttggatcaggatgatttggaaaatccaatgctggaaacagcttccaagttgctcttatcaggtactgctgatggtgcagacctcaggacagtagatccagaaacacaggctagactggaagctttactagaagctgcaggaataggaaaattgtccacggctgatggtaaagcctttgcagatcctgaagtacttcggaggttgacatcgtctgttagttgtgcgttggatgaagctgctgctgcacttacccgtatgagagctgaaagcacagcaaatgcagggcagtcggacaaccgcagtttggcagaagcctgttcagaaggagatgtaaatgctgtgcgaaagttactcattgaagggcgaagtgtaaatgaacacacagaggaaggggagagcctcctttgtttagcttgttctgctggatactatgagcttgcacaggttttgttggcaatgcatgcaaatgtggaagataggggaatcaaaggtgacattacacctttaatggctgctgctaatggaggacatgtcaaaattgtgaagttgctgctagctcataaagcagatgttaatgcacagtcttcaacaggcaatacagcacttacatatgcttgtgctggaggctatgtagatgttgtaaaggtgctcttggaatccggtgctagtattgaggaccataatgaaaatggtcatacccctcttatggaagctggaagtgctggacatgtggaagtagccagattgctgctagaaaatggggctggcattaatacgcattctaatgaatttaaagagagtgcccttaccttagcttgttacaaaggacacttagagatggtgcgatttcttttggaagcaggcgcggatcaagagcataaaacagatgaaatgcacactgctctgatggaggcttgcatggatggccatgttgaagtagctaggttacttcttgacagcggtgcccaagtgaacatgcctgctgattcatttgagtcaccattaactttggctgcatgtggtgggcatgtggaacttgcggctttacttattgaaagaggagctagcctggaagaggtcaatgatgaaggttatacaccattgatggaagcagctcgagaaggacatgaagaaatggtggcattacttcttggtcaaggagcaaatatcaatgcacagacagaagaaactcaagaaactgccttgactctggcttgctgtggaggctttctggaagtggcagactttctaattaaggcaggagccgatatagaactagggtgttctacccctttaatggaagctgctcaagagggtcatttggagttagttaaatacttattagctgcaggagctaacgttcatgcaacaacagcaacaggggatacagcactaacatatgcctgtgaaaatggtcatactgatgtagcagatgtcttacttcaggcaggcgcagatctggaacatgaatctgaaggtggaagaactcctttaatgaaagctgcaagagctggtcatgtttgtactgttcagttcttaattagtaaaggagcgaatgtgaatagaaccacagctaataatgaccatactgtactgtccctggcttgtgcagggggtcatctggcagtggtggaactacttttggctcatggggcagatcctactcaccgtttgaaagatggctcaactatgttgatagaagcagcaaaaggtggccatacaagtgttgtttgctatctcttggattatcctaataacttgctttcagcccctccaccagatgtcactcagttaactcccccatcccacgatttaaatagggctcctcgtgtaccagttcaagcactgcccatggttgttccacctcaggagcctgacaaaccacctgccaatgttgccaccactcttcccatcaggaataaagctgcttctaaacaaaagtccagcagccatttgccagcaaacagccaggatgtacagggttacatcaccaatcagtctccagagagcattgtagaagaggctcagggaaagttaacagaactggaacagaggataaaagaagccatagaaaagaatgcacagctgcagtccttggaactggctcatgctgaccaacttaccaaggagaagatcgaggagctcaacaaaacaagggaggaacaaattcagaagaaacaaaagattttggaggaactacagaaagtagaacgagagttacaactgaaaactcagcagcagctaaaaaagcagtatctagaggttaaagctcaaagaattcaacttcagcaacagcagcaacagtcttgccaacacctgggattactaactcctgttggagttggagagcagctttctgagggagactatgcacggttacagcaagtggatcctgttttacttaaagatgaaccccagcagactgctgctcagatgggttttgcgccaatccagcctctggcgatgcctcaagctttgcctctggcggcaggtcccttgcctccagggtccatcgcaaatcttacagaactgcaaggagtgatagttggacagccagtactgggccaagcacagttggcagggctggggcaaggaattctgacagaaacacaacaagggttaatggtagccagccctgctcagaccctcaatgacacgctggatgacatcatggcagcagtcagtggaagagcatctgcaatgtcaaacactcctacccacagtattgctgcatccatttcccaacctcagactccaactccaagtcctatcatctctccttcagccatgcttcctatctaccctgccattgatattgatgcacagactgagagtaatcatgacacggcactaacacttgcctgtgctggtggccacgaggaactggtacaaacactgctagagagaggagctagtatagagcaccgagacaagaaaggttttactccactcatcttggctgccacagctggtcatgttggtgttgtggaaatattgctggacaatggtgcagacattgaagcccagtctgaaagaaccaaggacacaccactctccttggcttgttctgggggaagacaggaggtggtggagctattgttagctcgaggggcaaataagagcacaggaatgtttctgattacacacctctaa

SEQ ID NO: 2707 - DNA, 2886 bp, Homo sapiens
  source 1..2886: mol_type = genomic DNA
ctgcagcttccccgggcgctgcctggacaggcctgcctgcgtgctgggacatgtctggcctccaaggaccgtcggtgggcgatggctgcaacggtggaggggccagagctggaggcagctgctgccgcaggagatgcttcagaggattcggacgcagggtccagggcgctgcctttcctgggcggcaaccggctgagcttggacctgtaccccgggggctgccagcagctgctgcacctgtgtgtccagcagcctctgcagctgctgcaggtggaattcttgcgtctgagcactcacgaggaccctcagctgctggaggccaccctggcccagctgcctcagagcctgtcctgcctccgctccctggtcctcaaaggagggcaacgccgggacacactgggtgcctgtctccggggtgccctgaccaacctgcccgctggtctgagtggcctggcccatctggcccacctggacctgagcttcaacagcctggagacactgccggcctgtgtcctgcagatgcgaggtctgggtgcgctcttgctgtctcacaactgcctctctgagctgcctgaggctctgggggccctccccgccctcaccttcctcacagtgacacacaaccgcctgcagacgctgcccccagcactgggggccctatccaccctgcagcgcctcgatctctctcagaatctgctggacacgctacctcctgagattggaggcctgggcagcctcctggagctcaacctggcctccaaccggctgcagagcctcccagcctctctggcgggacttcggtccttgcggctccttgtcctgcacagcaacctcctggcctctgtgccagctgacttggcccgccttccactcctcacccggctcgacctgagggacaaccagctccgggacctgccccctgagctgctagacgccccctttgtgcgcctgcaggggaaccccctgggtgaggcctcgccagacgccccgagttcaccagtggcagccctcattccagaaatgcccagactgttcctgacctcagatttggacagctttcctgtgacccctcaaggctgctcagtgaccctggcctgtggcgtccgcctgcagttcccagcgggagccaccgccacccccatcaccatccgctatcggctgctgctgccggagccaggcctcgtccccctgggtcctcatgacgccctgctcagccatgtgctggagctgcagccccatggggtggccttccagcaggatgtggggctgtggctgctcttcaccccaccgcaggcccggcgctgccgtgaagtggtggtcaggacccggaatgacaacagctggggtgacctggagacctacctggaggaagaggcaccccagcggctctgggctcactgccaggtgccccacttctcctggttccttgtggtttcccgccctgtgtccaatgcctgcctggtgccaccggaggggacactgctgtgctcctcgggtcatcctggggtcaaagtcatcttcccccctggggccactgaggagcctcgtcgagtctccatgcaggtggtgcgcatggctggccgagagctgcaggccctcctgggagaaccagaggctgcagtgagccccctgctgtgcctgtcacagagcggtccccccagcttcctccaaccggtcaccgtgcagctgcctctgccctctggcatcacaggcctcagtctggaccgctcccgcctgcacctgttgtactgggcccctcctgcagccacctgggatgacatcacagctcaggtggtcctggagctcacccacctgtacgcacgcttccaggtcacacacttctcctggtactggctctggtacaccaccaagaactgtgtgggaggcctggctcggaaggcctgggagcggctgcggctgcaccgtgtgaacctcatcgctctgcagcggcgccgggaccctgagcaggtcctgctgcagtgcctgccccgaaacaaggtggacgccacccttcggcggctgctggagcggtaccggggccccgagccctctgacacggtggagatgttcgagggcgaagagttctttgcggccttcgagcgcggcatcgacgtggatgctgaccgccctgactgtgtggagggcagaatctgctttgtcttctactcgcacctgaagaatgtgaaggaggtgtccttctaccgtggcgcggtgcctgtgcgggtgcccgaggaggctgaggctgcccggcagaggaagggcgcagacgccctgtggatggccactctgcccatcaagctgccgagacttcgagggtccgaggggccacggcggggggctggcctctccttggcacccttgaatctgggagatgccgagaccggctttctgacgcagagcaacctgctgagtgtggctgggcgtctgggtctggactggccagccgtggccctgcacctgggggtgtcctaccgggaggtgcagcgcatccggcacgagttccgggatgatctggatgagcagatccgtcacatgctcttctcctgggctgagcgccaggctgggcagccaggggctgtggggctcctggtgcaggccctggagcagagtgaccggcaggacgtggctgaagaggtgcgcgcagtcttggagctcggccgccgcaagtaccaggacagcatccgacgcatgggcttggcccccaaggaccccgctctgcctggctcctcggctccacagcccccagagcctgcccaggcctaggccccacagacttttaggctggcccagatattccccagtggatgggcagagcccccaccttcaagtctctccagtgtgtggggacgggtccctgtgagcaacaaaactgcactgtttctttca

SEQ ID NO: 2708 - DNA, 2390 bp, Homo sapiens
  source 1..2390: mol_type = genomic DNA
ttcgcggtgccaccgccccgcccacgcctcctcgccggcctccgagtgcgtcacgtgacgggtcggtggcgctggcggttgctgtcagctgattcccggggttggtggcagcggcggtagcagcaatggactttctcctggggaacccgttcagctctccagtgggacagcgcatcgagaaagccacagatggctccctgcagagcgaggactgggccctcaacatggagatctgcgacatcatcaacgagacggaggaaggtcccaaagatgccctccgagcagtaaagaagagaatcgtggggaataagaacttccacgaggtgatgctggctctcacagtcttagaaacctgtgtcaagaactgcgggcaccgcttccacgtgctggtggccagccaggacttcgtggagagtgtgctggtgaggaccatcctgcccaagaacaacccacccaccatcgtgcatgacaaagtgctcaacctcatccagtcctgggctgacgcgttccgcagctcgcccgatctgacaggtgtggtcaccatctatgaggacctgcggaggaaaggcctggagttccccatgactgacctggacatgctgtcacccatccacacaccccagaggaccgtgttcaactcagagacacaatcaggacaggattctgtgggcactgactccagccagcaagaggactctggccagcatgctgcccctctgcccgccccgcccatactctccggtgacacgcccatagcaccaaccccggaacagattgggaagctgcgcagtgagctggagatggtgagtgggaacgtgagggtgatgtcggagatgctgacggagctggtgcccacccaggccgagcccgcagacctggagctgctgcaggagctcaaccgcacgtgccgagccatgcagcagcgggtcctggagctcatccctcagatcgccaatgagcagctgacagaggagctgctcatcgtcaatgacaatctcaacaatgtgttcctgcgccatgaacggtttgaacggttccgaacaggccagaccaccaaggccccaagtgaggccgagccggcagctgacctgatcgacatgggccctgacccagcagccaccggcaacctctcatcccagctggcaggaatgaacctgggctccagcagtgtgagagctggcctgcagtctctggaggcctctggtcgactggaagatgagtttgacatgtttgcgctgacacggggcagctcactggctgaccaacggaaagaggtaaaatacgaagccccccaagcaacagacggcctggctggagccctggacgcccggcagcagagcactggcgcgatcccagtcacccaggcctgcctcatggaggacatcgagcagtggctgtccactgacgtgggtaatgatgcggaagagcctaagggggtcaccagcgaaggtaaatttgacaaattcctggaagaacgggccaaagccgcggaccgattgcccaacctctccagcccctcagctgaggggcccccgggtcccccatctggcccagcgccccggaagaagacccaggagaaagatgatgacatgctgtttgccttatgagtgtggggtctggcaccctgcagcccaggtccccactgctctcacacccttaggctgggacctccctccctcctctggtgttaaggctgctttgggggtggcttgttacccccttttcctcctctttgaagacggagctgccccagctgtggctgggggtgtggaggcagtgggatgaactgggggacaggtctgcgctgcagtgggatctggctgctctgcctcctttcccaccccagctgaccatgagactttgctgagaagtggaggccccaggacaggctggctggctggctggctgcttgacccagtgtgactctccttcactgagtgataccctgctccgggcccatgccccaaggagcccttcagagcccacactgccagtcgaggcctggctggaggctggccacagtggaaattctgccgagcctcttgtcccttccctgctctgctgcatggggccccatggctttggctggccactgagggtagggtgtggaggtgtggaggccccctgaggagctgcggcggcccaggtacgaagctgcaactctgcgcgcagtgggcgagatctcatcagccccaggctgcaggtgaggcttcaggggatgctggggccccactgcccctccgctgccttgccctccatccttcctctgttccttctggccgggcaccacagcactggggctcacctcttggttgatcctcttgtactgggagaggtgccttttgtatccccaattaaaggtagaaaaccaccctgctagcagcattgtc

SEQ ID NO: 2709 - DNA, 1122 bp, Homo sapiens
  source 1..1122: mol_type = genomic DNA
gttggatgctctgctcgttgagtgaagaaaatccaccggcatcgcctgagccccgctaccgagaagggcgccgcttcctccggggagggggataaagatcccccgccgccggcccatgaggatattgccgtgaaaggcacagcgactgcagcaggaaccggacccggcaccggagcggcggcggcggcggcagcagcggtaccgcctcctcacccggcggcggcagcagcggcggcggcggcggcggcggcggcggcggcggcagcggtcccccctcctcacccgaacatcagggccctccagactcaggcgccccaacaaattcctagaggacctgtgcaacaacctcttgaggatcgaatcttcactcccgctgtctcagcagtctacagcacgaccccttatccctctggacagaatgcaggtccaaccacgctggtataccctcaaacccctcagacaatgaattcacaacctcaaacccgttctccgcccagcagaacagtgccaatacattgcacagacaactggaagaggaggaaggttttggaacagactcccgtttacaggtccttggctggaagaggctggataaaatactgcatttttttccagaggcctcaaatacagcctcctagagctaccatcccgaacagcagtccttccattcgtcctggtgcacagacacccactgcagtgtaccaggctaatcagcacatcatgatggttaaccatctgcccatgccgtacccagtgccccaggggcctcagtactgtataccacagtaccgtcatagtggccctccttatgttgggcccccccaacaatatccagttcaaccaccggggccaggtcctttttatcctggaccaggacctggggacttccccaatgcttatggaacgcctttttacccaagtcagccggtgtatcagtcagcacctatcatagtgcctacgcagcaacagccgcctccagccaagagagagaaaaaaactataagaattcgggatccaaaccagggaggtaaagacataacagaggagattatgtctggaggtggcagcagaaatcctactccacccataggaagacccacgtccacacctactcctcctcag

SEQ ID NO: 2710 - DNA, 588 bp, Homo sapiens
  source 1..588: mol_type = genomic DNA
gggatgctggggcgcgagcgggactgttgactaagcttcgttactgggccctggaagcgaggtgccaccgtacaggcagtacttctccaggcaagtagtattaaacaccagccgccctgggccaggcattgtactgtgggacccagtatgcattaagggaagaatccaggttcaaaatgagcctgtttggaacaacctcaggttttggaaccagtgggaccagcatgtttggcagtgcaactacagacaatcacaatcccatgaaggatattgaagtaacatcatctcctgatgatagcattggttgtctgtcttttagcccaccaaccttgccggggaactttcttattgcaggatcatgggctaatgatgttcgctgctgggaagttcaagacagtggacagaccattccaaaagcccagcagatgcacactgggcctgtgcttgatgtctgctggagtgacgatgggagcaaagtgtttacggcatcgtgtgataaaactgccaaaatgtgggacctcagcagtaaccaagcgatacagatcgcacagcatgatgctcctgttaaaaccatccattggatcaaag

SEQ ID NO: 2711 - DNA, 8047 bp, Homo sapiens
  source 1..8047: mol_type = genomic DNA
gacggcggctcggcgatggctctcccgcaggcgcagaaacggctgctgggcagctgatgggcaggagcttaccaggctggcttgctctgagctgcggttactgtgtccaggccccgggttctcagaactgtcatacataaagtacacagaaatgaagagaaaagtcgtgaatactcacaagctgagattgagtcctaatgaggaagccttcattttgaaggaagattatgaaagaaggcgaaaactaagattgctacaggttcgagaacaagaaagagatatcgccttacagataagagaagacataaaacagaggagaaatcaacaatttacacgtttggcagaggagctaagggcagaatgggaagaatcacaaactcagaaaatacagaacttggaaaaactgtatttggcaagtttaagaagtatgggagagggacatcgacaggccaaagaaaatgaacctgatttggatgctttggcacagcgggcagcagaaaggaaaagaaaagcagatttgaggcataaagaagccttgaaagtacagaaaaatcaaaaagaaatattactgaaacaaaaaacctggcatataaaagctcgaaaggaagcactgcttgtggaaaaagagagatcagccaaaattacaagtctgccacctcctcctccaactctttttgagaacatcgaagtaaaaagaatttctgcagtcaaaaccaatagttctacctaccatcatcttcacacttttgtgaatagagagacagacacaaaacggccagatgctcgtttggctgctgaagaggaagctaaacgattggaagaactacaaaaacaggcagcacaagagagaatggaacggtttgaaaaggcacatgtacggggattccaagcaatgaagaagatccatttggctcaaaatcaggagaaactaatgaaagaactcaaacagctacagcaagaggacctggcacgtaggagacagactgtagcacaaatgccaccacaactagttgaacttccatacaaacgcagtgaaatgaaagaagactggcagagagaattggaatttgcctttgaagatatgtacaatgcagacaggaaggtgaaagggaatctgattctgcaccttgaaccagagcccttgcccactgtgactaatcagatccaagatgaagagctggacctttcaatggaacaagaaaatttgggtgcagctgaagaccttccagtgacagaagctgaaatatgttctagtgaaacagatgttcccttggtaatgaagacccaacagattccttcaaaagttctttttaaaaaattattaaataagatccgaagccaaaaatctctctggacaattaaatctatgtctgaggatgaaagtgaaatgattacgactgttagtgaaattgagagtaaagcaccaacggttgagtcaggaacaattgccagcaaagagagaacgttatcctctgggcaggaacaagttgttgaaagtgatacactaacaattgagtctggaccacttgctagtgaagataaaccactttcgtgtggtacaaactctggaaaagaacaagaaataaatgagactctgcctatcacaactgtagctcagagttcagttctacttcatcctcaagaagcagcagccaggattagaatgtcagcaaggcagaaacagataatggaaatagaagagcagaagcaaaagcaattggaattacttgaacaaattgaacagcagaaattaagattagaaactgactgcttcagggctcagctggaagaagaaaaaagaaaaaaaactcaaccgactggggttggcattgctccagcatcatgccctgtaatttctgatgaagatagtcataggcagatgattcgtaactatcaacatcagcttttacaacaaaacaggttacacaggcagtctgttgaaacagccaggaaacaattacttgaatatcaaactatgttaaaaggaaggtgcccatcggtgtcagctccatcattgataactgattctgttatatcagtgccatcatggaaatctgagagaccgactgctatatcagagcattgggatcaaggtcagagactcaagttgagtcctaacaaataccaacccatacaacctatacagacctccaaattagaacaagatcattttcaggtagcgagacaaaatcactttccacaaagacaggtggaaacaacagaaacattacgcgcttcagatattttaaccaatcaagctttagaatcacaagaacatctaaggcaattctctcagactgaaacacaacagagagactataaattggtccccaaagattctgagacactttcaagggctttgtcacatgacaggcagctaatatcacaggatgctagaaaaatatctgaaacatttggggcaacaacttttcaaagtttagaatcccaacaattgttctcagagaatagtgaaaatatatcttaccatttaactgaaccttcttcatttgtaccactggtacctcagcattcttttagttctctgcctgttaaagttgagtcaggaaaaattcaagaacccttttcagccatgagcaaaagtacagtttccacaagccattctataatcagccaaatgcatgataggcctttgctgccgtcagagaatatcacagcccagcaaggtaatatgaaggccctccaagaacagttagacctacagaagaaagttcttcaggcaactcaggaagctcaggaacagttgcttttgtgcaaacagaaagaagtggaacagcaaacgggcctctcggtattccttcccttggtaactccagattcatctgctttattgccttctgccaaagcagatttggggagaatccaggaatcttcaccaaccaagaataatattgcagtttcctcagaccatcatgtgatctcacaacttcaggataagcgtttgagtctttcacagcctatcctatcacagcaaaataattttaaatttctccaagagcagttgaatattcagaaggatagccttcaggctaggcgagaagcccaggaagtattgtatgtacataaacagagtgaattggatagaagagtatgttccgaacaggctgagccctctttcccatttcaggtagctcagcatacatttacttcactaccatctgctgatacaaaatctggaaaaatacaggagcaacattcatctaagagcgagaaaggacttgtttcatgccaatctgacatccccatatctcaggatgggtctttgagtttcctacagcagttcctacctctacatgatagtttgaagttgctccaagaacagttgactaaacagagggatactcttcaggctaggcatgaagctcaggtggaattacttttacatagacaaagagatttgggggacagtaagtctgggctggtgagctcttcatcctcaccagtggttgttcagcattcagttgcttcacaagcttctgctaaagctgagcctaggagaattcaggagctttatttatctgagaaggagaatgtaggtccctcctgtcatttgataatcccaacatttcaggataagtctcttagttttccacagcatagcctggcacagcaagaaaatttgacaatactccaagaacagtcacaaatacaaagggtaatacttggtgctaaagaaggaactcaggaatttgtacacacagaaagtgaattggagaaaagaatttcttctgaacagactggcacctcctcatccctttcccaggtggatgaatctgagagattccaggaatgtatatcaatcaagagtgacagtaccattcccttaagccatcctaagatcccaagatgtcaggaaagacttttgagagtttcacaacatatgctacctctacaagataatttggaggaacaccaagcatggctagacactgagaaagaagcctttcatttcagccagaaaacccaagaaaatacatcttctgaacaaactggttcatcttcattcataccccagttggtacagctttcatttacttcgttagcttcagctgagtctggcacaatcctggaacctctttttacagagagtgaaagtaaaattttttcaagccaccttcagatcccacaattgcaggataggcttttgaggatatcgcaacttatccagcctcaacaagataatttgaaggcacttcaagaacagttagctacacagagagaagccatcattctagctagacaagaagctcgggaagaattacttttacatcagagtgaatgggagggaagaatatctcccgagcaggttgacacctcttccttacccctagtaccacagcattcattcgcctcattacctcttaatgaatctgaaagaaaccaagaaccatgttcaattaacagtgataatatagtatcctcaggtcactcagagataccaacattgcctgatgggctgttgggtttatcacatcttgttttacctcaacaagataatttgattgcacttgaagaacacttgcatgcacagacagatttccttccttctattgagaaaacccagaaagaattggttttgtcaaaaccatgtaaatttgaggaaaaggtatcttctgagcattttatccagtctcaccatggtgatttgcaggcacttcaacagcagttagatacacagaagaaagccattcgatctatacaggaagtccaagaagaattgcttttgcaaagattaagtgaattggagaaaagggtatcatctgaacaagtttgctcctcttcatttgtatcccaggtgcctgttgctgactctgaaagaacccagaagtctttcccaaccaaaagtaatgatactcttccctcaagtcatcgtgagattccaagattacaggatagacttttgagtttatcaaagcctattctgcctcagcaagataatatgacagcacaattggatgcacaaagggaagtgatgtattcttatgagaaaccccaggaagaactgtctttaaacaaacaaagaaagttgaacaaaagtgaatctgctgagcatactatcccctctttgtttctacccaaggaaacagagcattcgtttattccactaccttttgcagaagctaaacctaaaagcacttgtgaattgtattcatcccagaatgaacatgcagcccccccaagtaatcctgtgatcccagggtttcaagatagacttttgagtttttcacagtctgtcttaactcagcaagataacttgggacttcagaaacagttggatctacaaagagaagttctgcattatagccagaaagcccaggaaaaattgcttgtacagagacaaacagcattgcagcagcagatacagaaacatgaagagactttgaaggatttctttaaagacagtcagataagtaagcccacagttgaaaatgatttaaaaacccagaagatggggcagctcagagactggtttcctaatacacaagacctagcaggaaatgatcaagaaaatattaggcatgcagataggaacaactctgatgataatcatttggcttcagaagatactagtgccaagcaaagtggtgagcatctggagaaagatctggggagaagatcctcaaagccacctgtagcaaaagtcaaatgtggtttggacttaaaccagcatgaacttagtgctatacaagaagtagagtcaccagcaattggcagaacttctatactaggtaaaccaggtatttatgaagacagagaccccctgcgagtctcaataagccgagaacaaagtttctttgggagcccactggcccatgatccgtttagttgtcttcaactggttggccaagagaatgtctgtggtgatgactatgatgaagcagttaagctgaaggaatctgttgttgaaaatcatgcagtgttaagttatgctgtggaggaagaacatgcatatttgggtccaactgtgaagccagatgataaggctaaaacactgtcttatgaaccattatcttcagcaactgtttccactgggagccttttaagttatgaaaacacagatttgagccttacagatccagagtcattttcagagcacatggatgatagcaagcaagaatctaccaccagtaaagaagaggaaacaaatattataagttccatagttccttcaacacaagatatttatcagcggcagaactcttcagacgttcataaatctctgttgcctgcagtggatgaaactacatgtggtcacacacactttcagcaaatgatagacaagtacattaatgaagcaaatttgatacctgaaaaaacagatttgcaagaattggaacacatttttcctaatttgcatcatcagctgtttaaacccttagaaccacatccagattttgacttatcatcatcatcctctgggatttctccagacaacagagacttttaccagagatcagattcttcatctgaaagccactgtgctactggattatccaaaagtacagtttatttcacagcactgaggaggaccagcatgcattcttctcttaacacaagtccgaatcaacaacctgacactaacttggctcatgttggagctcacagttttgctacagaaaatattattgggggatctgaacaatgttttgaacagcttcagccagaatattcttcacaggaggagagccagcatgctgatctaccaagtatttttagcattgaagcaagagattcttcccaaggcatgaaaaatcagaactatccctctgaagaacatactgaaatattacaaaacaagaaaaaaattgttcatttccagctttctataggaaacttaagttcagtctacagttcatctgatgaagctaatgtatttgatcagttaaatgtacagcatagcactccatgtggttctaactctagtgagtgctcaacaaaacaccaactagaaagcagaaaggaaagtatgggctttgaagaactatcaaaaagaggggttgttacaatgttacaaagtcaaggactcattgaagataataaaaatgaaacctgtagggttttagacataaatccacaggtagaggaaactgactctcgattatgtgtaagaacagtggagatgggaacttcaattcaggcaccatattccttaactactcaaaatgaaaaatattttgagaattcagctgaaacagacattccaaaaatcaccaaaaaactatctcaactaggagaatcagagctttttgcaagttctggatcattttcattacagagctctataccagtctgggaaacagaaactggccatggtataatggaagaaccagaacttactttaataagcaccactgataccagtattgctgaaatggattttgcaaatttaaccctagaagagaagagcgagaatgaagcaaaatgcttctttcaggtgagtgagtttctgcctcttgtatcagcaacagaagcctcagattatccagctgtatcagaactttccatagaaaaaccaaggacagcatctacagcagaaacccctcgcaggcttacacctgtaccagggagcttacaagaagcatttataaagaggaaaaaatcatttatggagagatcccaccagaggcagaaagaaataaggaataaaattcatgtctctgaaaattctcaaatcaaaacagttaaagagaaaccatctataagttcatctgtgagtcgtctaaagggcgtgaataaagtcagagcatcttttcctgaagacagaaagactacacaggctctaaggcaccaaaggggtctaaggttatacaatcaactagctgaagtgaaacaacaaaaggaagaaaaaacaaaacaagaagcttatgcccaaaacagagcaagggcaaaagaattccataagaaaacactagagaaacttcgagccaaaaatacatgctgactttctagaaatagtgtaaaggttttttaattgtgtatatgtagcattagacaaaattatttaaagtcaataaattgttattcgagg

SEQ ID NO: 2712 - DNA, 1602 bp, Homo sapiens
  source 1..1602: mol_type = genomic DNA
tcagctccttcagtaggcaatgatatgggaaatgatgatgccattggagggaatgtgagcaaatatatagtgcttccaactggctattgtggacagcccaagaaaggacatcttatctttgatgcttgctttgaaagtggtaacctgggccgggtggaccaggtctctgagtttgagtatgatctgttcattaggccggacacctgtaatccacgcttccgagtctggttcaactttactgttgaaaatgtgaaagaatcacagagggtcattttcaacattgttaacttcagtaaaaccaagagtctctatagagatgggatggcccctatggtgaaatctaccagcagaccaaaatggcaaaggctgccacccaaaaatgtttactactaccgctgcccggaccataggaagaactatgtgatgtcctttgccttttgttttgaccgagaagaagatatttaccagtttgcttactgctacccatatacatacactcgcttccaacattaccttgacagcctgcaaaagagaaacatggattacttctttcgggagcagctgggccagagtgtgcaacaacgaaagcttgacctcctgacgataaccagccctgacaatctccgggaaggggcagagcagaaggtggtattcatcacaggacgagtccacccaggggaaacaccctcatcatttgtgtgccaagggatcattgacttccttgtaagccagcaccctattgcctgtgtcctccgggaatacctggtcttcaagatcgcaccaatgctcaatcctgatggagtctacctgggcaattacaggtgttctctgatgggatttgatctgaatcgtcactggctggatccctctccatgggtccatcctaccctgcatggagtgaaacaactcatcgtccagatgtacaacgacccaaaaacaagcctggagttttatattgacatccatgcccactccaccatgatgaatggcttcatgtatggcaacatctttgaggatgaggaacggttccagaggcaggccatttttcccaagctcctctgccagaatgctgaggacttctcctattccagcacatcctttaaccgggacgctgtgaaagcaggaactggccgtcgcttcctcggtggactcctggaccacacttcctattgctacaccctagaggtctccttctacagctacatcatcagtggcaccacggctgctgtgccctacactgaagaagcctatatgaagctggggcggaatgtggcaagaacctttttggactattatcggctgaaccccgtggttgaaaaggtggcaattcccatgccgagactgcgaaataaagaaatagaagtccagagaaggaaagaaaaatcccctccttacaagcacccactcctgcggggcccagccagcaactaccccaacagcaaaggggacaagaagagctcagtgaaccacaaagacccttcaaccccttttaagacacggagtcctgggaggtcttatggggacaggagcatgcattttctgctggggaatgaaattaatcactcttctctagcttccaaggatttgtggattaatgcatag

SEQ ID NO: 2713 - DNA, 1832 bp, Homo sapiens
  source 1..1832: mol_type = genomic DNA
tggttgcgcctgcgcagtgcatcaccgcaggcgggcctcgcgggtccgggagcgcggcggagacgatgcctgagatcagagtcacgcccttgggtgcctgccctgtgctgtcctggaacctggtccttccaccgggcagggggtcgagggcaccttccagcacagacaccaggacgggattccatgtcctcccccatggcgtagatgatgagctggagatcaaggcctactatgcaggccacgtgctgggggcagccatgttccagattaaagtgggctcagagtctgtggtctacacgggtgattataacatgaccccagaccgacacttaggagctgcctggattgacaagtgccgccccaacctgctcatcacagagtccacgtacgccacgaccatccgtgactccaagcgctgccgggagcgagacttcctgaagaaagtccacgagaccgtggagcgtggtgggaaggtgctgatacctgtgttcgcgctgggccgcgcccaggagctctgcatcctcctggagaccttctgggagcgcatgaacctgaaggtgcccatctacttctccacggggctgaccgagaaggccaaccactactacaagctgttcatcccctggaccaaccagaagatccgcaagactttcgtgcagaggaacatgtttgagttcaagcacatcaaggccttcgaccgggcttttgctgacaacccaggaccgatggttgtgtttgccacgccaggaatgctgcacgctgggcagtccctgcagatcttccggaaatgggccggaaacgaaaagaacatggtcatcatgcccggctactgcgtgcagggcaccgtcggccacaagatcctcagcgggcagcggaagctcgagatggaggggcggcaggtgctggaggtcaagatgcaggtggagtacatgtcattcagcgcacacgcggacgccaagggcatcatgcagctggtgggccaggcagagccggagagcgtgctgctggtgcatggcgaggccaagaagatggagttcctgaagcagaagatcgagcaggagctccgggtcaactgctacatgccggccaatggcgagacggtgacgctgcccacaagccccagcatccccgtaggcatctcgctggggctgctgaagcgggagatggcgcaggggctgctccctgaggccaagaagcctcggctcctgcacggcaccctgatcatgaaggacagcaacttccggctggtgtcctcagagcaagccctcaaagagctgggtctggctgagcaccagctgcgcttcacctgccgcgtgcacctgcatgacacacgcaaggagcaggagacggcattgcgcgtctacagccacctcaagagcgtcctgaaggaccactgtgtgcagcacctcccagacggctctgtgactgtggagtccgtcctcctccaggccgccgccccttctgaggacccaggcaccaaggtgctgctggtctcctggacctaccaggacgaggagctggggagcttcctcacatctctgctgaagaagggcctcccccaggcccccagctgaggccggcaactcacccagccgccacctctgccctctcccagctggacagaccctgggcctgcacttcaggactgtgggtgccctgggtgaacagaccctgcaggtcccatccctggggacagaggccttgtgtcacctgcctgcccaggcagctgtttgcagctgaagaaacaaactggtctccaggctgtcttgcctttattcctggttagggcaggtggtcctagacagcagtttccagtaaaagctgaacaaaag

SEQ ID NO: 2714 - DNA, 2253 bp, Homo sapiens
  source 1..2253: mol_type = genomic DNA
gacttttgtttttcagttgcgttccctgactcggagtcttagtgtgtcgttatttggacaagaggcacattgacccaatttggagacgtattttggaaggaggcgaacagttgtctccaaacgtggtgttgccgtcagtggtcccaccaagaggaggggaatggcagattcactggagtcaacccccttgccttcccccgaagatcgtctggccaaactccatccttctaaggagctcctggaatattatcaaaagaagatggctgagtgtgaggcagaaaatgaggacttgctgaagaaactggaactctacaaagaagcttgtgaaggacagcataaacttgaatgtgatttgcagcagagggaggaagagattgctgaattgcagaaagctctaagtgatatgcaggtctgcctcttccaggaacgggaacatgttttacgcctctactcagaaaatgaccgactgagaatcagggagctagaagacaagaaaaagattcagaatctcttggctcttgtgggaacagatgctggagaagtgacctatttttgtaaggagcctcctcacaaagtcaccattctccaaaagactatccaggctgtaggtgaatgtgagcagagtgaatcttcagctttcaaagcagatcctaaaataagcaaaagaagaccatcgagagagagaaaagaaagttctgagcattaccaaagagacatacagacactcatcctacaggtggaagcactgcaggctcagctgggagagcagaccaaactttctcgagaacaaattgaagggctcatcgaggacagacggattcaccttgaggaaatacaagttcagcaccagagaaatcagaacaaaatcaaagagctaaccaaaaatcttcaccacacccaagaactgctctatgagagcaccaaagattttctgcaactcagatctgaaaaccaaaataaagagaagtcatggatgcttgaaaaagataatttgatgtcaaagattaagcaatatagggtgcagtgtaagaagaaagaagataaaattggaaaagtgttgcccgttatgcatgagagtcaccatgctcaaagtgaatatattaagtccctaaaagataagttagtacaagagaaaaagctgtccaatatgtaccaagagcagtgcatttccttagaagaagaacttgcccgaattcgtgaggaagagggaatgaggagagagatcttcaaggatcgcactaacaagatggggaagcgtttacagataatgacaaaacgctatgaggcattggagcgtcgacgtatcctggaagtagaaggctttaagacagatattaaagttctccgacagaaactgaaagacttggagcaaatgttgtataaggcaacagttaatgcccgggcaaaccaggatcttgcccttctgtgtgaggtccgtgacagcaatagacgggcacataagatacaaggagaactgaagaatcttaagtcgaaagtgtttggtctggagaatgaacttagactctgttaatgtctacttttggaaatggcccccatttagaagaggtgtgcttcttgaaacctgaggacaaggtcatctgctgccagaaaatgtaaacctgagttgactagagtggtggtattcattattgtaaagacagcttgaagaatcggggaccactaggaaagcttttcttgcatactcagcttgctttatcatttttgctgtccttttaacacttgcgaggagtaggggcctggtcctgaatgacttggaggctttcattatttatcctgtctgtattgaccggtttttgttttttcagaaggcagtgatgatgaaaacttaggaagaaggtattttgcaataagcttggctgagtgtccatgggaagaatactttccctaaagagagagaagcactcacagaggctgcctttctcctgagctcggggagaaggcagcacatcacaacctgtcacattgaaataggcgctcattctgctatttcaccttccgtcctgagcagagcctgaattacgtttttgggcaatttcatggtgtttcaccagagggcgctagagactcaaacgaaatgtccatctggaaagattcgggagacactttgccgaggggatgaagctgagatgatgcttgtatggaaagtttgatatttttatcagtcacatggcttttgaaaaatgatgtatatattttaaattaactattttcaataaaatatttcactcaaaa

SEQ ID NO: 2715 - DNA, 2506 bp, Homo sapiens
  source 1..2506: mol_type = genomic DNA
attagagaagaagcaggcagcttgagacaggtggagctggatcaagctgtgaacgtgatttgctggaagctggtcattagtgttagaaaccccgtcttatttatttcatccttcaccctaccatgattattgcaattattattatttatttttcatcttttttcaggttgacgatgtgtcacactgtgtaagggaatcgcatggagatgggcattccgaactgttaatggggacatgggactccagttgtctctgatcacttgtgtggattttcctggcgtagaacgacagaagccgctagtaagtcgccaagacctacagcaggaattctgcaccaaagggcataaaatcttgttattttaatttgcatctgggagaatgtctgagcaaggagacctgaatcaggcaatagcagaggaaggagggactgagcaggagacggccactccagagaacggcattgttaaatcagaaagtctggatgaagaggagaaactggaactgcagaggcggctggaggctcagaatcaagaaagaagaaaatccaagtcaggagcaggaaaaggtaaactgactcgcagccttgctgtctgtgaggaatcttctgccagaccaggaggtgaaagtcttcaggatcagactctctgaaaactgcaaatggaaaggaattcaaaagaatttagattaaaagttaaataaaaagtaggcacagtagtgctgaattttcctcaaaggctctcttttgataaggctgaaccaaatataatcccaagtatcctctctccttccttgttggagatgtcttacctctcagctccccaaaatgcacttgcctataagaaacacaattgctggttcatatgaaacttaggaaatagtgaataaggtgcatttaactttggagaaatacttttatggctttggtggagatttctcaatactgcaaaagttgtccagaaatgaatctgagctgatggtgactttaagttaatattattaatatatcactgcatatttttacccttatttttgctccttacagcaagattagtaggttataaaaatttaaatttaaacaaaattatttcatgacaaaatgggaaacttcacatcatacttatttttgtttgcctttcaggcatcatattagcttttataaaaaatggtcttgctgctgaaattgtacttattttatcagaggctgggtgcagtcaagacaaaagtaaaatggtttacctgagcccaggggagggaaaattgattaagatatcattatttttgtttggtttggttttgcttttttcctcttactttaattgaaatactctgaattcccctcatggaaacagagagcattgagagcactttctttaaaaggaccaaaaataaattcctaatagattttgtcctaagagagtgtttttttttctagcatcattttctttacatgccactcatgtcataaggcatggacaggctatctttcagtggccattactatgtttcgtacacatgctttattttacttgggctctgagaaatgtgtggctttccttcagcattttatttgtgcttctctttttaatggagattgaaaagggagaataatgtgaatatcacggcttatattattaaatgttgattgatggcttgtaatgtactgcacacaatatatgttaactctgcagaatgacagaccctgggagaagtaatgccccagttgtcccccactcctaatgccaggcagagaaggacagcctttatagacttaatctgctttttgtcccatttgacaaggtaccaggaggaaattttttaagggatcaactgtatcacagtgcccactctggacctaagtctagtgtatccatacaattggtgcagagaaataaggtgtaaatggtgctttgttcctgctggttccaagctcagaaaccaagactagctttgtaggagagaatgagagcctgcaagcctctctttggattggctgaggagtggtgggagcagggggttgatagaaaacatccagacacacatataagcaagtggccgtgctacctttttagagaataaagaaacagacttttgagtttatatgcaatgccttcattaggtaccaccggcacttacaaaatgtgcggactgaatcccagagaacactggcagatgtatacagtatatggattgtatcgcttccccaatgtttgtaaattcacagtatttggaaaactgccttcattttccagtgtgggaaaaactcttgctacctgtattacttgatctcagacccatacctgatggttcagtctgtccttaagttaaaagaattttgcttttctaatgttatactatttacctgtcagtgtattactgcaacttgaatcactcttttactgttgttggatataaacttatcctgtaccaatgtatttattaacacttgtattttattattgagcatatcaataaaaatattaaaaaataacagattgttttttaccaa

SEQ ID NO: 2716 - DNA, 1090 bp, Homo sapiens
  source 1..1090: mol_type = genomic DNA
aacaaagggccgcgggcggcgggcagtggtgtcccagtctcccggtgcttccctgaggctgaggcgcccggcctcccgcccgccgcgctccagatgaagtgtgagcactgcacgcgcaaggaatgtagtaagaaaacaaaaactgatgaccaagagaatgtgtcagccgatgcaccgagtccagcccaggaaaatggagagaagggagaattccacaagttggctgatgccaagatatttttgagcgactgcctggcatgtgacagctgtatgactgcagaggaaggagtccaactttcccagcaaaatgccaaggacttcttccgcgttctgaaccttaacaagaaatgtgatacctcaaagcacaaagtgctggtagtgtctgtgtgtcctcaatctttgccttattttgctgctaaattcaacctcagtgtaactgatgcatccagaagactctgtggtttcctcaaaagtcttgggatgctcccatttcccagtagcctccaggcctgcaggttcccatgacccacagccgggccaccgaggacgggttttgggtccagcacgagctcctggctgggtccgatacgccgagcgggtgctgggtcgccccatcactgcccacctctgcaccgccaagtccccccagcaggtcatgggctctttggtgaaggattatttcgccagacagcagaacctgtctccagagaagattttccacgtcattgtggccccttgttatgacaagaagctggaggctcttcaggaaagccttccccctgctttgcatggctcccggggcgctgactgcgtgttaacatcaggtgaaattgctcaaataatggagcaaggtgacctctcagtgagagatgctgccgtcgacactctgtaagtggcttctctggggagagtcctctggggggcaggacctctcgtcagccctgccagccacctgccaggcccagggctgccctgctttatgacgaggccatgtgaagcactgcgatgcagtcccccaggcccctgccacaaccctcagccaccctatagctgttgaatgggataccattcaccagggctgccagggagt

SEQ ID NO: 2717 - DNA, 1116 bp, Homo sapiens
  source 1..1116: mol_type = genomic DNA
ctcacctgctcctctacctgctccaccctcaatccaccagaaccatgggctgctgtggctgctccagaggctgtggctccggctgtgggggctgtggctccagctgtgggggttgtggctctggctgtgggggctgtggctccggccgtgggggctgtggctctggctgtgggggctgcagctccagctgtgggggatgtggctccagatgttatgtgcctgtctgctgctgcaagcccgtgtgctcctgggtgccagcctgttcctgcaccagctgtggctcctgtgggggctccaaggggggctgtggctcctgtgggggctccaaggggggctgtggctcctgtgggggttccaaggggggctgtggttcttgtggctgctcccagtccagctgttgtaagccctgttgctgctcctcaggctgtggatcatcctgctgccagtccagctgctgcaagccctgctgctgccagtccagctgctgtgtccccgtgtgctgccagtccagctgctgcaagccctgttgctgccagtccaactgttgtgtccctgtgtgctgccagtgtaagatctgaggctctggacccagaccttcaggtttctcctgtttggtgaaagcatttcttatggttccctgagtcagttcgtcccacacatcctccctgaggcacctgcacctgctctagctcaccatccatgcacacacctccttccatggctcagctctcctctgggccctgccttcagcctcctcactccagaaacgtgtgtttccctgatgcgggaggtgtcctcgcctggacgcaggcacccagccgactgccacgatgttccctgcacttgggtgtggaccatcttcttcttctccctgggctgactgagatgcaaggtctgaccccacaaggccaggccgacgtttctgagtgatcactaagaaccagcttctcaaccaccatcaggaccctggatcctcctgggccgctgcctgttctcctgtggcccaagtgtgaccaggaaggtctctttccttcctgttgtctccatctgtttaaaaaaaaataacaaaataatgaatgaatttccttgcaataaagcctctcatgtctgtaaatc

SEQ ID NO: 2718 - DNA, 682 bp, Homo sapiens
  source 1..682: mol_type = genomic DNA
ctcaaccacagactacacttgctgaactggctcctggggccatgaggctgtcactgccactgctgctgctgctgctgggagcctgggccatcccagggggcctcggggacagggcgccactcacagccacagccccacaactggatgatgaggagatgtactcagcccacatgcccgctcacctgcgctgtgatgcctgcagagctgtggcttaccagctacggagttcgagaagtggaccaagtgaaacgtctcacaggcccaggacttagcgaggggccagagccaagcatcagcgtgatggtcacagggggcccctggcctaccaggctctccaggacatgtttgcactacttgggggagtttggagaagaccagatctatgaagcccaccaacaaggccgaggggctctggaggcattgctatgtgggggaccccagggggcctgctcagagaaggtgtcagccacaagagaagagctctagtcctggactctaccctcctctgaaagaagctggggcttgctctgacggtctccactcccgtctgcaggcagccaggagggcaggaagcccttgctctgtgctgccatcctgcctccctcctccagcctcagggcactcgggcctgggtgggagtcaacgccttcccctctggactcaaataaaacccagtgacctc

SEQ ID NO: 2719 - DNA, 1213 bp, Homo sapiens
  source 1..1213: mol_type = genomic DNA
gggggagcgagccggtgctgctgcaggctgaggctgcggcagaggcggcgaggcgcgggcggtgaggacggacagtcaccgacttagtccagttccctgtgatctcaaaacaattgttgcagcaggctcctggcagtctcaagcagttcatcttcttggtgtactggtttcctattgtgattttatcatggaaaatcaattggctaaatcaactgaagaacgaacatttcagtaccaggattctcttccatcactgcctgttccttcacttgaagaatcattaaaaaaataccttgaatcagtgaaaccatttgcaaatcaagaagaatataagaaaactgaagaaatagttcaaaaatttcaaagtgggattggagaaaaattgcaccagaaattgcttgaaagagcaaaaggaaaaagaaattgggtatttgttgttataattgaataatgatgatgtttaaagaatgataaataaaaagtgcatagtttttatttttaaattattgctgtaaaaatttttacagttattattgttattttcataatccaaaagaaggaatgaatcacttaactttgggagttttcagtgggtggattcgggaacttgttaaaatgcagatttgctgggataagtgattctgattcacatggctggaatgaggcccagagattcttattttaacaatcacttcatgtggtttggctgcaggtaatctgtagaccatgctgaaggaaaacattttgtccaggtgactagcttgaaaaatcagaaacactaaaatagacatgtcacataggtggcatagaaatattttcgtagtacaatggagaaagggaatcattaaaaatcagagtggagaatggttatgtatattgtatatttcagttagataaattgaggaagctagtataataattattgaaggtctcaataattttccacaaaattctttaacttcttcagctcaaccatttctgtacttctctactatgaatcagaggatgaggttgtataattcaaaagcattgccttagtctagaaataattattgtacctatcatttagttttagaaataaaaagcaagctgattttttttgatgaaccatttatatctgtgatggaataataaaatttcacacttccggattcctttgttctcaattttgagccttgagttgttttaattaaagaggggtaaaggtaaagaa

SEQ ID NO: 2720 - DNA, 3848 bp, Homo sapiens
  source 1..3848: mol_type = genomic DNA
agacgcagaggcgaggccgccagtcgaggacgaggaggagataacatcaagatgccgaagactgaggaaactgtgctccagaatgatcccagtgtagcagagaatggggcccctgagcctaaaacaccagggcagagccagaaaagcaagagtttctgtttagatgaccagtctcctgacctgatgtcttttctgtcacagatctgatagagacagttaatgaagtttccaagctgagcatttcacatgaaattgtagtaaaccaagatttctatgtggaagagaccattttgcctccaaacagtgtagaaggcaggtttgcggaggcaatgtacaatgctttttggaaccatctgaaagaacagctattgagtactcctcctgacttcacttgtgcccttgaacttctaaaagatgttaaggagaccttgctatcactgctattaccatggcagaaccgcctaagaaatgagatagaagaagctctggacacagatctcctcaagcaggaagcagaacatggggccctggatgtccctcatctttctaactacattctcaatttgatggctctgctatgtgcaccggttcgagatgaagcgatacagaaactagagaccataagagatccagtgcagttactgaggggcatcctccgtgttctgggcctaatgaaaatggacatggtgaactataccatccagagctttcgaccctacctgcaggaacattccatccagtatgaacaagctaaattccaggaactccttgataaacagcccagtctcctcgattataccacaaaatggctaaccaaagcagccacagacatcactacactatgtccgagttctcctgactcacctagctcctcctgcagcatggcgtgttcacttccaagcggggcaggtaacaattcagagccccccagtccaacaatggtgctataccaaggctacctgaacctcctcctctgggatcttgaaaacgtagaattcccagagactctgctgatggacagaatccggctccaggaactggcattccagttgcaccagttaactgtcctggcctcagtcttgctagtggccagaagcttctctggtgaagttttattcagatcacctgaatttgtggatagactgaaatgcaccaccaaggccctaactgaggaatttatctccaggcctgaagagactatgctgagtgtgagtgaacaggtgtctcaggaagtccatcaaggccttaaggacatgggcctcactactctgagcagtgaaaacacagcatctcttctaggccaactccagaacatcaccaagaaagagaactgcattcgtagcattgttggagtctctgctacactttcctggaggcctcattctcattgaaaaggagttggcagaactgggctggaagtttctcaatctgatgcatcataatcagcagagtcatttttcacaaaacgaaatctttccagaagatcacgaataagagagatcaaagctaggcagcttgagttgaagtagagctggaagaaggagttttgaggactgtttcaaaaccactggactagatgatctctaaaggatcttatccaggacgcttcattgcatttggtcttcatttctccttagtctcctccaggctgacatttcctcaatctttattggtcttccacagccctgacacttttggagataccagtcagcatttccaagttcgttctgtgagactgtagtgtcaggacaaagcaacaacaaaatgtgctctactctaaagaagtgtgggacatacagaactgaagttgcagaatgccatgaccatggtagcacttttcaaggaagaaagaaaggtgggagttctttccgggataattttgacaagaggagctgtcattatgaacatggtgggtatgagcgcccgccttcacactgccaggagaatgatggaagcgtggagatgagggatgtccacaaggaccaacaactaagacacactccttatagcatccgatgcgaaagaagaatgaaatggcatagtgaagacgaaatccgtattaccacgtggagaaatagaaaacctccggagagaaaaatgagtcagaacacacaggatggatacacaaggaactggtttaaggtcacaattccttacgggataaagtatgacaaggcatggctaatgaattcaatccagagccattgcagtgaccgcttcactccggttgatttccactacgtccgaaatcgggcatgcttctttgtccaggatgctagcgctgcctccgcattgaaggatgtcagttataagatttatgatgatgagaaccaaaagatatgtatatttgtcaatcattctactgcgccctactctgtgaagaataagttgaagccaggccaaatggagatgctaaagctgaccatgaacaaacggtacaatgtctcccagcaagctcttgatctccagaatctccgctttgacccagacttgatgggccgtgacattgatataatcctgaatcgaagaaactgcatggctgccaccctgaagatcattgaaagaaatttccctgagctgttgtctttgaacttgtgcaacaacaagctgtaccagctggatggcctttctgacattacagagaaggctcccaaagtcaagaccctgaatctctccaaaaataagctggagtcggcgtgggagttgggcaaggtgaaagggctgaagctcgaagagctatggctagaagggaacccgttgtgcagcaccttctcggaccagtccgcctatgtaagtgccatccgggattgtttccccaagttgttacgcctggacggccgagagttatccgcaccagtgattgttgacattgacagctctgagacaatgaaaccctgcaaggaaaactttactggatctgagaccctaaagcatttagtcctgcaattcctgcagcagtattactcgatctatgactctggagatcgacagggtctcctcggtgcttaccacgatgaggcctgcttctccttggctattcccttcgaccccaaggactcagccccgagcagcttgtgcaagtactttgaggatagcaggaatatgaaaacactcaaggacccctacctgaagggggaactgctgaggcgcacaaaacgtgacattgtggactccctcagtgcgttgcccaaaactcagcatgacctcagctccatcctggtggacgtgtggtgccagacggaaaggatgctctgcttttctgtcaatggggttttcaaggaagtggaaggacagtctcagggttctgttctcgccttcacccggaccttcattgctacccctggcagcagttccagtctgtgcatcgtgaatgacgagctgtttgtgagggatgccagcccccaagagactcagagtgccttctccatcccagtgtccacactctcctccagctctgagccctccctctcccaggagcagcaggaaatggtgcaggctttctctgcccagtctgggatgaaactggagtggtctcagaagtgccttcaggacaatgagtggaactacactagagctggccaggccttcactatgctccagaccgagggcaagatccccgcggaggccttcaagcaaatctcctaaaaggagccctccgatgtcttctttgtcttcgttcacatcctctttgtttcctcttttcaccagcctaaggcctggctgaccaggaagccaacgttaacttgcaggccacgtgacataaccacccaaagagccagttgctctgtgtattcgccccactcatgatcaccattttattttcataataaagagtgacgttacacgtt

SEQ ID NO: 2721 - DNA, 4211 bp, Homo sapiens
  source 1..4211: mol_type = genomic DNA
agtctcttccccaactctccccacccctggtgctctccgccccgcttgcctcccgttcttccccgcccgctccatccgggtcgctgacggctgtctctggactggacagcagtggcgtccgcttttctctaaggaacccgataagaactccattttctgttgatgtggagacatagggtacctccaactttccggggtttcagaagagaattttttattgaaactggaagaccaaaataattacaagcatgttgtgctggggaaatgcatcctttgggcagctaggtttgggtggaattgatgaagaaattgtactagagcccagaaaaagtgacttctttataaataaaagggtccgagatgtaggatgtggactcagacatactgtgtttgttctggatgatggaacagtgtacacatgtggatgtaatgatctaggacagctaggtcatgaaaaatccagaaagaaaccagagcaggttgttgccctggatgcccaaaatattgtagctgtttcatgtggagaagctcatacgttagcgctaaatgacaaaggccaggtgtatgcttggggtctcgattctgatggacagcttggcctggtaggatcagaggaatgcatcagagtacccagaaatattaaaagtttgtcagatatccagattgtacaggttgcttgtggttactatcattcacttgcactttctaaagcaagtgaagtcttctgttggggacagaataaatatggccaattgggtttaggtactgactgtaaaaagcaaacttcaccgcagctgcttaagtctttgcttggaatccctttcatgcaagttgcagcaggaggagcccatagttttgtactcaccctttctggagctatctttggatggggacgcaacaagtttggtcagctaggtcttaatgatgaaaatgataggtatgttcctaatttactaaagtcactaagatctcagaaaatagtttatatttgttgtggagaagatcatactgctgctctaaccaaggaaggtggagtgtttacttttggagctggagggtatggtcagttgggccataattctaccagtcatgaaataaacccaaggaaagtttttgaacttatgggaagcattgtcactgagattgcttgtggacggcagcacacttctgcttttgttccttcatcaggacgaatttactcttttgggcttggtggtaatgggcagctgggaaccggttcaacaagcaacaggaaaagcccctttactgtaaaaggaaattggtacccctataatgggcagtgtctaccagatattgattctgaagaatatttctgtgtaaaaagaattttctcagggggagatcaaagcttttcacattactctagtccccagaactgtgggccaccagatgacttcagatgtcccaatccgacaaagcagatctggacagtgaatgaagctctaattcagaaatggctgagctatccttctggaaggtttcctgtggagatagccaatgagatagatggaacgttttcttcctctggttgcctaaatggaagttttttagctgttagcaatgatgatcactatagaacaggtaccagattttcaggggttgatatgaatgctgctaggcttttattccacaaacttatacaacctgatcatccgcagatatctcagcaggtggcagctagtttggaaaagaatcttattcctaaactgactagctccttacctgatgttgaagcattgaggttttatcttactctaccagaatgtcccctgatgagtgattccaacaatttcacaacaatagcaattccctttggtacagctcttgtgaacctagaaaaggcaccactgaaagtacttgaaaactggtggtcagtacttgaacctccactattcctcaagatagtagaactttttaaggaagttgtggtacatcttttgaaactctacaagatcggtattcccccttctgaaagaagaattttcaacagttttcttcatactgcattaaaggttttagaaatactacatagggtaaatgagaaaatgggacagattatacagtatgataaattttatatacatgaagtacaagaattgatagacataagaaatgattatatcaactgggtccaacagcaggcctatggaatggatgtcaaccatggattaactgagttggcagatatccctgttacaatctgtacatatccatttgtatttgatgcccaagcaaaaactactctgttacagaccgatgcagtcttacagatgcagatggctattgatcaggcccacaggcagaatgtctcctctctttttctcccagtgattgaatctgtgaatccctgcttaattctagtggtgcgtagagaaaatattgtaggagatgcaatggaagtccttaggaaaacaaagaacatagattacaagaagccactcaaggttatatttgttggagaagatgctgtggatgcaggaggggtgcgcaaagaatttttcttgctcatcatgagggaattattggatcctaaatacggcatgtttaggtattatgaagattccaggctcatttggttttctgataagatcacagttgaaaactttggtgcaacagaagtgaaagagctggttctaaatggtgcagacacagctgttaacaaacaaaatcggcaagagtttgtcgatgcttatgtggattacatattcaataaatcagtggcttccttatttgatgcttttcatgcgggctttcataaggtctgtggaggaaaagtccttctgctctttcagcctaatgaactacaagcaatggtcattggaaatacaaattatgattggaaggaactggaaaagaatacagaatacaaaggggaatattgggcagaacatcctacgataaaaattttttgggaagtatttcacgaattaccattggaaaagaagaaacagtttctgttatttttgacaggtagtgatcgcattcctattcttggtatgaagagtctgaaactagtcatccagtccacaggaggtggtgaggagtatctcccagtttcccatacttgttttaatcttctggatcttccaaaatatacagaaaaagaaactctacgctctaaactgatccaagctattgatcacaatgaaggcttcagtttaatataactttggagttataactattcagtttagtgcaaaagcattaaactatttgtgtttttcttgtggtgatgaattcagcaaggtgacagaggtactattataattcttacttgcagaatgttcaatctacgagtgttcatggaagccaaaaaatattaaaggaaaatgaacaaactgttaatattattgtacagaaccatggattttttttgaccatcttctaataaacatagcaagtattatgaatacattaaagttttactaacatgaattttaagagtttgcatatttcagaaatgatctggtgtgagtgcatggaaatattgcttaatttttcttcaatcattgagtgaaaaacctttaactttggcctgcaatagtcatttgattattttttcattttgtaaataatgttaagttttgtaataaaatagttatgttctgataccagtacagtttctatggttgtaattgaacttgaacagacttttaaaggttaaaaattatgatttaaatcttactctgagactctataaaaagaaaaaaaaggtagcatggtggaaacactatcttttcttttttgctagaataagtgtctttgtgcaaacctaaatcacagatagggaatatactacataacctgcagttcttttctttgtgaatcctgacacactgatagatgggggattgtcgatcagagaacttattaatatttagtactggaagaactctgtctccacagttgccagtaataaaaagaaacattggctactatgagcaccaatcactgggttatagctttcaaaattattgatgctgcagtgctttagagctatttccttgaatttaagaaacaaatcttaacagttttatggtgctgatgcttagttgtctcatgccattaaattgtaaaagtgagttgatgcaatacatgtgactttctgctataatgcaaatatttattttttaaatttattttaaaatgccgtgaaaactgtttaataaagatttattgttttaatattt

SEQ ID NO: 2722 - DNA, 1566 bp, Homo sapiens
  source 1..1566: mol_type = genomic DNA
agccattcctgaggaggactgccggtcgttcggacgtcttgcctgtcgctggaggagaggtccgggctctccaggaaggtggctgcggcgacaaaatgaagatattcgtgggcaacgtcgacggggcggatacgactccggaggagctggcagccctctttgcgccctacggcacggtcatgagctgcgccgtcatgaaacagttcgccttcgtgcacatgcgcgagaacgcgggcgcgctgcgcgccatcgaagccctgcacggccacgagctgcggccggggcgcgcgctcgtggtggagatgtcgcgcccaaggcctcttaatacttggaagattttcgtgggcaatgtgtcggctgcatgcacgagccaggaactgcgcagcctcttcgagcgccgcggacgcgtcatcgagtgtgacgtggtgaaaggcaaacgaatgcacgtgcagttgtccaccagccggcttaggactgcgcccgggatgggagaccagagcggctgctatcggtgcgggaaagaggggcactggtccaaagagtgtccgatagatcgttcaggccgcgtggcagacttgaccgagcaatataatgagcaatacggagcagtgcgtacgccttacaccatgagctatggggattcattgtattacaacaacgcgtacggagcgctcgatgcctactacaagcgctgccgtgctgcccggtcctatgaggcagtggcagctgcagctgcctccgtgtataattacgcagagcagaccctgtcccagctgccacaagtccagaatacagccatggccagtcacctcacctccacctctctcgatccctacgatagacacctgttgccgacctcaggagctgctgccacagctgctgctgcagcagcagccgctgctgctgttactgcagcttccacttcatattacgggcgggatcggagccccctgcgtcgcgctacagccccagtccccactgttggagagggctacggttacgggcatgagagtgagttgtcccaagcttcagcagccgcgcggaattctctgtacgacatggcccggtatgagcgggagcagtatgccgatcgggcgcggtactcagccttttaaagcttgaggtgggatgtgtgtgggctgaaattccgagctgcggttgtgcatgagaatacacccttcgtggtaccccatctccgggacgttctcggctctgtgcgttcagtccctcaggaaccgtggaccttaatttaccttgctaagttcagaccttctcttcctttcctttcctttcctctcctgcccattttcctgttcttctgtccttcaatacttctgtagcttcccattcatgttctcttctcccagcaggcctcattgtgtgcagaaactgtggtgggggctgtgctgtctcctccctgcctcctgcctcctgcggctgttggatttgggaatgaccttggtgagagtctcactgctccagggtctctttttggtccaaaggctagacctatagagttggatcactttttttctttccggtgaaataaatggtttttcaacttag

SEQ ID NO: 2723 - DNA, 884 bp, Homo sapiens; identical to SEQ ID NO: 2530
  source 1..884: mol_type = genomic DNA

SEQ ID NO: 2724 - DNA, 3220 bp, Homo sapiens
  source 1..3220: mol_type = genomic DNA
aactttgcctctcctttacgccaaatacgtgtccttatatctgaatctacaccactattatagattcaccttctttgagaagtccctatttgaagagaggaaaattcaggctacttgtaaccctcttattctttttagacggagttttccctcttgttgcccaggctagagtgcaatggcgcgatctcggctcaccgcaacctccgcctcccgggttcaagcgactctcctgcctcagcctcccgagtagctggaattacaggcatgcgccaccactcccggctaattttgtatttttagtagagacggggtttctccatattggtcaggctggtctcaaacccccggcctcagcctcaggtgatccgcccgcctcggcctcccaaactggtggggttacaggtgtgagccacggaacgcggctcctcttccttctggatatggctgtctcagatggccagaggcctcggaaaggcttccggtttcccggcaggcccgagtggggctgaacttccggcctcaggacgcaggcgcgggccgctcatttcgctctttccggcggtgctcgcaagcgaggcagccatgtcttatcccgctgatgattatgagtctgaggcggcttatgacccctacgcttatcccagcgactatgatatgcacacaggagatccaaagcaggaccttgcttatgaacgtcagtatgaacagcaaacctatcaggtgatccctgaggtgatcaaaaacttcatccagtatttccacaaaactgtctcagatttgattgaccagaaagtgtatgagctacaggccagtcgtgtctccagtgatgtcattgaccagaaggtgtatgagatccaggacatctatgagaacagctggaccaagctgactgaaagattcttcaagaatacaccttggcccgaggctgaagccattgctccacaggttggcaatgatgctgtcttcctgattttatacaaagaattatactacaggcacatatatgccaaagtcagtgggggaccttccttggagcagaggtttgaatcctattacaactactgcaatctcttcaactacattcttaatgccgatggtcctgctccccttgaactacccaaccagtggctctgggatattatcgatgagttcatctaccagtttcagtcattcagtcagtaccgctgtaagactgccaagaagtcagaggaggagattgactttcttcgttccaatcccaaaatctggaatgttcatagtgtcctcaatgtccttcattccctggtagacaaatccaacatcaaccgacagttggaggtatacacaagcggaggtgaccctgagagtgtggctggggagtatgggcggcactccctctacaaaatgcttggttacttcagcctggtcgggcttctccgcctgcactccctgttaggagattactaccaggccatcaaggtgctggagaacatcgaactgaacaagaagagtatgtattcccgtgtgccagagtgccaggtcaccacatactattatgttgggtttgcatatttgatgatgcgtcgttaccaggatgccatccgggtcttcgccaacatcctcctctacatccagaggaccaagagcatgttccagaggaccacgtacaagtatgagatgattaacaagcagaatgagcagatgcatgcgctgctggccattgccctcacgatgtaccccatgcgtattgatgagagcattcacctccagctgcgggagaaatatggggacaagatgttgcgcatgcagaaaggtgacccacaagtctatgaagaacttttcagttactcctgccccaagttcctgtcgcctgtagtgcccaactatgataatgtgcaccccaactaccacaaagagcccttcctgcagcagctgaaggtgttttctgatgaagtacagcagcaggcccagctttcaaccatccgcagcttcctgaagctctacaccaccatgcctgtggccaagctggctggcttcctggacctcacagagcaggagttccggatccagcttcttgtcttcaaacacaagatgaagaacctcgtgtggaccagcggtatctcagccctggatggtgaatttcagtcagcctcagaggttgacttctacattgataaggacatgatccacatcgcggacaccaaggtcgccaggcgttatggggatttcttcatccgtcagatccacaaatttgaggagcttaatcgaaccctgaagaagatgggacagagaccttgatgatattcacacacattcaggaacctgttttgatgtattataggcaggaagtgtttttgctaccgtgaaacctttacctagatcagccatcagcctgtcaactcagttaacaagttaaggaccgaagtgtttcaagtggatctcagtaaaggatctttggagccagatttgtcgtctcattattgtaggagagaatttgtgggttgtggcagtaatacatttcccatgtgtcctgatgctttcaggatacatcagttgttagtgtttaaattgagttatttttattttgtgcttttgagatggagtctcactctgtctcccaggctggagtgcagtagcgtgatctcagttcgttgcatcctccgctgcccaggttcaagcagttctgcctcagccttccaagtagctgggattacaggcgtgtgccaccacactcagctaatttttgtattctcagtagagatgggttttaccatgttggccaggctggtctcgaactcctggcctcaagtgattcgcctgccttggcctcccaaaatgtgctaggattacaggcatgagccaccacgccccgcctaaattcaaaatctttttgtttttttttagacggagtctcactctgtcgcccaggttggagtgtactggcgcgatctcggctcactgcaagctccacctcccaggttcctgccattctcctgcctcagcctcccaagtagctgggactacaggcacccgccaccatgcccggccaattttttgtattttttagtagagatggggtttcaccgtgttagccaggatggtctcagatttcctgacctcgtgatctgcccatctctgcctcctaaagtactgggattacaggcgtgagccaccgtgcccagccctaaattgaattcttaaatccctcttgttcataaagcagtatatttggtttacagga

SEQ ID NO: 2725 - DNA, 1083 bp, Homo sapiens
  source 1..1083: mol_type = genomic DNA
ttcttaatggaatccaagcctctaagcctcacagtccaggccctccaccagcctgcctcaccctatcctcatttcatctcccgcaacctggctccgagtcagaggttccggttgagatcaagttgggagacacacccttgttcattctccttgagaagcagctattatcaacagaacattgacagaacctgtgtttggggaaaggactgatggctttgagtctaggttggaaagcacacaggaaccactgtggtctcctcttgcaggctctgcgaagcagtggtcttctcttgtttccctgtggccagtgtccctggagaggagctggaagctttttggaccctgagataaaggctttcctggaggagaacactgaagtcaccagcagtggtagcctcacccctgaaatccagttgcggcttttgacccccagatgcaaattctggtgggagagagctgacctgtggccccacagtgatccttactgggcaatctactggccaggaggccaagccctgtctaggtatcttttggataatcctgatgttgtcagaggaaaatctgtattagatcttgggagtggatgtggagctacagctattgctgctaagatgagtggggcatcaaggatcttggccaatgacatagaccctattgcaggaatggctattacactaaattgtgaattgaacagactgaatccttttcctattttaatccaaaacattttgaatttggaacaagataagtgggaccttgttgttcttggcgatatgttttatgatgaagaccttgcagatagtcttcatcagtggctgaagaagtgcttctggacctatagaactcgagtactgattggtgaccctgggcggccccagttcagtggacacagcattcagcatcacctgcacaaagtggtagaatattcacttttggagtctactaggcaggaaaacagtggactgacaacaagcacagtgtggggttttcagccttgagttgtcaaagtgcttccaagtatgaatatagtaatgtttggatctgactctaaaagttttctctataggagatactctccagttt

SEQ ID NO: 2726 - DNA, 2006 bp, Homo sapiens
  source 1..2006: mol_type = genomic DNA
ccgagctgggggcgcagagcgcgggaggcggcggcggcgcggagcccaggtggctccgctgccggatgggagtgccccagtgtgctggatgaagctggcgcatgcaccatgtcatcatgtgtctctagccagcccagcagcaaccgggccgccccccaggatgagctggggggcaggggcagcagcagcagcgaaagccagaagccctgtgaggccctgcggggcctctcatccttgagcatccacctgggcatggagtccttcattgtggtcaccgagtgtgagccgggctgtgctgtggacctcggcttggcgcgggaccggcccctggaggccgatggccaagaggtcccccttgacacctccgggtcccaggcccggccccacctctccggtcgcaagctgtctctgcaagagcggtcccagggtgggctggcagccggtggcagcctggacatgaacggacgctgcatctgcccgtccctgccctactcacccgtcagctccccgcagtcctcgcctcggctgccccggcggccgacagtggagtctcaccacgtctccatcacgggtatgcaggactgtgtgcagctgaatcagtataccctgaaggatgaaattggaaagggctcctatggtgtcgtcaagttggcctacaatgaaaatgacaatacctactatgcaatgaaggtgctgtccaaaaagaagctgatccggcaggccggctttccacgtcgccctccaccccgaggcacccggccagctcctggaggctgcatccagcccaggggccccattgagcaggtgtaccaggaaattgccatcctcaagaagctggaccaccccaatgtggtgaagctggtggaggtcctggatgaccccaatgaggaccatctgtacatggtgttcgaactggtcaaccaagggcccgtgatggaagtgcccaccctcaaaccactctctgaagaccaggcccgtttctacttccaggatctgatcaaaggcatcgagtacttacactaccagaagatcatccaccgtgacatcaaaccttccaacctcctggtcggagaagatgggcacatcaagatcgctgactttggtgtgagcaatgaattcaagggcagtgacgcgctcctctccaacaccgtgggcacgcccgccttcatggcacccgagtcgctctctgagacccgcaagatcttctctgggaaggccttggatgtttgggccatgggtgtgacactatactgctttgtctttggccagtgcccattcatggacgagcggatcatgtgtttacacagtaagatcaagagtcaggccctggaatttccagaccagcccgacatagctgaggacttgaaggacctgatcacccgtatgctggacaagaaccccgagtcgaggatcgtggtgccggaaatcaagctgcacccctgggtcacgaggcatggggcggagccgttgccgtcggaggatgagaactgcacgctggtcgaagtgactgaagaggaggtcgagaactcagtcaaacacattcccagcttggcaaccgtgatcctggtgaagaccatgatacgtaaacgctcctttgggaacccattcgagggcagccggcgggaggaacgctcactgtcagcgcctggaaacttgctcacgaagcaaggcagcgaagacaacctccagggcaccgacccgccccccgtgggggaggaggaagtgctcttgtgagaggcagtccctgcgtggaaagttgctgggcccccgcccccggctcccccgcacgcatgcatccactgcggccggaggaggccatggagcccgagtagctgcctggatcgctcgacctcgcatgcgcgccgcgtcgcctctggggggctgctgcaccgcgtttccatagcagcatgtcctacggaaacccagcacgtgtgtagagcctcgatcgtcatctctggttatttgttttttcctttgttgttttaaaggggacaaaaaaaaaaaaa

SEQ ID NO: 2727 - DNA, 1129 bp, Homo sapiens
  source 1..1129: mol_type = genomic DNA
aggcttgaaaaagaggtcaggccccaggagctgggctggagcagtgaggagtgtttcttccaagagaagatgactgcctgagaggattatttatgaggatggcctgtgcaaaaagacacccagagatttcatgctgttgattcacagaaagcctgttcctcttcactccgtagagtcctcagagtctggatcatcccttacagaagatccttgataatatttctgatatacctccaaggttccgtttgtcaaatgtgtgcgacccttctgataagtcaccagaggtgatgagggagagagagaaagaaagcaaattacaactgtaaagagtctctgaacagtgaaagatcaaaacagacagtctctggctttactggatgagtcaccattgcagcccgaccgcaaaaacaagcgtggcttctgtacttagcagcagtcttcctgtctggaaaggaaacattgctcagattggagatactggccattttatagacttcaaagcaacttaggccactgaactgtcaggcgggaaaacaggatgtcttccatttggaagcccctttgcttctaagaagttccagagaccatcccaggcccacagagttataaggattcatctgggcactgaagacatttgggacctcagtgaagtttctccgaggccagatggtcacattgattttctggaatcattttgaataaaaatgagcgaggtggtgaacacaatgcaaggctctccacgtactgtctggtattgttcaaccagctccacgactccctgagggcagagatgagcagatgttaatggataaagccaggctgaagaaatgtcaacaattgggagttttgaaggattccaggctgtgtctctgaagcaagagggagatgaccaaccctctgagactgaccacctatcgatggaggaagaggacccgatgccaagacagatttcaaggcagtcaagtgtgaccgaatcaactctttaccccaatccttatcatcagccttatatctcacggaagtactttgctacacggccgggggccattgagactgccatggaagacttgaaaggtcacgtagctgagacttctggagagaccattcaaggcttctggctcttgacaaa

SEQ ID NO: 2728 - DNA, 2067 bp, Homo sapiens
  source 1..2067: mol_type = genomic DNA
ctttcaaagccaatttgaataaacaactcttccctctcaaatgggcaagagtaactcttcagcaccatggagaggtccgggcagcgtgttacaacgtgggactgtgaccagggcaagcactctgacagtgattaccgagaggatgggatggatctaggcagtgacgccggcagcagcagcagcagcagccgcgccagttcacagtccaactccaccaaagtgaccccttgctccgagtgcaaatcttcatcgtcgccggggggcagcctggacttggtgtctgccctggaggactatgaggagcccttcccggtctaccagaagaaggtgattgatgagtgggcgccggaggaggacggggaggaggaggaagaggaggacgagcgcgaccagcgagggtaccgggatgaccgctctccggcccgggaaccgggggacgtaagcgccaggacccgcagcggcggcggcgggggcaggagcgccaccaccgccatgccgcccccggtgcccaacggcaacctccaccagcacgacccccaggacctcaggcacaatggcaacgtggtggtggctggccggccgagctgttcccggggcccccgccgggcgatccaaaagccccagccggctgggggccggcgcagtggccgcggcccggcggctggggggctctgccttcagcccccagacggcgggacgtgcgtccccgaagagcccccggtgccacctatggattgggaggcgctggagaagcatctggccgggctgcagttccgggagcaggaggcacagaaaaatgagagagagtctatcagacagaagttggcacttggaagcttctttgatgatggcccaggaatttataccagctgtagcaaaagtgggaagccaagcctttcctcccgactgcagagtgggatgaacttgcagatatgctttgtcaacgacagtggcagtgataaggacagtgatgctgatgacagtaagactgaaaccagcttggacacccccttgtctcccatgagcaaacagagttcttcctattctgatagagacactactgaagaggagtctgaatccttggatgacatggacttccttacaaggcaaaagaaattgcaagctgaagccaaaatggcccttgccatggccaaaccaatggccaaaatgcaagtagaagtggagaaacagaacaggaaaaagtctcccgtcgctgatcttctgccacacatgcctcatataagtgaatgcttgatgaaaagaagtttaaaacccaccgacctgagagacatgactattgggcagctacaagtgatagtcaatgatctccattcccagatagaaagcttgaatgaagagttggtccagctgcttctcatccgagatgagctgcacacagagcaggatgccatgctggtggacattgaagacttgaccagacatgctgaaagtcagcagaagcacatggcagagaaaatgcctgcaaagtgaaaagaagccattcaaccagagaacaagctagaatttattttgcttctgtggttgtaaaaatgctgttgctaaaggtggcgcagaaacaaatatcagtgttagtcattgataatgtctgaagcttaatgtccagtgattggcctttgcttcttaatttattttaattttttacttgtgccacttaatatcaggcattttaataaaatattgttacaaaaaatgtacagtactgacaccaccacaaatcatggttaataaaagagagtagttttaactttatttttatttgtttagagattttaagttggaacagtattttcccattgactacttttcattcttcactgtagttttaaagaagaactgtaaatgacggtgctatacaagtcaaaaaatacatgcctgcctcgtagtgaagttgtagctctccgtaatatgtatattttactcagttttcaacattttgtgaatgttgactacctgaagttcctttttagatgtgctattaacattctgttggattcagagggttccttgaaagttttatgtataaatatgtaaaataaaaattaaaac

SEQ ID NO: 2729 - DNA, 1893 bp, Homo sapiens
  source 1..1893: mol_type = genomic DNA
agctgattcccggggttggtggcagcggcggtagcagcaatggactttctcctggggaacccgttcagctctccagtgggacagcgcatcgagaaagccacagatggctccctgcagagcgaggactgggccctcaacatggagatctgcgacatcatcaacgagacggaggaaggtcccaaagatgccctccgagcagtaaagaagagaatcgtggggaataagaacttccacgaggtgatgctggctctcacagtcttagaaacctgtgtcaagaactgcgggcaccgcttccacgtgctggtggccagccaggacttcgtggagagtgtgctggtgaggaccatgctgacggagctggtgcccacccaggccgagcccgcagacctggagctgctgcaggagctcaaccgcacgtgccgagccatgcagcagcgggtcctggagctcatccctcagatcgccaatgagcagctgacagaggagctgctcatcgtcaatgacaatctcaacaatgtgttcctgcgccatgaacggtttgaacggttccgaacaggccagaccaccaaggccccaagtgaggccgagccggcagctgacctgatcgacatgggccctgacccagcagccaccggcaacctctcatcccagctggcaggaatgaacctgggctccagcagtgtgagagctggcctgcagtctctggaggcctctggtcgactggaagatgagtttgacatgtttgcgctgacacggggcagctcactggctgaccaacggaaagaggtaaaatacgaagccccccaagcaacagacggcctggctggagccctggacgcccggcagcagagcactggcgcgatcccagtcacccaggcctgcctcatggaggacatcgagcagtggctgtccactgacgtgggtaatgatgcggaagagcctaagggggtcaccagcgaagaatttgacaaattcctggaagaacgggccaaagccgcggaccgattgcccaacctctccagcccctcagctgaggggcccccgggtcccccatctggcccagcgccccggaagaagacccaggagaaagatgatgacatgctgtttgccttatgagtgtggggtctggcaccctgcagcccaggtccccactgctctcacacccttaggctgggacctccctccctcctctggtgttaaggctgctttgggggtggcttgttacccccttttcctcctctttgaagacggagctgccccagctgtggctgggggtgtggaggcagtgggatgaactgggggacaggtctgcgctgcagtgggatctggctgctctgcctcctttcccaccccagctgaccatgagactttgctgagaagtggaggccccaggacaggctggctggctggctggctgcttgacccagtgtgactctccttcactgagtgataccctgctccgggcccatgccccaaggagcccttcagagcccacactgccagtcgaggcctggctggaggctggccacagtggaaattctgccgagcctcttgtcccttccctgctctgctgcatggggccccatggctttggctggccactgagggtagggtgtggaggtgtggaggccccctgaggagctgcggcggcccaggtacgaagctgcaactctgcgcgcagtgggcgagatctcatcagccccaggctgcaggtgaggcttcaggggatgctggggccccactgcccctccgctgccttgccctccatccttcctctgttccttctggccgggcaccacagcactggggctcacctcttggttgatcctcttgtactgggagaggtgccttttgtatccccaattaaaggtagaaaaccaccctgctagcagc

SEQ ID NO: 2730 - DNA, 2081 bp, Homo sapiens
  source 1..2081: mol_type = genomic DNA
gaacacttcagcacctgtagcacagaagggccaaggagctgcagtcctcgaccagcaggaggtttgctcctcagcccactcgctgcatccagatcagctcacccctctcccttccctgcccaccaggactctgatagcccctggcagccacagcccattttgccaagatgtctagagtagccaaatatcgccggcaggtgagtgaagaccccgacatcgacagcctgctggagaccctgtctcccgaggagatggaggagctggagaaggagctggacgtggtggacccagacgggagtgttcccgtggggctgcggcagagaaaccagacggagaaacagtccacgggtgtgtacaaccgggaggccatgctcaacttctgtgaaaaggagaccaagaaacttatgcagagggagatgtccatggatgaaagcaagcaagtggagaccaagacagatgccaaggaggagaagatcatccggggcattgacaagggccgggtcagggctgcagtggataagaaggaggcagggaaggatgggagaggagaggagagggcagtggccaccaagaaggaagaggagaagaaagggagtgacaggaacacaggcttgagcagggacaaggataaaaagagagaggagatgaaggaggtggccaagaaagaggatgatgagaaggtaaaaggggagcgtaggaacacagacaccagaaaagagggtgagaagatgaaaagagcaggtgggaacacagacatgaaaaaggaggatgagaaggtaaaaagaggaactgggaacacagacaccaaaaaggacgatgaaaaagtcaagaagaatgaacccttacatgaaaaggaagccaaggatgacagcaagaccaaaacacccgagaaacagacgcccagtggccccaccaagccctctgaaggaccggccaaggtggaggaggaggcagctcccagcatatttgatgagcctctggagagagtgaagaacaatgaccccgagatgactgaggtgaacgtcaacaactcagactgcatcacaaatgagatcttggtccggtttactgaggctctggagttcaacactgtggttaagctgttcgccttggccaacacgcgagccgatgaccacgtggcctttgccattgccatcatgctcaaggccaacaagaccatcaccagcctcaacctggactccaaccacatcacaggcaaaggcatcctggccatcttccgggccctcctccagaacaacacgctgaccgagctccgcttccacaaccagcgacacatctgtggaggcaagacggagatggagatcgccaagctgctgaaggagaatactaccctgctcaagctgggctaccattttgagctggccgggccccgaatgactgtcaccaatctgctcagccgcaacatggacaagcagagacaaaagcggctgcaggagcaaaggcaggcacaggaagccaagggagagaagaaggatctgctggaggtacccaaggccggggccgtggctaagggctccccaaaaccttcacctcaaccatctccaaagccctctccaaagaactcacccaaaaaagggggtgctccagctgccccaccaccccctccccctcccttggctccaccccttatcatggagaacctgaagaattcactctcaccagctacccagaggaagatgggagacaaagtcctccctgcccaggagaagaactcccgtgaccagctattggctgccatccgctccagcaacctcaagcagctcaagaaggtggaagtgcccaaactgcttcagtaggaccaggctgccaggcaccatctgccaatgccatgactgctcaggcctcacctcccagggctacacagaccctgcccaccccatccctggctgacctgctgtggatgtccctattctgccatgggagagtccaggcctgggtcacgctcaaggaaggatgccttatctcttctcactttccttttcttgtctctgaggctctccaaattttgctttagtacatggagctcaggtttctggacaagaagagtccttttagcacat

SEQ ID NO: 2731 - DNA, 339 bp, Homo sapiens
  source 1..339: mol_type = genomic DNA
gtgacctcgaggcagcctcagcacggcactctcttgggtcctcttccaggctcacactgggcgacagcggagaggctcttggacggggcagagctcgcgccgagacctgcatgtccgcgtcttgtgacgggtgtgtgggaagccgcccgcctgtgcatcttgcttccgggtattcgctggctgatttactggttttagagatggggatgggcacccagtgctggactgaagaccagagaaggtggagctccctgtggccttggtctcacctctcttcagacccaagcctgcccaatgtgcaggtgaccaggctgacactcctgtcggaacaggctccgg

SEQ ID NO: 2732 - DNA, 1884 bp, Homo sapiens
  source 1..1884: mol_type = genomic DNA
gctgaggacggggcggggcctcgcgctaacggtcgcgcggccgtcgcacctgcacgaggctgtggcccgagcgtcctgtggagaagccgcgaagcgcgggcgacccgggggtcgggcgggccaggtccgcgaggccgcggcggcagctgtgcaggcccggggagcagccggccgggcgagcctcggattaaaaaaatggcaaactcctttgcagcgaggattttcactaccctttcagatctgcagacaaatatggctaatctgaaagttatcggtatagttattgggaaaacagatgtcaaaggctttccagacagaaaaaatattggatcagaaaggtacactttcagcttcaccattcgggattcaccagcacattttgtaaatgcagcttcctggggcaatgaagattacatcaagtctctttctgacagctttagggttggtgactgtgtgataattgaaaatcctctgatccaaagaaaggaaatagaaagagaagaaaaattcagccctgcaactcctagcaactgtaaactgttgctcagtgagaatcactcaacagtaaaagtttgttccagttatgaagtggacacaaagttactttctttgatacatttacctgttaaagagtctcatgattattattcactgggtgacattgttgcaaatggacacagtcttaatgggaggattattaacgtgcttgcagctgtgaaatcggttggagagccaaaatactttacaacttcagaccggagaaaaggccagaggtgtgaagttagactctatgatgaaacagagtcgtcttttgcgatgacatgttgggataatgaatccattctacttgcacagagctggatgccacgagaaacagtaatatttgcctcagatgtaagaataaattttgacaaatttcggaactgcatgacagcaactgtaatctcaaaaaccattattacaactaatccagatataccagaagctaacattctgctgaattttatacgagaaaataaagaaacgaatgttctggatgatgaaattgacagttatttcaaagaatccataaatttaagtacaatagttgatgtctacacagttgaacaattaaagggaaaagctttgaagaatgaaggaaaagctgatccttcctatggcatcctttatgcctacatttccacactcaacattgatgatgaaactacaaaagtagttcgaaatagatgttccagctgtggttatattgtaaatgaagcatctaacatgtgcacaacttgcaacaaaaactccttggactttaaatctgtctttctcagtttccatgtgctgattgatctgactgatcacacaggcacccttcattcctgtagtctcacaggaagtgttgctgaggagactttgggctgcacggtacatgagtttcttgcaatgacagatgaacagaaaacagcattaaagtggcaatttctcttggaaagaagcaaaatttatttaaaattcgttctatcacacagagcaaggagtggattgaaaattagtgtactctcgtgcaagcttgcagatcctactgaggcaagcagaaacttgtctggacaaaaacatgtttaaaacggtctatcattttgaactctggaaaagtataagagttttaactccctttaaaatggaatattaatttgaaaattatggggaaaattgcattttgtttacatgtggtgaacatgtttctagaaattgttatggtggaggtggtctgggtgagtctgaaggcctctctcatctgacctcccttcttagaaggcctcctactgtctttgccttgtctcctcccaagttggaaaatgtttacatgaattaataaacagatttaatcttctacag

SEQ ID NO: 2733 - DNA, 1124 bp, Homo sapiens
  source 1..1124: mol_type = genomic DNA
acggggcggggacgagctgtcgcgctggttgctcgtgcaggagcgggacccggaacagaccgccgtgagagaggaggggtgccggccgggattcgcggcccggagctcgggaccggagtcaggaatggagagaagggtaatggttttacctcttattgtggaaacctgttgagatcacagagaatatactgacggcataaaagggcagaaccatagcagggtgcggttgcttcattccagcctcgcagtcacctctgtgccctgctggttgtcttcccagcgctgctgtagttgccttccatggatctataggagagcaagtcctccaggagaagaagtcctcaccagtgaacggagacctctctgaactaaggataccatggccacgtcagccccactacggagcctggaagaggaggtgacctgctccatctgtcttgattacctgcgggaccctgtgaccattgactgtggccacgtcttctgccgcagctgcaccacagacgtccgccccatctcagggagccgccccgtctgcccactctgcaagaagccttttaagaaggagaacatccgacccgtgtggcaactggccagcctggtggagaacattgagcggctgaaggtggacaagggcaggcagccgggagaggtgacccgggagcagcaggatgcaaagttgtgcgagcgacaccgagagaagctgcactactactgtgaggacgacgggaagctgctgtgcgtgatgtgccgggagtcccgggagcacaggccccacacggccgtcctcatggagaaggccgcccagccccacagggaaaaaatcctgaaccacctgagtaccctaaggagggacagagacaaaattcagggcttccaggcaaagggagaagctgatatcctggccgcgctgaagaagctccaggaccagaggcagtacattgtggctgagtttgagcagggtcatcagttcctgagggagcgggaggaacacctgctggaacagctggcgaagctggagcaggagctcacggagggcagggagaagttcaagagccggggcgtcggggagcttgcccggctggccctggtcatctccgaactggagggcaaggcgcagcagc

SEQ ID NO: 2734 - DNA, 3636 bp, Homo sapiens
  source 1..3636: mol_type = genomic DNA
cggcaactccacccggcgctgaccccctcaactctgcaggacccggcgcgcgaggaccccacgacccgcgggcgcctgcgcggaccccgcgagccccggcgcctgcgcgagtccccgacgccgcccccgcccccactcaccgggccccgcagcaggggccggagccgccggcggcggggcgggggggggcgccccgatgagccccgagtgcgaggagccgccgccccccctcgcagggcgccatgttttggaagtttgacctgcacacaagctcgcacctggacacgctgctggagcgggaggacctgagcctgcccgagctgctggacgaggaagacgtgctgcaggagtgcaaggtcgtcaaccgcaagctgctggacttcctgctgcagccaccccacctgcaagcaatggtggcctgggtcacccaggagccgccagatagcggtgaggagcggctgcgctacaagtaccccagtgtggcctgcgagattctgacctcagatgtgccccagatcaatgatgccctgggtgctgatgagtcccttctgaaccggctctacggcttcctgcagagcaccggcagcctcaacccactgctggccagcttcttcagcaaggtcatgggcatcctcatcaaccgcaagacagaccagctcgtgtcctttcttcggaagaaggatgacttcgtggacctgctgctgcagcacattggcacctcggccatcatggacctcctgctgcgcctgctcacctgtgtggagcggcctcagctgaggcaggatgttgtcaattggctcaacgaggagaagatcgtccagcggctgattgagcagatccacccgtcgaaggatgagaatcaacattccaacgcatcccagtccctgtgtgacatcatccgcctgagccgggagcagatgatccaagtccaggacagcccagagcctgaccaactgctggccaccctggagaagcaggagacgattgagcagctcttaagcaacatgttcgagggggagcagagccagtctgtcatcgtcagtgggatccaggtgctgctgaccctgctggagcccaggaggccgaggtccgagtccgtgaccgtgaacagcttcttcagcagtgtggatgggcagctggagctcctggcccagggggccctggaaagcactgtgtccagtgtgggcgccttgcacgccctacgcccgcggctcagctgcttccaccagctcctgctggagcctcccaagctggagccgctacagatgacatggggcatgctggctccgcctctgggcaacacgcggctgcacgtggtcaagctcctggccagtgccctgagcgccaatgatgcagccctgacgcacgagctcctggcactggacgtgcccaacaccatgctggacctcttcttccattatgtcttcaacaacttcttgcatgcccaagtagagggatgcgtgagcaccatgctgagcttggggccacctcctgacagcagccctgagacgcccatccaaaaccctgttgtgaaacatctgctgcagcagtgccgcctggtggagcggatcctgacgtcctgggaggagaacgaccgtgtacagtgtgcgggaggccctcggaaaggctacatgggtcacctgacaagagtggccggtgccctggtgcagaacacggagaaggggcccaatgcagagcagctgcggcagctgctgaaggagctgcccagcgagcagcaggagcagtgggaagccttcgtatcggggcccctggcggagaccaacaagaagaacatggtggacctggtgaacacccaccacctacactcctccagtgacgatgaggacgaccggctcaaggagttcaacttccctgaggaggctgtgctgcagcaggccttcatggacttccagatgcagcgcatgacctctgccttcattgaccacttcggcttcaatgatgaggagtttggggagcaggaggagagtgtgaacgcaccttttgacaagacagccaacatcaccttctccctcaatgctgacgatgagaaccccaacgccaacctacttgagatatgctacaaggaccgcatccagcagtttgatgatgatgaggaagaggaggacgaggaagaggcccagggctcaggggagtctgatggagaagatggcgcctggcagggcagccagctggccaggggggcccgtctgggccagccacctggtgtccggagtggaggcagcacagacagtgaggacgaagaagaggaggacgaggaggaggaggaagacgaggagggcattggctgtgcagcccgtggaggggccacccctctgtcctaccccagccctggccctcagcctccaggccccagctggacagccacctttgacccagtgcctacagatgccccgaccagcccccgagtctccggggaggaagagctgcacactgggcctccagccccacaggggcccctcagtgtgccccagggcctccccactcagagcctggccagccctcctgcccgtgacgccctgcagctcaggtctcaggaccccacacccccctcagcacctcaggaagccacagaaggcagcaaagtcacggagccctcagccccttgccaggccttggttagcatcggggaccttcaggccaccttccacgggatccgttctgcccccagctcctcggacagtgcaaccagagacccctctacctctgtcccagcctccggggcccaccagcccccccagaccacagaaggggagaagagcccagagcccttggggcttccccaaagccagagtgcccaggccctcacgcctcctccgatacccaatggctctgccccggaagggcctgcatccccaggctcccaatagctgcctggtgcggcagcggcggccaaatcttccgtcctcccgtggatctcccggggtgggggcagggcgggtcccacgatggcccccattgccctcatcaccctgacacccccacattctctcctctggacccccaggaggctggtgccagggagacaggcccaacccacccccatttgcactgagaagagaagttttggagcgttgcctcctagaataaagatacagagagtcaaatagagagaatggagagagagaaacatatattatatattatatagagagagggaggagagcgagagagagtgaggacaccgaactgggctggcggctccaaagcacagccttccctgttccgtcccagcgggagctggtgttaggggtcccaaggttgccacccacgtgcccagctgtcccacgctgcagcgcagacggccacgcccacacccggccttttagctcaggtccaccatgggggacggcccagcgtgggtgggggtgccagagggtcccgagtgggggccgtgcctttgcccagaccctgcactttcaaccaggccagtccggctctggggagcaggggcctccccggcaacagccccaggggccttgagggtctgaggtcccagccctgttgccaagtgaccttgtccccagctccctcctcccaggctggtgtgagtgtgcgtgcgtttgtgccgagcttctatttcatattgcaaatataaataaaggaaggcagtttacg

SEQ ID NO: 2735 - DNA, 1851 bp, Homo sapiens
  source 1..1851: mol_type = genomic DNA
gaaaagccgccggtatttctccacctggctctcctctacctccaggcaggcgcacccgaggtccccctcccaccccaccttctgccctcccgcacacttggaccagtgctgttgacccggaagcggacatttctgcagctattctaagcacacgtcggcggagggagcgggacgtggccagcggtcagcggcgaaggaggcaggccctgcgcggggatcacggaagccctgtgattcaccatgaagttccagtacaaggaggtccatccctttgagtatcggaaaaaggaaggagaaaagatccggaagaaatatccggacagggtccccttgattgtagagaaggctccaaaagcaagggtgcctgatctggacaggaggaagtacctagtgccctccgaccttaccgatggccagttctaccttttaatccggaagagaatccacctgagacctgaggacgccttattcttctttgtcaacaacactatccctcccactagtgctaccatgggccaactatatgaggacagtcatgaggaagatgattttctgtatgtggcctacagtaatgagagtgtctatgggaaatgagtggttggaagcccagcagatggaagcacctggacttaggggtaggggaggggtgtgtgtgtgacttggggaaagagagggcggctcccaccgtgaggagacagaaggtgaagacatatagaaactttacaccgcacacaccgtcaacgcattttcacatgctcaactgatattttttgttgcttccttggcccagggagaaagcatgtcaggacagagctgttggattggctttgatagaggaatggggatgatgtaattttatggcattcctgagatttaatttttgtgcagtttcatagaaaggtcggtcaggaggtggacaagttggggtcagagatgatggcagtccagcagcaactccctgtgctcccttctctttgggcagagattctgtttttgacagttgcacaagacaggtagggaaaggggacttgtggtagtgggccatacctggggacgaaaagagacccactgtaattgatgcatcgtggcccccgatcttccgtatcccacacttcttttctcccatcccagttgcaatctcactcacaaacatcacagtaccaccccaggggcggcagtagacaccaacccagaaatttagacagggatctcttatctttggaaaataggggttaggcatgagggtggttatgattaagaagataattttgttgttaaatagcattaaactggaattgacagagtgagttgagcatctctgtctaacctgctctttctctctggtgctcctcatctcacccctaccttggaatttaataagcttcaggcatttccaattgcagactaaaaccacttctaccatctcctctagtattttccatgtatcaggacagagatgtcttatgtagggaaggggcaggtatgaagtgaggtagattatctatacctctcactcattcaggattctcgctcccatgctgctgtcccttcattctcacactcacaggaatgctatgtgatggccagctgcttcccttcttggttatccactgcagctgctagttagaaaggtttgcagggatgacttttagtaaatcatggggattttattgatttattatcacttataggattttgtggggtgggagtggggagcaggaattgcactcagacatgacatttcaattcatctctgcaaatgaaaagggttcttcctcttgggggaaatctgtgtgtcagttctgtcagctgcaagttcttgtgtaatgaagtcaatgctgtcaggccaag

SEQ ID NO: 2736 - DNA, 1594 bp, Homo sapiens
  source 1..1594: mol_type = genomic DNA
gtgctccgccgtctccgccgcatcttccaccctcgccgccgccgcagctccccgcgctcgtgccaccgccgccgcgtccaccctcagcgccaccgccatgcgggagatcgtgcacctgcaggccggccagtgcggcaaccagatcggggccaagttttgggaggttatcagtgacgaacatggcatcgaccccacaggcacataccatggggacagtgacctgcaactggagaggatcaacgtgtactacaacgaggccacaggaggaaattatgtccccagagcggtgctggtggacctggaacccggcaccatggactctgtccgttctggccccttcggtcagatctttcggccggacaacttcgtgtttggccaatccggagccggcaacaactgggcaaaggggcactacacggagggcgcagagctggtggacgctgtcctggacgtagtccggaaggaggccgagagctgcgactgccttcagggcttccagctgaccacccccacctacggggacctcaaccacctggtgtcggccaccatgagcggggtcaccacctgcctgcgcttcccgggccagctgaacgccgacctgcgcaagctggccgtcaacatggttccctttcctcgcctgcacttcttcatgcccggcttcgcacccctgaccagccggggcagccagcagtaccgggccctgacggtgcccgagctcacccagcagatgttcgatgccaagaacatgatggcggcgtgcgacccgcgccacggccgctacctgaccgtggccgccgtgttccggggccgcatgtccatgaaggaggtggacgagcagatgctgagcgtgcagagcaagaacagcagctacttcgtggagtggatccccaacaacgtgaagacggccgtgtgcgacatcccgccccgcggcctgaagatggccgcgaccttcatcggcaacagcacggccatccaggagctgttcaagcgcatctccgagcagttcacggccatgttccggcgcaaggccttcttgcactggtacacgggcgagggcatggacgagatggagttcaccgaggccgagagcaacatgaatgacctggtatctgagtaccagcagtaccaggacgccacggccgaggagggcgagttcgaggaggaggcggaggaggaggtggcctaggctgctcccatcgcttcccacctgtcccctcgaggcttctgacctttgatccgctaggccccccatctctgaaccctagagccccgctttccctccaaggctgactccccgctgaccctaacaatacctttggagctcgctttacctctggctacttcatctccgaccctggctcccctttgagccctaatttatctttaacccccttgagctcttccaaccttgacattcccaggaggagccccgcttcaccccttctgactctggaaaccgcacctttaactttgcagaccttccttcacccctgacttctgcttcacctttgacctctgccccccatgaatcccattttacctctagacctataagttctggtttatgtttgacccctccctctgagctgcactt

SEQ ID NO: 2737 - DNA, 877 bp, Homo sapiens
  source 1..877: mol_type = genomic DNA
gcacagcagtgacgacacacaaggtttcggggactgagtgggtttcagactttctctcaggatttccgctggcttcaggttccggtcaggcgtcgggacagagcctgatccaggcttcggcggccggtggcagctctcgatcagctctcgcagtcggagaggcggctaaggaaaggtgccacagcagagacgcgaaggagaggccctagaaccttttcaaagaagaatggaagaaaccatgaagcttgctacgatggaagacacagtggagtactgcctgttcctgataccagatgagtcaagggactcagataaacataaagagattcttcagaagtacattgagagaataatcactcggtttgcacctatgctggtcccctacatctggcagaatcagcctttcaatcttaaatataaacctgggaaaggaggtgttcctgctcatatgtttggcgtgacaaagtttggggataacattgaggatgaatggtttattgtttatgtaataaagcagatcacaaaggaatttccagagttagtagcaagcaccaatagggtatttttctgccatggggaattgtgtattatccctgcaccaagaaaatctggagcagaatcttggttacccaccacacccccaacaattccacaagcattgaatataatcacagcacattcagaaaaaatacttgcttcagaatctatacgagctgctgtgaataggcgcatcagagggtacccagaaaaaattcaggcctcacttcatcgagcacactgcttccttccagctggcattgtggcagtgctaaagcagcgccccagattggtggctgcagcagtccaggcattttacctacgagaccctattgacctg

SEQ ID NO: 2738 - DNA, 3007 bp, Homo sapiens
  source 1..3007: mol_type = genomic DNA
gagtgtgtgacccagcccttcccccgtggccaagcagagagagtggccttgaggaagccatagcagcaggaccagcatggcctctgctgcctctgtgaccagcctggcagatgaagtcaactgccccatctgtcagggtaccctgagggagccggtcactatcgactgcggccacaacttctgccgggcctgccttacccgctactgtgagataccaggcccagacctggaggagtcccctacttgcccactctgcaaagaacccttccgtcctgggagcttccggcccaactggcagctggctaacgtggtggagaacattgagcgcctccagctggtgtccacactgggtttgggagaggaggatgtctgccaagagcacggagagaagatctacttcttctgtgaggatgatgagatgcagttgtgcgtggtgtgccgggaggctggggagcacgctacccacaccatgcgcttcctggaggatgcagcggctccctatagggaacaaatccataagtgtcttaaatgtctaagaaaagagagagaggagattcaagaaatccagtcaagagaaaataaaaggatgcaagtcctcctgactcaggtgtccaccaagagacaacaggtgatttctgagttcgcacacctgaggaagtttctagaggaacagcagagcatcctcttagcacaattggagagccaggatggggacatcttgaggcaacgggatgaatttgatttgctggttgctggggagatctgccggtttagtgctcttattgaagaactggaggagaagaatgagaggccagcaagggagctcctgacggacatcagaagcactctaataagatgtgaaaccagaaagtgccggaaaccggtggctgtgtcgccagagctgggccagaggattcgggactttccccagcaggccctcccgctgcagagggagatgaagatgtttctggaaaaactatgctttgagttggactatgagccagctcacatttctctagaccctcagacttcccaccccaagctcctcttgtccgaggaccaccagcgagctcagttctcctacaaatggcagaactcaccagacaacccccagcgttttgaccgggccacctgtgttctggcccacactggcatcacaggggggagacacacgtgggtgtggatggccagggtacctggggactcaggctgctgccagttctgctcaccaccatccgtgcttggcacagaagtagctgcatagaaagggcactggatttgaagtcagaagacctgggttcttgaaccagcctgtcaaccagttgtatgactttaaacaaggcatctcacctcttttcatcttgttttcttccaataatgttagagttcatgtaatcacattctctagaaccatttagtttgtgttaactatgaaccaagcagtgtggtggccactggtgacttgaaaatatagagaaaaaaaaaacctgctctatatctgaaagagctcttgggaagacagagaaacataaagaggaaattacagcacagtgtggtgggtgttacgggaagtccaaccccagcattatgggagttcaggggaaggggcatagcccagcctggaaggagagggtgagtgggggatggctttctgaaaagggtggtctaaaggatgcctatggtcaatagggaaaagaggggaagaagcatcttaagaagaggaaacagcagagaactggctggatgacctgtgactctggagcactgggttgtctccattgtcattatgggcagatgtgtgccatccccagccgacgccactcactgcctccttcctcctggtgttgccacttctgggtgagattaaggtgcagggcctgggggcaggaggacataaggtatagccataaatcataacccagggaccacactcaaccctagggaaattgtcttcctgatcagttgattaccatctgaggtcaagaaatgagatagtgggagcaaatgggtcacaaatagctcagctgtgggctcagaaactgctaggtaaaagaattccagaaggaggccagggcataagttggatgacctatgaactttagtctaaagaattgagactaccgtaattgagactactgtagtgacatctgagaaatgggatggaatagtgaccatgttttattttcttgttcttgtcactattgtattttattttgcataatcatgcccttcactgacagtctccttaacatcatctgtttactctgctcagtgtaaactacaatgctctgtcatctccctactgggtctcctgggaggaggggagccatccagggtgcaaactcaaaggcagagggcacagcgtgcttaggcccaagcttagaattcaattgagaagttctgttgttcatccttacctcagcaggtagaaaagaggtggagatcagaagccagggattagagattgaattgctttccctgggagtgtgcagtatctcattaaaatgttgtatattcaaaaaaatacagacacacacaagtgcctatataatgataaaacatatccaaagcacccaaacctgtgattccagaaaagtagatcctatttttgtttatttttattggctttagctgtgtcttttgaaaggactattatcctctaaaatgtatgtgtatgaagatcctggcttgcagctcgggagctttacacaccttgtgtcactttatcttggtaacgagccaagatcatgcaaccagttcatccatgtctgacccaagagctcttaactgctatgctgcactgcctcattcagagatagatgcctgcatgggtcctggcgattattttaatgctggctacacccccacaggtgacttggattcagaaatacaatttatatttcttctttttaaattgttttattttatttttcttttaatagttatatgtcagtgagaacaatttatatgtcttacactgagaaataaaactgctcataagtgaaaa

SEQ ID NO: 2739 - DNA, 592 bp, Homo sapiens
  source 1..592: mol_type = genomic DNA
tattttgggggtggttggaggcggtggcggcggcggcgaggaggggaatttccttgtgcctccattcccgggaggggggagcggcgttggaggccaccgtttccagcatcaacaacagcaacttgtgattggcggtgaccggatattcagttgcacatccccacatcaatgcactgccaatgatgaggaaactgaggccttggactagaacagaggtctcctgactcagtccaggactctttctattacatcatgcggcctgatatttgtctttatggaactcagcaacatcacatacaggtagagacggggtttcaccgtgttagccaggatggtctcaatctcctgacctcgtgatctgtccgccttggcctcccaaaggtttgggattacagacgtgagccaccgcacccagccgatattgttttattttaatcaaggcaaaactggttatatcctgtgttgtgacctcatggtttaagtgggaataaagatgagtataagcagtgatgaggtcaacttcttggtatatagatacttgcaagagtcaggattttctcattcagcatttacctttggtatagaaagccat

SEQ ID NO: 2740 - DNA, 1504 bp, Homo sapiens
  source 1..1504: mol_type = genomic DNA
gtgtcctccggtcccctctgcctcaggcagctgcatgtttgcctctgacctcctcagggctttagattgctgccctggggcgggaagctccggcctcctcccccagctgggcccccgacagctcctggcattcacagtgaactgtctggggaatcatcgctatttggggttcttcgaggacctggagcagcggcacaaggcccaggtgctggtcgaggacatcagtgacatcctggaggagcacgctgagaagcacttccacccctacatcgcctactgctccaacgaggtctaccaacagcgcacgctgcagaagctgataagcagcaacgccgccttccgagaggccctgagagagattgagaggcggccggcgtgcgggggcctgcccatgctctccttcctgatcctccccatgcagcgggtgacccggctgcccctcctgatggatacgctctgcctcaagacccagggccactccgaaaggtacaaggctgccagccgtgcactgaaggccatcagcaagctggtgaggcagtgcaacgagggggcccacaggatggagcgcatggagcagatgtacacgctgcacacacagctggacttcagcaaggtcaagtccctcccactgatctctgcctcccggtggctgctgaagcgcggagagctgttcttagtggaagaaaccggactttttcgaaaaattgccagccggccaacgtgctaccttttcctgttcaacgatgtcctggttgtgaccaagaagaagagcgaggagagctacatggtccaggactacgcccagatgaaccacatccaggtggagaagatagagccgtctgagctccctctgcccgggggcggcaaccgtagctcctccgtgccccaccccttccaggtgaccctgcttcgcaacagcgagggccgccaggagcagctcctgctctcctcggactccgcgagtgaccgggcacggtggatcgtggcgctcacacacagtgagagacagtggcagggcctctccagcaaaggagacctgccccaggtggagatcaccaaggccttcttcgcgaagcaagcagacgaggtcacactgcagcaggcggacgtggtcctggttctgcagcaggaggatgggtggctctatggcgagaggctccgggacggagagacgggatggttccccgaggactttgcccgcttcatcaccagccgtgtggccgtggagggcaatgtccgcaggatggagcgtctgcgggtggagacggacgtgtagccctggcgaggccagccggcggcagcacagcctgtctccaatcagcaagtggtcgtgcctggctctagagagcgtggggagctggtctcaaggacccagcatggttccctggggcttcccaagagcctgtggctgtggtgccgggctccagacacttcacggaaggaagatcacatgtccccagagaggcacccccaggcaagctcgagggggccacaccgtgtccca

SEQ ID NO: 2741 - DNA, 2776 bp, Homo sapiens
  source 1..2776: mol_type = genomic DNA
ggtgaaaggtgaggggaacagctgatccgtctgttgggaggacagatatctcaaggccaggatggaagaatcaccactaagccgggcaccatcccgtggtggagtcaactttctcaatgtagcccggacctacatccccaacaccaaggtggaatgtcactacacccttcccccaggcaccatgcccagtgccagtgactggattggcatcttcaaggtggaggctgcctgtgttcgggattaccacacatttgtgtggtcttccgtgcctgaaagtacaactgatggttcccccattcacaccagtgtccagttccaagcctgtaaccagctcgatgagagccagcaagaacggaatgacctgatgcagctgaagctacagctggagggacaggtgacagagctgaggagccgagtgcaggagctcgagagggctctggcaactgccaggcaggagcacacggagctgatggaacagtacaaggggatttcccggtcccatggggagatcacagaagagagggacatcctgagccggcaacagggagaccatgtggcacgcatcctggagctagaggatgacatccagaccatcagtgagaaagtgctgacgaaggaagtggagctggacaggcttagagacacagtgaaggccctgactcgggaacaagagaagctccttgggcaactgaaagaagtacaagcagacaaggagcaaagtgaggctgagctccaagtggcacaacaggagaaccatcacttaaatttggacctgaaggaggcgaagagctggcaagaggagcagagtgctcaggctcagcgactgaaagacaaggtggcccagatgaaggacaccctaggccaggcccagcagcgggtggccgagctggagcccttgaaggagcagcttcgaggggcccaggagcttgcagcctcaagccagcagaaagccacccttcttggggaggagttggccagtgcagcagcagccagggaccgcaccatagccgaactacaccgcagccgcctggaagtggctgaagttaacggcaggctggctgagctcggtttgcacttgaaggaagaaaaatgccaatggagcaaggagcgggcagggctgctgcagagtgtggaggcagagaaggacaagatcctgaagctgagtgcagagatacttcgattggagaaggcagttcaggaggagaggacccaaaaccaagtgttcaagactgagctggcccgggagaaggattctagcctggtacagttgtcagaaagtaagcgggagctgacagagctgcggtcagccctgcgtgtgctccagaaggaaaaggagcagttacaggaggagaaacaggaattgctagagtacatgagaaagctagaggcccgcctggagaaggtggcagatgagaagtggaatgaggatgccaccacagaggatgaggaggccgctgtggggctgagctgcccggcagctctgacagactcagaggacgagtccccagaagacatgaggctcccaccctatggcctttgtgagcgtggagacccaggctcctctcctgctgggcctcgagaggcttctccccttgttgtcatcagccagccggctcccatttctcctcacctctctgggccagctgaggacagtagctctgactcggaggctgaagatgagaagtcagtcctgatggcagctgtgcagagtgggggtgaggaggccaacttactgcttcctgaactgggcagtgccttctatgacatggccagtggctttacagtgggtaccctgtcagaaaccagcactgggggccctgccacccccacatggaaggagtgtcctatctgtaaggagcgctttcctgctgagagtgacaaggatgccctggaggaccacatggatggacacttctttttcagcacccaggaccccttcacctttgagtgatcttactccctcgtacatgcacaaatacacactcatgcacacacacactcacacacatgcatacacttaggtttcatgcccattttctatcacactgggctccatgatattctgttccctaagaactgcttctgtgtgccctgttttcatcccaagatttctcacttcatcctctcctacctggctcttttgtcccagggaggggtcctgttcggaagcagtggctgaatttatcccctgaaagtggttttggaggaaccgggatggaggaggccttcccctgtgggaatagaatcgtccactcctagccctggttgcttctgatacacagccactgcacacacacactcacactcacactcccttgtctgatgccccaaagccaattcctggggcaccctaccctctcttatttggagtttccgttggtttacctgagttttctctggggtctgcacagaggcagcagcatggacatcatggcctctcaggtcccttttggttctcagtttcattggttcctctttctgttcccccattgacttctgtgccccaccctagccttttccataaccttaggtattcagtttggaggggttttttgtatttttgaggattcctgtattctgtatcctctcctcgcatctcctcacatggaaagaaataatgtatttgtgccttctgtgaggaatggggggaacaagtggtcccaggtatccccatttccaaggcccccctccctctccaggtccccccacagcaataaaagcttccccctgatatccatccctttgtagtttgaacaaatatatttatatgatatgt

SEQ ID NO: 2742 - DNA, 2671 bp, Homo sapiens
  source 1..2671: mol_type = genomic DNA
atgccgctgagctcccccaacgccgccgccaccgcctccgacatggacaagaacagcggctccaacagctcctccgcctcttcgggcagcagcaaagggcaacagccgccccgctccgcctcggcggggccagccggcgagtctaaacccaagagcgatggaaagaactccagtggatccaagcgttataatcgcaaacgtgaactttcctaccccaaaaatgaaagttttaacaaccagtcccgtcgctccagttcacagaaaagcaagacttttaacaagatgcctcctcaaaggggcggcggcagcagcaaactctttagctcttcttttaatggtggaagacgagatgaggtagcagaggctcaacgggcagagtttagccctgcccagttctctggtcctaagaagatcaacctgaaccacttgttgaatttcacttttgaaccccgtggccagacgggtcactttgaaggcagtggacatggtagctggggaaagaggaacaagtggggacataagccttttaacaaggaactctttttacaggccaactgccaatttgtggtgtctgaagaccaagactacacagctcattttgctgatcctgatacattagttaactgggactttgtggaacaagtgcgcatttgtagccatgaagtgccatcttgcccaatatgcctctatccacctactgcagccaagataacccgttgtggacacatcttctgctgggcatgcatcctgcactatctttcactgagtgagaagacgtggagtaaatgtcccatctgttacagttctgtgcataagaaggatctcaagagtgttgttgccacagagtcacatcagtatgttgttggtgataccattacgatgcagctgatgaagagggagaaaggggtgttggtggctttgcccaaatccaaatggatgaatgtagaccatcccattcatctaggagatgaacagcacagccagtactccaagttgctgctggcctctaaggagcaggtgctgcaccgggtagttctggaggagaaagtagcactagagcagcagctggcagaggagaagcacactcccgagtcctgctttattgaggcagctatccaggagctcaagactcgggaagaggctctgtcgggattggccggaagcagaagggaggtcactggtgttgtggctgctctggaacaactggtgctgatggctcccttggcgaaggagtctgtttttcaacccaggaagagtttgctgcaacagggtgtgctggagtatctgtctgccttcgatgaagaaaccacggaagtttgttctctggacactccttctagacctcttgctctccctctggtagaagaggaggaagcagtgtctgaaccagagcctgaggggttgccagaggcctgtgatgacttggagttagcagatgacaatcttaaagaggggaccatttgcactgagtccagccagcaggaacccatcaccaagtcaggcttcacacgcctcagcagctctccttgttactacttttaccaagcggaagatggacagcatatgttcctgcaccctgtgaatgtgcgctgcctcgtgcgggagtacggcagcctggagaggagccccgagaagatctcagcaactgtggtggagattgctggctactccatgtctgaggatgttcgacagcgtcacagatatctctctcacttgccactcacctgtgagttcagcatctgtgaactggctttgcaacctcctgtggtctctaaggaaaccctagagatgttctcagatgacattgagaagaggaaacgtcagcgccaaaagaaggctcgggaggaacgccgccgagagcgcaggattgagatagaggagaacaagaaacagggcaagtacccagaagtccacattcccctcgagaatctacagcagtttcctgccttcaattcttatacctgctcctctgattctgctttgggtcccaccagcaccgagggccatggggccctctccatttctcctctcagcagaagtccaggttcccatgcagactttctgctgacccctctgtcacccactgccagtcagggcagtccctcattctgcgttgggagtctggaagaagactctcccttcccttcctttgcccagatgctgagggttggaaaagcaaaagcagatgtgtggcccaaaactgctccaaagaaagatgagaacagcttagttcctcctgcccctgtggacagcgacggggagagtgataattcagaccgtgttcctgtgcccagttttcaaaattccttcagccaagctattgaagcagccttcatgaaactggacacaccagctacttcagatcccctctctgaagagaaaggaggaaagaaaagaaaaaaacagaaacagaagctcctgttcagcacctcagtcgtccacaccaagtgacactactggcccaggctaccttctccatctggtttttgtttttgtttttttttcccccatgcttttgtttggctgctgtaatttttaagtatttgagtttgaacagattagctctggggggagggggtttccacaatgtgagggggaaccaagaaaattttaaatacagtgtattttccagcttcctgtctttacaccaaaataaagtattgacacaaga

SEQ ID NO: 2743 - DNA, 689 bp, Homo sapiens
  source 1..689: mol_type = genomic DNA
ggagaaggggcgcaggtggccgccatcttggattgcgaactgggtcgctacgcttcacgccaggggcggagtggcggcccttctgttacccgccacacacgtcgccgctggggactgggaaatcagggcatcggagagtgccacattaatgggtctctggaacctggcggtgccgggtgtttctcgtgttttccccagggcgacagcggtcgcgggggcgtggcagccggacctttcccttgcggacgcgaaggcgtgatgccatggctagtccagggaaagataactatagaatgaaaagttataagaataaagccctaaatcctcaagagatgcgtagacgaagagaagaagaaggaatacagcttagaaaacaaaaaagagaagaacagttgttcaaacgcagaaatgtctatttgcccagaaatgatgaatctatgcttgaaagtcctatacaggatccagatattagttccactgtacccattccagaggaagaagttgttactacagatatggttcagatgattttttctaataatgctgatcaacagctaacagcaacacagaaatttagaaagctgctttctaaagaacctaatccaccaatagatcaagttatacagaaaccaggagttgtacagagatttgtgaaatttcttgaaagaaatgaaaattgcactttacaa

SEQ ID NO: 2744 - DNA, 550 bp, Homo sapiens
  source 1..550: mol_type = genomic DNA
gattattgcaattattattatttatttttcatcttttttcaggttgacgatgtgtcacactgtgtaagggaatcgcatggagatgggcattccgaactgttaatggggacatgggactccagttgtctctgatcacttgtgtggattttcctggcgtagaacgacagaagccgctagtaagtcgccaagacctacagcaggaattctgcaccaaagggcataaaatcttgttattttaatttgcatctgggagaatgtctgagcaaggagacctgaatcaggcaatagcagaggaaggagggactgagcaggagacggccactccagagaacggcattgttaaatcagaaagtctggatgaagaggagaaactggaactgcagaggcggctggaggctcagaatcaagaaagaagaaaatccaagtcaggagcaggaaaaggtaaactgactcgcagccttgctgtctgtgaggaatcttctgccagaccaggaggtgaaagtcttcaggatcaggaatcaattcatttacagctttccagtttttccag

SEQ ID NO: 2745 - DNA, 2702 bp, Homo sapiens
  source 1..2702: mol_type = genomic DNA
ggtttcaaattggccctttggcctctggagcaaattcaaatgtaactcttccccaaccccccttctcttcttccagattaattaaaagaagaatgaactataatccttgaagataactgggcaattttttaagtcggaggctgttcttactggtgtgaggatttacacacgtcttcagtttttcagcacagaccagcagaccatcatttttagaggaaatactccctctgccctcctttttggtttccttggtggtaaagattaaatttggttgcatcattttgacttgtgtttgagtctagattttatggcacaaggaatggcataaacttttcatgtgttttggttaaaacaaaccagaccattgcattgaccctggacatctttaattgagaaattggtaactttattttaatatgtatatctgaagaattcaagaaaacaaaggcatcctcagaggtgtgcctcttttctttattattagaggcaaaacgaacaattttataggatttgtagtgaaattataccagattataaggagaaccaaaactaagtcgcaaaatttattaatttaaggggctctcgctttgaaagtttgagagtaagttacgataggcatttgtatccattcattactttcctcttttcaaataagcaactaaatagaaatgctaatctcagacttaattatttaacagaagagtgtaccatggaaaacctccagacaaatttctccttggttcagggctcaactaaaaaactgaatgggatgggagatgatggcagccccccagcgaaaaaaatgataacggacattcatgcaaatggaaaaacgataaacaaggtgccaacagttaagaaggaacacttggatgactatggagaagcaccagtggaaactgatggagagcatgttaagcgaacctgtacttctgttcctgaaactttgcatttaaatcccagtttgaaacacacattggcacaattccatttaagtagtcagagctcgctgggtggaccagcagcattttctgctcggcattcccaagaaagcatgtcgcctactgtatttctgcctcttccatcacctcaggttcttcctggcccattgctcatcccttcagatagctccacagaactcactcagactgtgttggaaggggaatctatttcttgttttcaagttggaggagaaaagagactctgtttgccccaagtcttaaattctgttctccgagaatttacactccagcaaataaatacagtgtgtgatgaactgtacatatattgttcaaggtgtacttcagaccagcttcatatcttaaaggtactgggcatacttccattcaatgccccatcctgtgggctgattacattaactgatgcacaaagattatgtaatgctttattgcggccacgaacttttcctcaaaatggtagcgtacttcctgctaaaagctcattggcccagttaaaggaaactggcagtgcctttgaagtggagcatgaatgcctaggcaaatgtcagggtttatttgcaccccagttttatgttcagcctgatgctccgtgtattcaatgtctggagtgttgtggaatgtttgcaccccagacgtttgtgatgcattctcacagatcacctgacaaaagaacttgccactggggctttgaatcagctaaatggcattgctatcttcatgtgaaccaaaaatacttaggaacacctgaagaaaagaaactgaagataattttagaagaaatgaaggagaagtttagcatgagaagtggaaagagaaatcaatccaagacagatgcaccatcaggaatggaattacagtcatggtatcctgttataaagcaggaaggtgaccatgtttctcagacacattcatttttacaccccagctactacttatacatgtgtgataaagtggttgccccaaatgtgtcacttacttctgctgtatcccagtctaaagagctcacaaagacagaggcaaatgcatcaatctcaaataattctacaagtaaaaggaaatctgagtctgccacttgcaacttagtcagagacataaacaaagtgggaattggccttgttgctgccgcttcatctccgcttcttgtgaaagatgtcatttgtgaggatgataagggaaaaatcatggaagaagtaatgagaacttatttaaaacaacaggaaaaactaaacttgattttgcaaaagaagcaacaacttcagatggaagtaaaaatgttgagtagttcaaaatctatgaaggaactcactgaagaacagcagaatttacagaaagagcttgaatctttgcagaatgaacatgctcaaagaatggaagaattttatgttgaacagaaagacttagagaaaaaattggagcagataatgaagcaaaaatgtacctgtgactcaaatttagaaaaagacaaagaggctgaatatgcaggacagttggcagaactgaggcagagattggaccatgctgaggccgataggcaagaactccaagatgaactcagacaggaacgggaagcaagacagaagttagagatgatgataaaagagctaaagctgcaaattctgaaatcatcaaagactgctaaagaatagaaactgttaaagagattcatctgtgtattactgacaaggttttttttgtttgttgcttgctttggtaattgaattc

SEQ ID NO: 2746 - DNA, 4012 bp, Homo sapiens
  source 1..4012: mol_type = genomic DNA
acggcacccgccagtgggggtgcctcaacttccgcgggcgtttaaatagcagcctctctcccctcccaccggtaataggctgcctgctgtttcccggggagatcatgaaacgaggtcgccttcccagcagcagtgaggattctgacgacaatggcagcctgtcaactacttggtcccagaattcccgatcccagcataggagaagctcctgctccagacatgaagatcgaaagccttcagaggtgtttaggacagacctgatcactgccatgaagttgcatgactcctaccagctgaatccggatgagtactatgtgttggcagatccctggagacaggaatgggagaaaggggtccaggtgcctgtgagcccggggaccatccctcagcctgtggccagggttgtgtctgaagagaaatccctcatgttcatcaggcccaagaagtacatcgtgtcatcaggctctgagcctcccgagttgggctatgtggacatccggacgctggctgacagcgtgtgtcgctatgacctcaatgacatggatgctgcatggctggaactgaccaatgaagaatttaaggagatgggaatgcctgaactagatgaatacaccatggagagggtcctagaggaatttgagcagcgatgctacgacaatatgaatcatgccatagagactgaggaaggcctggggatcgaatatgatgaagatgttgtctgtgatgtctgccagtctcctgatggtgaggacggcaatgagatggtgttctgtgacaaatgcaacatctgtgtgcaccaggcctgttatggaatcctcaaggtaccagagggcagctggctgtgccggacatgtgccctgggggttcagccaaaatgtctgctgtgtccgaagaagggtggagctatgaagcccacccgtagcggaaccaagtgggtccacgttagctgtgctctgtggatccctgaggtgagcattggcagcccagagaagatggagcccatcaccaaggtgtcacacattcccagcagccggtgggcgctagtgtgcagcctctgcaatgagaagtttggggcctctatacagtgctctgtgaagaactgccgcacagccttccatgtgacctgtgcttttgaccggggcctggagatgaagaccatcttagcagagaatgatgaagtcaagttcaagtcctattgcccaaagcacagctcacataggaaacccgaggagagtcttggcaagggggctgcacaggagaatggggcccctgagtgttccccccggaatccgctggagccctttgccagccttgagcagaaccgggaggaggcccaccgggtgagtgtccgtaagcagaagctgcagcagttggaggatgagttctacaccttcgtcaacctgctggatgttgccagggctctgcggctgcctgaggaagtagtggatttcctgtaccagtactggaagttgaagaggaaggtcaacttcaacaagcccctgatcaccccaaagaaagatgaagaggacaatctagccaagcgggagcaggatgtcttatttaggaggctgcagctgttcacgcacctgcggcaggacctggagagggtaatgattgacactgacaccttatagtgacttagagaagaagatgcaaagaggcgaacgctcgcccagagcaagaaatgatagccagtcatatactctcagacccttgtacacaccacagcatgaggttgtgttggttaaaaatatttatgggctggtaaactcattgtacatatgtgcaaaactgctactgagtggggagcttctttgtggtttttttttttttaaaaacactttcccattaatctttactgttttgtaagatcaaatggggtgtgtcttccccacccccattccttcattctagagctagagtgaatgagccccaagaaaatgacccaaggagttgactcaggatggtttacagactgatttagaaaaccagaacggatttcatttctaatggagggggccagagatgggaaaatttcttgttcagtccggggaaacacacctaggtgctggtgatgggcttatgaaggaagctaagcacggctgctcactggcccccactttgtttcttgggtaattcacaggggaattcccagtactgtcatggagcagagcaggcagtgggtgctgatgtgtgtgcatgagctgtatgtacacatgcatatatctgttacagaagatactcctggcagtgaggtgctaagtcatcactgaggctgtgtgtgtgtgtgtgtgtgcgcgtgcccgtgtccatccatgtctctgttgtgtgtctgtgtgcgggtatgggtgggattcctggtggacaggggtgtcagatctgtctgaggagccccagtcatgctcagcacgctacagatgtgttgtttgtcacactgagattgctgaatgtcgtggctgttggctgccgagcctcagctgctggcatttccttctgctgtttgctgcttttgtgcctcccccactttccatcacctctggagtcccgtctggacgtcccttcctgctacaggaataatgaggcgtgggctgcctcccgctagggcctcctgctccctgtaggtagtttctggctgaggcttgctaattggggatgcttcttagagcatcttccacatcaactcccctggctgctggctaccgattaaattcattagtgtgaaagaggtgggagtgaggttttctggcctgaagcagtctgcactgaaaggtacccaagtggcctgaaacagtgtagggaaagacctgggaaacactggaccaaaaaagcctgatctcatggagacctgcatggccctgttagagatggcgtagaagtgaaagtcttaaagggagcattagagatccttttaatacacgactgagtgccagcttatttgtgatgccccttcccagaccaggttaggattcctgggaaggccgcggattccggccctggaagaggcaggatcctggagcagttttgtgaggcttttgtgctcccatacgccccctggtggtgagtgtaaagaagactttgcctctcacaactacatgtatgtgtggcatttttgttagagatgagaaaaggattgagaaggataaactggaatcctggtaagaagcctttatgccagcccgacacctgctgtaattggggtgcatgagctatggagtcagatagttgttgggagggggaggacaagaagtctattgtttggactgtgtttgtctcacaatcaccacaaaataaaagtgtagaaaatgcttgtggtgtactaactcttttctgtacttaagttactcagattaacatgcacttctaattctaaacattttttttggagtcatcactgtcgctgtttaagtagaacaatgccaacgatgtatgagaaacagggaataaatcaggatttgtgtgtgtatgtgtgtggcattacttacatttactttattaaaaagcctaaggaactttaaagaatttgtattcagtttatttttattttttcaagacagagtctcactttgttgcccaggctggagtgcagtggcgtgatctcggctcactgcagcctccgcctcccgggttcaagtgattctcctgcctcggtctcatgagtagctgggattacaggcgtgcgccaccatgcctggctaatttttgtatttttagtagagacggtttcaccatgttggtcaggttggtcttgaactcctgacctcaagtgatctacctgtcttggcctcccagagtgttgggattacgccactgtacccagccttagactcagtttaaaatgggcttattgtaatgaaaaaaaatacgctacccaaaatttgccatgatgcctgtgatggtgaaggcattaaacaattgaaatctttgccttgcccagagagttgcagttatttgtaattataaacagtaagtgtatcagggcaggggtgacaataaaaaaccaatcattactacc

SEQ ID NO: 2747 - DNA, 957 bp, Homo sapiens
  source 1..957: mol_type = genomic DNA
attctcatccctgtgctcagagctctcaagcacccacgatggccttctcaggccgagcgcgcccctgcattatcccagagaacgaagaaatcccccgagcagcccttaacactgtccacgaggccaatgggaccgaggacgagagggctgtttccaaactgcagcgcaggcacagtgacgtgaaagtctacaaggagttctgtgacttttatgcgaaattcaacatggccaacgccctggccagcgccacttgcgagcgctgcaagggcggctttgcgcccgctgagacgatcgtgaacagtaatggggagctgtaccatgagcagtgtttcgtgtgcgctcagtgcttccagcagttcccagaaggactcttctatgaggaacgaacgtgatggttaagctaccttcattaagcagcatgaccgcttcctgagctcctgctgccgcatttaggccctgtcagctgtgaggccactggtgctgagtcagagggaaaagctcagaacagccttgagcagcgaagaataaagcatgactcatctcgtcctgcccacccctcacactggactataaataccctccctgggtctgtgtgctgttattccaaaagatgcgatgaatacccagaactaggctattcatgggctgttgcccagttcaagctctattgggtcctgaggaagattactattttggctacattgtttatcattaaaaccagcccagggatgtgtaaacctgcatctggagaataagacatttctttttggttaaatgatattagagaaaaaaaaaactatccaaggctgctaacaaataatcttcactttcaattatatccagcaataagttgttctccagaaaagaaagcttggaaacttacccagtttgccttccatttgggacatgactgatgtgcttcagtctttgtataataaatgcatcttcgccactcta

SEQ ID NO: 2748 - DNA, 1520 bp, Homo sapiens
  source 1..1520: mol_type = genomic DNA
agtcataaaggtctctttgccaagttactgccctctcaagctgcttccagtgaatgctacacacctgcaccatggtttgtccgacatccttagccaagatcaggattggctatgttggtacttacatatcctcatgagaattgtggttctggtactagtttggtaaagaaattattaaacctagctgatgcttgaaggtagttggattaacaggaaagaaaagagacttcttttctagccaagatgaaagatacacaagacattcaggaagcttcgaaggcaatgcagaataaagtccatgagcaggaagataagaatgagaaacaaaaacaaagagaagacaaacttggagtatattctttagtacatttttccccaaagatgttgggttcagttgccacaacactgccattgtcatcttcaaattccagtggaatgcctcttggttactatctgtctagtcctcagattagtagagtaactatatcaacaactggacaattgacttctaaagctactgtaggtagctgttccagagtggaaaacagcttggatgccagccccttctcagttccgaagaaacaggatgaatcacccatgattggggatggagaagattatttcctttctttgtttggtgattcaaagaaacttacagcacactcaaactacactcagaaaactttaaaatacttttctatgattcttgaagaagttggccaatttacctccagttctcttggagatgttgaaatagctgaagtgaatgtcaagggtttgttcgtgaagctcattaactcttcccttgacaaagaaatggcaattggagatcatattctccagcaaaatgtgaatggacaaaccatttctttgtaccgattccttccaaacatcgtaatgcaggcaaattccacagtaacagccattgcgtggtacacccctatccactggaagcaagcgtgggaaaaattagatgctgacgttgaatttaacagatgttcagtagtatctccaacattccgaaagcgtgtgtttcagtggacagcatctacagctacaataactaaagaaaaacaagatcaacctaagaaagatatctcaaattatcaggtggaacaagctcaagttcttcttaagagagagaaggaaatcccaccaaccgttttccctaatcgcagcccttggtgccagaatccctatgtctctgcacatccttactgtcctctgattgaaccacacaatacatccaccgctggaggcagattggatagacagcccaggactcggtcaaccagacctaatcgagcctcagggtctaagaaaaagaagacatctgagtcacaaaagcaataagcagtcaactcaacctttaaagctttacctttatggtgtcatggtccagttgtatggaagagtaaaaagacctgcaatctaggctccctgccatgctggccaaagacattccacaacttaaagaaaatcaaatgcctgagcaaacgtagcgggttccgctttcatag

SEQ ID NO: 2749 - DNA, 1158 bp, Homo sapiens
  source 1..1158: mol_type = genomic DNA
acgtcagagggtcgcgccgctgcaggaacccgctctgcctgagctaccgcgagtcgtagaaaattacgtaatgatagggggccggtcagagtgagggcacctgaggtacacgaaatccctccggcttgcccacttcctcggactttccaccaatcaggagcttcctccccagcaccaaccaattgtgggagagaagttttctctgtgctacaagcccggaatttcattcatacccagctacgctccgaatgagggagcagaggtacagcggccgaatgagcgggaacagttattccacgacaggtgtacatcagacgcattgcttaggcctcttattttacgttctccaagcaactccataagacaactgtctcggaaaggctacagtgatgacagaccgacttaagttcggattcggcttccaccgcttcttagtggtatgcaaagaagccttttcaccctgatgtccttagagataatatggatcagtccagagttctcctctgggtgaaagcagaaccctttatagtgggtgccttgcaggtcccccctccatccaagtttagtcttcactatctcaggaagatatccacctatgtgcaaatccgggccacagaaggagcttacccgcgcctctactggtctacatggaggcacatcgcttgtgggaagctgcagttggccaaggacctggcgtggctttacttcgaaatatttgatagtctttcaatgaagacacctgaggagcgcctggaatggtctgaggttctgtccaactgcatgtctgaggaggaagttgaaaagcagagaaatcagctttcagtggacacgctacagtttctgctcttcttatacattcaacagttgaacaaggtctccctaaggacatctttgattggcgaagagtggcccagtcccagaaacaaatctcagtctcctgacctgactgaaaaatctaattgtcataataagaactggaatgattacagtcaccaagcttttgtctatgatcatctgtctgatctcctcgagctgcttttagatccaaaacaactcactgcatcatttcattcaacccatagtagtctagtgtctcgagaagctgttgtggcgctcagcttccttattgaaggtacaataagtagagccaggaagatc

SEQ ID NO: 2750 - DNA, 1287 bp, Homo sapiens
  source 1..1287: mol_type = genomic DNA
gaactcaaggcctgcttgatacgtccgccattttgggcgcttcgctgatggtgtcggtgagcgcgtttcccgcctgagcgcaactagcggcgggtcgtgggcacctccaggagagcttgtttcatatccatatcccactgtattcctgctaatctgctaatgcagtaaattggaggaaaactgttaccaggataacctgtaatgggcaaggagccacaaagaagaaaacatttcttttaatttttaaacttggtttgaaagaccagcatgttttggaaatttgatcttcactcatcatcccacatagacacacttctagaaagagaagatgtaacactgaaggagttaatggatgaggaagatgttttacaggaatgtaaagctcagaaccgcaaacttatagagtttctgttaaaagcagaatgtctcgaagatttagtctcattcattatagaagaaccacctcaagacatggatgaaaagatcagatacaagtatccaaatatatcttgtgagttgctcacttctgatgtctcccagatgaatgatagactgggagaagatgaatccttgctaatgaaattatatagcttcctcctaaacgattcccctttgaatccactacttgccagtttcttcagcaaggtgctaagtattcttatcagcagaaaaccagaacagattgtggatttcttaaagaagaagcatgattttgtagaccttattataaagcacataggaacttctgctatcatggatttgttgctcaggctcctgacgtgtatcgaacctccacagcccaggcaagatgtgctgaattggttaaatgaggagaaaattatccagaggcttgtggaaatagttcatccatcgcaagaagaagatcgacattcaaatgcatcacaatcactttgtgaaattgttcgcctgagcagagaccagatgttacaaattcagaacagtacagagcccgacctcctgcttgcctcagggctgcctgacttgaatggcgttggacctcggggattactggtagataatatgctctggtctcgcctggtggtgagttttgccagccatggccagggtttggctccactggtggcacacgtggcctccgtggtatggacctggtggcttctccatcccactgtggcctctgtggtatggacctggtggcttctccatcctacccaaggtaacagtgtcttgcttcatcccactgactgctgggagagagcctctgggacttttctttggggcatcattttgttttgtctttcgtag

SEQ ID NO: 2751 - DNA, 2472 bp, Homo sapiens
  source 1..2472: mol_type = genomic DNA
actctggctgccttctcctgagagtcggagccacagccagagccctgcccaggccgagccggagctgcagcccgagcgcggtggtgccctcagccccgtcctcttgtcctcctcagcctcgatctgccggaggcgctgggcaatgaccccgggactccaggccagaggggtctgaagctgtttgggaaagcagcgggactccttgggaagatggccatggccccaagcccttccctggtgcaggtgtacaccagccccgcggctgtggccgtgtgggaatggcaggacgggctgggcacctggcacccctacagtgccaccgtctgcagcttcatcgagcagcagtttgtccagcagaagggccaacgttttgggcttgggagcctggcccacagcatccccttgggccaggcagacccctcgctggccccttacattattgacctccccagctggacccagttccgccaggacaccggcaccatgcgggctgtgcggagacacctgttcccccagcactcagcccctggccgaggtgtcgtctgggagtggctgagcgacgatggctcctggactgcctatgaagccagcgtctgtgactatctggagcagcaggtggccaggggcaaccagctcgtggacttggcccccctggggtacaactacactgtcaactacaccacccacacgcagaccaacaagacttccagcttctgccgcagcgtgcggcgccaagcagggccgccttacccggtgaccaccatcatcgctccgccgggccacacaggcgtcgcctgctcttgccaccagtgcctcagtggcagcagaactggccccgtgtcaggccgctaccgccactccatgaccaacctccctgcataccccgtcccccagcaccccccacacaggaccgcttctgtgtttgggacccaccaggcctttgcaccgtacaacaaaccctcactctccggggcccggtctgcgcccaggctgaacaccaccaacgcctggggcgcagctcctccttccctggggagccagcccctctaccgctccagcctctcccacctgggaccgcagcacctgcccccaggatcctccacctccggtgcagtcagtgcctccctccccagcggtccctcaagcagcccagggagcgtccctgccactgtgcccatgcagatgccaaagcccagcagagtccagcaggcgctcgcaggcatgacgagtgttctgatgtcagccattggactccctgtgtgtcttagccgcgcaccccagcccaccagccctcccgcctcccgtctggcttccaaaagtcacggctcagttaagagattgaggaaaatgtccgtgaaaggagcgaccccgaagccagagccagagccagagcaggtcataaaaaactacacggaagagctgaaagtgcccccagatgaggactgcatcatctgcatggagaagctgtccacagcgtctggatacagcgatgtgactgacagcaaggcaatcgggtccctagctgtgggccacctcaccaagtgcagccatgccttccacctgctgtgcctcctggccatgtactgcaacggcaataaggatggaagtctgcagtgtccctcctgcaaaaccatctatggagagaagacggggacccagccccagggaaagatggaggtattacggttccagatgtcgctccccggccacgaggactgcgggaccatcctcatagtttacagcattccccatggtatccagggccctgagcaccccaatcccggaaagccgttcactgccagagggtttccccgccagtgctaccttccagacaacgcccagggccgcaaggtcctagagctcctgaaggtggcctggaagaggcggctcatcttcacagtgggcacgtccagcaccacgggtgagacggacaccgtggtatggaacgagatccaccacaagacagagatggaccgcaacattacgggccacggctatcccgaccccaactacctgcagaacgtgctggctgagctggctgcccagggggtgaccgaggactgcctggagcagcagtgacctcgcaccccagcacgcccgcctctggtggccaccccgctgccccatggctggctgggtggccaggcaggaagtgcccagcccgagaggctgggaggtttgttgagggtgtggggtgtgccccacctgaagccggggctccccctgcctgcctctctctcctcctcccctctgggaattgggcagccctgggcagttgtactcatgggggcttaggatgcagctacctcagtgcgcagggcccgtctgtcctctgggggctgcttcgggcccgcggtgctcggggcctggtgtggggcgagtagagacttccccagcctggacgggcgtgggttctgggtcagcttcttttacctcaattttgtttgcaataaatgctctatagccaaagcc

SEQ ID NO: 2752 - DNA, 4455 bp, Homo sapiens
  source 1..4455: mol_type = genomic DNA
agagcgaagctgaggagtccagcgctcgccgacaggggcctgggctgtcccgagccggaatccagatcttacataagatggaagtctctcacactagatactgaacattaaatagaaaatctatttagtaaaatctaagttgccatggaagaaataccagtaaaagttgctgtaagaattagacctctgctttgcaaagaagctcttcataatcatcaagtttgtgtgagagttattccaaacagccagcaagttatcattgggagagatagagtcttcacttttgattttgtttttggcaaaaattccactcaagatgaagtttataacacatgtataaagcccctagtgttgtcactcattgagggctataatgcaactgtttttgcctatggacaaactggatctgggaagacatacaccattggagggggccatattgcttcagttgtggagggccaaaagggtatcattcctcgagctattcaagaaatatttcaaagcatctctgaacatcctagcattgactttaatgtaaaagtatcttatatagaagtgtacaaggaagacctaagagatcttctagaattggagacatccatgaaggatcttcacatccgagaagatgaaaaaggaaacacagtgattgttggggccaaggaatgccatgtggagagtgcaggtgaagtgatgagtcttttggagatggggaatgcagccagacatacaggtaccactcaaatgaatgagcactccagcagatcacatgcaatttttacaatcagcatttgtcaagttcataaaaatatggaggcagctgaagatggatcatggtattcccctcggcatattgtctcaaagttccactttgtggatttggcaggatcagaaagagtaaccaaaacggggaatactggtgaacggttcaaagaatccattcaaatcaatagtggattgctggctttaggaaatgtaataagcgctcttggggacccacgcaggaagagttcacatattccatatagggatgctaaaattacccggcttctgaaagattctctgggaggcagtgctaagactgtcatgatcacatgtgtcagcccctcctcctcgaattttgatgagtccttaaattctctcaaatatgccaacagagcacggaacattagaaacaaacccactgtaaacttcagccccgagtcagaccgtatagatgaaatggaatttgagattaaattgcttcgagaagctttgcaaagccagcaggctggtgtcagccaaactacccagatcaatcgagaagggagtcctgatacaaataggattcattctcttgaggagcaagtagctcagcttcaaggagaatgtctgggttaccagtgttgtgtagaagaagcctttaccttcctggttgacctaaaagatactgtcagactaaacgaaaagcagcaacacaaactgcaggagtggtttaacatgatccaagaggtcaggaaggctgtcctcacctcatttcgaggaatcggaggcactgcaagtctggaagaaggaccacagcatgttacagttctccagctgaagagagagcttaagaaatgccagtgtgtgcttgctgctgatgaagtagtatttaatcagaaggaactggaggtgaaggaactgaagaatcaagtgcagatgatggtacaggaaaacaaagggcatgctgtatctttgaaagaagcgcaaaaagtgaatagactgcagaatgaaaaaataatagaacaacaacttcttgtggatcaactgagtgaagaactaacaaaacttaacctgtcagtgacttcttcagctaaagaaaattgtggagatgggccagatgccaggatccctgaaaggagaccatatactgtaccatttgatactcatttggggcattatatttatatcccatcaagacaagattccaggaaggtccacacaagtccgcctatgtactctctggatcgaatatttgctggatttcgaacacgaagtcagatgctgttgggtcacatagaagaacaagataaggtcctccactgccaattttctgataacagtgatgatgaagaatcagaaggccaagagaaatctggaactagatgtagaagtcgttcatggattcagaagccagactctgtttgttcccttgttgaattgagtgatactcaggatgaaacacaaaagtcagatttggagaatgaagatttaaagattgattgtctccaggagagtcaagaattgaatttgcaaaaattaaagaattcagaacgcatacttactgaagctaaacaaaaaatgagagaacttacaattaacatcaagatgaaggaagatctgattaaagaattaataaaaacaggtaatgatgccaagtctgtaagcaagcagtattctttgaaagtaacaaagctagagcatgatgcagaacaggcaaaagtcgaactgattgaaacacaaaagcagctacaggagctggaaaacaaagatctttctgatgttgcaatgaaggtaaaattacagaaagagtttcgtaaaaagatggatgctgcaaagctgagagttcaggaaatacaattaaaaacaggacaggaagaaggtctaaaaccgaaagctgaggaccttgatgcatgtaacttgaaaaggagaaaaggttcgtttggaagtatagaccatctccagaaattggatgagcaaaagaaatggttagatgaagaagtagagaaagttctgaaccaacgccaagaattagaggagctggaagcagacttaaagaaacgggaggccatagtttctaagaaggaggctctgttacaggagaagagtcacctggaaaataagaaattgagatctagtcaggccttaaacacagatagtttgaaaatatcaactcgcctgaacttactggaacaagagttgtctgaaaagaatgtgcagctccagaccagtacagctgaggagaaaacaaagatttcagaacaagttgaagtcctccagaaagaaaaggatcagctccagaaacgcagacacaatgtggatgaaaaacttaaaaatggtagagtgttatcacctgaagaagaacatgttcttttccaacttgaagaagggattgaagctttggaagctgcaattgaatacaggaatgaaagtatccagaatcgccagaagtcacttagagcatcattccataacctctctcgtggtgaagcaaatgtcttggaaaagctagcttgcctgagtcctgttgagattagaactattcttttcagatatttcaataaggtggtgaatttgcgagaagctgaacggaaacaacagttatataatgaagaaatgaaaatgaaagttctggaacgggataatatggttcgtgaattagaatctgcactggaccatctaaaattgcagtgtgaccggagactgaccctccagcaaaaggaacacgaacaaaagatgcagttgctattacatcatttcaaagaacaagatggagaaggcattatggaaactttcaaaacatatgaagataaaatccagcagttggaaaaagatctttatttctataagaaaaccagccgggatcataagaagaaacttaaggaactggtaggggaagcaattcggcggcaactagcaccatcagagtatcaagaggctggagatggagtcctgaagccagaaggaggaggcatgctttcagaagaattaaaatgggcatccagacctgaaagtatgaaattaagtggaagagaaagagaaatggacagttcagcaagcagcttaagaacacagccaaatcctcaaaagctctgggaagatatcccagaattacctccaattcatagttctttagcaccccccagtgggcatatgttaggtaatgagaataaaacagaaacagatgataatcagtttacaaaatctcacagtcgactgtcatcccaaattcaggttgtgggaaatgtgggacgacttcatggtgtcacacctgtaaaactgtgtcgaaaagaattacgtcaaatttccgccttggaactatcattgcgacgttccagtcttggagttggcattggatcaatggctgctgattccatcgaagtatctaggaaaccaagggacttaaaaacttagacattgaataatagaacttttagtagatatgtaaaaagattcctttttctaacctgttaaaaactaaagctcaagttcactacctctttcctcagaataaaggaagaaggggaggaaggaatccctaattcttttatatgctatagatgtgtacatcttctatatatatttggggagttttagtttatattcccatagtaatcaaacatgttttccaatacttgataacatttaaatatttataaatacgcttaaatgtttttccaggcatatttgaagattaaaactagtaatagactaaaa

SEQ ID NO: 2753 - DNA, 2967 bp, Homo sapiens
  source 1..2967: mol_type = genomic DNA
cgtgactgaactcgaggaggacctgggcacggcccgccgggacctcatcaagtcggaggagctgagcagcaagcatcagcgggacctccgggaggctctggcccagaaggaggacatggaagagcggattactacactggagaagcgctacctggctgctcagcgtgaggcaacatccatccatgacctcaatgacaagctggagaatgagctggccaacaaggagtccctgcaccgccagtgtgaggagaaggcccgacacctgcaggagctgctggaggtggcagagcagaagctgcagcagacgatgcgcaaggcagagacgctgccagaggtggaggctgagctggcccagagaattgcagccctcaccaaggctgaagaacggcatggcaacattgaggagcacctgcggcagctggagggacagctggaggagaagaaccaggagctggcacgggtgcgccagcgggaaaagatgaatgaggaccacaacaagcggctgtcggacacagtggaccggctgctcagcgagtccaacgagcgtctgcagctccacctgaaggagcgcatggctgccctggaggagaagaacacgttgatccaggagttggagagctcccagcggcagattgaggagcagcaccaccacaagggccgcctgtctgaagagattgagaagctgcgccaagaggtggaccagctgaagggccgaggggggccgtttgtggatggcgtccactccaggtcgcacatgggcagtgcagcagacgtgcggttctccctgggcacaaccacacacgcacccccaggcgtgcatcgccgctactcggcattgagggaagagtctgccaaggactgggagacttctccactgcctgggatgctggccccggcagctggccctgcctttgacagtgaccctgagatctccgacgtggatgaggatgagccagggggtctggtgggctctgcggatgttgtctcccccagcggccactcagatgcccagaccctggccatgatgctgcaggagcagctggatgccatcaatgaggaaatcaggatgattcaggaagagaaggagtccacggagctccgcgcggaggagattgagacgcgtgtaaccagtggcagcatggaagccctaaacctgaagcagctgcgcaagcgtggttccatccccacctctctgacggccctgtccctggccagcgcgtccccaccactcagcggccgctccacacctaagctcacctcccgcagtgctgcccaggacctggaccgaatgggggtcatgaccctgcccagtgacttaagaaagcataggaggaagctgctgtcgccagtgtctcgggaagagaaccgagaggataaagccaccataaaatgtgagacttctcctccttcctcacccaggacgctgcggctagagaagcttggccacccagccctgagccaggaagaaggcaagagtgccttggaggatcagggcagcaaccccagcagcagcaacagcagccaggactccctgcacaagggcgccaagcgcaagggcatcaagtcgtccattggccgcctgtttgggaagaaggagaagggcaggctgatccagctgagtcgggatggagccacaggccatgttctgctaacagactccgaattcagtatgcaggagcctatggtgcctgccaagctggggacccaggcagagaaggaccggcggctaaagaagaaacaccagctgcttgaagatgcccgcaggaaaggaatgccctttgcccagtgggatggtcctactgtggtctcctggttggagctctgggtggggatgcctgcctggtatgtggcagcctgccgggccaacgtcaagagtggtgccatcatgtccgctctgtcggacacagagatccagcgggagatcggcatcagcaatgccctgcaccggctcaagctccgcctggccattcaggagatggtgtcattgaccagcccctctgccccacccacctccaggacttcttctgggaatgtctgggtcacccatgaagagatggaaactctggaaacatctactaaaacagacagtgaggagggcagctgggctcagaccctggcctatggggacatgaaccatgagtggattgggaatgaatggctacccagcctggggctcccgcagtaccgcagctacttcatggagtgcctggtggacgcccgcatgctggaccacctcaccaagaaggacctgcgggtccacctgaagatggtggacagcttccatcgaaccagtcttcagtatggcatcatgtgtctgaagaggctgaattatgaccggaaggagctggagaagaggcgagaggagagccagcatgagatcaaggatgtgttagtctggaccaacgaccaggtggttcattgggtccagtctattgggctccgggactacgcaggaaacctgcatgagagtggtgtgcatggagccttgctggccctggacgagaacttcgaccacaacacactggccctgatcctccagatccccacacagaacacccaggcacgccaagtgatggaaagagagttcaataacctgttggccttgggcacagaccggaagctggatgacggggatgacaaggtgtttcgccgcgcgccctcctggaggaagcgcttccggccgcgggagcaccacggtcgcggcggcatgctcagcgcttccgcggagaccctcccggcgggcttccgtgtgtccaccctggggaccctgcagcccccaccggccccgccaaagaagatcatgcctgaagctcactcccactatctctacggacacatgctctccgccttccgggactagccatggcccccagggctggcttcctccttctgggtttcacaggctcctctggccctgacccctcttgctcgttccccttccttccgcagctcctagtctcgtccgtg

SEQ ID NO: 2754 - DNA, 2815 bp, Homo sapiens
  source 1..2815: mol_type = genomic DNA
gacgtcggcggtgacaggccctgggactctgggaatacccagcttcctccccgcaacccggtgaaagccaacgcaatgttcggtgcgggggacgaggacgacaccgatttcctctcgccgagcggcggtgccagattggcctcactttttggactggatcaggcagctgctggccatggaaatgaatttttccagtacacagccccaaaacagcctaagaaaggccagggaacggcagcaacaggaaatcaggcaacaccaaaaacagcaccagccaccatgagcactcccacaatactggtcgcaacagcagtccatgcatatcgatacacaaatggtcaatatgtaaagcagggcaaatttggtgctgcagttctggggaaccacacagccagagagtataggattcttctttatatcagtcaacaacagccagttacggttgctaggattcatgtgaactttgagctaatggttcggcccaataactatagcaccttttatgatgaccagagacagaactggtccatcatgtttgagtcggaaaaggctgctgtggagttcaataagcaggtgtgcattgctaagtgcaacagtacctcttccctggatgcagtgctctcccaggacctcattgtggcagacggccctgctgtagaagttggagattctttggaagtggcctataccggctggctctttcagaatcatgtgctgggccaggttttcgactccactgctaacaaagataagttgcttcgcttgaagttaggatcaggaaaagtcatcaagggctgggaggatggaatgctgggcatgaaaaaaggaggaaagcgattgcttattgtccctccagcctgtgctgttggctcagaaggggtaataggctggactcaagcaacggactcgatcctggtgttcgaggtggaggttaggcgggtgaagtttgccagagattctggctctgatggtcacagtgttagttcccgcgattctgcagctccgtctcccatccctggtgctgacaacctctctgctgatcctgttgtgtcaccacccacatcaatacctttcaaatcaggggagccagctcttcgtaccaaatctaactccctcagtgaacaacttgcaataaatacaagtcccgatgcagtcaaagccaagttgatctctcggatggctaaaatgggccagcccatgctgcccatccttccaccacagctggattccaatgattcagaaatcgaagatgtgaacactctgcaaggaggtgggcagcctgtggtgactccgtccgtccagccctctcttcatccggcccatccagcgttaccacagatgacctcacaggcacctcagccatctgttactgggctccaggcaccttctgctgccttaatgcaagtgtcatctctcgattcccactcagctgtatctggaaatgcccaatcctttcaggtaacattttataaccgtattaattatatcctataatttgctgtggttctagtcagtctcttttcttcttcctgtacatttcatacagtagcagttccccaaagtcagagtttgtaatttttttcccttccttggttaccactttctcatctctaaaccaggcaaaggataacctacgttccagtgtcataaagattaaatgcaagaacaagtagagcccctagtacaacgtagtaaagatgcaatcaatgtttgtttccttttcttttcacacatatccagttgaagcgtgtatattcgcgttcttctgtattcttttctactaaaagttggcaggctaacattctgcagtatattcagcagaatggtatggtttaaaagtggaaccatgtggaaaatgtagcttgactctgctatctagtaaacttttcttaaagaaggcctttttcctgttatcacagaaaacaatggcagcagcctgtttgccaggggtagcagaccctttcttctgcctcaacacacttggtggataaggcatactgtcactgggaacagctgctcactccttgtgatgcttaatggaggtgtgggaatgatggtggataggctatgcctcattaacatggggagtctcgaaactggaaaaagtcccactgttgccctctttctccccatccctcctctcctccatggagaattactatgctgtagactaagaattttttttaagtggatgcgtagttatatctatccctggaaatgagctagacttccttatttcaaggaagaattaccatcctcattaaaataaaagctgctgtttattaagcgcttactatctgtcaggcctgtaacttactagcttttcagaactttacctatctcacttcatttagtccacagaacagccctatgaagtgatattattatcttcctcttacagttgaggtgaccgagactcaaaggaacatgagagctcttggtctcgtggattagcttcagaatctagcaggggagaggcatccttggaaattggcagatttggtttggaatctcagtgagcacttcttctttaaactcaatggaagctaagcagagtttattaatctaaaaacttcttagacaataggcctgataatggggaatgaatccctgcttaattatctcaccagatgactgggtagtgacctaagatacactttcttcagtttctgggtaggattttagtgactggtttcccctgggatacatagataactctcctgctgcagtccttaccaactgccaaacccagatctcacccatctctagcttcagtaagtttgagtctcctcccagctcatccactttattccac

SEQ ID NO: 2755 - DNA, 566 bp, Homo sapiens
  source 1..566: mol_type = genomic DNA
acagtctcagggatgagcagccgcccaagctgcagggcctcgggtcttcggcgcctctgaccctcgcaggttgctgcctttcggtgcagaaccgtctctgaaagaagatgaatttggctgagatttgtgataatgcaaagaaaggaagagaatatgcccttcttggaaattacgactcatcaatggtatattaccagggggtgatgcagcagattcagagacattgccagtcagtcagagatccagctatcaaaggcaaatggcaacaggttcggcaggaattattggaggaatatgaacaagttaaaagtattgtcagcactttagaaagttttaaaattgacaagcctccagatttccctgtgtcctgtcaagatgaaccatttagagatcctgctgtttggccaccccctgttcctgcagaacacagagctccacctcagatcaggcgtcccaatcgagaagtaagacctctgaggaaagaaatggcaggagtaggagcccggggacctgtaggccgagcacatcctatatcaaagagtgaaaagccttctacaagtagggac

SEQ ID NO: 2756 - DNA, 1142 bp, Homo sapiens
  source 1..1142: mol_type = genomic DNA
atgttccaggtcccggatagcgagggcggccgcgccggctccagggccatgaagcccccaggaggagaatcgagcaatctttttggaagtccagaagaagctactccttccagcaggcctaataggatggcatctaatatttttggaccaacagaagaacctcagaacatacccaagaggacaaatcccccagggggtaaaggaagtggtatctttgacgaatcaacccccgtgcagactcgacagcacctgaacccacctggagggaagaccagcgacatttttgggtctccggtcactgccacttcacgcttggcacacccaaacaaacccaccagaaactcaagagatagggtagccatgttttcatttccttttgcccaaatgagcggggtgggaagagggttagtcttatgtgagcctggctgctcagcgtctcctggccgtcatgacagctgcttggagacccgtgccttccagatggctgggagatgcctctgtggggatgaaatggggcacccctggccatcactcatgtgtagtccaggtttgagaggaactggaaggggggtgagggtggggaggtggggcagggcatggtccttggatcaacagcccgccagctgattggatgtctaggaatgactgaaagaaaccaaaacagcctgtccactgctgctgtgggatggaggaggcgtaagcagaaacactaacagtatattgacctcttagcagaaccgcttccattctggagatcacggctgctaaatccagcatccccacttcattttacccccagcatattgttctgtagtcttttcttgaaacatcttgattgcttttcctcggcagctttcaaaaaaccaaataataatagttatccgtcttctacttcatggaagattgttttggtgccctgaccctctgaagtgcccagttcctgccatctgaaacctcggcctgatctgatctcatgttggaatctgcctgtctttcacacagggctggtcttggtcctttacatgccagttttgcttgtgaattcttgcttttttcctctcatcagccttaagtttaggcgtttgttgttctccagtgatgtagacagttcccttcacaagtcacagttcttcccataaatg

SEQ ID NO: 2757 - DNA, 778 bp, Homo sapiens
  source 1..778: mol_type = genomic DNA
ggccgctccgcccggggccctagagccagccggggagctgcagctcagcggcgcccggcagggtcgggctgggctgggcccggccgacccggggagggggcggggtcaccccagcctcacctctgggcgcccaggcgctccgcggggtgagggttcggcggccactcctgggactctgggctgcggtagatgccgttctccaaggagaagtacatcctggactcatcgccagagaaactccacaaggaattggaggaggagctcaaactcagcagcacggatctccgcagccatgcctggtaccatggccgcatcccccgagaggtctcggagaccttggtacaacgcaacggcgacttcctcatccgggactcactcaccagcctgggcgactatgtgctcacgtgccgctggcgcaaccaggccttgcacttcaagatcaacaaggtggtggtgaaggcaggcgagagctacacacacatccagtacctgtttgagcaggagagctttgaccacgtgcccgccctcgtgcgctatcatgtgggcagccgcaaggctgtgtcagagcagagtggtgccatcatctactgcccggtgaaccgcaccttcccactgcgctacctcgaggccagctatggcctgggacaggggagtagcaagcctgctagccccgtcagcccctcaggccccaagggcagccacatgaagcggcgcagcgtcaccatgaccgatgggctcactgctgacaaggtcacccgcagcgatggctgccccacca

SEQ ID NO: 2758 - DNA, 6872 bp, Homo sapiens
  source 1..6872: mol_type = genomic DNA
cggagggagtaggagagcccggggcttcggcaggcagagcaggcctctcccctccgtcctcgtcgtcctcgtcctcctcctcctcctcctcctccgtggtggtagtggtgggacttcccccggctgctgcccctcccgccgccgctgctgtcccccaccgaagtagcggccacagcctggtcagcggcagcatcatgcaggccaatggggcaggaggaggaggaggaggtggcggcggcggcggtggaggaggagggggcggcgggggccagggacagaccccggaactcgcctgcttgtcggcccagaacggggagtcgtccccctcgtcgtcgtcgtccgcgggggacctggcccacgccaatgggctcctgccttccgccccctccgccgccagcaacaatagcaacagcctgaatgtcaataacggggttcccggcggggcggccgccgcatcctcagccaccgtcgcagctgcctccgccaccaccgccgcctcctcttccttggccaccccagaactgggcagcagcctcaagaagaagaagcggctctcccagtcagatgaggatgtcattaggctaataggacagcacttgaatggcttagggctcaaccagactgttgatctcctcatgcaagagtcaggatgtcgtttagaacatccttctgctaccaaattccgaaatcatgtcatggaaggagactgggataaggcagaaaatgacctgaatgaactaaagcctttagtgcattctcctcatgctattgtggtaagaggcgcacttgaaatctctcaaacgttgttgggaataattgtgaggatgaagtttttgctgctgcagcagaagtacctagaatacctggaggatggcaaggtcctggaggcacttcaagttctacgctgtgaattgacgccgctgaaatacaatacagagcgcattcatgttcttagtgggtatctgatgtgtagccatgcagaagacctacgtgcaaaagcagaatgggaaggcaaagggacagcttcccgatctaaactattggataaacttcagacctatttaccaccatcagtgatgcttcccccacggcgtttacagactctcctgcggcaggcggtggaactacaaagggatcggtgcctatatcacaataccaaacttgataataatctagattctgtgtctctgcttatagaccatgtttgtagtaggaggcagttcccatgttatacgcagcagatacttacggagcattgtaatgaagtgtggttctgtaaattctctaatgatggcactaaactagcaacaggatcaaaagatacaacagttatcatatggcaagttgatccggatacacacctgctaaaactgcttaaaacattagaaggacatgcttatggcgtttcttatattgcatggagtccagatgacaactatcttgttgcttgtggcccagatgactgctctgagctttggctttggaatgtacaaacaggagaactaaggacaaaaatgagccagtctcatgaagacagtttgacaagtgtggcttggaatccagatgggaagcgctttgtgactggaggtcagcgtgggcagttctatcagtgtgacttagatggtaatctccttgactcctgggaaggggtaagagtgcaatgcctttggtgcttgagtgatggaaagactgttctggcatcagatacacaccagcgaattcggggctataacttcgaggaccttacagataggaacatagtacaagaagatcatcctattatgtcttttactatttcaaaaaatggccgattagctttgttaaatgtagcaactcagggagttcatttatgggacttgcaagacagagttttagtaagaaagtatcaaggtgttacacaagggttttatacaattcattcatgttttggaggccataatgaagacttcatcgctagtggcagtgaagatcacaaggtttacatctggcacaaacgtagtgaactgccaattgcggagctgacagggcacacacgtacagtaaactgtgtgagctggaacccacagattccatccatgatggccagcgcctcagatgatggcactgttagaatatggggaccagcaccttttatagaccaccagaatattgaagaggaatgcagtagcatggatagttgatggtgaatttggagcagacgacttctgtttaacttaaaattagtcgtattttaatggcttgggatttggtgcaaacaaacatgattgatagctggacagacatgctcgtcatgaaaaaagaaccatttctgaagcccgattggggccaaacatttacaccttgcttcatagtaaccagttgagatgaagcacgtcgttagaacgttgttggacaccatgttgaattattcccccatcggttgtgaagaactgtgctacattcaggcttacccattgaactcagtatatatatttttttccttcctgtcttttgtctggcaggataccattcttgttgctcttctgtgtaatgaagtttaaatgcttgtttggaaaactttatttaacagtttagaaggcttgatagaaagagtgcattagtctgaagagtatacattggataggaaagaatttccttcttttgtttctccaaatctttccgccttatttagcttgagatctttgcagcttggttcatggattctagccttgcccgttgcgcagtatatactgatccagatgataaaccagtgaactatgtcaaaagcactctcaatattacatttgacaaaaagttttgtacttttcacatagcttgttgccccgtaaaagggttaacagcacaattttttaaaaataaattaagaagtatttataggattaaagtgacttcatttgtatacatttggaatctaaaccagcttaaaaacagtttcctcaatgacttagatacacagtataactgatgctcttctggaataccacatgagacatggtcagaaacagtgcttggaaggacattacacaagaaattcagagtaatgctttgaagatttccccccttttgttttattcctgaaggaacatcagtacccgatcttgaagaaattcaagattcaaaaagaattttaaatacaccaacatgagacatcagtagtcagttggttttcagtaaagcttgttccaagttgttctcaacttaggaagtaattttggtgtgatctagcaaaagagtaggaatcagcgatacaaccactttggaagtttatagtataattgaaattattagaagaattcagcaggttacagacatacttaaactgggattaaaacctcatagtcatttttcttaattgcccttaatattttgacatatagggatacataaatttaaagaatattttttctcagttttttcagatattgccatactgaacctcattctaaactggtgctgtggatagtctttccctctcccctcctgttttagtttaaggaaaggtttccttcatggaaaagcacttttaattttgagaatttcacatttaaaataagccaaaagcctgatgttcacattgtgcttttaaactccgtaacagctgaatacaacataacatagtctcccttgaaattccctccctttttcagtagaggataaatagggtgactccagctgttggaatgagaatggggatacccccaaaataagattctggtgaagaaaaagtcttgtactaagttcccctttaggtgtagccaagtctataatataattatgatcatgaatagactccagaatccacaaagagaagagggcttggatgtcaaaaattcttccattgtggggtaggtggtcggggatgggagaaagggaaaagtcagggaaggggagaagaaagaaaaacacatttggccttaaaatagcatgcattctcccagaagcccatagtaaagaaaatgacagatcgtggtcagcagactcttatcaaattggtatgtaaaagatttcttcaagctccattttgcagagaccaccacttagagaatcaaaaaattcctgttttgatacttctaagttaaaatatatgttacagtttatctggtacttcatttttcttaactaaaattactttttactttaagcttgaataaaaatcttcattggtaactgtatgtaattaagtggcaacttctctttacctcagtatagttaaaaaccattcatattttaagtgattcatgtataccctgaagccgttaatacaccccagtctctatggtaacatcactaaatgtgggcatagaaactccacagctgtttacaaatttggttacagtgtgctacggtgcatttgtaacactcagatttgtgcccattcaggggcaatttggcactcagattctactctacttcacctaaccacccctagatctgagttttcagagtgcttctgaagtacagtttaaaaacactttttaaaaagtggagtaaaagtgaggcacattttacaagaacataactcctattaaaacggagtaacaactatgcaaaggtttctatagcagctaggtgagtttgttttccgggtctgtcttaactggcagcttcctgtacatactggtacttatttgctgtaaacgtctgtttcatacatttgccatgcagtgactgtgctcgaaaggtgaaatcaatggtaaagaagcctaggattttatggtatgagaaactgatcgcaggattttctgatccatagctattaattgaaaacttctgatagtgctgtaggctctatagtaggcttaagagtgagtcttatactatgaagccagccacaagatactaacaaatgtataaattgaaaagtaccaatactttttgcacatagatcaaaatagagtggagaatttgggctccaaaaatcaggttagtaggctcatttccatgtgcttaaaaatgtttttgttgttatgcattgattaagggctagagcaaatataaaattaaatgtctttttcctccaaataattggttattaatggtaaaatgttggacttggggattactgagattagtatgtgggtagtaaagaattggagtgggagttagtggggagggatgacaaagcttcagctttggtttttgtatttttttagtcttcataacagctacatttctgttgctcttattggccagataaatgtgttatattaaaccaggtaagtattttaaacagagaacattttatttgcatatatccctacaaattggcccattttattgggtggggggataaaaaagggattccctaactttaaataatcagaatatcctgcaattgaaaggagaaaaaaatccaattttgtcagtattttcttagtctgaaaaaaacagcagtagtaatctggtgaatgttattattaggagtgttctgcctctacagtggcatattccatgacattaatagaaaacccttctttcccacccctccccatcttgacattttcttttttaggatgttggttcctgcaaacaagaactgaccctatcacctctgcctcacagtgggtaaatatatcatacatctcttgaaagggaaaatatccatgtcagtttctttcacagtagaagaatggctgcttttgaatggggaggaaagaagacatttttcttaatatcctttttgtcccatctctaaaatgtataaatattttgatttggttttactttaatttctcattcataatttcgcaactgtccttttgggttgccctccaacacattacttccatttcagaaaccatatctgatttaatataaactgctaacttaagaagaggtgaatttgcatttacacttagacactttctaaaaacagggtgaacttaattgaaatttttcagtgttgttaagctattgttatagtagctgccctatagttacaaaaataaaaactataaaaacccatcccctatctacttaatccagatagcctggatttaacaaaaccaatagtataaaaatgtgtgtgtgtgttctgtgtgtgtgtgagagagagagtacttgattcattaaaaagtcctggaaacagctgttctaggatcttgtcatttttactgaaagtctcgtgcacatgtgaagtgccctctgagtttaaggtttggttaatactggtatatttttataagattgaaattgtgtccccatctttaacttaaacattttcattatcagggtcaatgtgctagaactgaattgtaacatttttaggcacagatggaaaaaaatgttattggctccttgaaaatgtgtgtgtgtggcgaggggaatagatccacaaaagcatgtatgtacttacaaaccaagctgtagagatcaagaaaagaacttaagtgttgatctcaagatttctaaattgtcaagatttacatggcattgtggtggaactagttaacacttagagcttttggtatgtaataactatttgctatggactgattaaatgtttcaaaagattgtgttcttcaattttggtgggttttgatttttgtttttttaactgcctctcagattatatttacttagtttaaatttctttgctttattcattaaagtataaaaacttcaggtctctgatatttattttcacttgtttactaattatttacaaaacaccctttgttgacttttattttataaatgtgtaatgtattaaacgtctttaaatttttgttcaactgaaactacattaactttgatttgctttactgggatttttttttaaagacactttttccatgtcagtgcgcagcacttaaccagtcgtttgtattccctttctttcaatccaataaacagaatgaatacctaaataa

SEQ ID NO: 2759 - DNA, 1706 bp, Homo sapiens
  source 1..1706: mol_type = genomic DNA
atggagaaaaagaaaatggtaactcagggtaaccaggagccgacaacaactcctgacgcaatggttcagccttttactaccatcccatttccaccacctccgcagaatggaattcccacagagtatggggtgccacacactcaagactatgccggccagaccggtgagcataacctgacactctacggaagtacgcaagcccacggggagcagagcagcaactcacccagcacacaaaatggatctcttacgacagaaggtggagcacagacagacggccagcagtcacagacacaaagtagtgaaaattcagagagtaaatctaccccgaaacggctgcatgtctctaatattcctttccgcttccgggaccctgacctccggcagatgtttgggcagtttggcaaaatcctagatgtagaaataatctttaatgaacgtggctctaagggattcgggttcgtaactttcgagaatagtgctgatgcagacagggccagggagaaattacacggcaccgtggtagagggccgtaaaatcgaggtgaataatgctacagcacgtgtaatgaccaataagaagatggtcacaccatatgcaaatggttggaaattaagcccagtagttggagctgtatatggtccggagttatatgcagcatccagctttcaagcagatgtgtccctaggcaatgatgcagcagtgcccctatcaggaagagggggtatcaacacttacattcctttaatcagtctccctttagttcctggcttcccttaccctactgcagccaccacggcagccgctttcagaggagcccatttgaggggcagagggcggacagtatatggtgcagtccgagcggtacctccaacagccatccccgcctatccaggggtggatatgcagcctacagatatgcacagcctgctactgcaaccgcagccaccgctgctgcagccgctgcagccgcttacagtgacggttatggcagggtgtacacagccgacccctaccatgcccttgcccctgccgctagctatggagttggcgctgtggcgagtttataccgaggtggctacagccgatttgccccctactgaagtgacgtgagacccctgcaaatgggacagccccccagttcatgaggcctggctattgcaatatttactagtagaggaactctatagcaagatgaagaggaaaaacaaacaaacaaacaaaaaaaaacacaaaaaaagaaagaatacttttttatacctcactatgttctttgaatatgtatttttcctttaaatttctgcctttaattcttttgttccaaagattgtgcatttttttctttttttttttaaactgtggtaaaaaaaaaaaaaataatgcatttccatgtctgtatgtccgtgcttagcttattctatcaatcacggaagaggcagtcaaggaggaaggagagacattaggagccgataaatgcatctgatcagaaatcagcagacagaattaccaaagtgtatctggtgctgaatgactgggggacaagcagaagtggaagagatctttctgcaacaggatattcttctagtcttctgagtttctggtctttgacaggcaattctggttggctgtggctggaatccacatgctgatagataggaatttgtgcttacaaagcaggagaattaaaaagacgctttcctctcctc

SEQ ID NO: 2760 - DNA, 460 bp, Homo sapiens
  source 1..460: mol_type = genomic DNA
acgctgcgggtcctgggcccaggccttgggatgggcgggaaggcctggccgcgccgggctgtgggcactgcaggaggcccctgtgcagatctcggcccctttccaaacactcctgatgcctcatttgcctctcgcttcttttcgaccaccattttgggggctgaggcactcacggggcctccccaggtttcactccgtttctacacagtcggagccccatggatctcccatctcccggaggaaccgtgaagccaaacagaagcgcctgcgagagaagcaggctactctggaggctgagatagcaggggagagcaagtcacctgcagaatccattaaggcctggaggcctaaggagttagtattgtatgaaatccctacgaaacccggtgaaaagaaagatgtctctgggcccctgcctcctgcatacagcccccgatatgttgaggctgcctggtacccg

SEQ ID NO: 2761 - DNA, 4493 bp, Homo sapiens
  source 1..4493: mol_type = genomic DNA
cccagatagtcacatttaaaggttgctagtttgaaatttgcaaatgcttccctgctgtcagagttaggtttcctacagctgtaagatagctgctactcaacctacagcagatgcccgtgacattgtgtgttcctgggtgtatctcccatctagcaactccaaactgtgtatgctgtagtttgtgttcctggaactactatcttcaggagaagcttcagttataaatagtaattggagtgaagagatgagttctgtttaggggagatccattaactttcaacaagggaggacagggactttttcaataggaattgcaataacatggtttgtttttgaaaatgcaatagactgtggattaaatagctattgcacacaaagaagaaaataaagttataatctccagcatgagatctggatttacatatgctctgttagctgcaagaatttgggcaagctatttaatttccataaatttaggtatccttaagatacccactgcttagagttattgtgagaattaattgaggtaagaaaactgaggctcaggttgtcatttgctcaaatcacacagcaaaaccgtgatagaatgcagattcaaactgggatattaacattccaaagcctttacagttattgactactattcagcactgccttcaatatatgctgatgactgcacacaggagttagaaatgcccactgtcacttgcctgccttgagcggtttcttgtttgtataaataatccaaaatacttggttgtgttgtaagaagcaccgtgttttgtgagacatttcaaaggtaccacaaataggaaagatttcattctagaatgaatagagcacatatttagtatctacgtgctgtttggttaattttagttatttggtcatgcttttaaaatctatttttatagtatatattttcttttatagcatatcagaattatctttagattcaactcttcatgccgtcaatcttcattgcaataacatctccaagatcgaagccattgatcatatttggaatttacaacatctagatctgtcatctaatcaaataagtagaattgaaggactaaacacactgacaaaactgtgcacattaaatttgtcctgcaatttgattacaaaagtagaaggacttgaagaactaattaatctgactagactaaatgtatcttataaccacatagatgatcttagtggattgattccccttcatggaattaagcataaacttagatatattgatctacatagtaatcgtatagatagtatccatcacttacttcagtgtatggtaggattgcacttcctgaccaatcttattttggagaaagatggagacgataatcctgtctgtcgactgccagggtacagagcagttattctccagactttgccacagcttagaatcctagattgcaagaacatatttggtgaaccagtaaatttgacagaaataaattcatcacagctgcagtgcctagaaggtcttttggataatttagtttcttctgattctcccctaaatataagtgaagatgagatcattgatagaatgccagtgataacagcacctatcgatgagttagttcccttggaacagtttgcaagtacaccaagtgatgctgtgttgacgtcttttatgtctgtgtgtcaatcttctgagccagagaaaaataatcatgaaaacgatttgcagaatgagataaaacttcagaaattagatgaccaaattctacaacttctaaatgaaacttctaattcaatagataacgttcttgagaaagaccccagaccaaaaagagacacagatataacttctgaaagtgactatggaaacagaaaagaatgcaatagaaaagttcctcgaagatcaaaaatcccttatgatgccaaaaccattcaaactattaagcaccacaataaaaactacaactcttttgtaagttgtaatcgtaaaatgaaaccaccttaccttaaagaattatatgtaagctcatctttagcaaactgtcctatgttacaagaatcagaaaagccaaagactgaaataattaaagtagaccaaagtcactcagaagacaacacttaccagtcccttgttgaacagctagaccaagagagagagaagagatggagagctgagcaagccgaaaataaactcatggattatattgatgagctgcataaacatgcaaatgaaaaagaggatattcatagtctggctctacttaccacagataggctaaaggaaattatttttagagagagaaattccaaaggacaactcgaagttatggttcacaaacttcaaaatgaaattaaaaaactgactgttgaactaatgaaagcaaaagatcaacaagaggatcaccttaaacacttaagaaccctcgaaaaaacattagaaaaaatggagagacaaaaaaggcagcagcaggcagcacagataagactgatccaagaggtggaactcaaagcttcagctgccgatagagaaatatacttacttagaacttcccttcatcgagaaagagaacaagcgcaacaacttcatcaacttcttgcattgaaagaacaggaacacaggaaggaacttgaaacaagggagttttttactgatgctgacttccaggatgccttagctaaagaaatagccaaagaagagaaaaagcatgagcaaatgataaaagaataccaagagaaaattgacgtgttaagccagcagtatatggatttagaaaatgaattccgtattgctttaactgttgaagccagaagatttcaagatgttaaagatggttttgaaaatgttgcaactgagttagcaaagagcaaacatgctcttatttgggctcaacgaaaagaaaatgagtcttcctctttaattaaagatctgacctgtatggtaaaggaacaaaaaacaaaactggcagaagtttctaaattgaaacaagaaacagcagcaaatttacagaatcaaatcaacacccttgaaattttaattgaagatgacaagcagaagagtattcaaatagaacttctcaagcacgaaaaagtccagcttatttctgagctagcagccaaggaatcactaatatttggtttaaggacagaaagaaaagtatggggacatgagctggcacaacaaggatcttctctagcccaaaatcgtggaaaattggaggctcaaattgagagtttatctagagagaatgaatgtctgcgaaagacaaatgaaagtgatagtgatgcattaagaataaagtgcaaaatcatagacgaccaaactgaaactattagaaaattaaaagattgtttacaagaaaaagatgaacacatcaaaagattacaagaaaagatcacagaaatagaaaaatgcactcaagaacaacttgatgaaaaatcttcacaactggatgaggtacttgagaagttggaaaggcacaatgaaagaaaagaaaaactaaaacaacagttgaaaggaaaggaagtagaacttgaagaaatcagaaaagcttacagtacactgaatcggaagtggcatgataaaggagaacttctatgtcatcttgaaacacaagtaaaagaagtgaaagaaaaatttgaaaacaaggaaaagaaacttaaagcggaaagagacaaaagtattgaactacaaaagaatgcaatggaaaaacttcatagtatggatgatgcctttaaaagacaagttgatgcaattgttgaagctcatcaagctgaaatagcacagctggccaatgaaaagcagaagtgtattgattctgcaaatttaaaggtccatcaaattgaaaaagaaatgcgtgaacttttggaagaaacatgcaagaacaaaaaaacaatggaagcaaaaattaagcaacttgcttttgctttaaatgaaattcagcaagatatgtgatggttctgagaatgaatttaattgaaatagaccagcagacctattgtaaaaatgattaaatattgtaatagtagtaactgctatgactttgaaatgtctctttctatacatttcattatgaatatatttttaaagacttttgatcaagtatttattaattgtataggttttttataataaattgttgacaattttgtctattagaaaaaactatcataactagacttacaatatttttcttgtttctgtactatacattgtttggtaattacacatttgcctacaaatttgtgaatgaaaagattagtattttcaccatatgaggtaaaacattttaatcattgttatcttattgtgatgatgaagaactaattatatttgttatttaattgatgtagctcaattcttttaaagtacttatgtagccaaaaagcatttgaaatctgtatgataaaagatgtggcattcttaagaaagtatatgtagccatctccacatcactcattatgaccccttcttttataatgcttatatcttttcattaaagattacatttaaggtttta

SEQ ID NO: 2762 - DNA, 6676 bp, Homo sapiens
  source 1..6676: mol_type = genomic DNA
gtgggctcggcccgggctgccacgagcgtgcgggcctcgccgggcatgtcctaggcggcggccccgcccagcgctcggccgggcgggcgggcgggcgcgagggcagggaccgagccgggccgagctggggaacaagccggggaccaagccggggaccaagccggggactaaggcgagccggagaccgagcccgaacagcagggccagacgggcccagccagcaccaagatgagtgccacgtcctggttcctggtgagcagcagcggcgcccgccaccggctccctcgggagctcatcttcgtggggcgtgaggagtgtgagctcatgctacagtcccgcagcgtggacaagcagcatgccgtcatcaactacgaccaggacagggacgagcactgggtgaaggacctgggcagcctcaatgggacgtttgtgaatgacatgcgcatcccggaccagaagtacgtcacgctgaagctcaacgatgtcatccgcttcggctacgattccaacatgtatgtgctggagcgtgtgcagcaccgagtcccggaggaggcactcaagcatgaaaagtacaccagccagctgcaggtgagcgtgaagggtttggcgcccaagaggagcgaggcactgccggaacacacaccatactgcgaggcctcgaaccccaggccggagaagggggaccggagaccaggaacagaggcagcctcttaccgcacacccctgtatgggcagccctcctggtggggtgaggacgatggtagcacgctgcctgacgcccagcgccagggagagccctacccagagcgccccaagggaccagtgcagcaggacggggagctccacggcttccgcgcccctgctgagcctcagggctgctcgttccggcgggagcccagctacttcgagatccccacgaaggagaccccgcagccgtcgcagccccccgaggtgccggcacacgagatgcccacgaaggatgcagaggcaggtgggggcggagcggcccctgtggtgcagagccacgcctccttcaccatcgagtttgatgactgcagccctggcaagatgaagatcaaggaccatatcaccaagttttccctgcgccagcggcggcccccgggcaaggaggccacacctggcgagatggtgtcggctgagaccaaggtggccgactggctggtgcagaatgacccgagcctgctgcaccgggttggccctggggatgaccgccacagcaccaagagcgacctgcctgtccacacccgcaccctgaagggccacaagcacgaggacggcacgcagagtgactcagaggaccccctggccaaggcggcctcggccgctggggtgcccttggaggccagcggggagcaggtgcggctgcagaggcagatcaagcgggacccccaggagctactacataaccagcaggcctttgtcatcgagttcttcgacgaggacacaccccgaaagaagcgctcccagtccttcacgcacagcccgtccggggaccccaaggccgacaagcgccgtggcccaacgccggccgatagggaccgccccagtgtcccagccccagtccaggcagggggccgcagctcggggccacagagggccggctcgctcaagcgggagaagacagaggaacggctgggcagcccctcgcccgcctcccgaacccctgcccgccccttcggaagcgtggggcgccgctcccgcctggcccaggacttcatggcccagtgtctgcgggagagctccccggccgcccggcccagccccgagaaggttcctccggtgctgcccgctcccctgacaccccatgggaccagccccgtgggccccccgaccccaccgcccgcccccacggacccccagctgaccaaggcacggaaacaggaggaggacgacagcctcagtgacgcagggacatacaccatcgagaccgaggcgcaggacacggaggtggaggaggcccggaagatgatcgaccaggtctttggggtgttggagtcccctgaactctccagggcatcttcggccacctttcgcccagtcatcagaggggacagagatgagtctgatgacgggggcgtggcccagcggatggcgctactgcaggagtttgcctcccggccactgggtgcggccccccaggcggagcaccagggcctcccggtgccgggctcccctgggggtcagaagtgggtgtcccgctgggccagcctggctgacagctactcagacccgggcctcacagaggatggcctgggacgtagaggcggggagccggaggggtccctgcctgtgcgcatgcggcgacggctccctcagctgcccagtgagagggctgacagccctgcgggcccagagagcagcaggaggagtgggcctgggccaccggagctggacagtgagcagcccagccgcctcttcggccaggaggagttggatcctgacagcctcagcgatgccagtgggtcggacgggggccgaggccccgagccaggggtggagccacaggacagcagacgcaggagcccccaggaggggcccacgtggagcaggggtcggcgctcaccaagggcccccggggagccaactcccgcctctttcttcattggggaccagaatggggacgctgtgttatctaggaaaccgcttgcggctccaggggatggggagggcctagggcagacagcccagcccagccccccagcacgggatggcgtctatgtcagtgccaatgggagaatggtcatccagctacggcctggacggtccccagaacccgacggccctgccccagcctttctccggcaagagagcttcactaaggagccagccagtggtcccccagcgcccggcaagcccccccacatctccagccacccgcttctacaggacctggccgctacccgggccgcacgcatggacttccactcccaggacacccacctgatcttgaaggagacggagacggccctggcggccctggaggcccgactcctctctaattctgtggatgccgagtgtgaggggggcagcaccccgaggccgccggaggacgccctgtctggggactcggacgtggacacagccagcaccgtcagcctgcgtagtggcaagagcgggcccagccccacaaccccccagcctctgcgggcacagaaggagatgtcgccatccccgccagctgcacaggacccgggaggcaccgccctggtcagtgcccgtgagcagtcctcagagaggcagcatcacccacttggcccgacggacatgggccgtggagagccggtacggcgctcagccataaggcgtggccacaggccccgagggtccctggattggcccagtgaggagcgtggccctgtcctcgcccacctacccagctcagatgtgatggcctccaaccacgaaacccctgaggccaccggggcaggacggctaggttctcgccggaaaccagcggccccaccgccatccccagctgcccgggaggagcagagccgtagctcagccagctcccagaaggggccgcaggccttgacccgctccaacagcctgtccacccctcgccccacacgggcctcccggctgaggcgggcccggctgggggacgcttcagacactgaggctgcggatggtgagcgggggtccctgggcaaccctgagcccgtgggccggccagctgctgagcaggccaagaagctgtcacgcctggacatcctggccatgccccggaagcgggccggctccttcacagggactagtgaccccgaggcagcccctgcccgcaccagcttctctggccgcagtgtggagttgtgctgtgccagccgcaagcccaccatggccgaagcacgggctgtctccaggaaggctgccaacacagccaccaccacgggtccccgccagcccttcagcagggcccgctcaggcagtgcccgatacacctccaccactcagaccccgagggctggcagctccagccgggctcgttcccgggcccccggcccccgggacacggacgacgatgaggaggagcctgacccttatggtttcatcgtgcagacggcagagattgcggagattgccaggctgagccagacgctggtgaaggacgtggccatcctagcccaggagatccacgatgtggctggggacggtgacacactgggctcctcggagcctgcccacagcgcctccctcagcaacatgcccagcacccccgcctcgaccatctctgcccgggaggagctggtgcagcgcatccccgaggccagcctcaacttccagaaggtgccgcccggctcgctgaactctcgggactttgaccagaacatgaacgacagctgtgaggacgccctggccaacaagacgcggcctcggaaccgagaggaggtgatcttcgataacctgatgctgaacccggtgtcccagctgtcgcaggccatccgtgagaacacagagcaccttgccgagaagatgaagatcctctttcagaacacagggagagcttgggaggacctggaagccaggatcaacgccgagaacgaggtgcccatcctgaagacatctaacaaggaaatcagctccatcctgaaggaactgaggcgggtgcagaaacagctggaagttatcaatgccatcgtggaccccagtgggagcctggacctgctcacaggaaacaggagcttggccagctctgcacagccggggctggggaagggccgcgtggctgcccagagcccaccctcacccgcctcagccgaggccctgctgccagccctgcccctgaggaatttcccacagcgggccagctgtgggcctcccagcctcccggaccccaccttcctccctgatgccgagaggttcctgatctaggccccagacctggccaggccagcctccctgtgcgtgtgcgtctctgccttccgtccgccgcacacccgcctgcctggccgcaggtggttctccctgaagacccccacatgtgccatatccctgtgggcgggtgcctcccacgcccttgccccctcgtcagctcccagccagcaccctactcaccctgtccagccccatggccacccccacccctgcctcgccccctacaggcctctgggcccagctcctggccaggctgctgccaaggtcaagccctcaagggcattaccccgcctcctcttcatcactgttatttttgtctttagctttaaaggaaagagttgttggtgccattgcaggtgccccctccaggcctgactggctccgccaggcactaacctgccataaccctttgtgctggcctgcggccaggcagaggaagagaggtcgactgtggggtcatttggtgccaaacatggaggtgggcaggctcacctgttcctgggactgtctgagatggcagggcacttgccctggtggctcccacctgaccccaggccttttataggcaggagccccactgcttccagcctctggtgccaacacagttgccaaacccattgagcttggggctgccctgtggaggcctcctgggtatggaccaggggcttgttgagagctgagccatgcacacaggtgcagacaccccccaactcccatgcacacggctagtccaggcgcctccacgctgcaccgtgaggactgcagggcatgtccccgtgaggggctatgggcctctgtaggtgggcttccaaggtcctgggtgcagccgggtgcatggcagcccttctggcgggggtgagcgcacgaccaaagtcactggaagccgggtttccggaagctcgcagcttggcctgcaccacacgccctccccttttggcttcacgccatcaggcctcaagtgggcatgggggcagggacgggcccaggaactgttgttttctcaggattctttcagctgggaacatggcaggtgagcagagcttggtgcctctgccgtggcccctgctggggcagcccgtgttgccggagcctctaagccaaagagcccgttggccgtggttggtgggggtggacgtgggggtgtcccacctggaccagactggcgtgggtgagctccacaccctgcctggcaatggtatgagagtcggacctggacagggccagctgctgggggagcggcactggggactggaggctggaagcgggtggtgtgtgtcccctgtttacttttagctgagctggggttgggtgtacgggttctgttcctctgagcctgcggcccacctgatgtttacgtgtgtgtgtgagggggggcgggggtggcaggtgtccccccctggtccccgccccaagagcctgctgtctgtatggaggaggtgctagcccggtccaccgggctgctgcccacccctgcatgccccagttgcccaccccgcctgcccctggacatgaagtggtcacgcttcatccacggctccttcccacccctcggcagtggctgtgcaatgttttaagttcacaagttcctgctcctccccacactgagctcctttgttcctccccctccagcctttgcctgggaactggtccttgtttgccgggcttctcggagggttcactgtacattcgttctcaggtggtcttgtggctgtctttcggaaaatggttattttatatgatttgtcatggaatttgttctaataaatcattcttctatcac

SEQ ID NO: 2763 - DNA, 3229 bp, Homo sapiens
  source 1..3229: mol_type = genomic DNA
attatcttacttttggttccctcagaagaaacagatgaaaatgatttgatcctggaagtaactgcaggagttggaggtggccttagacatgcatctgccagcattgggggttcagaagcctataggcacatgaaatttgaaggaggtgttcacagagtacaaagagtgccaaagacagaaaagcaaggccgcgtccatactagcaccatgactgtagcaatattaccccagcctactgagattaatctggtgattaatccgaaagatttgagaattgacactaagcgagccagtggagctggggggcagcatgtaaataccacggacagtgctgtccggatagttcatcttccaacaggtgttgtttctgaatgtcaacaagagagatctcagctgaaaaataaagagctggctatgacaaagttacgtgcaaaactgtacagcatgcatctagaagaagaaataaataaaagacagaatgctagaaaaattcagattggaagtaaaggaagatcagagaaaataagaacatataattttccacagaaccgggtcacagatcacagaataaacaagacgctgcatgatcttgaaacttttatgcaaggagattatctactggatgaacttgtacagtcattgaaggaatacgccgattatgaatctttagtagaaattatttcccaaaaagtttaagttgatttgttatttatagactttcgtatcttagaaaaattctacagtacatccacatagggtgaaagtacccttactctcttgaaaaacgttgagttaacacagttggaggtaatatgcatattctgaagtcatagataatttacacagatctctctcaatgcattagcaaaaatcatacaatatacagatggtcctcgatttacattgtggttaattcccaataaacccatcataagttaaaaatgcatataacgttagcaacacagcagtctcctaattaatgacagcttgacttaacaattttccaactttaccatggtgtgaaagaggtatgattcctaagccctaaggagctcctcagcttgaaatggggctgcatccctataaacccatcataaagtcaaaaaatcctaaaacataagttggtgaccatctgtaatcatgatgtggtggtaaatcttggacgctaccttacaataactagacaaaggaaaatcatcctttgtcctgttctgtgtaaatatttaatgaatgatcaaaacttcagtttaaatattatgaaaaactttaaacataaagtagtagaaataagacagtaaatactgtatcctaatatccagtcaggatacagaaaccataccattaacttgaacagggataattttaatataaaaactgttaactgataatggtattaacttttaagagggatgaaagagagctatgatgtcctaggactgagagtaccccaggaaagaatacccttgaaagggtctccccttccccatggtgaagtcaggcctaatggagagagtggctacagcctactcagtgattgggaaattccctgtcttgccctgggccagagctggtgtaccgctggtggatcaggtcttacaagcaaagaacctcacactcccaactggtaagccagaagcctcttgctagggtgtgagcaaaacttggacaggaactctcagtagatgtttgtgtttgtcaagattctccagacaaacttccttaaaaggattggcttgtgttgttattattaagtctaacaagtccaaaagctggagtgtgaggcaggaggctggaaacccaggaaagctgatggtgcaaggtccagtccaaaggtatctgttggaggattctcttgttctgggaagaggacggtctttttttctcttcagaccttcacctgactggatcaagcccactaacatcgaggaggacagtctgcattactcagagttcactgattgatttaaatgtcaatctcatataaaacaccctcacagaaacacctagaataatgtttgaccttataattggaaaatcagagcaaaagttaaatctcaaaaaaaaaaaaaaaaaaagtatgacccagtagctaggcacctgtggccccgccaagttgacacataaaattaactgtcacagtatcatcttagaagtgaaagaagcccctttatcctgcagtgcccctctaccaccacctactgacaaagaacatggtgctatctggcatgggagaaatgttcagtttgctatggcttgtatgtgtcccctcaaattcaagtgttgccaatgtgacagcatcaagaggtggggtctttaagagatcactaggccatgagggattctcttaggactgggatgaaggcccataataaaagaggtttcggggagcatcctgctagcttgccttctgtatgtgagaacacagcaagaaagccctagtcaacaagtgccagctccttgatcttagacttcccatcctccagaactgtgagaaatacatttctgttccttacaaattacccagtctcctgtattctgttatagcagcacaaaatgaagataccatacctgaacacctgaacattcttcacaaggtagtaaatgcactgctttattctggtctcagtattgtgtgcttaataaggaaatgagaaagggtggatcagggcataggatgaacaagttactgctagacctctcacaatgccactaatggataagattgtattttcatcattcttgtctcttcggaagctaacaccatgctataataggcactaaatagatgtctaaaaacaccttaagtatttgtctagaaatctggtgcattgttcagaaagaaccaaaattcaaaataatttcaaagggcctaaagcactagttaatcaaaattcattagtttttaatggtactaccactctcaaatttaaaatgtcatcttacgttcctcttcctcgcattggatttattgctaaaacctggtaaacacttttaatccttttcaattccattaccactgctcttgtccagaattacttcgcagactaatagtcacctgacttctcccctgcatccgatttgctgtctaattctggttacaaataagtaactgccaaactaatctttctaaaaagcaagactgatctcgtcactcctttgctcaacaatgtaaaagctcccattgtctcccaaataaaaccagctttccactgtgtatacaatacatcca

SEQ ID NO: 2764 - DNA, 1476 bp, Homo sapiens; identical to SEQ ID NO: 1945
  source 1..1476: mol_type = genomic DNA

SEQ ID NO: 2765 - DNA, 999 bp, Homo sapiens
  source 1..999: mol_type = genomic DNA
acagaagttaaacttctttccagggaagaagggcggggatgtcagggctggagagtgcccgtgtccttctgtgtgcattgggctccttcctccttaattctctgctttccacttttaggctgaactccagtgcacccagttagacttggagcggaaactcaagttgaatgaaaatgccatctccaggctccaggctaaccaaaagtctgttctggtgtcggtgtcagaggtcaaagcagtggctgaaatgcagtttggggaactccttgctgctgtgaggaaggcccaggccaatgtgatgctcttcttagaggagaaggagcaagctgcgctgagccaggccaacggtatcaaggcccacctggagtacaggagtgccgagatggagaagagtaagcaggagctggagacgatggcggccatcagcaacactgtccagttcttggagatgtgcatgacatcacgttcgacccggacacagcacacaagtatctccggctgcaggaggagaaccgcaaggtcaccaacaccacgccctgggagcatccctacccggacctccccagcaggttcctgcactggcggcaggtgctgtcccagcagagtctgtacctgcacaggtactattttgaggtggagatcttcggggcaggcacctatgttggcctgacctgcaaaggcatcgaccagaaaggggaggagcgcagcagttgcatttccggaaacaacttctcctggagcctccaatggaacgggaaggagttcacggcctggtacagtgacatggagaccccactcaaagctggccctttctggaggctcggggtctatattgacttcccaggagggatcctttccttctatggcgtagagtatgattccatgactctggttcacaagtttgcctgcaagttttcagaaccagtctatgctgccttctggctttccaagaaggaaaacgccatccggattgtagatctgggagaggaacccgagaag

SEQ ID NO: 2766 - DNA, 1184 bp, Homo sapiens
  source 1..1184: mol_type = genomic DNA
aaaagacttattgacagtgccaaagctcggtactggacacaacgagggacctgggtctacgataacgcgcttttgctcctcctgaagtgtctttggtccaacgttgttccagagtgtaccatggcttccagtaacactgtgttgatgcggttggtagcctccgcatattctattgctcaaaaggcaggaatgatagtcagacgtgttattgctgaaggagacctgggtattgtggagaagacctgtgcaacagacctgcagaccaaagctgaccgattggcacagatgagcatatgttcttcattggcccggaaattccccaaactcacaattataggggaagagctcgtggtctgggttgatcctctggatggaaccaaggaatataccgaaggtcttcttgacaatgtaacagttcttattggaattgcttatgaaggaaaagccatagcaggagttattaaccagccatattacaactatgaggcaggaccagatgctgtgttggggaggacaatctggggagttttaggtttaggcgcctttgggtttcagctgaaagaagtccctgctgggaaacacattatcacaactactcgatcccatagcaacaagttggttactgactgtgttgctgctatgaaccccgatgctgtgctgcgagtaggaggagcaggaaataagattattcagctgattgaaggcaaagcctctgcttatgtatttgcaagtcctggttgtaagaagtgggatacttgtgctccagaagttattttacatgctgtgggaggcaagttaaccgatatccatgggaatgttcttcagtaccacaaggatgtgaagcatatgaactctgcaggagtcctggccacactgaggaattatgactactatgcaagccgagttccagaatctattaaaaatgcacttgttccttaaaggaaagtttcatttggccgggcgcggtggctcatgcctgtaatcccagcactttgggaggccgaggcaggtggatcacttgagctcaggagtttgagaccagcctgggcaatatcgtgagaccccatctctacaaaaatacaaattaactgggcatcctgtcatgcgcctgtcatcccagctacttgagaggctgaagcagaagaatctcttgagcccggaaggcagaggttgcagtgagctga

SEQ ID NO: 2767 - DNA, 885 bp, Homo sapiens
  source 1..885: mol_type = genomic DNA
tttgatatgacgattagagcataacccgagtgacacgttgaattcgccataatcaaggaaaccttttccgggtggggatctctgaaattactcagataacagtgctgtgccaaaaacctgtggattttctctacaaaaattatcatgactgttatctttttgatggaaaagatgaagttcagcgaagaacaaatctacaacttggccagaagactgtagactttgccttcaaagagtgagcaaccctaattaacctgattttttgctgataatcactctcaatggaatcaaatcacaaatccggggatggattgagcggcactcagaaggaagcagccctccgcgcactggtccagcgcacaggatatagcttggtccaggaaaatggacaaagaaaatatggtggccctccacctggttgggatgctgcaccccctgaaaggggctgtgaaatttttattggaaaacttccccgagacctttttgaggatgagcttataccattatgtgaaaaaatcggtaaaatttatgaaatgagaatgatgatggattttaatggcaacaatagaggatatgcatttgtaacattttcaaataaagtggaagccaagaatgcaatcaagcaacttaataattatgaaattagaaatgggcgcctcttaggggtttgtgccagtgtggacaactgccgattatttgttgggggcatcccaaaaaccaaaaagagagaagaaatcttatcggagatgaaaaaggttactgaaggtgttgtcgatgtcatcgtctacccaagcgctgcagataaaaccaaaaaccgaggctttgccttcgtggagtatgagagtcatcgagcagctgccatggcgaggaggaaactgctaccag

SEQ ID NO: 2768 - DNA, 2146 bp, Homo sapiens
  source 1..2146: mol_type = genomic DNA
gtaacgttcgggctccgtctcaggggctgaagtttgtgaggtgtagtattgagtcctgtttgagctattgttctctttttcctgaaaaatggcactgtcaaagagggagctggatgagctgaaaccatggatagagaagacagtgaagagggtcctgggtttctcagagcctacggtggtcacagcagcattgaactgtgtggggaagggcatggacaagaagaaggcagccgatcatctgaaaccttttcttgatgattctactctccgatttgtggacaaactgtttgaggctgtggaggaaggccgaagctctaggcattccaagtctagcagtgacaggagcagaaaacgagagctaaagatcaaacagatgatggaggcagcaacacgacaaatcgaggagaggaaaaaacagctgagcttcattagcccccctacacctcagccaaagactccttcttcctcccaaccagaacgacttcctattggcaacactattcagccctcccaggctgccactttcatgaatgatgccattgagaaggcaaggaaagcagctgaactgcaagctcgaatccaagcccagctggcactgaagccaggactcatcggcaatgccaacatggtgggcctggctaatctccatgccatgggcattgctcccccgaaggtggagttaaaagaccaaacgaaacctacaccactgatcctggatgagcaagggcgcactgtagatgcaacaggcaaggagattgagctgacacaccgcatgcctactctgaaagccaatattcgtgctgtgaagagggaacaattcaagcaacaactaaaggaaaagccatcagaagacatggaatccaataccttttttgacccccgagtctccattgccccttcccagcgccagagacgcacttttaaattccatgacaagggcaaatttgagaagattgctcagcgattacggacaaaggctcaactggagaagctacaggcagagatttcacaagcagctcgaaaaacaggcatccatacttcgactaggcttgccctcattgctcctaagaaggagctaaaggaaggagatattcctgaaattgagtggtgggactcttacataatccccaatggctttgatcttacagaggaaaatcccaagagagaagattattttggaatcacaaatcttgttgaacatccagcccagctcaatcctccagttgacaatgacacaccagttactctgggagtatatcttaccaagaaggaacagaaaaaacttcggagacaaacaaggagggaagcacagaaggaactacaagaaaaagtcaggctgggcctgatgcctcctccagaacccaaagtgagaatttctaatttgatgcgagtattaggaacagaagctgttcaagaccccacgaaggtagaagcccacgtcagagctcagatggcaaaaagacagaaagcgcatgaagaggccaacgctgcccgaaaactcacagcagaacagagaaaggtcaagaaaattaaaaagcttaaagaagacatttcacagggggtacacatatctgtatatagagttcgaaatttgagcaacccagccaagaagttcaagattgaagccaatgctgggcaactgtacctgacaggggtggtggtactgcacaaggatgtcaacgtggtagtagtggaagggggccccaaggcccagaagaaatttaagcgtcttatgctgcatcggataaagtgggatgaacagacatctaacacaaagggagatgatgatgaggagtctgatgaggaagctgtgaagaaaaccaacaaatgtgtactagtctgggagggtacagccaaagaccggagctttggagagatgaagtttaaacagtgtcctacagagaacatggctcgtgagcatttcaaaaagcatggggctgaacactactgggaccttgcgctgagtgaatctgtgttagagtccactgattgagactactgcaagcccttgcctctcctcccttgcctttgtctcttcagtcctctcacttattctatttcccaaccccctcccacttgtttgtgtgatctcagaactgtgccaagcagacactgggacaaagggagaatatcttgctcccctcct

SEQ ID NO: 2769 - DNA, 4073 bp, Homo sapiens
  source 1..4073: mol_type = genomic DNA
gccagctgctgcgcatgcgccggccggggccccgcccccatgcgccgcgcggctccagggccacgttccagggtcgggtttggtggattcctcagtccctgccgccgcggggcgccctgggatagcggcggggcctcctggtgagcgcgcgccggggcggcctccgggaagtgggagacgctgcgggtcctgggcccaggccttgggatgggcgggaaggcttggccgcgccgggctgtgggcactgcaggaggcccctgtgcaggtggagatcgccgcggccctggcgggactccttgctggctcttgggcgcgctgatgcccatcatctccctgagtttctgagccctatctctcatgtgtcagtggtcaccgccgaatccagacactccggccctgttccggaagagccctgatatccgtggctccatggcgctgtctgtcgataccatgcactctagctctcaaggaggaaaggttttgtggaagggaatagagacttggaataacagacctgtgctaattagagacaggaaagatggaacaaggggagtgacccttctccacccccatatcctaatgtgctctctctctatccagaacagatctcggcccctttccaaacactcctgatgcctcatttgcctctcgcctcttttcgaccaccattttgggggctgaggcactcacggggcctccccaggtttcactccgtttctacacagtcggagccccatggatctcccatctcccggaggaaccgtgaagccaaacagaagcgcctgcgagagaagcaggcgactctggaggctgagatagcaggggagagcaagtcacctgcagaatccattaaggcctggaggcctaaggagttagtattgtatgaaatccctacgaaacccggtgaaaagaaagatgtctctgggcccctgcctcctgcatacagcccccgatatgttgaggctgcctggtacccgtggtgggtacgagagggcttcttcaaaccagaatatcaggcccggctgccccaagctacaggggagaccttttccatgtgtatcccacctcccaatgtcactggctccctgcacattggccacgcactcacggtggccatacaggatgccctcgtgcgctggcaccggatgcgtggggatcaagtgctgtgggtccctggttcagatcatgcaggaattgctacacaagctgtggtggagaaacaactgtggaaggaacggggagtgaggagacatgagctgagccgggaggccttccttagggaggtgtggcagtggaaggaggcgaaaggtggagagatctgtgagcagctgcgagctctgggtgcctccctggactgggatcgagagtgttttaccatggatgttggctcctcagtggctgtgactgaagcttttgtgcggctctacaaggcggggttgctgtaccggaaccatcagcttgtcaactggtcatgtgctttaagatcagccatctcggacattgaggtggagaaccggcccctgcctggccacacacagcttcgactgcctggctgccccacccccgtgtcttttggcctcctattttctgttgccttccccgtggatggagagcctgatgcagaggttgtggtaggaaccacaaggccagagacgctgcctggagatgtggctgtggccgttcatccagacgactcgcgatacacacatctacacgggcgacagcttcgtcaccccttgatggggcagcctcttcccctcatcacagactatgctgttcagccacatgtgggcacgggggcagtgaaggtgactccagctcacagtcctgccgatgctgagatgggggcccgacatggcttgagccccttgaatgtcattgcggaggatgggaccatgacctccctctgcggggactggctgcagggtcttcaccggtttgtggcccgggaaaagataatgtctgtgctgagtgaatggggcctgttccggggcctccagaaccaccccatggtactgcccatctgcagccgttctggggatgtgatagaatacctgctgaagaaccagtggtttgtccgctgccaggaaatgggggcccgagctgccaaggctgtggagtcgggggccctggagctcagtccctccttccaccagaagaactggcagcactggttttcccatattggggactggtgtgtctcccggcagctgtggtggggccatcagattccagcctacctggttgtagaggaccatgcgcagggagaagaggactgttgggtggttgggcggtcagaggctgaggccagagaggtagcagcggaactgacagggaggccaggggcagagctgaccctggagagggatcctgatgtcctagacacatggttttcttctgccctgttccccttttctgccctgggctggccccaagagaccccagaccttgctcgtttctaccccctgtcacttttggaaacgggcagcgaccttctgctgttctgggtgggccgcatggtcatgttggggacccagctcacagggcagctgcccttcagcaaggtgcttcttcatcccatggttcgggacaggcagggccggaagatgagcaagtccctggggaatgtgctggacccaagagacatcatcagtggggtggagatgcaggtgctgcaggaaaagctgagaagcggaaatttggaccctgcagagctggccattgtggctgcagcacagaaaaaggactttcctcacgggatccctgagtgtgggacagatgccctgagattcacactctgctcccatggagttcaggcgggcgacttgcacctgtcagtctctgaggtccagagctgccgacatttctgcaacaagatctggaatgctcttcgctttatcctcaatgctttaggggagaaatttgtgccacagcctgctgaggagctgtctccctcctccccgatggatgcctggatcctgagccgccttgccctggctgcccaggagtgtgagcggggcttcctcacccgagagctctcgctcgtcactcatgccctgcaccacttctggcttcacaacctctgtgacgtctacctggaggctgtgaagcccgtgctgtggcactcgccccgccccctggggccccctcaggtcctgttctcctgcgctgacctcggcctccgcctcctggccccactgatgcccttcctggctgaagagctctggcagaggctgccccccaggcctggttgcccccctgcccccagcatctcggttgccccctaccccagcgcctgcagcttggagcactggcgccagccagagctggagcggcgcttctcccgggtccaagaggtcgtgcaggtgctaagggctctccgagccacgtaccagctcaccaaagcccggccccgagtgctgctgcagagctcagagcctggggaccagggcctcttcgaggccttcttggagcccctgggcaccctgggctactgtggggctgtgggcctgttacccccaggcgcagcagctccctccggctgggcccaggctccactcagtgacacggctcaagtctacatggagctgcagggcctggtggacccgcagatccagctacctctgttagccgcccgaaggtacaagttgcagaagcagcttgacagcctcacagccaggaccccatcagaaggggaggcagggactcagaggcaacaaaagctttcttccctccagctggaattgtcaaaactggacaaggcagcctctcacctccggcagctgatggatgagcctccagccccagggagcccggagctctaactcatcatccccatcagttttcctccctctcagacctgtctttgaggacaaacagatttgtcagctgtcagggtgcagtgggacgtcagagactatgtggtccatcgccttcattgtgtaaatgaggacacagactggcttggtcgcagtgactgtggtgtccttgagatgctcacattactgcccggcctgcctcccacctggaagtctgggaatgaggagattgagataaacttttgaaatcccaaa

SEQ ID NO: 2770 - DNA, 2394 bp, Homo sapiens
  source 1..2394: mol_type = genomic DNA
ggcttgaatcccggcgcctcagaggactatgaggcgggcgccaactgcttgggccgcagggcgggaggcagcgcgggagtggggcgttgaggggccggcctagcttggggctctggccttgcgtcttccgaccgaatcaccgctcctgagcccggtgcggggctgccgctatcgcctggccgtgggtgccggagcggccgggttgcgactcagcgttcttgggtgggcgcgggcggcgtctccgcggcgggcatcccccgaggccgccctcgggccatgatcgactccgtgaagctgcgccgcgacagcgcggcggacttcttctcccactacgagtacctgtgcgcgctgcagaactcggtgccgctgcccgccgtgcgcgcctgtctccgggagggcgtgctggatttcaacgccgaccgcctccgcggggtggactgggcgcctctgctgagcaccctcaagatcaataaagacctgcccttggtctccatcaagagcttcttccagccctggctgggggacacaggttctgacatgaataaattttgcagaagtcgtgttcctgcgataagatacaaagatgtgaccttccagttgtgtaaagctcttaaaggctgtttaagtatatcaagtgtgctaaagaacctggagctaaatggactaattctgagagagagggatttaactattctagcaaagggattgaataaatcggcttctttggtgcacctgtctcttgcaaattgtccaattggagatggaggtttagaaattatttgtcaaggtataaagagctctatcactcttaagacagtcaacttcacaggatgtaatctgacatggcagggagcagatcacatggccaagatcttaaagtatcagaccatgagaaggcatgaagaaacctgggctgagagtcttcgctataggagacctgatcttgactgtatggctggcttaagacgtatcacactgaattgcaacacacttattggtgacctaggtgcatgtgcttttgcagactctctcagtgaggatttatggctgagagctcttgacctgcaacagtgcggcctcaccaatgaaggagcaaaggctttgctagaggcccttgaaaccaatacaactctggtcgttctggatataagaaaaaatccactcattgatcattctatgatgaaagcagttatcaaaaaagtcctccagaatggaaggagtgccaaatcagagtaccagtggataacttctccatcagtgaaggaaccatccaaaactgctaaacagaaaaggagaactataattctaggaagtggtcacaaaggaaaagctactattagaattggattggctacaaagaaacctgtaagtagtggcagaaaacactcccttggtaaagaatattatgcgcccgcacctcttccacctggtgtgtctggtttcttgccgtggcgtactgcagaacgtgcaaaaagacacaggggtttcccattaatcaaaacacgtgatatatgtaatcagttgcagcaaccaggttttcctgtgactgtgacagtagagagtccttcatcctctgaagttgaagaggttgatgattcttcagagagtgttcatgaagtgcctgagaaaactagtatagaacaagaagcattacaggaaaaactggaggagtgcctaaagcagttaaaggaagaaagagtgataaggcttaaggttgataaacgagtcagtgagctggaacatgaaaatgcccagttaagaaatataaatttctctttgtctgaagcccttcatgcacagtcattgacaaatatgatcctggatgatgaaggtgttttgggcagcattgagaattcttttcagaagtttcatgctttcttggatctccttaaagatgctgggcttgggcagcttgccacaatggctgggatagatcagtcagattttcaattactaggtcatccccagatgacttctactgttagtaatccacctaaagaagaaaagaaggcgcttgaagatgaaaaaccagaaccgaagcagaatgccctagggcaaatgcaaaatatccaggtttctatttgtatgcagtcagcttacaatgaaggaacactaatgaagtttcagaaaattacaggtgatgctagaattcctttgcctctcgactcctttcctgtcccagtttctactccagagggcttaggaacttccagcaacaacctaggagtcccagctactgagcagcggcaggagtcttttgaaggattcattgctagaatgtgttctccttcaccagatgcgacttctggaactggaagtcaaagaaaagaagaggagttgtccagaaatagcagatcttcttcagagaaaaagaccaaaacaggaagccactaa

SEQ ID NO: 2771 - DNA, 4285 bp, Homo sapiens
  source 1..4285: mol_type = genomic DNA
gcacttccgggccggccgattccgcgcgtctccgcccatcatggcgctcgtgccagtgtcccgtgggctacccactcctgtcatgtcctttgggctggtgcaggccagatcttctagggccgtagccctgagaggagcgcctggagaggaaacggcgcgccatgcacctcacacggcccctcagacctcacggcgaggccctatcagggtaatggtgtccgccggactcgcacaacactccgccggactcgcacaacactccgccgcactcgcacaagactccgccgcggcgacctctactgaaagacccccagtcctggtgtcgcccgaaggcccaggaaaccgtgcttccgcgcttctcccccatttaccccagggtcgcaaaacatctcaccgtagttgaagccagcaagccggaccaggcgtcccggccaagccacgtgcgcgccccgcgccgcgagtgctcgccccgcccctagggaggagccggccgacccccggccacttagcagtgccgcagccgacggggtgcggttcggcgctcccaggttcctttcctcactgcacgctcttgcccctcctcttttctctcctgcccgtgttcttcccgccgcctgacctggcccgcccgcctttccagtctggccgggcgggggcctgaagcacggcggctcgggccgtgggaccgtgttcacaccctttccagaaattcttggctggtaaccgcgaaaccgactggagcaggagctgggagaactggagaaaactgctctaatctcacttgactccagctaggagctgatgctgcatcgtaataacatttgcagagcgctttcacaggcgctggagtgacttgtctgagattcctccagaactgagccctttgttggaaccataccccagcccatggtcccatgactaggtggatagtactccttgtacctcctgcaacccagaaccctggctgaccactttgaaggaggatgctccagcaggtcaatggccacaatccggggtctgatggccaagccagggagtacctcagagaagacctgcaggagttcctgggtggggaggtcctgctgtacaaactggatgacctcaccagggtgaatcctgtgacactagagacagtcctgaggtgcctgcaggcccggtacatggcagacacattctacaccaatgctggctgcaccctggtagccttgaaccccttcaagcctgttcctcagctctactcgcccgagctaatgagagagtaccatgctgcgcctcagccccagaaactgaagccccatgtgttcactgtgggtgaacagacctacaggaatgtcaagagcctgattgaaccagtcaaccagtctattgttgtcagtggagagagtggtgctggaaagacatggacgtctcgctgcctaatgaagttctatgctgtggtggccacctcacctgcatcttgggagagccacaagattgcagagaggatagaacagaggatcctgaactccaaccctgtcatggaagcttttgggctcagcaaatgactggagccgcagtccagacctacctcctagagaaaactcgagtggcctgccaggcttccagtgagaggaacttccacatcttctatcagatttgcaaaggagccagtgaggacgagaggctccagtggcaccttcctgagggagctgccttctcctggctgcccaacccagagaggagcttagaagaggattgttttgaggtgaccagagaggccatgctccatttgggcattgacacccctacccagaacaacatctttaaggtcagaagaaaagccacgccacttaagtttggcagagatgacgggcagccctttgcatagagcttttccctggacttggagttggtctttccctgaggatctaggactttgggcccctctgggctacctccaaggaatcagtcacctctgttctgctgagtctggagaccaggtggtggggtggacggggcataaggaagagtgatgcatacacagtgctagagtacagaatgcagtaagtgatccatgggggcagagagcaaggtaccgcatgatcagaagagagaactagtgctaccgccttgcttgtctagtacattaaaacttacaagtcatgttcacacttctctgctcacttagttttttaaacagtcctctgtgtgtgtttatttccctttatgcctgagaaaaccagagaggtaaagtgacgtgcccaaggtcagataccactaagtggtgatacagagtaccagacatagtaattccaagttcctaccctctctgtcttcccccaacccgtgccccgtcgtcctctggaacatgagactgccccagagcagcaggaggggatagataggatggcctggcagtcgagaaagggaggccacttcagggaggtagcaatgcagtggaaagtgaccctcacctccagatgggggctgctcagacactgccaggtcctagctggactgctgcaccttggcaatatccagtttgctgcctccgaggatgaagcccagccctgccagccgatggatgatgccaagtactctgtcaggacggcagcctcgctgctggggctcccagaggacgtgctgctggagatggtgcagattagaaccatcagggcaggcagacagcagcaggtgttccggaagccctgcgcccgagccgagtgtgacacccgtagagactgcctggccaaactgatctatgcgcggttgtttgactggctggtatcagtgatcaacagcagcatctgtgcagacaccgactcgtggaccactttcataggcctgctggatgtgtatggatttgaatcatttcctgacaacagtctggaacagttgtgcatcaactacgccaatgagaagctgcagcagcattttgtggctcactacctaagggcccagcaggaggaatacgcagttgagggcctggagtggtcattcatcaactaccaggacaaccagccctgtttggatctcattgagggaagccccatcagcatctgctccctcataaatgaggaatgccgcctcaatcgacccagcagcgcagcccagctccagacacgcattgagactgccctggcaggcagcccctgcctgggccacaataagctcagccgggagcccagcttcattgtggtgcattatgcggggcctgtgcggtaccacacagcaggcctggtggagaagaacaaggaccctatcccacctgagctggatggtgtggaagaaaaacacttctctcaagctccctgttccctgagcacctcgccgctgcagaccaggctcctggaggcaataatccgcctctggcccctgggactggtcctggccaatacggctatgggtgtaggcagctttcagaggaaattagtggtctgggcttgcctccagctccccaggggcagccccagtagctacactgtccagacagcacaagaccaggctggtgtcacgtccatccgagcgctgcctcagggatcgataaagtttcactgcagaaagtctccactgcggtatgctgacatctgccctgaaccttcaccctacagcattacaggctttaatcagattctgctggaaagacacaggctgatccacgtgacctcttctgccttcactgggctggggtgatccttggtgcctttgtttccacaaggccttttcctgccccctgccttgccaaagacatttaatcagcacacagctgccagactattcccacagtgctccaaatgcacatgaacaacagtgacggctccagccttcgacccagagccccgtgcccagtgcgtcagtgggcctggggttccaggctacatcaagcactgatggtgtcagggctggtagttaccaaatcagggttaagaaacatcagggccacatttcactaccttcacagatcaaactcagcagcagtcatgactgtctgtcactacactggggatcccaattccacataagcacttttggaagaaaacagccaaagttggcctaaaattggcgctggaatttgggctgggaaaaatcttgtggttatttcctttaaaaaggaacaaaactttagtatttaattagttgatttatttaatgtaatttcaaacaattaaattatgaataatgcaatgtacagtagaatcacgttttgattttattaacactgaccaagtttaactccatatgaagtgtaagcttgatatcgtttatgatgtctatcaactgtaccaaaagtaaaacatttaaaaac

SEQ ID NO: 2772 - DNA, 2268 bp, Homo sapiens
  source 1..2268: mol_type = genomic DNA
gttgtgaccagagcggttgcgggctgagcggtttcgagccggcgtcggggagcggcggtaccgggcggctgcggggctggctcgacccagcttgaggtctcggcgtccgcgtcctgcggtgccctggggtctcccgaggaccttgtacccgcgcggcttccttgggctggctttggacgacgctttcgccttcctgctgcctaggatccgccgacatgaatcccatcgtagtggtccacggcggcggagccggtcccatctccaaggatcggaaggagcgagtgcaccagggcatggtcagagccgccaccgtgggctacggcatcctccgggagggcgggagcgccgtggatgccgtagagggagctgtcgtcgccctggaagacgatcccgagttcaacgcaggttgtgggtctgtcttgaacacaaatggtgaggttgaaatggatgctagtatcatggatggaaaagacctgtctgcaggagcagtgtccgcagtccagtgtatagcaaatcccattaaacttgctcggcttgtcatggaaaagacacctcattgctttctgactgaccaaggcgcagcgcagtttgcagcagctatgggggttccagagattcctggagaaaaactggtgacagagagaaacaaaaagcgcctggaaaaagagaagcatgaaaaaggtgctcagaaaacagattgtcaaaaaaacttgggaaccgtgggtgctgttgccttggactgcaaagggaatgtagcctacgcaacctccacaggcggtatcgttaataaaatggtcggccgcgttggggactcaccgtgtctaggagctggaggttatgccgacaatgacatcggagccgtctcaaccacagggcatggggaaagcatcctgaaggtgaacctggctagactcaccctgttccacatagaacaaggaaagacggtagaagaggctgcggacctatcgttgggttatatgaagtcaagggttaaaggtttaggtggcctcatcgtggttagcaaaacaggagactgggtggcaaagtggacctccacctccatgccctgggcagccgccaaggacggcaagctgcacttcggaattgatcctgacgatactactatcaccgaccttccctaagccgctggaagattgtattccagatgctagcttagaggtcaagtacagtctcctcatgagacatagcctaatcaattagatctagaattggaaaaattgtcccgtctgtcacttgttttgttgccttaataagcatctgaatgtttggttgtggggcgggttctgaagcgatgagagaaatgcccgtattaggaggattacttgagcccaggaggtcaaagctgaggtgagccatgattactccactgcactccagcctgggcaacagagccaggccctgtatcaaaaaaaaaaaaaaaaagaaaagggaaaaaagaaagaaagcagcagcatgatcctgacatgacagatgtgggagacccacagcctgcagacactgtgggctggaaggtgggaagggaggggccggtggaggtggagctgtttgaaagtgacacagcagcagtagaagcagtggtgggcgaagcccaggtgaccctcagaacgttgcacaagaacatcagggaaaagaaccagaatcctttaaggaaaatgttcttcatgtatgagagactaaagtgatttttctaagaaagttcagcccttctctgacttacctggacatttctagatacttccaaaggaccctctgggaatccatagcttcctaatctggagatgggaggtcataagggagacgctgtggggttccttgaagtttcttgggttcacagaggagccccctcacttggtgttctcccgtgagccagcctccacctgccaaagacactctggtcctcgtatagtgagtaatggggctcagggcctctccaacaacagagaggagctgatgctgtagggctgaccccgtgacttcctgagtcctcaccctgtccagtgctttgagattcttcccacctccccatcctcaccagccggatcgggcgctgtgcagtgtggtcagcatggtgaagaaagtcatttcctcggtgggcagtattcctctttatctctcattacactggaaatgttatttctgctgtatcatccgtgctcaacgttttagtctgtcaggctcaccttctctctggaaagaatttgcttaacttgacattccatgtgccgctaataaaatatattttgaaag

SEQ ID NO: 2773 - DNA, 1220 bp, Homo sapiens
  source 1..1220: mol_type = genomic DNA
gaaactaggggtcgggctcggccgtcgtcgttgtttgtcgccgcatccccgcttccgggttaggccgttcctgcccgccccctcctctcctcccttcggacccatagatctcaggctcggctccccgcccgccgcagcccactgttgacccggcccgtactgcggccccgtggccaccatgtccctgcacggcaaacggaaggagatctacaagtatgaagcgccctggacagtctacgcgatgaactggagtgtgcggcccgataagcgctttcgcttggcgctgggcagcttcgtggaggagtacaacaacaaggtggtgattctagatgtccgggttccctgcacacctgtcgccaggttaaacaaccatcgagcatgtgtcaatggcattgcttgggccccacattcatcctgccacatctgcactgcagcggatgaccaccaggctctcatctgggacatccagcaaatgccccgagccattgaggaccctatcctggcctacacagctgaaggagagatcaacaatgtgcagtgggcatcaactcagcccgactggatcgccatctgctacaacaactgcctggagatactcagagtgtagtgttggtggcgctgtgcccacgaggcaggggcttttgtatttcctgcctctgccccacccccaaagtaagaagaaacatgtttccagtggccagtatgtctttcattgctttgcacccactgttaccagaagctgctctaggagttcctggccagtcaccccatcgccctctgtggcagactcagtgctgtgtggcgcctcctcagcccagggctgagttttaagattttctctcctttcctcttctcctttggttcctcaattaaaaaatgtgtgtatatttgtttgtcaggcgttgtgttgaggagcagttcacgcactggctgtgtctattcctctgcccaggtgtctctgtttgctgcccaaggcagcagttcatgtctcgtccatgtccatgttcgtgttagcacttacgtgggaacaaataccaatttgtcttttctcctagtatcagtgtgtttaacaaattttaactttgtatatttgttatctatcaggctaatttttttatgaaaagaattttactctcctgcttcatttctttgtcttatagtcctccctctttgcaccttcttctcttccctcagtgcctggagctggtactgggcccctg

SEQ ID NO: 2774 - DNA, 3772 bp, Homo sapiens
  source 1..3772: mol_type = genomic DNA
ggccgtgcgagaggccgagcttgctgcattgcagccgccgcggcgccgctcggctcttcactcccaacaatggcggctccgagcccgagcggcggcggcggctccgggggcggcagcggcagcggcacccccggccccgtagggtccccggcgccaggccacccggccgtcagcagcatgcagggctttcagataaacttctgtgaaaaggcacaaagtaaacgcaaagcactgaagttgaattttgcaaatccacctttcaaatctacagcaaggtttactctgaatcccaatcctacaggagttcaaaacccacacatagagagactgagaacacacagcattgagtcatcaggaaaactgaagatctcccctgaacaacactgggatttcactgcagaggacttgaaagaccttggagaaattggacgaggagcttatggttctgtcaacaaaatggtccacaaaccaagtgggcaaataatggcagttaaaagaattcggtcaacagtggatgaaaaagaacaaaaacaacttcttatggatttggatgtagtaatgcggagtagtgattgcccatacattgttcagttttatggtgcactcttcagagagggtgactgttggatctgtatggaactcatgtctacctcgtttgataagttttacaaatatgtatatagtgtattagatgatgttattccagaagaaattttaggcaaaatcactttagcaactgtgaaagcactaaaccacttaaaagaaaacttgaaaattattcacagagatatcaaaccttccaatattcttctggacagaagtggaaatattaagctctgtgacttcggcatcagtggacagcttgtggactctattgccaagacaagagatgctggctgtaggccatacatggcacctgaaagaatagacccaagcgcatcacgacaaggatatgatgtccgctctgatgtctggagtttggggatcacattgtatgagttggccacaggccgatttccttatccaaagtggaatagtgtatttgatcaactaacacaagtcgtgaaaggagatcctccgcagctgagtaattctgaggaaagggaattctccccgagtttcatcaactttgtcaacttgtgccttacgaaggatgaatccaaaaggccaaagtataaagagcttctgaaacatccctttattttgatgtatgaagaacgtgccgttgaggtcgcatgctatgtttgtaaaatcctggatcaaatgccagctactcccagctctcccatgtatgtcgattgatatcgctgctacatcagactctagaaaaaagggctgagaggaagcaagacgtaaagaattttcatcccgtatcacagtgtttttattgctcgcccagacaccatgtgcaataagattggtgttcgtttccatcatgtctgtatactcctgtcacctagaacgtgcatccttgtaatacctgattgatcacacagtgttagtgctggtcagagagacctcatcctgctcttttgtgatgaacatattcatgaaatgtggaagtcagtacgatcaagttgttgactgtgattagatcacatcttaaattcatttctagactcaaaacctggagatgcagctactggaatggtgttttgtcagacttccaaatcctggaaggacacagtgatgaatgtactatgtctgaacatagaaactcgggcttgagtgagaagagcttgcacagccaacgagacacattgccttctggagctgggagacaaaggaggaatttactttcttcaccaagtgcaatagattactgatgtgatattctgttgctttacagttacagttgatgtttggggatcgatgtgctcagccaaatttcctgtttgaaatatcatgttaaattagaatgaatttatctttaccaaaaaccatgttgcgttcaaagaggtgaacattaaaatatagagacaggacagaatgtgttcttttctcctttaccagtcctatttttcaatgggaagactcaggagtctgccacttgtcaaagaaggtgctgatcctaagaatttttcattctcagaattcggtgtgctgccaacttgatgttccacctgccacaaaccaccaggactgaaagaagaaaacagtacagaaggcaaagtttacagatgtttttaattctagtattttatctggaacaacttgtagcagctatatatttccccttggtcccaagcctgatactttagccatcataactcactaacagggagaagtagctagtagcaatgtgccttgattgattagataaagatttctagtaggcagcaaaagaccaaatctcagttgtttgcttcttgccatcactggtccaggtcttcagtttccgaatctctttcccttcccctgtggtctattgtcgctatgtgacttgcgcttaatccaatattttgccttttttctatatcaaaaaacctttacagttagcagggatgttccttaccaaggatttttagccccaaatctctcatattcgctagtgtttaaaaggctaagaatagtggggcccagccgatgtggtaggtgataaagaggcatcttttctagagacacattggaccagatgaggatccgaaacggcagcctttacgttcatcacctgctagaacctctcgtagtccatcaccatttcttggcattggaattctactggaaaaaaatacaaaaagcaaaacaaaaccctcagcactgttacaagaggccatttaagtatcttgtgcttcttcacttacccattagccaggttctcattaggttttgcttgggcctccctggcactgaaccttaggctttgtatgacagtgaagcagcactgtgagtggttcaagcacactggaatataaaacagtcatggcctgagatgcaggtgatgccattacagaaccaaatcgtggcacgtattgctgtgtctcctctcagagtgacagtcataaatactgtcaaacaataaagggagaatggtgctgtttaaagtcacatccctgtaaattgcagaattcaaaagtgattatctctttgatctacttgcctcatttccctatcttctcccccacggtatcctaaactttagacttcccactgttctgaaaggagacattgctctatgtctgccttcgaccacagcaagccatcatcctccattgctcccggggactcaagaggaatctgtttctctgctgtcaacttcccatctggctcagcatagggtcactttgccattatgcaaatggagataaaagcaattctgactgtccaggagctaatctgaccgttctattgtgtggatgaccacataagaaggcaattttagtgtattaatcatagattattataaactataaacttaagggcaaggagtttattacaatgtatctttattaaaacaaaagggtgtatagtgttcacaaactgtgaaaatagtgtaagaactgtacattgtgagctctggttatttttctcttgtaccatagaaaaatgtataaaaattatcaaaaagctaatgtgcagggatattgccttatttgtctgtaaaaaatggagctcagtaacataactgcttcttggagctttggaatattttatcctgtattcttgtttgaattcctcctctatttaagatatatacatggaatcgaagtgtttatgtaatagttctatccttttgcctgcaggtcagttgtaataaatctaggatgtgatg

SEQ ID NO: 2775 - DNA, 993 bp, Homo sapiens
  source 1..993: mol_type = genomic DNA
ccagccactgcggcaggaagcaagaggaagttaacatccctaataggagggttctggttactggtgccactgggcttcttggcagagctgtacacaaagaatttcagcagaataattggcatgcagttggctgtggtttcagaagagcaagaccaaaatttgaacaggttaatctgttggattctaatgcagttcatctacattagctcagattatgtatttgatggaacaaatccaccttacagagaggaagacataccagctcccctaaatttgtatggcaaaacaaaattagatggagaaaaggctgtcctggagaacaatctaggagctgctgttttgaggattcctattctgtatggggaagttgaaaagctcgaagaaagtgctgtgactgttatgtttgataaagtgcagttcagcaacaagtcagcaaacatggatcactggcagcagaggttccccacacatgtcaaagatgtggccactgtgtgccggcagctagcagagaagagaatgctggatccatcaattaagggaacctttcactggtctggcaatgaacagatgactaagtatgaaatggcatgtgcaattgcagatgccttcaacctccccagcagtcacttaagacctattactgacagccctgtcctaggagcacaacgtccgagaaatgctcagcttgactgctccaaattggagaccttgggcattggccaacgaacaccatttcgaattggaatcaaagaatcactttggcctttcctcattgacaagagatggagacaaacggtctttcattagtttatttgtgttgggttcttttttttttttaaatgaaaagtatagtatgtggcactttttaaagaacaaaggaaatagttttgtatgagtactttaattgtgactcttaggatctttcaggtaaatgatgctcttgcactagtgaaattgtctaaagaaactaaagggcagtcatgccctgtttgc

SEQ ID NO: 2776 - DNA, 3195 bp, Homo sapiens
  source 1..3195: mol_type = genomic DNA
agtcggcctgcgctcctcagcctggcggttctacctccgagggttcgcccgcccttggttttccttacaccttagcctttggctcctttgaccactcgaagccccacagcgtgttccagcggacttcaccagcagacccagaagtggtgggtgaaacactgcctctgttcctccttgagcctgtcgggagctgctgcctgccaccaccatgtctgctgcaaatcctgagactccaaactcaaccatctccagagaggccagcacccagtcttcatcagctgcagctagccaaggctgggtgttaccagaaggcaaaatcgtgccaaacactgtttttgttggtggaattgatgctaggatggatgaaactgagattggaagctgctttggtagatacggttcagtgaaagaagtgaagataatcacgaatcgaactggtgtgtccaaaggctatggatttgtttcgtttgttaatgacgtggatgtccagaagatagtaggatcacagatacatttccatggtaaaaagctgaagctgggccctgcaatcaggaaacaaaagttatgtgctcgtcatgtgcagccacgtcctttggtagttaatcctcctcctccaccacagtttcagaacgtctggcggaatccaaacactgaaacctacctgcagccccaaatcacgccgaatcctgtaactcagcacgttcaggcttactctgcttatccacattcaccaggtcaggtcatcactggatgtcagttgcttgtatataattatcaggaatatcctacttatcccgattcagcatttcaggtcaccactggatatcagttgcctgtatataattatcagccatttcctgcttatccaagttcaccatttcaggtcactgctggatatcagttgcctgtatataattatcaggcatttcctgcttatccaagttcaccatttcaggtcaccactggatatcagttgcctgtatataattatcaggcatttcctgcttatccaagttcaccatttcaggtcaccactggatatcagttgcctgtatataattatcaggcatttcctgcttatccaagttcaccatttcaggtcaccactggatatcagttgcctgtatataattatcaggcatttcctgcttatccaaattcagcagttcaggtcaccactggatatcagttccatgtatacaattaccagatgccaccgcagtgccctgttggggagcaaaggagaaatctgtggaccgaagcatacaaatggtggtatcttgtctgtttaatccagagaagagactgataaattccgttgttactcaagatgactgcttcaagggtaaaagagtgcatcgctttagaagaagtttggcagtatttaaatctgttggatcctctcagctatctagtttcatgggaagttgctggttttgaatattaagctaaaagttttccactattacagaaattctgaattttggtaaatcacactgaaactttctgtataacttgtattattagactctctagttttatcttaacactgaaactgttcttcattagatgtttatttagaacctggttctgtgtttaatatatagtttaaagtaacaaataatcgagactgaaagaatgttaagatttatctgcaaggatttttaaaaaattgaaacttgcattttaagtgtttaaaagcaaatactgactttcaaaaaagtttttaaaacctgatttgaaagctaacaattttgatagtctgaacacaagcatttcacttctccaagaagtacctgtgaacagtacaatatttcagtattgagctttgcatttatgatttatctagaaatttacctcaaaagcagaatttttaaaactgcatttttaatcagtggaactcaatgtatagttagctttattgaagtcttatccaaacccagtaaaacagattctaagcaaacagtccaatcagtgagtcataatgtttattcaaagtattttatcttttatctagaatccacatatgtatgtccaatttgattgggatagtagttaggataactaaaattctgggcctaattttttaaagaatccaagacaaactaaactttactgggtatataaccttctcaatgagttaccattcttttttataaaaaaaattgttccttgaaatgctaaacttaatggctgtatgtgaaatttgcaaaatactggtattaaagaacgctgcagcttttttatgtcactcaaaggttaatcggagtatctgaaaggaattgtttttataaaaacattgaagtattagttacttgctataaatagatttttatttttgttttttagcctgttatatttccttctgtaaaataaaatatgtccagaagaggcatgttgtttctagattaggtagtgtcctcattttatattgtgaccacacagctagagcaccagagcccttttgctatactcacagtcttgttttcccagcctcttttactagtctttcaggaggtttgctcttagaactggtgatgtaaagaatggaagtagctgtatgagcagttcaaaggccaagccgtggaatggtagcaatgggatataatacctttctaagggaaacatttgtatcagtatcatttgatctgccatggacatgtgtttaaagtggctttctggcccttctttcaatggcttcttccctaaaacgtggagactctaagttaatgtcgttactatgggccatattactaatgcccactggggtctatgatttctcaaaattttcattcggaatccgaaggatacagtctttaaactttagaattcccaagaaggctttattacacctcagaaattgaaagcaccatgactttgtccattaaaaaattatccatagtttttttagtgcttttaacattccgacatacatcattctgtgattaaatctccagatttctgtaaatgatacctacattctaaagagttaattctaattattccgatatgaccttaaggaaaagtaaaggaataaatttttgtctttgttgaagtatttaatagagtaaggtaaagaagatattaagtccctttcaaaatggaaaattaattctaaactgagaaaaatgttcctactacctattgctgatactgtctttgcataaatgaataaaaataaactttttttcttca

SEQ ID NO: 2777 - DNA, 712 bp, Homo sapiens
  source 1..712: mol_type = genomic DNA
tctcggtctgtccgctgggggcgcgcgcggtgtgtggcaggcggcagcggcgctggcggccgagtgcgcttgtcacgcgtggcggtgcgtggttgctaggggcgcctgaggctgccgggtagcccagcaggccgagggaggaagtagcgtggagccggtgccgagccggggcgaagctggatcccctagatagactgtcttcaagctcactgatattttcctctgcttgatccattgtgctgttgagagcctctagtaaatttttcaggtcactacctctttttcaacactagatggcatcttggccccagactgacagacttcaaggatgcagctgctactaccggaggtgtgtggcaccttacctcagcaaggccatgagaccgtgtggccatgatgtgggcccctcatggcctcagcaggaacacagcactatagtattggcctccgccagaaaaacagcttcaagcagagtggtccctcaggcacagtacctgccacgccacctgagaaaccctcggagggcagagtctggcctcaggcccatcagcaagtgaagccaatctggaagctggaaaagaagcaagtggagacactgtcagcagggttgggcccaggcctcttgggcgtcccaccccagccagcatatttcttttgccccagcactttatgtagctctgggaccacggctgtcattgcaggccacagcagt

SEQ ID NO: 2778 - DNA, 2623 bp, Homo sapiens
  source 1..2623: mol_type = genomic DNA
tgaggggccggcctagcttggggctctggccttgcgtcttccgaccgaatcaccgctcctgagcccggtgcggggctgccgctatcgcctggccgtgggtgccggagcggccgggttgcgactcagcgttcttgggtgggcgcgggcggcgtctccgcggcgggcatcccccgaggccgccctcgggccatgatcgactccgtgaagctgcgccgcgacagcgcggcggacttcttctcccactacgagtacctgtgcgcgctgcagaactcggtgccgctgcccgccgtgcgcgcctgtctccgggagggcgtgctggatttcaacgccgaccgcctccgcggggtggactgggcgcctctgctgagcaccctcaagatcaataaagacctgcccttggtctccatcaagagcttcttccagccctggctgggggacacaggttctgacatgaataaattttgcagaagtcgtgttcctgcgataagatacaaagatgtgaccttccagttgtgtaaagctcttaaaggctgtttaagtatatcaagtgtgctaaagaacctggagctaaatggactaattctgagagagagggatttaactattctagcaaagggattgaataaatcggcttctttggtgcacctgtctcttgcaaattgtccaattggagatggaggtttagaaattatttgtcaaggtataaagagctctatcactcttaagacagtcaacttcacaggatgtaatctgacatggcagggagcagatcacatggccaagatcttaaagtatcagaccatgagaaggcatgaagaaacctgggctgagagtcttcgctataggagacctgatcttgactgtatggctggcttaagacgtatcacactgaattgcaacacacttattggtgacctaggtgcatgtgcttttgcagactctctcagtgaggatttatggctgagagctcttgacctgcaacagtgcggcctcaccaatgaaggagcaaaggctttgctagaggcccttgaaaccaatacaactctggtcgttctggatataagaaaaaatccactcattgatcattctatgatgaaagcagttatcaaaaaagtcctccagaatggaaggagtgccaaatcagagtaccagtggataacttctccatcagtgaaggaaccatccaaaactgctaaacagaaaaggagaactataattctaggaagtggtcacaaaggaaaagctactattagaattgtaggattggctacaaagaaacctgtaagtagtggcagaaaacactcccttggtaaagaatattatgcgcccgcacctcttccacctggtgtgtctggtttcttgccgtggcgtactgcagaacgtgcaaaaagacacaggggtttcccattaatcaaaacacgtgatatatgtaatcagttgcagcaaccaggttttcctgtgactgtgacagtagagagtccttcatcctctgaagttgaagaggttgatgattcttcagagagtgttcatgaagtgcctgagaaaactagtatagaacaagaagcattacaggaaaaactggaggagtgcctaaagcagttaaaggaagaaagagtgataaggcttaaggttgataaacgagtcagtgagctggaacatgaaaatgcccagttaagaaatataaatttctctttgtctgaagcccttcatgcacagtcattgacaaatatgatcctggatgatgaaggtgttttgggcagcattgagaattcttttcagaagtttcatgctttcttggatctccttaaagatgctgggcttgggcagcttgccacaatggctgggatagatcagtcagattttcaattactaggtcatccccagatgacttctactgttagtaatccacctaaagaagaaaagaaggcgcttgaagatgaaaaaccagaaccgaagcagaatgccctagggcaaatgcaaaatatccagtttcagaaaattacaggtgatgctagaattcctttgcctctcgactcctttcctgtcccagtttctactccagagggcttaggaacttccagcaacaacctaggagtcccagctactgagcagcggcaggagtcttttgaaggattcattgctagaatgtgttctccttcaccagatgcgacttctggaactggaagtcaaagaaaagaagaggagttgtccagaaatagcagatcttcttcagagaaaaagaccaaaacaggtgaatataccaaaaaacactctgataagcaacaccctggaaaggacctgcattcctgatctgactgtcctgaaaaccagaaaagcaaagaaactagggaaactagttctttggttaatgaaccaattaaaagtaggtctttgaaaaaatacgtttctgtcaagaaagaaaatagaatagtgactgtttcatccaagacaaataaaagtaaatccagtccactagaacattctgaaagtgatactcttggatgtgattttgaatttcaagaaagcatccattctctatcacacctttcatatgactaaatcttttgaaactatgtttttacctttaaattttaataaattttcttatgtttttattatggca

SEQ ID NO: 2779 - DNA, 2015 bp, Homo sapiens
  source 1..2015: mol_type = genomic DNA
cggctgtacgctaccacagcttcccaggccgcgggtgctgattgcccgcctgcccgtgggtcatggcctgccagcagtcgcggtaccacagcttctcgtccgcgtcgagattacagccacggccttcaggagtgaccatagacgaatcctttctcacagaagacaagagcacccagaatcgcaagcttcttcagaaacgaaggacgctggagctgccagcagcacccctttcgcactgccaagccccagtacttggaggaactggaaaactacctacgcaaggagctcctcctgctggacctgggcacagattccacccaggaactaaggctgcagcccaccaaagggagaagattcgggctctggagcccctgaaggccaagcttgtcactgtgaatgaggactgcaatgagaggatcctggccatgagagctgaggagaaatatgaaatctccctgctcaagaaagagaagatgaacttgctaaaactcatcgacaaaaagaatgaggagaagatttcattgcagagcgaggtgaccaaactgaggaagaacttggctgaggagtacctgcactacctcagtgagcgagatgcctgtaagatcctcatcgcagacctgaatgagctgcggtaccagcgggaggacatgtcattagcccagtcgccaggcatctggggggaggaccctgtgaagttaaccctggctcttaagatgacccggcaagacctgacccgcacgcagatggaactcaacaacatgaaggccaactttggagatgtggtccccaggagggactttgaaatgcaggagaagaccaacaaggatcttcaggagcagctggacaccctgagagccagctacgaggaggttcgcaaggagcatgagatcctcatgcagctgcacatgagcacgctgaaggaacgggaccaattcttctctgagctgcaggagatccagcgcacttccacgccgcggcctgactggaccaagtgcaaagatgtggtggctgggggcccagagcgctggcagatgctggctgagggcaagaacagcgaccagctggtggacgtgctcctggaagagattggttcggggctgctgcgggagaaagacttcttccctggtctgggctatggggaagccatccctgcttttcttcggtttgatggcctcgtggagaacaagaagccaagcaagaaggacgtggtcaacctcctcaaggatgcctggaaggaacgtcttgctgaggagcagaaagagacgttcccagatttcttcttcaatttcctggagcatcgctttgggcccagtgatgccatggcctgggcttatactatttttgaaaatatcaagatcttccactccaacgaggttatgagtcagttctatgcagtcttgatgggaaagcggagtgagaatgtgtatgtcacccagaaggagacagtagcccagctgctgaaggagatgacaaatgctgacagtcagaacgaggggctactaaccatggagcagttcaacactgtcctcaagagtaccttccctctcaagacagaagagcaaatccaggagctgatggaggcagggggctggcatcccagcagcagcaatgcagacttgctcaactaccgctcactgtttatggaggatgaggagggccagagtgagccctttgtgcaaaaactctgggaacaatacatggatgagaaggacgagtacttacagcagctaaagcaggagcttggcatagaactccatgaggaagtgactctgcccaagctgcgagggggcctgatgaccatcgaccccagcctggacaagcagacagtgaacacctacatgagccaggccttccagctccctgagtcggaaatgccagaggagggtgacgagaaggaagaagccgtggtggaaatcctccagactgccctggagcggcttcaggtgattgacatcaggcgtgtgggacctcgagagccagagcctgcaagctaggaacttgtgggcagcctgcgt

SEQ ID NO: 2780 - DNA, 603 bp, Homo sapiens
  source 1..603: mol_type = genomic DNA
gtgcaggagcgggacccggaacagaccgccgtgagagaggaggggcgccggccgggattcgcggcccggagctcgggaccggagaagaagtcctcaccagtgaacggagacctctctgaactaaggataccatggccacgtcagccccactacggagcctggaagaggaggtgacctgctccatctgtcttgattacctgcgggaccctgtgaccattgactgtggccacgtcttctgccgcagctgcaccacagacgtccgccccatctcagggagccgccccgtctgcccactctgcaagaagccttttaagaaggagaacatccgacccgtgtggcaactggccagcctggtggagaacattgagcggctgaaggtggacaagggcaggcagccgggagaggtgacccgggagcagcaggatgcaaagttgtgcgagcgacaccgagagaagctgcactactactgtgaggacgacgggaagctgctgtgcgtgatgtgccgggagtcccgggagcacaggccccacacggccgtcctcatggagaaggccgcccagccccacagggaaaaaatcctgaaccacctgagtaccctaagga

SEQ ID NO: 2781 - DNA, 2678 bp, Homo sapiens
  source 1..2678: mol_type = genomic DNA
caaagcagacctcacctcccactaccagcttgaagtcacagcagccagaggaaattctgccaccattttcccaggtctgcagcccctccagctgggaacctgctcctggagccatccctctgcaaacagagagcccagagtgcctcggggaaaattggctgaataaaagagcgatcaggacgccacggctccgcctgaagcgatggcccagccctacccccccgcccagtacccccctccgccacagaacggcatccctgccgagtacgccccgcccccaccgcaccccacgcaggactactccggccagaccccggtccccacagagcatggcatgaccctgtacacaccagcacagacccaccccgagcagccaggctccgaggccagcacacagcccatcgccgggacccagacagtgccgcagacagacgaggcggcacagacggacagccagccgctccacccctccgaccctacagagaagcagcagcccaagcggctacacgtctccaacatccccttccggttcagggaccccgacttgcggcaaatgttcgggcaattcggaaaaattttagacgtggagatcatttttaacgagcggggctccaagggttttgggtttgtaacttttgaaactagctcagatgctgaccgagcccgggagaagctgaatgggacgatcgtagagggacggaaaattgaggtcaataatgccacggcccgagtgatgaccaacaagaagacggggaacccctacaccaacggctggaagctaaatccagtggtcggcgcagtctacgggcctgaattctatgcagtgacggggttcccctaccccaccaccggcacagccgttgcctaccggggcgcacatcttcggggccggggccgggccgtgtataatacatttcgggctgcgccacccccaccccccatcccgacttacggagcggtcgtgtatcaggatggattttatggtgctgagatttatggaggctacgcagcctacagatacgctcagcccgctgcagcggcggcagcctacagcgacagttacggcagagtctacgcagctgccgacccgtaccatcacaccatcgggcccgcggcgacctacagcattggaaccatgtgaaaccttccaccgtttccttctcggaccatgaagggcaaaaacaaaaaaacaaaaaaaatcacaaaacaaaaaaaacaaaaaaagatgttaagatccaagcaacaaaaaaaaaaccaaccaaaccaagaggcatccaaccaagtccaagtcccgcgtcctggccacacgcccgcaccgagggagcacgccggcaggggcgccgaggagcggccccaggacaggacggccccaccgcgtcctggctggcagcacagtgggaacacgcccctccgtctcaggcagtgggggagttggaggggaaggggcctcccttgtgggacccgtggggggctctgttttccatccagtcttcctttcccagcccccaactcccaagacagacagtgtggagcccagcggcggcggagcaggcccgggcctgagcaggcaggcgctgctagcaagacttgatctttgtggccagctgtgccagggggccggcggggctgaggggtgcgggcagctttcatcccaggggctccactgggccccgtcaccctcctgtcgcgtcccctgcgtcccacctccctcctgcccggcagtcccgcccgtgcccccagcctggcgaggaagccgtccaacagtagccccggggccagctcccaacagaaagggctgacgtggctccaggactcaggggcgctccatgggaggacgaaggaagcccagccagccaggagccactcctcacacctccaagtgtggccaagtgggccctgaggccaaggacttacttgctcttcctggccatctctccctttctggaggaggcccggggcctgtgtacaccaaggctgacctcgtgctgcctgctgggacccagccctccctgccgctcccctgtgagcccagtccaccgtgggcgcccagggccagggacgggccagcgcccggctgcatcgcgaggttgggagtcacagtggctgtgggcctggacgggcacagccagagcaggggcccatgggaagggcaagggatggggaagcctgggccggccccttccctgctcccaaggcaggtgtccaggtggcgggagcagcaccaaggacagccaggcttacccggtgggaggagcaggagcagagcaggtggcagggaggaacccctggcgaggcagggagcactgaagtagggaagcagcaaaaaatacaggctcccaacgtggctccactgtctcatgaagtgtcaaaaatttaaaaatacacctcactttctattcagcatcagctattgaaatggaattctccttttctattcccgttgtacatagccccacgccctgcctccggctttgtcctctgtacagagccccctgtcccctctgctgttccggacccttttcttgcagcagctcaaccccccgactcactcagatccccaggactgcagccgagccccgggcttcctttcttaccattctgtatgcttccaaggtgtgaccattcaaactaacagtattattaagattattaataaagatttctttcttcaaaccagg

SEQ ID NO: 2782 - DNA, 556 bp, Homo sapiens
  source 1..556: mol_type = genomic DNA
agaagcaagggagtagacaaaatgattctcttctttcttgcccctcagagagacctgagacaccctgaatcccactgtaatctccttggtgccattggtaactctgccaaagtccatctctaggtgacatgaagtctcttagaaattgaggaccaaattgcgctctgcagctctgggctacttcccatctcattttgtgtccctattttcgtatctgtattagagaggtgatctggtgccagctggtggaacagtgggtgatggcgtccctgctgcaagaccagctgaccactgatcaggacttgctgctgatgcaggaaggcatgccgatgcgcaaggtgaggtccaaaagctggaagaagctaagatacttcagacttcagaatgacggcatgacagtctggcatgcacggcaggccaggggcagtgccaagcccagcttctcaatctctgatgtggagacaatacgtaatggccatgattccgagttgctgcgtagcctggcagaggagctccccctggagcagggcttcaccattgtcttccatggccgccg

SEQ ID NO: 2783 - DNA, 3478 bp, Homo sapiens
  source 1..3478: mol_type = genomic DNA
aacagaccgccgtgagagaggaggggcgccggccgggattcgcggcccggagctcgggaccggagtcaggaatggagagaagggtaatggtgttacctcttattgtggaaacctgttgagatcacagagaatatactgacggcataaaagggcagaaccatagcagggtgcggttgcttcattccagcctcgcagtcacctctgtgccctgctggttgtcttcccagcgctgctgtagttgccttccatggatctataggagagcaagtcctccaggagctggtggtgtctgtcgattgactgagtgctggagctggcagccctgtgcaggctgccacctttgcccctttactgtgcttgctcctgactctacgtcgcgtctccaaggagaagaagtcctcaccagtgaacggagacctctctgaactaaggataccatggccacgtcagccccactacggagcctggaagaggaggtgacctgctccatctgtcttgattacctgcgggaccctgtgaccattgactgtggccacgtcttctgccgcagctgcaccacagacgtccgccccatctcagggagccgccccgtctgcccactctgcaagaagccttttaagaaggagaacatccgacccgtgtggcaactggccagcctggtggagaacattgagcggctgaaggtggacaagggcaggcagccgggagaggtgacccgggagcagcaggatgcaaagttgtgcgagcgacaccgagagaagctgcactactactgtgaggacgacgggaagctgctgtgcgtgatgtgccgggagtcccgggagcacaggccccacacggccgtcctcatggagaaggccgcccagccccacagggaaaaaatcctgaaccacctgagtaccctaaggagagacagagacaaaattcagggcttccaggcaaagggagaagctgatatcctggccgcgctgaagaagctccaggaccagaggcagtacattgtggctgagtttgagcagggtcatcagttcctgagggagcgggaggaacacctgctggaacagctggcgaagctggagcaggagctcacggagggcagggagaagttcaagagccggggcgtcggggagcttgcccggctggccctggtcatctccgaactggagggcaaggcgcagcagccagctgcagagctcatgcaggacacgagagacttcctaaacaggtatccacggaagaagttctgggttgggaaacccattgctcgagtggttaaaaaaaagaccggagaattctcagataaactcctctctctgcaacgaggcctgagggaattccaggggaagctgctgagagacttggaatataagacagtgagcgtcaccctggacccacagtcggccagtgggtacctgcagctgtcagaggactggaagtgcgtgacctacaccagcctgtacaagagtgcctacctgcacccccagcagtttgactgtgagcctggggtgctgggcagcaagggcttcacctggggcaaggtctactgggaagtggaagtggagagggagggctggtctgaggatgaagaagagggggatgaggaggaagagggagaagaggaggaggaggaagaggaggccggctatggggatggatatgacgactgggaaacggacgaagatgaggaatcgttgggcgatgaagaggaagaagaggaggaggaagaggaggaagttctggaaagctgcatggtgggggtggctagagactctgtgaagaggaagggagacctctccctgcggccagaggatggcgtgtgggcgctgcgcctctcctcctccggcatctgggccaacaccagccccgaggctgagcttttcccagcactgcggccccggagagtgggcatcgccctggattatgaagggggcaccgtgactttcaccaacgcagagtcacaggaactcatctacaccttcactgccaccttcacccggcgcctggtccccttcctgtggctcaagtggccaggaacacgcctcctgctaagaccctgagccctgacatctgcccccagccccaaccctcagatgcttcacttctttggaattccaggactctcaatggggggacgggatgcctggcctaagcacctggagcaggggaccccatatccactggtagccacctccccattgctgtggccccctgaaatctcactcagtgctgttgctccatctactgccctaatggggctcttttcccacctcctgctggtttcccgagggaacttctgaccctggagtccatgagggctcctttcctttttgaccacgaccttggccccagctctgcactctctggaataagggcccgatgcagcattttcttgcccagtgtggcaagacctcagaaaaaccagtcaattacgcctaagatcattttgctgtccttaaaccccccaggttccttcttgcacaaatccactctgctgcccaccttctctggcattttaaacagacctaccccaccccaactcagagttaagcatacatggcaatgctgaaaataaacaaaatccactgaggcttcccaggccatttaaagcctggagtaccagcgcatatcatctcatggggtccagagtggagtccaggcttctctgaaaccagggctgagcatatttccatagccaaggaggtgggactccctggagctatctgtggtcttagggaaggatccagacatacacggctttggggtacaagctgtgatcactgatcaataaattatctctagattggtccttgtgaggggagttttaagaatccagaacatcttgctcttgatcagcacatccaaaaacaccaagacaaacatccagtggagcagaacctctcctgcctcgggagttctgaccgggttccccagcagggtgttaagcctctgtctctggccctaccagcatccaggttccactttcctaggagagagtggagatgggaagacagggaaaggaaggcagcaggaggccacaagcccaccaggtcttcatgtcaagagagggagtaacatgtcttctcattgcccacggacccaacctctgtccaggtgcccctcatcatcacagtttaacacaagctcccctgctccagccaaattgatctcccagtcttgtccttacccattccaagtgctctgccagcccctgttcatccaagttttaagtcctccaccctgttctaagagactgttccaacggctctgggcctcagtggtcacttgaccaccattgtctcagagctgcccactttgtgtgtgtcacatgctgcctgagtcacatgtacatcttatttctgcctctagttttgtaagctcctggagggcggataacatcttatactactcttgtattctcatggcacctagtgcagtgctgggcacagagtaggtgctcaataaagacttgttgaatgaa

SEQ ID NO: 2784 - DNA, 682 bp, Homo sapiens
  source 1..682: mol_type = genomic DNA
ggaaacctgttgagatcacagagaatatactgacggcataaaagggcagaaccatagcagggtgcgcctcgcagtcacctctgtgccctgctggttgtcttcccagcgctgctgtagttgccttccatggatctataggagagcaagtcctccaggagaagaagtcctcaccagtgaacggagacctctctgaactaaggataccatggccacgtcagccccactacggagcctggaagaggaggtgacctgctccatctgtcttgattacctgcgggaccctgtgaccattgactgtggccacgtcttctgccgcagctgcaccacagacgtccgccccatctcagggagccgccccgtctgcccactctgcaagaagccttttaagaaggagaacatccgacccgtgtggcaactggaaaaaatcctgaaccacctgagtaccctaaggagggacagagacaaaattcagggcttccaggcaaagggagaagctgatatcctggccgcgctgaagaagctccaggaccagaggcagtacattgtggctgagtttgagcagggtcatcagttcctgagggagcgggaggaacacctgctggaacagctggcgaagctggagcaggagctcacggagggcagggagaagttcaagagccggggcgtcggggagcttgcccgg

SEQ ID NO: 2785 - DNA, 795 bp, Homo sapiens
  source 1..795: mol_type = genomic DNA
cggcctgggcgtctcgagaggtgagagagttggcggcgaggtctcggcggctaagcgagcgtcggcgactgtctctccgcgagaggaggcaagttggggtccaggctccaaagccggtggccgcgtaccgcggtggagccgctgtctttgaggtctgaggagagaacagtgatatcctgagagaagatgggaaagggctgcaaggttgtggtttgtggattgttatctgtggggaaaactgcaattttggagcagctcctttatggaaatcatactattggaatggaagattgcgaaacaatggaagatgtatacatggcttcagtagaaacagaccgaggagtaaaagaacagttacatctttatgacaccagaggtctacaggaaggcgtggagctgccaaagcattatttttcatttgctgatggcttcgttcttgtgtacagtgtgaataaccttgaatcctttcaaagagtggagcttctgaagaaagaaatcgataagttcaaagacaaaaaagaggtagcaattgtggtattaggaaacaaaatcgacctttctgagcagagacaagtggacgctgaagtggcacagcagtgggcaaaaagtgagaaagtaagactgtgggaggtgactgttacagatcggaaaactctgattgaaccattcactttattagccagtaaactttctcaaccccagagcaaatcaagctttcctttgcctgggaggaaaaacaaagggaactctaattctgagaactaaaaatcagtaatttccacaattgtatgttga

SEQ ID NO: 2786 - DNA, 370 bp, Homo sapiens
  source 1..370: mol_type = genomic DNA
ttctcaagttcctgccaatcctcaatgcataacagatctcaaggcttttttttcagtagttgccacccccaaaaccatgtctcttatggctgtcaatcaccgagctttattttttgtcgctgtcaatcactgaattttgtgtccaggacctgctatcccttgagctatttctcctatggtaatcaaactataggttctatatccaacagcttcagatccctgaattatgtgtctcatagtttccaacctatttccttcatgcacagcagtttccaaccagcttgttctgattttgtgggttggcaatctccatttcttagaagaacatgctgaattgtcttttcagtgtcttgccctgacagcgttttac

SEQ ID NO: 2787 - DNA, 941 bp, Homo sapiens
  source 1..941: mol_type = genomic DNA
aagccatcaacaccagagagccagctgccgagatagaagccttgctggggatggatctggtcaggcttggtttagaaagaggggaaacagctaaagaagccttagatgtcattgtctccttgttggaagaacatggacaaggtgggaattactttgaagatgcaaactcctgccacagcttccaaagtgcatatctgattgtggatcgtgatgaagcctgggtgctcgagaccatagggaagtactgggctgccgagaaagtcacagaaagcatcacagtgcagactatgatgaacaccttacgggacaaagccagcggagtgtgcatagactctgagtttttcctcaccacagccagtggagtgtctgtcctgccgcagaatagaagctctccgtgcattcactacttcactggaacccctgatccttccaggtccatattcaagcctttcatctttgttgatgacgtaaaacttgtccccaaaacacagtctccctgttttggggatgacgaccctgccaaaaaggagcctcggttccaggagaaaccagaccgccggcatgagctgtacaaagcccacgagtgggcacgtgccatcatcgaaagtgaccaggagcaaggtcgcaagctgaggagcaccatgctggagctggagaagcaaggcctggaagccatggaagaaatcctgaccagctccgagccactggaccctgcggaagtgggggaccttttctatgactgtgttgacacggagattaagttctttaagtgaagtaagcgttccctttccccttcttatttaagacttcccaccttactaaattaccagcaaaacaaaccactctcctgtttgagtaaaatgagaaagttaatatgtggcctccttttctgaagccagatcaaactgttaccttgtgttccaccttgaatctcacagcgt

SEQ ID NO: 2788 - DNA, 3938 bp, Homo sapiens
  source 1..3938: mol_type = genomic DNA
accgagaagaagatatttaccagtttgcttactgctacccatatacatacactcgcttccaacattaccttgacagcctgcaaaagagaaacatggattacttctttcgggagcagctgggccagagtgtgcaacaacgaaagcttgacctcctgacgataaccagccctgacaatctccgggaaggggcagagcagaaggtggtattcatcacaggacgagtccacccaggggaaacaccctcatcatttgtgtgccaagggatcattgacttccttgtaagccagcaccctattgcctgtgtcctccgggaatacctggtcttcaagatcgcaccaatgctcaatcctgatggagtctacctgggcaattacaggtgttctctgatgggatttgatctgaatcgtcactggctggatccctctccatgggtccatcctaccctgcatggagtgaaacaactcatcgtccagatgtacaacgacccaaaaacaagcctggagttttatattgacatccatgcccactccaccatgatgaatggcttcatgtatggcaacatctttgaggatgaggaacggttccagaggcaggccatttttcccaagctcctctgccagaatgctgaggacttctcctattccagcacatcctttaaccgggacgctgtgaaagcaggaactggccgtcgcttcctcggtggactcctggaccacacttcctattgctacaccctagaggtctccttctacagctacatcatcagtggcaccacggctgctgtgccctacactgaagaagcctgtatccttagtccccacccagccttgggccagccctcatccagccgagagtatccaagtctgacaggtcaggaattaggcccccagctcaggtaagggctgagactctcaggtgaggatggaggtgcttcttcttctggtggcgtctttggattgtccagtttgcctcagcccttagtatgatactcctaccccaattgccatgctccaaatctttcccaggccagccggacccatggcctgcccatatcttactctgcttccatctctctcccctctcttctctcatgatgcagtgagtctcctgccatctaagctatgcaagtccacaggctggatgaccatccccagggttgctgaggaagagcttgatgatcttgactccttctaaccctgaacatacaaaaacatatgttctcttttcatcttttgtctaacctatcctctcccactttctcttccctctactcactatttccccttctacttacttttctcacccttgttccctctccttctatgccctcctcctccctcctcacctgtcctgtgcttctctttccttacttctttttccccctcctcccctcctttctgtcctctctctcatcccatcctccttttctttctctcctctttgcctgtcttctgtcttccttgtctttcccctctcatcctctgtgcatctttctctctgcctttgcatttcctttgacaaattccttttcctcttagtttcttcataaaatttctctgaaaactccaaagccttccatgatgaaattagaagttattttctagtttgcctaattttttaaggattaggtagtaactctagtttcccgagtgttgattttaatatcaaggtcactgcatcagagctgtaacagatcgtggcagattctgctttccttgatcctttgttttcgggttgatctatgtctcctttcctaacacttagttttctcagagaagtggagggaggaggaaggaactttagatgaaatgaactctgtatttctgcaaattccccctccctggaggtagaagtgctcttttagcattttttcaacccttggtgagtgtttatggaattcctctgtgcaggaaaacatcttttctgaacgtggcatgacttagggctagtcccaccagccaactgcaacttagtggctctgtttgtatgtgtgtttgggagggttgggggtatggtgtccaggtaccttgccaggaacatcggaagtagggcaatggccctagaaggaggggctgtcagggggtaggccaggtgttagagcaatgttccacatcctgttggacacagagatattatgattggaactgagagttccctatgtacagtcatcaagactgagggtcatcttgcagtctgctttaatacccacctgactcagcaaggccaagggagtaggctctgctctgaggaagagggtctgtgggttccaaagtcctggccacctgttatgtgccacattgcccctcttcatgccccatacacaccttagatgatgcatatggcctatgccttctccagaatctgctaactcctataacacatgcatatgcttcattccacattgtacttgctttgctctcccataatattatggcaaagggacagagagctgcctggaataagagtttgagcttgtgcactaaaggggattctgcaacccttattcatagtgagatgagggtccctccagaggaggcctgcccttagtttgttgttttttgctgtccaatctgacaggctctcctaccttttcttagcacttctgacatgcttctgtcttagaagaaaatgtgtttcttagtagaaagcccacccttggttcaggcccaaggtttccacccctcaacagccaacactcatttatcaaaagtaaacacagcattagtacataccaggaatcataaaaggcacctagggtaaaatactgaataaaaaggcatgattcctgactcacagaactttcagtctacttggggagacagaaaagggaagagataattacaatgtatgtgataaattctggtggaggaattccagaaggctctgggacattttcatttgacaagtatatattgagtgcctgtcataggtcaggtaaagttctaggcacagggaatgtaacagagaacatactaaagacaagaatgtctttacatgggggaaagagggaactcacacgcagtcctaggagtcagggaagatttcccaggaaaagagacatctaaactgagattttttgtttgtttgtttttgagatggagtctcactctgttacccaggctagagtgtagtggcatgatctcagctcactgcaacttctgcctcctgggttcaagcgattcccctgcctcagcctcctgagtagctgggattacaggtgtgcgccaccatgtccggctaatttttgtatttttagcagagatggggttttaccatgttggtcaggctggtctcaaacttctgacctcgtgatccacctgcttcggcctcccaaagtgctgagattacaggtgtaagccactgagcccggcctaaactgagtttttaatatgaactagtcaaactgggtgagggtgttgttgaagggaggatgtggtagacagagaggggagtacagaaggtatgggcagaagctgtaagtggtcccttagggctgaaggacttcagactcaatgataagtctgaagtggaaagatgtaagaagtttgatcttgaatgtagacaatggaaggacagattcgagggggccagtattgtagacagggacatgcattaggaggctgttataaaaatccaggtgagaaataatccaggccaagaccagagtggtggctgtagaatacttagaatgtggaactgagaagacttggtaattgactatttgggagtggcgacagggaatgggagctcgtgattggaaggggttaaggtgagtagagaggctatgcacaagctgagcaggtcgtgatactgatggacctaccctgccttgttctgtcctctagaggatgagaagaggaaacaaactgcaccagggaagctcaggccgattcaatgcatgcaagggtgatttaacctgggttctgtttgaaatactt

SEQ ID NO: 2789 - DNA, 1728 bp, Homo sapiens
  source 1..1728: mol_type = genomic DNA
cgcgggggcccgaccaccgcggggccgggacgcgatggcggcggcagagcccgcgagctcgggccagcaggcgccggcagggcaggggcagggccagcggccgccgccgcagcctccgcaggcgcaagccccgcagccgcccccgccgccgcagctcgggggcgccgggggcggcagcagcaggcacgagaagagcctggggctgctcactaccaagttcgtgtcgctgctgcaggaggccaaggacggcgttctggatctcaaagcggctgctgatactttggctgtgaggcaaaaaaggagaatttatgatatcaccaatgtcttagagggaattgacttgattgaaaaaaagtcaaaaaacagtatccagtggaaaggtgtaggtgctggctgtaatactaaagaagtcatagatagattaagatatcttaaagctgaaattgaagatctagaactgaaggaaagagaacttgatcagcagaagttgtggctacagcaaagcatcaaaaatgtgatggacgattccattaataatagattttcctatgtaactcatgaagacatctgtaattgctttaatggtgatacacttttggccattcaggcaccttctggtacacaactggaggtacccattccagaaatgggtcagaatggacaaaagaaataccagatcaatctaaagagtcattcaggacctatccatgtgctgcttataaataaagagtcgagttcatctaagcccgtggtttttcctgttcccccacctgatgacctcacacagccttcctcccagtccttgactccagtgactccacagaaatccagcatggcaactcaaaatctgcctgagcaacatgtctctgaaagaagccaggctctgcagcagacatcagctacagatatatcttcagcaggatctattagtggagatatcattgatgagttaatgtcttctgacgtgtttcctctcttaaggctttctcctaccccggcagatgactacaactttaatttagatgataacgaaggagtttgtgatctgtttgatgtccagatactaaattattagattccatggaaacttgggactgttatctacctctaactgtgtaacattttagacttcttaataacctaaatatttaaaataatgaatgtaacaccttttttagttcactgattctgaagtgttcttccctaatactttctttacttcacaaaacttcaaccataaaaacaaagggctctgattgctttaggggataagtgatttaatatccacaaacgtccccactcccaaaagtaactatattctggatttcaacttttcttctaattgtgaatccttctgttttttcttcttaaggaggaaagttaaaggacactacaggtcatcaaaaacaagttggccaaggactcattacttgtcttatatttttactgccactaaactgcctgtatttctgtatgtccttctatccaaacagacgttcactgccacttgtaaagtgaaggatgtaaacgaggatatataactgtttcagtgaacagattttgtgaagtgccttctgttttagcactttaagtttatcacattttgttgacttctgacattccactttcctaggttataggaaagatctgtttatgtagtttgtttttaaaatgtgccaatgcctgtacattaacaagatttttaaaaataaaattgtataaaacatt

SEQ ID NO: 2790 - DNA, 4128 bp, Homo sapiens
  source 1..4128: mol_type = genomic DNA
ttttataccagttgcctcctcatcttttactgtctcgttctttttctgcaggaccgttgtttgctctcaacggcagttgctggggctaacagaactggctgttgggagagagaggcgaggcaacgccgcccggccctgccattccattttactgcttaactcaacctggagtgtcaggacctattctcctgcattctcgctgcactatacgggggagccaagtcactctgtactcactggacagccaggctgggtggaatagggttctagagtggagcaggggctctgccctttatggcgactttctaaaagattagcatcagtgtcttttgacagtatagcatctggggtgggacgcggagaggaggctttgcttgctaaacggcttctttctccgccggtgatctggatttgtttcctcggccccctccccccgctcctttctttctcccctcccgcctttagcaaagtgacacaggcgacacctgctcgcttgtgttcgatgttggaactcgcacctcctcggtggtgacggtgccagggcactgctaccagggggacatcggcgggtttcccttccttccagcccacgatgcctagaagggcagcgggtgggctgcgtggggctctgcccgcagcacttcgaggcgggattgaggggctgaagctggccaggagttgctgctaagtggattcgagtggaaggcgccaagtctccgcgagggcaccagcggggacctatctgcgagcagtgggaacaggggcacctggacggaggaacgcgggcgtctggaggggggacatcggctgagctcagagcctctcctccttcctgtcccgagcttcccagcaactccgccacgttggagacccggtacctgcgagagccagggaactcgagaagtgcgtggccgaggctgctttcctgaaggtgaatcattctgtccaattgcctttccccagagaacaagagggagggcgggagagagggaacggaggatgtgtgagtgtgtgtgtgtgtgagagggagagacgacgtgaggcgagaggaaaagtctttagtcggccttaaaagcaaacaaatcagagatggaataagagcggtaattgcagcaagaccgccttgattcttgcagtccagggagctgagcgcaccgcgcgcatccggcgaggacaggaggcgaccgcgggcgctgccaagggctgcgggactttggcttttcctcagtaaacaaatcttttgattactttgacactgtggaataaagaagcggggagaaggatcaggctcaccttcacccgcttcagggggattccagcttggatgtcagattcctgaaccgtctttgccatcggaggaggaaacacatccacacacgcgcgcgcacactcgcacgctcagggccacactcacacgccgccctccacgatcacacagcaccagacttcggttccctatgcccctggatggtgacggcggattggcatcttggaagcgatgcgagagcgataaggctggcgccggcccgcaaaagctgcaggagcatcgctaggtgttgccgccaccgggaagcggggctgcaggatgagtaagagatacttacagaaagcaacaaaaggaaaactgctaataataatatttattgtaaccttgtgggggaaagttgtatccagtgcaaaccatcataaagctcaccatgttaaaacgggaacttgtgaggtggtggcactccacagatgctgtaataagaacaagatagaagaacggtcacaaacagtcaagtgctcctgcttccctgggcaggtggcaggcaccacgcgagctgctccatcatgtgtggatgcttcaatagtggaacagaaatggtggtgccatatgcagccatgtctagagggagaagaatgtaaagttcttccggatcggaaaggatggagctgttcctctgggaataaagtcaaaacaactagggtaacccattaacccaggagaaatcaagtgatcctcaaggctgatgacattgaacatgcgcatagaaacttaactcaactcctgaggtgatcttgaagatttttataccacttgaaagaggcgctcaatagtctatttccaagggatttcatggcctcttcttgaaatcaagactttttaaaagtcagacatgaacttgcatgtcatgaagatttcagcagatttgaactgtgttcaacttgtaaattgttaaaagaatttgaagtcactgtctgaggagctggtgaagagttgtttttttcagggtgatgttagagacagtcaccttttgagttattggctccagatgtgactacttttcttgtttctgcaagctgtatcccaagtgcactgtccttctgtcctggatgtgttcctgggtcctatgttcatttgctagtgggactacacatggctttaatgacatttcctttgagaacttttcctctggcatggtgtagactgagacaattttatttatatcctaatcttggagctcagaaagcctacatgttttaacatcttaaagttgcttttgttaaaggaatggaaatatatatccattggtaataatgttggcaagtaatagttatctgaataaatcaatcatataagaatgtatagacaagctgacatatttccctaaggctaacaacaccctgctgaagctctttgtcaaataggtagtagttagaactggattgccattttcattatataatactttgtacctctagagcactctccctttctgtttttttttaagtgagcttttctttaattttttatgtttacttattcccttcacagaaatcagcagtgagcagtcaagttaatgggtagccttcagtttcaaaaaaattgacagggatgcatgtgagtttctgatttcttagcttgaacattattcacttagatttcttccagtattttttaaaaaactgtcctatctcattttaaaagactttcttttgcttgatcccaatgactgtttgaatgcttatatatttgttcaatctgttgatagaaaaaattgttcattttcctcagtctcaaatttataaatatttgcttacagttttcctattcaaacaatttgttaggccaatattttgtgacatttttgtagcgattttaacgtttatggttttggttctacaggaaagtcataaatatttaaaggccttaaacatgtatgtactttttttttctaagttatagaatgtataattttgtactacatttattttgtttcatttgtgatatgaagggagagaagaaagaaaagtgcatagccattctgtaacaatattgtgtaaacctatagtttgaaggaatgcaaggagaaggatttctgtgttttactcattttaggctgttcagaagatgcttcaaaaattgtcctgttagaatttccatcatggaaggtggtatggaagaaggtatggaaatactttgtattctaaaaactcactgacgtggtcagttagacatacgttggtttccaggatagaggcccatatatcctggggagctttggtctattagtttgtgacaatattcaaaggccaaaacactactcagacactttcctgggaagagcaactaaaaatgtaaaattggttaaaaataaaatctgaaaagtatgtatctcacattgaactaaaatccactgtctcataagttcatggaatgaaatggctttctgcctccattttaatcatgcataaaatgaattagatggctttgagtggattttcacaatggctcaagactatatgaaattataaaaaaaaagttgccctggggtttctgcatcaattagaatatcattaatttctttgtaaccaagtgaaaaactatactttttggaaattatgaatttgtcctaggtttgtttgagatttgaaattatacatcatgcttctcattttttaaactatgttctttaaatcaacactggaaactctgtattatatacaagtgtaatacatgcatataatagaaaaaaaacatggaatttcaaatatactaactagattatccccagtagattaatgttgtgactattcagaaaaggtgaataaaattgggatataaaatggactctctttcataaa

SEQ ID NO: 2791 - DNA, 744 bp, Homo sapiens
  source 1..744: mol_type = genomic DNA
aaggtaactctgggctacagagtccttgctgggggttcggggagcgcttggaccccggcttctgggacgcgtcaggtcgccgtgaagatgattgcatgagatcgtgcgtgtgaacgtttgttgacagctgttacttgagtccgacagccctgggggccgtgcatctgcgtaacatggctacctctgaactccttgggggacacgtatatctttgagaatccgatgaaaaccagagattccgcccttgttttcttagaattaaaaatattatccagcaatgcaaatgaacaaactataactacacacagctgcatggataaatgtcagaaacatgacgttgagtgtgagaagccagatgcaaacgaggactcactgtgcaattctgtgcatgtacagtggccaggagaagggagcactggctttgctttcatcaggccaaagatgcctttctttgggaatacgttcagtccgaagaagacacctcctcggaagtcggcatctctctccaacctgcattctttggatcgatcaacccgggaggtggagctgggcttggaatacggatccccgactatgaacctggcagggcaaagcctgaagtttgaaaatggccagtggatagcagagacaggggttagtggcggtgtggaccggagggaggttcagcgccttcgcaggcggaaccagcagttggaggaagagaacaatctcttgcggctgaaagtggacatcttattagacatg

SEQ ID NO: 2792 - DNA, 582 bp, Homo sapiens
  source 1..582: mol_type = genomic DNA
agttacagtggtggggaccaggagtagggaggcagagactggccccgtgccaggcctagcactgcccacaggcagggcgaaggcgcgggagcagtttccagcagttgtacaggtagccaggtgtcggtctccagcctgagaactctggctgttgttccttgtgtcgtcccatattcctgcctggcctgcgatggacatcagcaagggcctcccaggcatgcagggaggcctccacatatggatctctgagaaccggaagatggtgccggtacccgagggggcttacgggaacttttttgaggaacactgctatgtcatcctccacgtcccccagagcccgaaggccacgcagggggcgtccagcgacctgcactactgggtcgggaagcaggcgggtgcggaagcgcagggcgctgcggaggccttccagcagcgcctacaggacgagctggggggccagaccgtgctgcaccgcgaggcgcagggccacgagtccgactgcttctgcagctacttccgcccgggaatcatctacaggaagggaggcctagcatctgacctcaagcatgtggagaccaactt

SEQ ID NO: 2793 - DNA, 223 bp, Homo sapiens
  source 1..223: mol_type = genomic DNA
ggcctagatgggaggatcacgacatcaggagaccgagaccatcctggctaacacgtgaaaaatgccatggccttgtttctcatagcaggtaaagaagaaccaaagaattcactggtactaacaattaaacctatgccctctgagatctcattgggattccttaccccatcaccatgtgcacctcagaaactttccaagcgctggacaccttcgaagccagaca

SEQ ID NO: 2794 - DNA, 6520 bp, Homo sapiens
  source 1..6520: mol_type = genomic DNA
attgtttgaatttgaaaacggtaacatcgcagtgctgctcgcgggtctggctagtcaggcgaagtttgcagaatggaatctaattttaatcaagagggagtacctcgaccatcttatgtttttagtgctgacccaattgcaaggccttcagaaataaatttcgatggcattaagcttgatctgtctcatgaattttccttagttgctccaaatactgaggcaaacagtttcgaatctaaagattatctccaggtttgtcttcgaataagaccatttacacagtcagaaaaagaacttgagtctgagggctgtgtgcatattctggattcacagactgttgtgctgaaagagcctcaatgcatccttggtcggttaagtgaaaaaagctcagggcagatggcacagaaattcagtttttccaaggtttttggcccagcaactacacagaaggaattctttcagggttgcattatgcaaccagtaaaagacctcttgaaaggacagagtcgtctgatttttacttacgggctaaccaattcaggaaaaacatatacatttcaagggacagaagaaaatattggcattctgcctcgaactttgaatgtattatttgatagtcttcaagaaagactgtatacaaagatgaaccttaaaccacatagatccagagaatacttaaggttatcatcagaacaagagaaagaagaaattgctagcaaaagtgcattgcttcggcaaattaaagaggttactgtgcataatgatagtgatgatactctttatggaagtttaactaactctttgaatatctcagagtttgaagaatccataaaagattatgaacaagccaacttgaatatggctaatagtataaaattttctgtgtgggtttctttctttgaaatttacaatgaatatatttatgacttatttgttcctgtatcatctaaattccaaaagagaaagatgctgcgcctttcccaagacgtaaagggctattcttttataaaagatctacaatggattcaagtatctgattccaaagaagcctatagacttttaaaactaggaataaagcaccagagtgttgccttcacaaaattgaataatgcttccagtagaagtcacagcatattcactgttaaaatattacagattgaagattctgaaatgtctcgtgtaattcgagtcagtgaattatctttatgtgatcttgctggttcagaacgaactatgaagacacagaatgaaggtgaaaggttaagagagactgggaatatcaacacttctttattgactctgggaaagtgtattaacgtcttgaagaatagtgaaaagtcaaagtttcaacagcatgtgcctttccgggaaagtaaactgactcactattttcaaagtttttttaatggtaaagggaaaatttgtatgattgtcaatatcagccaatgttatttagcctatgatgaaacactcaatgtattgaagttctccgccattgcacaaaaagtttgtgtcccagacactttaaattcctctcaagagaaattatttggacctgtcaaatcttctcaagatgtatcactagacagtaattcaaacagtaaaatattaaatgtaaaaagagccaccatttcatgggaaaatagtctagaagatttgatggaagacgaggatttggttgaggagctagaaaacgctgaagaaactcaaaatgtggaaactaaacttcttgatgaagatctagataaaacattagaggaaaataaggctttcattagccacgaggagaaaagaaaactgttggacttaatagaagacttgaaaaaaaaactgataaatgaaaaaaaggaaaaattaaccttggaatttaaaattcgagaagaagttacacaggagtttactcagtattgggctcaacgggaagctgactttaaggagactctgcttcaagaacgagagatattagaagaaaatgctgaacgtcgtttggctatcttcaaggatttggttggtaaatgtgacactcgagaagaagcagcgaaagacatttgtgccacaaaagttgaaactgaagaaacacataattatgtaggatttgaagatattattgattctcttcaagataatgttgctgatattaagaaacaggctgaaattgctcacttatatattgcatctcttcctgacccccaggaagctactgcttgtttagaactaaagtttaatcaaattaaagctgaattagctaaaaccaaaggagaattaatcaaaaccaaagaagagttaaaaaagagagaaaatgaatcagattcattgattcaagagcttgagacatctaataagaaaataattacacagaatcaaagaattaaagaattgataaatataattgatcaaaaagaagatactatcaacgaatttcagaacctaaagtctcatatggaaaacacatttaaatgcaatgacaaggctgatacatcttctttaataataaacaataaattgatttgtaatgaaacagttgaagtacctaaggacagcaaatctaaaatctgttcagaaagaaaaagagtaaatgaaaatgaacttcagcaagatgaaccaccagcaaagaaaggtactacttcagctgccagcagcaggcgtttaagaaagctaatttctaaaccagtaaatagaacaaggcaaacagaggggcattcacttgtgtctatccatgttagttcagctatcactgaagaccaaaagaaaagtgaagaagtgcgaccgaacattgcagaaattgaagacatcagagttttacaagaaaataatgaaggactgagagcatttttactcactattgagaatgaacttaaaaatgaaaaggaagaaaaagcagaattaaataaacagattgttcattttcagcaggaactttctctttctgaaaaaaagaatttaactttaagtaaagaggtccaacaaattcagtcaaattatgatattgcaattgctgaattacatgtgcagaaaagtaaaaatcaagaacaggaggaaaagatcatgaaattgtcaaatgagatagaaactgctacaagaagcattacaaataatgtttcacaaataaaattaatgcacacgaaaatagacgaactacgtactcttgattcagtttctcagatttcaaacatagatttgctcaatctcagggatctgtcaaatggttctgaggaggataatttgccaaatacacagttagaccttttaggtaatgattatttggtaagtaagcaagttaaagaatatcgaattcaagaacccaatagggaaaattctttccactctagtattgaagctatttgggaagaatgtaaagagattgtgaaggcctcttccaaaaaaagtcatcagattgaggaactggaacaacaaattgaaaaattgcaggcagaagtaaaaggctataaggatgaaaacaatagactaaaggagaaggagcataaaaaccaagatgacctactaaaagaaaaagaaactcttatacagcagctgaaagaagaattgcaagaaaaaaatgttactcttgatgttcaaatacagcatgtagttgaaggaaagagagcgctttcagaacttacacaaggtgttacttgctataaggcaaaaataaaggaacttgaaacaattttagagactcagaaagttgaatgtagtcattcagccaagttagaacaagacattttggaaaaggaatctatcatcttaaagctagaaagaaatttgaaggaatttcaagaacatcttcaggattctgtcaaaaacaccaaagatttaaatgtaaaggaactcaagctgaaagaagaaatcacacagttaacaaataatttgcaagatatgaaacatttacttcaattaaaagaagaagaagaagaaaccaacaggcaagaaacagaaaaattgaaagaggaactctctgcaagctctgctcgtacccagaatctgaaagcagatcttcagaggaaggaagaagattatgctgacctgaaagagaaactgactgatgccaaaaagcagattaagcaagtacagaaagaggtatctgtaatgcgtgatgaggataaattactgaggattaaaattaatgaactggagaaaaagaaaaaccagtgttctcaggaattagatatgaaacagcgaaccattcagcaactcaaggagcagttaaataatcagaaagtggaagaagctatacaacagtatgagagagcatgcaaagatctaaatgttaaagagaaaataattgaagacatgcgaatgacactagaagaacaggaacaaactcaggtagaacaggatcaagtgcttgaggctaaattagaggaagttgaaaggctggccacagaattggaaaaatggaaggaaaaatgcaatgatttggaaaccaaaaacaatcaaaggtcaaataaagaacatgagaacaacacagatgtgcttggaaagctcactaatcttcaagatgagttacaggagtctgaacagaaatataatgctgatagaaagaaatggttagaagaaaaaatgatgcttatcactcaagcgaaagaagcagagaatatacgaaataaagagatgaaaaaatatgctgaggacagggagcgtttttttaagcaacagaatgaaatggaaatactgacagcccagctgacagagaaagatagtgaccttcaaaagtggcgagaagaacgagatcaactggttgcagctttagaaatacagctaaaagcactgatatccagtaatgtacagaaagataatgaaattgaacaactaaaaaggatcatatcagagacttctaaaatagaaacacaaatcatggatatcaagcccaaacgtattagttcagcagatcctgacaaacttcaaactgaacctctatcgacaagttttgaaatttccagaaataaaatagaggatggatctgtagtccttgactcttgtgaagtgtcaacagaaaatgatcaaagcactcgatttccaaaacctgagttagagattcaatttacacctttacagccaaacaaaatggcagtgaaacaccctggttgtaccacaccagtgacagttaagattcccaaggctcggaagaggaagagtaatgaaatggaggaggacttggtgaaatgtgaaaataagaagaatgctacacccagaactaatttgaaatttcctatttcagatgatagaaattcttctgtcaaaaaggaacaaaaggttgccatacgtccatcatctaagaaaacatattctttacggagtcaggcatccataattggtgtaaacctggccactaagaaaaaagaaggaacactacagaaatttggagacttcttacaacattctccctcaattcttcaatcaaaagcaaagaagataattgaaacaatgagctcttcaaagctctcaaatgtagaagcaagtaaagaaaatgtgtctcaaccaaaacgagccaaacggaaattatacacaagtgaaatttcatctcctattgatatatcaggccaagtgattttaatggaccagaaaatgaaggagagtgatcaccagattatcaaacgacgacttcgaacaaaaacagccaaataaatcacttatggaaatgtttaatataaattttatagtcatagtcattggaacttgcatcctgtattgtaaatataaatgtatatattatgcattaaatcactctgcatatagattgctgttttatacatagtataattttaattcaataaatgagtcaaaatttgtatatttttataaggcttttttataatagcttctttcaaactgtatttccctattatctcagacattggatcagtgaagatcctaggaaagaggctgttattctcatttattttgctatacaggatgtaataggtcaggtatttggtttacttatatttaacaatgtcttatgaattttttttactttatctgttatacaactgattttacatatctgtttggattatagctaggatttggagaataagtgtgtacagatcacaaaacatgtatatacattatttagaaaagatctcaagtctttaattagaatgtctcacttattttgtaaacattttgtgggtacatagtacatgtatatatttacggggtatgtgagatgttttgacacaggcatgcaatgtgaaatacgtgtatcatggagaatgaggtatccatcccctcaagcatttttcctttgaattacagataatccaattacattctttagatcatttaaaaatatacaagtaagttattattgattatagtcactctattgtgctatcagatagtagatcattctttttatcttatttgtttttgtacccattaaccatccccacctccccctgcaaccgtcagtacccttaccagccactggtaaccattcttctactctgtatgcccatgaggtcaattgattttatttttagatcccataaataaatgagaacatgcagtctttgtc

SEQ ID NO: 2795 - DNA, 2398 bp, Homo sapiens
  source 1..2398: mol_type = genomic DNA
atgcgctgtcccaaatccgctgttactatgagaaatgaagagctgcttttaagtaacggcacagccaacaagatgaacggagctttggatcactcagaccaaccagacccagatgccattaagatgtttgtcggacagatcccccggtcatggtcggaaaaggagctgaaagaactttttgagccttacggagccgtctaccagatcaacgtcctccgggaccggagtcagaaccctccgcagagtaaaggttgttgtttcgtaacattttatacaagaaaagctgcacttgaggcccagaatgcactgcacaatattaaaactttacctgggatgcatcatcccattcagatgaaacctgcagatagtgaaaagtccaacgctgtggaagacagaaaattgttcataggaatggtatcgaagaaatgtaatgagaacgacatcagggtgatgttctctccatttggccagatagaagaatgccggatcctccggggacctgatgggctgagtcgaggctgtgcgtttgtcacattttctacaagggcaatggcacagaatgcaatcaaagccatgcatcagtctcagaccatggagggctgctcttcacctatcgtggtgaagtttgctgacactcagaaggacaaagagcaaaggcgcctccagcagcagctcgctcagcagatgcagcagctcaacactgccacctgggggaacctgacagggctgggcggactgaccccacagtatctggcgctcctgcagcaggccacctcctccagcaacctgggtgcgttcagcggcattcaacaaatggcaggcatgaatgctttacagttgcagaacctggcgacgctggctgctgctgcagctgcggcccagacctcagccaccagcaccaatgcaaaccctctctctaccacgagcagcgccctgggagccctcacgagtcccgtggctgcttcaacccccaactccactgctggtgcagccatgaactccttgacctctctcgggactctgcaaggactggctggagccactgttggactgaataatattaatgcactagcaggtatggcggctctgaatggaggacttggcgccacaggcttgacgaatggcacggctggcaccatggacgccctcacccaggcctactcaggaattcaacagtacgcagccgccgcgctgcccactctgtacagccagagcctgctgcagcagcagagcgctgcaggcagccagaaggaaggtccagagggggcaaacctctttatttaccaccttccacaggaatttggagaccaggacattctgcagatgttcatgccttttggaaatgttatctctgctaaagtcttcattgacaaacagaccaatctgagcaagtgctttggttttgttagctacgacaatccagtctctgcacaagctgctatccaagctatgaatggctttcagatcggcatgaaacgcttgaaggtgcagctgaagcgttccaaaaacgacagcaaaccttactgatcctaaccccagaggctccctgctctcattttagctttcttaggacatcttcatgcccgttagttcatcgtttgcctagcatgtccctgtggcgtctcaaaaaaaagtttcatcgtcccgtcattgtttctgatgtctttctgacctcacatcatatttggttctcctactgacctttgatctagtttgacctttgaaatttgcatgtgacctcatctagctatgaattctgggaagtcaatgtgaaaaacattgctgcattcatgcaagactgaaatttattattagacaaattcattatagaaaaaacctgtggcaaaaacgtttctttcttattttttttcttttcctaaaacagacttgaaagtattatacagggattggcattcttcccggtcactggtaacaatagcaatatgtgtccagggacacagaatgttggtttctaacagactacttccaaaaacagtttgagaaaaaaactgtctgattttaagtctctagaggtctgtaatagtttttacatttttcaggcagtgtaaagttttttgataaggccattttaggtggctcactttctcattaagatatatatatagaaccactttttgtagattagtataagaaaaatatttaccctgttttggggcaaatgctacctatttgtgtcaccttttgctgaactcacagttagacaatccatggtttaatgcacatgaaattacctatattttatactgtttcaatgtacaggagaaaggttactgtaaactgtgttatgttggtgcttctgtgaattaagttgtggtttcatcatgagtcttaatgttctttgttgataagacaagtttagaattggtttacttaatac

SEQ ID NO: 2796 - DNA, 1714 bp, Homo sapiens
  source 1..1714: mol_type = genomic DNA
agagccagagagaacttccagcgcaaaaggaaaataaaacttgtggctggtgtttgtgcaggagggtctccgccatcctgaagccccccgatcctggggcgtctcgggggccgccaaaggagcgccagggttaaaatgtttatcggtggactgagctggcagacctcaccagatagccttagagactattttagcaaatttggagaaattagagaatgtatggtcatgagagatcccactacgaaacgctccagaggcttcggtttcgtcacgttcgcagacccagcaagtgtagataaagtattaggtcagccccaccatgagttagattccaagacgattgaccccaaagttgcatttcctcgtcgagcgcaacccaagatggtcacaagaacaaagaaaatatttgtaggcgggttatctgcgaacacagtagtggaagatgtaaagcaatatttcgagcagtttggcaaggtggaagatgcaatgctgatgtttgataaaactaccaacaggcacagagggtttggctttgtcacttttgagaatgaagatgttgtggagaaagtctgtgagattcatttccatgaaatcaataataaaatggtagaatgtaagaaagctcagccgaaagaagtcatgttcccacctgggacaagaggccgggcccggggactgccttacaccatggacgcgttcatgcttggcatggggatgctgggatatcccaacttcgtggcgacctatggccgtggctaccccggatttgctccaagctatggctatcagttcccaggcttcccagcagcggcttatggaccagtggcagcagcggcggtggcggcagcaagaggatcagtcctgaatagctacagtgctcaaccgaattttggcgcgcccgcttccccggcaggctccaacccggcgcggcccggaggcttcccgggggccaacagcccaggacctgtcgccgatctctacggccctgccagccaggactccggagtggggaattacataagtgcggccagcccacagccgggctcgggcttcggccacggcatagctggacctttgattgcaacggcctttacaaatggataccattgagcaggtgctttcgttgccatctcactctgagagcatacctggatgtccaggcaagactgggcgaagtttctgagtggccctttgtttaggtgatgtcctcagacctggacccccaccagcctcactccccatcccaaccagagatggctcacttcggatcgagggttgactacatctcatcatctcacgaatctgctgtaatataagacaacagcttttaaatgtgtatataacccatgatttcggttttgttttgttttgtttttcttgatggtttccctctccctccctctcttcccattctccttttaaatctctttgaatcacatttggtagtgattttgacttagtccagtagtcacatagctttaatatctagttcaaagctaaccatagtataattgttatattaaggagttattttttcttaaaacatttttttttgcttgttttggttctgttctcacttttaaaggatgctgagatggtaatatgactctccatattttggtaccaattctgagactgtatgaattttcaggtggaactttagcacacactgaagcaaagttgtgaagtgcagggcgggaggtgggcgtgagct

SEQ ID NO: 2797 - DNA, 430 bp, Homo sapiens
  source 1..430: mol_type = genomic DNA
ccacaagccatgctatggggctctctttggacccaggggggtgaacattggtggtgtaggctcctacttgtacaatccccccactcccagccctggctgcaccactcctctcagccccagcagcttcagccctcccaggccaaggactggcctcccccaaggcaagaaaactgagaaggtgatgtcattaggcagaaattggcaccgaccgtgtctgaggtgccagcgttgccacaagaccctgactgctgggagtcatgctgagcatgatggagtcccctactgccacgtcccctgctacggctacctgtttggccccaaagccctctaggtcctgcctgtttcttgcctgcctcacccagtggcatcacgatgatggtaaaaccagccagggctgagccagtaagggtgcgggtgatggcaaacatta

SEQ ID NO: 2798 - DNA, 714 bp, Homo sapiens
  source 1..714: mol_type = genomic DNA
caacagggaccgaccaaatcgtcatgcagctgtttggatgctttaaaaaaataaatccccacactcattacgcgttttatgctgctgacttttttatttttaagacatctgctcccgaaagctcagagccctttagcatttcattttctaaacgaatcctaatctttcctgtgactgaatcggttcagaggatatcttttcaataaggaaggaagccctcccctgctcactggggacgtcgcagggtttttaaacctaaagatttactcttttgtgcacagacgctggaagcatttggaatgaaatatgactgaggactctcagagaaactttcgttcagtatattatgagaaagtggggtttcgtggagttgaagaaaagaaatcattagaaattctcctaaaagatgaccgtctggatactgagaaactttgtacttttagtcagaggttccctctcccgtccatgtaccgtgcattggtatggaaggtgcttctaggaatcttgcctccacaccacgagtcccatgccaaggtgatgatgtatcgtaaggagcagtacttggatgtccttcatgccctgaaagtcgttcgctttgttagtgatgccacacctcaggctgaagtctatctccgcatgtatcagctggagtctgggaagttacctcgaagtccctcttttccactggagccagatgatgaagtgtttcttgcc

SEQ ID NO: 2799 - DNA, 1911 bp, Homo sapiens
  source 1..1911: mol_type = genomic DNA
agtgctccgggcgcttcaggctggcttgggtcctgctgctccaaccccaagggccctggagcgctccctgatacctccatcactcaccatggccagccagttctgcctccctgaatccccatgtctctcgcccccgcccttatcccccttggctctggcgccctcttcggccatcagggaccagcgtaccgccacgaaatgggttgcgatgatcccccagaaaaaccaaacagcctcaggggacagcctggatgtgagggtccccagcaaaccttgtctgatgaagcagaaaaagtctccctgcctctgggaaatccagaaactgcaggagcagcgggaaaagcgcaggcggctgcagcaggagatccgagctagacgcgccctcgatgtcaataccagaaaccccaactacgaaatcatgcacatgatcgaagagtatcgcaggcacctggacagcagcaagatctcagtcctggagcccccgcaagaacatcgcatctgcgtctgcgtgaggaagcggcctctcaaccagcgagagacaaccttaaaggaccatgccttcgatgacaaagcctccaacgagttggtgtaccagttcaccgcccagccactggtggagtccatcttccgcaagggcatggccacctgctttgcctatgggcagacgggaagtgggaagacgtacaccatgggtggagacttttcaggaacggcccaagattgttctaagggcatttatgctctggtggcacaggatgtctttctcctgctcagaaactccacatatgagaagctggacctcaaagtctatgggacattttttgagatttatgggggcaaggtgtatgatttgttgaactggaagaagaagctgcaagtccttgaggatggcaatcagcaaatccaagtggtcgggctgcaggagaaagaggtgtgttgtgtggaggaagtgctgaacctggtggaaatagggaatagctgtcggacttccaggcaaacacctgtcaacgctcactcatccaggagccatgcagtgttccagatcatcctgaagtcaggacggataatgcatggcaagttttccctcgttgatttagctgggaatgaaagaggagcagatacaaccaaggccagccggaaaaggcagctggaaggggcagagattaacaagagtcttctagccctcaaagaatgtattctggctttgggtcagaacaagcctcacaccccattcagagccagcaaactcacactggtgctccgggactcctttataggccagaactcctccacttgcatgattgctaccatctctccggggatgacctcttgtgaaaacactctcaacactttaagatatgcaaacagagtaaaaaaattaaatgtagatgtaaggccctaccatcgtggccactatccgattggacatgaggcaccaaggatgttaaaaagtcacatcggaaattcagaaatgtcccttcagagggatgaatttattaaaataccttatgtacagagtgaggagcagaaagagattgaagaggttgaaacattacccactctgttagggaaggataccacaatttcagggaagggatctagccaatggctggaaaacatccaggagagagctggtggagtacaccatgatattgatttttgcattgcccggtctttgtccattttggagcagaaaattgatgctctgaccgagatccaaaagaaactgaaattattactagctgacctccacgtgaagagcaaggtagagtgaagccaatggcgagagatcaggtccgaaatgctgcattgctgcagtttccaccactcttatacaggaaaactgtccaaattatctaaagatcctcctgagaagcttaaaacatcttaaaatacactgatgggaaacat

SEQ ID NO: 2800 - DNA, 394 bp, Homo sapiens
  source 1..394: mol_type = genomic DNA
tgtcagcttgcattgggaactgctctacagccttagaagagctgacagatgacatgacagaagacttcctacctgtgctcagggaatatattttatactctgactccatgaagagtgtattgaagaagagggaccaagttcaagcagagtatgaagccaaactggaagctgtggctctgcggaaggaagaccgccccaaggtaccggcggacgtcgagaaatgtcaggatcggatggagtgtttcaatgctgacctgaaagctgacatggagaggtggcagaacaacaagaggcaggacttccggcagctactcatggggatggctgacaagaacatccagtattatgagaagtccattgcagatctgaagtgatggcctagggagagagcagg

SEQ ID NO: 2801 - DNA, 1124 bp, Homo sapiens; identical to SEQ ID NO: 2733
  source 1..1124: mol_type = genomic DNA

SEQ ID NO: 2802 - DNA, 1415 bp, Homo sapiens
  source 1..1415: mol_type = genomic DNA
gggccgggggctgccggctgcgctcgggccgtgcgcggcggccgtgcgggcacgccatggacttcaacatgaagaagctggcgtcggacgcgggcatcttcttcacccgggcggtgcagttcacggaggagaaatttggccaggctgagaagactgagcttgatgcccactttgaaaaccttctggcccgggcagacagcaccaagaactggacagagaagatcttgaggcagacagaggtgctgctgcagcccaaccccagtgcccgagtggaggagttcctgtatgagaagctggacaggaaggtcccctcaagggtcaccaacggggagctgctggctcagtacatggcagacgcggccagtgagctggggccgaccaccccctatgggaagacactgatcaaggtggcagaagctgaaaagcaactgggagccgcggagagggattttatccacacggcctccatcagcttcctcacacccttgcgcaacttcctggagggggactggaagaccatctcgaaggagaggcggctcctccaaaaccggcgtctggacttggatgcctgcaaagcgaggctgaagaaggccaaggctgcagaagccaaagccacgctctggaatgatgaagtggacaaggccgagcaggagctccgcgtggcccagacagagtttgaccggcaagcagaagtgacccgtctcttgctggagggaatcagtagcactcacgtgaaccacctgcgctgcctccacgagttcgtcaagtctcagacaacctactacgcacagtgctaccgccacatgctggacttgcagaagcagctgggcagatttcccggcaccttcgtgggcaccacagagcccgcctccccacccctgagcagcacctcacccaccactgctgcggccactatgcctgtggtgccctctgtggccagcctggcccctccgggggaggcctcgctctgcctggaagaggtggccccccctgccagtgggacccgcaaagctcgggtgctctatgactacgaggcagccgacagcagtgagctggccctgctggctgatgagctcatcactgtctacagcctgcctggcatggaccctgactggctcattggcgagagaggcaacaagaagggcaaggtccctgtcacctacttggaactgctcagctaggcaggtgcccccatcccccccgcattctggcctaggcaggagaggatgggcgcagccctgccacttaacttgtttgttggtgacacagttgttcagagtggggagaattcaccccattctgtccctgcccctagtcacctagctgtgagggtgcctgaggctgaatggctccacccctcccccagccctgcttctgacctgtggctctggagcccctgcccctgcctgcatccc

SEQ ID NO: 2803 - DNA, 3009 bp, Homo sapiens
  source 1..3009: mol_type = genomic DNA
agtgtgtgacccagcccttcccccgtggccaagcagagagagtggccttgaggaagccatagcagcaggaccagcatggcctctgctgcctctgtgaccagcctggcagatgaagtcaactgccccatctgtcagggtaccctgagggagccggtcactatcgactgcggccacaacttctgccgggcctgccttacccgctactgtgagataccaggcccagacctggaggagtcccctacttgcccactctgcaaagaacccttccgtcctgggagcttccggcccaactggcagctggctaacgtggtggagaacattgagcgcctccagctggtgtccacactgggtttgggagaggaggatgtctgccaagagcacggagagaagatctacttcttctgtgaggatgatgagatgcagttgtgcgtggtgtgccgggaggctggggagcacgctacccacaccatgcgcttcctggaggatgcagcggctccctatagggaacaaatccataagtgtcttaaatgtctaagaaaagagagagaggagattcaagaaatccagtcaagagaaaataaaaggatgcaagtcctcctgactcaggtgtccaccaagagacaacaggtgatttctgagttcgcacacctgaggaagtttctagaggaacagcagagcatcctcttagcacaattggagagccaggatggggacatcttgaggcaacgggatgaatttgatttgctggttgctggggagatctgccggtttagtgctcttattgaagaactggaggagaagaatgagaggccagcaagggagctcctgacggacatcagaagcactctaataagatgtgaaaccagaaagtgccggaaaccggtggctgtgtcgccagagctgggccagaggattcgggactttccccagcaggccctcccgctgcagagggagatgaagatgtttctggaaaaactatgctttgagttggactatgagccagctcacatttctctagaccctcagacttcccaccccaagctcctcttgtccgaggaccaccagcgagctcagttctcctacaaatggcagaactcaccagacaacccccagcgttttgaccgggccacctgtgttctggcccacactggcatcacaggggggagacacacgtgggtgtggatggccagggtacctggggactcaggctgctgccagttctgctcaccaccatccgtgcttggcacagaagtagctgcatagaaagagcactggatttgaagtcagaagacctgggttcttgaaccagcctgtcaaccagttgtatgactttaaacaaggcatctcacctcttttcatcttgttttcttccaataatgttagagttcatgtaatcacattctctagaaccatttagtttgtgttaactatgaaccaagcagtgtggtggccactggtgacttgaaaatgtagagaaaaaaaaaacctgctctatatctgaaagagctcttgggaagacagagaaacataaagaggaaattatagcacagtgtggtgggtgttacgggaagtccaaccccagcattatgggagttcaggggaaggggcatagcccagcctggaaggagaggatgagtgggggatggctttctgaaaagggtagtctaaaggatgcctatagtcaatagggaaaagaggggaagaagcatcttaagaagaggaaacagcagagaactggctggatgacctgtgactctggagcactgggttgtctccattgtccttatgggcagatgtgtgccatccccagccgacaccactcactgcctccttcctcctggtgttgccacttctgggtgagattaaggtgcagggcctgggggcaggaggacataaggtatagccataaatcataacccagggaccacactcaaccctagggaaattgtcttcctgatcagttgattaccatctgaggtcaagaaatgagatagtgggagcaaatgggtcacaaatagctcagctgtgggctcagaaactgctaggtaaaagaattccagaaggaggccagggcataagttggatgacctatgacctttagtctaaagaattgagactaccgtaattgagactactgtagtgacatctgagaaatgggatggaagagtgaccatgttttattttcttgttcttgtcactattgtattttattttgcataatcatgcccttcactgacagtctccttaacatcatctgtttactctgctcagatgtaaaatacaatgctctgtcatctccctactgggtctcctgggaggaggggagccatccagggtgcaaactcaaaggcagagggcacagcgtgcttaggcccaagcttagaattcaattgagaagttctgttgttcatccttacctcagcaggtagaaaagaggtggagatcagaagccagggattaaagattgaattgctttccctgggagtgtgcagtatctcattaaaatgttgtatattcaaaaaaatacagacacacacaagtgcctatataatgataaaacatatgcaaagcacccaaacctgtgattccagaaaggtagatcctatttttctgtttatttttattggctttagctgtgtcttttgaaaggactattatcctctaaaatgtatgtgtatgaagatcctggcttgcagctcgggagctttacacaccttgtgtcactttatcttggtaacgagccaagatcatgcaaccagttcatccatgtctgacccaagagctcttaactgctatgctgcactgcctcattcagagatagatgcctgcatgggtcctggcgattattttaatgctggctacacccccacaggtgacttggattcagaaatacaatttatatttcttctttttaaattgttttattttatttttcttttaatagttatatgtcagtgagaacaatttatatgtcttacactgagaaataaaactgctcataagtgaaaa

SEQ ID NO: 2804 - DNA, 1254 bp, Homo sapiens
  source 1..1254: mol_type = genomic DNA
agaaagctgtggaggtgtgccccagcacggctgctttgaaaggtttatcatctatccgtttggtttatggagaaaaagaaaatggtaactcagggtaaccaggagccgacaacaactcctgacgcaatggttcagccttttactaccatcccatttccaccacctccgcagaatggaattcccacagagtatggggtgccacacactcaagactatgccggccagaccggtgagcataacctgacactctacggaagtacgcaagcccacggggagcagagcagcaactcacccagcacacaaaatggatctcttacgacagaaggtggagcacagacagacggccagcagtcacagacacaaagtagtgaaaattcagagagtaaatctaccccgaaacggctgcatgtctctaatattcctttccgcttccgggaccctgacctccggcagatgtttgggcagtttggcaaaatcctagatgtagaaataatctttaatgaacgtggctctaagggattcgggttcgtaactttcgagaatagtgctgatgcagacagggccagggagaaattacacggcaccgtggtagagggccgtaaaatcgaggtgaataatgctacagcacgtgtaatgaccaataagaagatggtcacaccatatgcaaatggttggaaattaagcccagtagttggagctgtatatggtccggagttatatgcagcatccagctttcaagcagatgtgtccctaggcaatgatgcagcagtgcccctatcaggaagagggggtatcaacacttacattcctttaatcattcctggcttcccttaccctactgcagccaccacggcagccgctttcagaggagcccatttgaggggcagagggcggacagtatatggtgcagtccgagcggtacctccaacagccatccccgcctatccaggtgtggtttaccaggacggattttacggtgctgacctctatggtggatatgcagcctacagatatgcacagcctgctactgcaaccgcagccaccgctgctgcagccgctgcagccgcttacagtgacggttatggcagggtgtacacagccgacccctaccatgcccttgcccctgccgctagctatggagttggcgctgtggcgagtttataccgaggtggctacagccgatttgccccctactgaagtgacgtgagacccctgcaaatgggacagccccccagttcatgaggcctggctatt

SEQ ID NO: 2805 - DNA, 1966 bp, Homo sapiens
  source 1..1966: mol_type = genomic DNA
agaagtgcggacgcccggctcccggcgtggacgccatggtgctgtgcccggtgattgggaagctgctgcacaagcgcgtggtgctggccagcgcctccccacgccgtcaggagatcctcagcaacgcgggtctcaggtttgaggtggtcccctccaagtttaaagagaagctggacaaagcctccttcgctactccgtatgggtacgccatggagaccgccaagcagaaggccctggaggtggccaaccggctgtaccagaaagacctgcgggcccccgacgtggtcattggagcggacacgatcgtggttgagtgggagagaacacagcgtgttcacaggtgtcgcgatcgtccactgctccagcaaagaccatcagctggacaccagggtctcggaattctacgaggaaacgaaggtgaagttctcggagctgtccgaggagctgctctgggaatacgtccacagcggggagcccatggacaaagctggcggctacgggatccaggccctgggcggcatgctggtggagtccgtacacggggactttctgaacgtggtgggattcccgctgaaccacttctgcaagcagctggtgaagctctactacccgccccgtccggaggacctgcggcggagtgtcaagcacgactccatcccggccgcggacaccttcgaagacctcagtgacgtggaggggggcggctcggagcccactcagagggacgcgggcagccgcgatgagaaggccgaggcgggagaggcgggacaggccacggcagaggctgagtgtcacaggactcgggagaccctgcctccgttcccgacacgcctcctggagctgattgagggctttatgctatccaagggcctgctcaccgcttgcaaactgaaggtgttcgatttgttaaaagatgaagcaccccagaaggctgcggatattgccagcaaagtggacgcctctgcgtgtggaatggagaggcttctggacatctgtgctgccatggggctcctggagaagacagagcaaggttacagtaacacagagacagcgaacgtctacctggcatcggatggcgaatactctctgcacggcttcatcatgcacaataatgacctcacatggaacctctttacatacctggagtttgccatccgagagggaacaaaccagcaccacagggcgttggggaagaaggcggaagatctgttccaggatgcgtactaccagagcccggagacgcggctgaggttcatgcgggccatgcacggcatgacgaagctgactgcgtgccaggtggccacggccttcaatctgtcccgcttctcctccgcctgcgacgtgggaggctgcacgggtgcactggcccgagagctggcccgtgagtaccctcgtatgcaggtgactgtgtttgacctcccagacattatcgagctggccgcccacttccaaccccccggaccgcaggcagtgcagatccacttcgcagcaggtgactttttcagggaccccctccccagcgctgagctgtacgtcctgtgccggatcctgcatgactggccagacgacaaagtccacaagttactcagcagggtcgccgagagctgcaagccaggggccggcctgctgctggtggagacgctcctggatgaggagaagagggtggcgcagcgcgccctgatgcagtcactgaacatgctggtgcagactgaaggcaaggagcggagcctgggcgagtatcagtgcttgctggagctgcacggcttccaccaggtgcaggtggtgcacttggggggtgtcctggatgccatcttggccaccaaagtggccccctgaagcccaggcagcatgttcattatagggatgtcctcccccaggctgcaggtggaccgcccggtccccaagtaccataggacagtcacataggagcgtgtagtcgtgactgaataaagaaagcaaaagcctg

SEQ ID NO: 2806 - DNA, 685 bp, Homo sapiens
  source 1..685: mol_type = genomic DNA
gtgacaggaaatggagctggggagacaaaaatgtggataacaacaaaagaatttcaacaggtaaaaaaatgagtcaaacatctctcaaacagaaaaagaatgagcctggaatgaggtcctcaaaagagagtctagaagcagaaaaaagaaaggaatctgacaaaacaggagttcgtctgagcaatcagatgaggcgtgcagtcaatccgaatcactcgctgagatgttgccccttccagggtcactcgtcgtgtagacgctgcctttgtgcagctgagggaacagcccttggcccctgccacacaatacgtatttatattcacatgtgcctgttgtgggagcagggccagcagatcaccatgatgagggtgagcagagatcacactaccgattctggaggggaaccacagacaacctggggatcacaagaatcatcactgcggaagacagactctcgagggtaccttgtgcgcagtcaatggtctagaatatcccggagcccatccaccaaggctccatccatagatgagcctagaagcaggaacaccagtgctaagctccccagcagctccacgagctcccggactccatccacctccccaagcctgcatgactcctcaccgccgccgctgtccgggcagccctcgctccagccacccgcgtcgccccagctgccccggtcgct

SEQ ID NO: 2807 - DNA, 3116 bp, Homo sapiens
  source 1..3116: mol_type = genomic DNA
attcactgattagatccagcgctgagaggcagcactgctccttctctcacgccaactgagtctcttgatctgtacatgcaatcccaggcagctcgcgaacacaaacccggggccagccgcctactgctgctgctgctgctgccgctgccgccgccgccgccgccgctgcctccgccggctctgcgaacccgggacttttcatgcaccacactctccgcctgcttccctccgtgtcctgaaaagtgcgaccgttctcccaaggaatttccacggtcttaggagggaatgattccccagtaatattccctgccctgacccaaagtgctggttggcctccctcccagggaagactgcttcttgcgtaacgccggccacagaaagagactccgatggacttacaccgggcagccttcaagatggagaactcatcctaccttcccaaccctctggcatccccagcactgatggtcctggcatccacggctgaggccagccgtgatgcttccatcccttgtcagcagccacgaccctttggtgtacctgtctcagttgacaaggacgtgcatattcctttcaccaacggttcctatacctttgcctctatgtaccatcggcaaggtggggtgccaggcacttttgccaatcgtgatttccccccttctctactacacctccaccctcaatttgctcccccaaatctagattgcaccccaatcagtatgctgaatcatagtggtgtgggggctttccggccctttgcctccaccgaggaccgggagagctatcagtcagcctttacgccggccaagcgacttaagaactgccatgacacagagtctccccacttgcgcttctcagatgcagatggcaaggaatatgactttgggacacagctgccatctagctcccccggttcactaaaggttgatgacactgggaagaagatttttgctgtctctggcctcatttctgatcgggaagcctcatctagcccagaggatcggaatgacagatgtaagtacagagcagcggcattgttcgacagccaggccccaatttgccccatctgccaggtcctgctgaggcccagtgagctgcaggagcatatggagcaggaactggagcagctagcccaactgccctcgagcaagaattcccttctgaaggatgccatggctccaggcaccccaaagtccctcctgttgtctgcttccatcaagagggaaggagagtctccaacggcatcaccccactcatctgccaccgatgacctccaccattcagacagataccagacctttctgcgagtacgagccaaccggcagacccgactgaatgctcggattgggaaaatgaaacggaggaagcaagatgaagggcaggtatgtcccctgtgcaaccgccccctggcaggatcggagcaggagatgagtaggcatgtggagcattgcctttctaagagggaaggctcctgcatggctgaggatgatgctgtggacatcgagcatgagaacaacaaccgctttgaggagtatgagtggtgtggacagaagcggatacgggccaccactctcctggaaggtggcttccgaggctctggcttcatcatgtgcagcggcaaagagaacccggacagtgatgctgacttggatgtggatggggatgacactctggagtatgggaagccacaatacacagaggctgatgtcatcccctgcacaggcgaggagcctggtgaagccaaggagagagaggcacttcggggcgcagtcctaaatggcggccctcccagcacgcgcatcacacctgagttctctaaatgggccagtgatgagatgccatccaccagcaatggtgaaagcagcaagcaggaggccatgcagaagacctgcaagaacagcgacatcgagaaaatcaccgaagattcagctgtgaccacgtttgaggctctgaaggctcgggtcagagaacttgaacggcagctatctcgtggggaccgttacaaatgcctcatctgcatggactcgtactcgatgcccctaacgtccatccagtgttggcacgtgcactgcgaggagtgctggctgcggaccctgggtgccaagaagctctgccctcagtgcaacacgatcacagcgcccggagacctgcggaggatctacttgtgagctatctgccccaggcaggcctcgcctccagcagccccacctgcccccagcctctgtgacagtgaccgtctccctttgtacatacttgcacacaggttccccatgtacatacatgcacatactcaaacatgcgtacacacacacacatttacacacgcaggactctggagccagagtagaggctgtggcccaggcactacctgctggctcccacctatggtttgggggccatacctgttccagctctgttcccagggtggggcagggaggtgggggttgggggagtagtggggcacggctcctaagatccagcccccatactgacagacggacagacagacatgcaaacaccagactgaagcacatgtaatatagaccgtgtatgtttacaatgttgtgtataaatgggacaactcctcgccctctacctgtcccctccccctttggttgtatgattttcttcttttttaagaacccctggaagcagcgcctccttcagggttggctgggagctcggcccatccacctcttggggtacctgcctctctctctcctgtggtgtcccttccctctcccatgtgctcggtgttcagtggtgtatatttcttctcccagacatggggcacacgccccaagggacatgatcctctccttagtcttagctcatggggctctttataaggagttggggggtagaggcaggaaatgggaaccgagctgaagcagaggctgagttagggggctagaggacagtgctcctggccacccagcctctgctgagaaccattcctgggattagagctgcctttcccagggaaaaagtgtcgtctccccgaccctcccgtgggccctgtggtgtgatgctgtgtctgtatattctatacaaaggtacttgtcctttccctttgtaaactacatttgacatggattaaaccagtataaacagtt

SEQ ID NO: 2808 - DNA, 650 bp, Homo sapiens
  source 1..650: mol_type = genomic DNA
gttctccgctgaggaggagcggggcagaggagggaggcagcgggtgagagttcagagttcagcagcagcagcccgagcccatgattcccatatgccctgtagtttctttcacctatgtgcccagccggctgggggaagatgccaaaatggcgaccggcaactactttggattcacccacagcggggcggcggcggcggcggctgcggcccaatatagccagcagccagcttcgggtgtagcctattctcatccaactacagttgctagctacactgtccatcaggctccagtagctgctcacacagttactgctgcctatgcaccagcagccgccacagttgcagttgccaggcctgctccagtagctgttgcagctgctgcaacagctgctgcttatggaggctaccccactgcacacacagcaactgactatggttatactcagaggcaacaagaagcaccaccaccaccacccccagctactacacaaaactaccaggattcatactcatatgtaaggtccacagctcctgctgtagcttatgatagtaagcaatactaccaacaaccagcagcaacagaagcaggcagcagcagcagctgctgctgctgctgcaacagctgcctggacagggaccacctttactaa

SEQ ID NO: 2809 - DNA, 991 bp, Homo sapiens
  source 1..991: mol_type = genomic DNA
ggccgttacgcgattttcgctcccgcgggcagcgcctctcaggccactcccgagggaccccgaggacgcactcgggccccagggcgacggttcaaacgggccattgtgcgcccccggggtcccccggcccctgcagggctacttgggcgcagagccgcggagggtctccgttcctagaggtcctcctatcccgggctgcctgagtcctcgccagcatccgccctctcccactcccatccttcctggatccgcctctcggttcccgagggacagtcccgaccgcaaacccacgtagagtaaggaatgtgggacaggcgacagaagtggcatacggtcctgcgttatccctccgtctcgccacaccttgtgtctccatctctccccacttccttccctccgtctgtcatctgtcatccccggtcgctctaagaccaggattccaattcgcctagtgaggaatctcactaggggaatttatcgcgacatcataaattaacgggttcattttgactgaaaaagcgaaggacttttttcaggcagaaaacaagtctcgtctggacggatgtgatcttcgtggtggaaagctaaattttaaaaccaccccaatggatgcagacagtgatgttgcattggacattctaattacaaatgtagtctgtgtttttagaacaagatgtcatttaaacttaaggaagattgctttggaaggagcaaatgtaatttataaacgtgatgttggaaaagtattaatgaagcttagaaaacctagaattacagctacaatttggtcctcaggaaaaattatttgcactggagcaacaagtgaagaagaagctaaatttggtgccagacgcttagcccgtagtctgcagaaactaggttttcaggtaatatttacagattttaaggttgttaacgttctggcagtgtgtaacatgccatttgaaatccgtttgccagaattcacaaagaacaatagacctcatgccag

SEQ ID NO: 2810 - DNA, 567 bp, Homo sapiens
  source 1..567: mol_type = genomic DNA
aggctaggcgtggacccaactggcgaggctgctggggttgcagcgggacagttggggcggccccgcaggcccaggtttttgaaaataaagttaattcagagaaggtaaaactttctcttcggaatttcccacataatgattatgaggatgtttttgaagagccttcagaaagtggcagtgatcccagcatgtggacagccagaggccccttcagaagagacaggtggagcagtgaggatgaggaggctgcagggccatcacaggctctctcccctctactttctgatacgcgcaaaattgtttctgaaggagaactagatcagttggctcagattcggccattaatattcaattttcatgagcagacagccatcaaggattgtttgaaaatccttgaggaaaaaacagcagcgtatgatatcatgcaggaatttatggctttagaacttaagaatctgcctggtgagttcaactctgggaatcaaccaagcaacagagaaaaaaacagataccgagatattcttccatttcaacatcatggatatagtggcccaaatgagagaacaa

SEQ ID NO: 2811 - DNA, 4649 bp, Homo sapiens
  source 1..4649: mol_type = genomic DNA
gaggatgagtatatccagagtcataacttcgattctgcaatgaaagtcaccagccaagggcagccctccccagtggagccccgaggacccttttatttctgcaggttattgcttgatgacttgggaatgaattcttgggacagaaggaagaattttcatctattgaagaaaaattcaaaattattgagagagctgaaaaatttggactcccgccagtgccgtgagacacacaaaatcgcagtgttttacattgctgaaggtcaagaagacaagtgttcaatcctctctaatgaaagaggaagccaagcatatgaagactttgttgctggacttggatgggaggtggatctctccacccactgtgggttcatgggtggccttcagcgcaatggcagcaccgggcagacggccccttactatgctacctcaactgtggaagtgattttccatgtttccactcgaatgccgtcagactcagatgattccctcaccaaaaagcttcgtcacttggggaatgacgaggtccatatcgtctggtctgaacactccagagactaccgcaggggtattatcccaactgcctttggagatgtttcaatcattatttacccaatgaagaatcacatgttcttcatcgcgataacgaagaaacctgaggttccattttttgggcctctgtttgatggagccatagtgagtgggaagctgctgccaagccttgtatgtgccacgtgcatcaacgccagcagggctgtgaagtgcctcatcccactctaccagagcttctatgaagagcgagctctgtatctcgaagcaataattcagaaccaccgcgaagtaatgacattcgaggatttcgcagcccaagtcttttctccctctcccagctactccctcagcggaacggattaaaacacgtaaaggtctcatttcaatatttgagcaaggggccctggcctccagtctgagtgctgacctcgaagagcccctgagtgaggaggagacagaacaccctctcctgcctctgccccgagccactaaacccagaatctccaggaaatttcgttgctgtactagtgccctcagcaggtcttcccattagtggacttctgaagcccatggtgaatcccactaccgtgtctcagatgggactcaaactaggctgtatcatcttgtcctgaaacctcacaaaccttggacttccaaagaagaaaagaaaaagtcaccaaaaaccagagatgaacccactgacacgtgggcactggtgtggctgctctgggcagatgacagcaggaaaagattctgcgctttcagggagggggcagagggcagcttgcttctgcaccccaagttgtttcttctcatttatgaacccaagcatgattcacaaaggggctggcaaaacaattgtctaattgaggaatctgatctgcattgattttgctagttccttttatgttaggatttatggtttactcaaaaatttcatcatcatggaaattggctttccccggggtcttttgcccaggagaagttttacctcagttgtccagtgttttcccacatggtacctgacgcccgctaactaagcagaggctctcctcaccacgcagaggcgcttcaggtcatgacagtgatgcccctatcttagaacactcagaagattccagaaatacagggtcctgtccttgcataagttcctgcaggacaggaagtgtcccaaggctcaaaacaacacagaccacatccacacaaaaggcgcatgccggcttcaggcgctaggctgagacgggtaccccccgaatggccttgtgcctccaaaagcctcacgctgcaactttgctgctcctgtctgttgcccagagaggcctcacacaggcctcagaaatgtttcttgtcacacaaagcttttggtagccgattccaagcgagggatttaatccttacatttttgcccatttggctccaaggaaggcttattagacctgtttttttgttgttgttgtttttttttcttaaaaacaaaatgaatgaatgaatgaaaagagaagcaatggtgagccctctcctgctggggcgccctgggtgggccttgcccgtcctgcagcagagaaatcagtcagcagcgaagagctgctggcgcaggccccaggctgtgtcctggacccttgacctgcctcagagctagaggtttgctccaccccgcacttcacttgggaagtaaatccaagaagcttaccagagtccatcgccactgcgcaggctttgttctcacagcggccaggtacagagcaacgccctgcagtgggaagggacagcagcacgagagacgcagcccctaactcagggcttatgatgggtgggctggtcctgggaaaggcgggccctgtgcgggaggcctccccaccttcctgtgccctctgccctctgcccttgcacacacttgttaccttcaggctgcttggccacccaggcctgaagaagccttctgaggctctcaccccatcagaacggccattttcactgaggagccagttttttccatttgccatggagctggtttggctggaacctggcctttgtagggaaaacggggagactcaggagccagactcactcttgggacaaatgagaaagagctgagccagtcgttcctgtcggaagggcgggcctgctcatcctggcgagaatttgcttttctgctttataggggattgcaggccaggcccactgacaggagcaccttgagaaccacctgaacagaagagaatgagggtgccccaaagtggaaggaagcttctggcccctgggccgttttgggaagggcccaggatactcacgggggctgaagggcaatgtgaagagtgactgcaagtcctggcattttctgtggtgtcagcaaatgcccctttattttaaatgattccagacatctgggcagcatagcttggccaccatcactcaggcttgatcctgctgttgagctgctcctgtctcctgtttacctcactcctgttgggaaggccatcgcatgctcctaggctccagagtcccctgtaggtctctaccagcaggtcgcctctgggagaacgtttcatcttcaggctctagaaactcctgttgcggaattgctggctttagtagaaaagatatgtcaggatttagaaatcgtattgaactctcctggacttctgctccatgatttcattttgctttcacgaaccagcgatccctaccttggggtgggaaattcaattgtaggcagcaaataactcaaccctcctgtaacccctgaggattataacgaccccatgacccccgatgacagccagcagtttggtgactagagttttttgagcctgccattctcagtagcagctttggtctggagatggaacgtggagcagggaatctgacagccacgtttctcgtgatcacgtggactggagttgtttttgttatctggggtggaaaattgcaatgatcaagtttcttttttattttttttttacttagaaaagcaaatattgtgtttttgtaataaatccctttcagcaaaattgcggaggatcattcatccactagggccccacctgaggcacagcgctgactcatcacggtggtaccagtaggtcagccatctggaaacagaagtggccctaattgggccaaaatgtggtaagactcgctggcctcaggcagggccaggccagttccctcacttctctgcacacctattcccagattccatccagagcaaagctgatgtttatcgtctcattgtacttaggctttcgtactttaaaaaattatgactttttaaaaataagccttcagcagacagaagtgaagaaatttagcctgggttgcctcagcaacaaagtctgcggttcctaagagccacatgttggggaagtggggtgacccaaacttggtgacataggttgattgatcagaccctcagccttacaagcaagagctcatgcagatccacagagccatgcacatcctgtcttcctgaccttcctcaggtggcaccacctgcgccccatggacctgctgtatcggtgtcatgtggaggtctgatgaatcctttaaaacctaactgtgatgtcgtaaatgtaactgtgctacctttatatctactgaagggcagcgtctgcatccgagggaaattcaacatgaaacaaccatcgttttagttgcactcagtctgtccatatgacatacacatgaagtgaatgtttccttatgttttcaggtctacaatgtttagtacatgtaaataaggaaaaaatttgataaatatggtaaattaagttatagcgtgtcatttgattcttattttgctgtctcttgttatttaattttcctaatgctccacatctaggttccttcctaggtggtgggaacaccttgcagacgtgtgtgcaccaggacacaccgcggcccaggcagccacaccgagaaagcacacatctccactgatggcagccacccgactctccagttaacctcttttactctttaattctgatttactgtgatgatttaataaagtggaaacacagcacttcagtgctatatgtttctctcattctcattatagtttataagaaaataaagttcaccctggcatctaataaaaa

SEQ ID NO: 2812 - DNA, 3535 bp, Homo sapiens
  source 1..3535: mol_type = genomic DNA
tagggcacgggaagggctcgctagaatgagctcttaaactggttgggtgtaagcggttttgggctagtctaaaccaaacaactgagaataaacgcggggttcctgcaggttgagagagtacctgtctgcaaatgtccagtagtgatggattgccttgtaggccccagagcaatcggggaagttagcattcttgttcaagaagctgctggttcacttagagctataaaagaatgttgtgagtttggattttcttccaaacgttcaggattgaggttagggctggtggtgagggatcatgtaaagaggtttgagtggctcagccttaggtcccggtgtggaaagcttattcttttggtgtcatcacgtggccgtgggaattatttagaatgtgatctgccctcatgagaagaaaggagctctgaagccgttgcagttcttcctccctatgtggaaaatcgaatttctggaaacatcctccgtattgggagattttgcctatgtaaaggctatccttattggctagcggcactaattactttaaaagtaggatggaagtacaagtatctcaagcatcattgggtttcgagctcacttctgtggaaaagagtttaagggagtggtctagactttccagggaagttattgcctggctgtgtccctctagtcctaattttatacttaactttcccccacctccttcagcctcatctgtttcaatggtgcaactcttttcatccccttttggttaccagtcaccttcaggccattcagaggaggaaagagaggggaatatgaagtcagccaagccccaagtgaaccacagtcagcatggggaaagccagcgggccttgagccccctgcagtctactctgagttctgctgcatctccttcccaagcgtatgagacctatattgaaaatggactcatatgccttaaacacaaaattagaaacatcgagaaaaagaagctcaaactggaggattataaggatcgcctgaaaagtggagagcatcttaatccagaccagttggaagctgtagagaaatatgaagaagtgctacataatttggaatttgccaaggagcttcaaaaaaccttttctgggttgagcctagatctactaaaagcgcaaaagaaggcccagagaagggagcacatgctaaaacttgaggctgagaagaaaaagcttcgaactatacttcaagttcagtatgtattgcagaacttgacacaggagcacgtacaaaaagacttcaaagggggtttgaatggtgcagtgtatttgccttcaaaagaacttgactacctcattaagttttcaaaactgacctgccctgaaagaaatgaaagtctgagtgttgaagaccagatggagcagtcatccttgtacttttgggaccttttggaaggtagtgagaaagcagtggtaggaacgacatacaaacacttgaaggatctactgtctaaattgctgaactcaggctattttgaaagtatcccagttcccaaaaatgccaaggaaaaggaagtaccactggaggaagaaatgctaatacaatcagagaaaaaaacacaattatcgaagactgaatctgtcaaagagtcagagtctctaatggaatttgcccagccagagatacaaccacaagagtttcttaacagacgctatatgacagaagtagattattcaaacaaacaaggcgaagagcaaccttgggaagcagattatgctagaaaaccaaatctcccaaaacgttgggatatgcttactgaaccagatggtcaagagaagaaacaggagtcctttaagtcctgggaggcttctggtaagcaccaggaggtatccaagcctgcagtttccttagaacagaggaaacaagacacctcaaaactcaggtctactctgccggaagagcagaagaagcaggagatctccaaatccaagccatctcctagccagtggaagcaagatacacctaaatccaaagcagggtatgttcaagaggaacaaaagaaacaggagacaccaaagctgtggccagttcagctgcagaaagaacaagatccaaagaagcaaactccaaagtcttggacaccttccatgcagagcgaacagaacaccaccaagtcatggaccactcccatgtgtgaagaacaggattcaaaacagccagagactccaaaatcctgggaaaacaatgttgagagtcaaaaacactctttaacatcacagtcacagatttctccaaagtcctggggagtagctacagcaagcctcataccaaatgaccagctgctgcccaggaagttgaacacagaacccaaagatgtgcctaagcctgtgcatcagcctgtaggttcttcctctacccttccgaaggatccagtattgaggaaagaaaaactgcaggatctgatgactcagattcaaggaacttgtaactttatgcaagagtctgttcttgactttgacaaaccttcaagtgcaattccaacgtcacaaccgccttcagctactccaggtagccccgtagcatctaaagaacaaaatctgtccagtcaaagtgattttcttcaagagccgttacaggctacttcttctccagttacttgtagctcaaatgcttgcttggttactaccgatcaggcttcttctggatctgaaacagagtttatgacctcagagactcctgaggcagcaattcccccaggcaagcaaccgtcttcactagcttctccaaatcctcccatggcaaagggctctgaacagggcttccagtcacctccagcaagtagtagttcagtaaccattaacacagcaccctttcaagccatgcagacagtatttaacgttaatgcacctctgcctccacgaaaagaacaagaaataaaagaatccccttattcacctggctacaatcaaagttttaccacagcaagtacacaaacaccaccccagtgccaactgccatctatacatgtagaacaaactgtccattctcaagagactgcaaattatcatcctgatggaactattcaagtaagcaatggtagccttgccttttacccagcacagacgaatgtgtttcccagacctactcagccatttgtcaatagccggggatctgttagaggatgtactcgtggtgggagattaataaccaattcctatcggtcccctggtggttataaaggttttgatacttatagaggactcccttcaatttccaatggaaattatagccagctgcagttccaagctagagagtattctggagcaccttattcccaaagggataatttccagcagtgttataagcgaggagggacatctggtggtccacgagcaaattcgagagctaactgcttcattatgagaaactcactgttgctaataaaacagcagggtggagtgattcttctcaggtgagcagcccagaaagagacaacgaaacctttaacagtggtgactctggacaaggagactcccgtagcatgacccctgtggatgtgccagtgacaaatccagcagcc

SEQ ID NO: 2813 - DNA, 2724 bp, Homo sapiens
  source 1..2724: mol_type = genomic DNA
aataacaatggaacatatgatggtattgcatattttgagtgcaaagaaaagcatggtatttttgctcctcctcaaaaaatatctcacattccagaaaactttgatgactatgtagacattaatgaagatgaagactgttactcagatgaacgatatcagtgctataatcaagagcaaaatgatacagagggtccaaaagacagagaaaaggatgtcagtgaatatttttatgagaaatccctacctagtgtgaatgatatagaagcctcagttaatagaagtagaagccttaaaatagaaacagacaatgtacaggacatttctggggtacttgaagcccatgttcaccagcagtcttcagtggattcacagatttcttcaaaggaaaacaaagacctcatttctgatgccacagaaaaggtttccatcgctgcagaagatgacactttagacaataccttttccgaagaattggagaagcaacagcagtttacagaagaggaagacaacctatatgctgaagcttcagaaaagctttgtacaccacttctggatcttttaacaagagaaaaaaaccaactggaagcccagctgaagtcatcactaaatgaggaaaaaaagtcaaaacaacaactggaaaaaatcagcttactgacagacagtttactaaaagtctttgtaaaggacacagtcaatcaactacaacaaatcaaaaaaaccagggatgagaaaatccagcttagcaatcaggagcttcttggtgatgaccaaaagaaagtaacaccccaagacctatcccaaaatgttgaggaacagtcgccaagtatttcaggttgcttcttaagttctgaattggaagatgaaaaagaagagatttcctctccagatatgtgtcccagaccggagagcccagtatttggtgccagtgggcaggaagaacttgctaagagacttgctgaacttgaactcagccgggagttcctgagcgcgttaggagatgatcaagactggtttgatgaagactttggtttgagctcttctcacaagatccaaaaaaataaggcagaagaaaccattgtacctctaatggcagaacctaaaagagtaacccaacaaccatgtgaaacattattggcagtcccccatactgcagaagaagtagagattcttgtacataatgcagcagaagaactttggaaatggaaagaattaggccacgatcttcatagcatcagtattcctacaaaactgcttggctgtgccagtaaaggtctagatatagaaagcactagtaaaagggtctacaaacaggcggtttttgatttaacaaaagagatttttgaggaaatatttgctgaggatcccaacttaaatcaacctgtctggatgaagccatgtagaatcaactctagttatttccgacgagtgaaaaatccaaataaccttgatgaaatcaagagcttcatagcaagtgaagtactcaagttgttcagtcttaaaaaggagccaaaccacaaaacagattggcagaaaatgatgaaatttggaagaaagaaaagagaccgagtggatcatatcctggttcaggagctccatgaggaggaggcacagtgggtgaactatgatgaggatgagttgtgtgtgaaaatgcagctagccgacgggatctttgagaccctgatcaaagatactattgatgttctgaatcagatcagtgaaaagcaggggagaatgctacttgtgtgacatcttgcaaataaatcgaacgctgagtgctaatcattgcttctcacaactattacctgcatctgaaaaaaaatctatagactccagctgctacattagagcataagagatgctctcctgggacctcagtaccctgccttcttgactggtttccgttcatcagtcctgtccctcttcaagtaatctagaagaatgtggatactcttaggcgtgaatgtaaatgccttaatattgaaggtcctggttagaagcatgatacaagacatctactggattcatatttacaaatatcctggaatgttatagcttcaaagtatattagaaaaaccccaaagatggtataatctttaagtgtgcacgttcgtttatttctgcatcttccctccaaacttgcctttgcatcttaaatatttcactatgcacactcccattcctcttgggtttcatcttgtcgtttaagaaatgtactgaaataatcattggaatatttgcattttgcacaatgactggtatgatagctcttgacaaataaggaaagcactgaaatgttgtgattgggtctcgggaaatgctcagattgatgtcttaccagcatttcttctgggcttgtgatgttgagctgtagtcttgtagccataatgagcaaattgactaagagaagcaaaggtttcttggggttattaaccagtagtgtggaaatactagttttatgtggccaaggaaaagcaaaggcttttcttttcagtttgtgttatttggaagacagaaaaacatcttgtctacatcctttggctgtttgtaggatcacgttgtccttacgatactgaaactttacagctgctgtaaattttttataaatgaatttcaaaatgttataatgggactgtaggttgtttttctacatcttcattatttggacctaaaaccagtttttaataagaaagtttatctttactctttctgaaattatgactccag

SEQ ID NO: 2814 - DNA, 535 bp, Homo sapiens
  source 1..535: mol_type = genomic DNA
cggagggaggcgggactcaagagtagccttcctcgaggacctgcctttcccatttgctgcctgaagttaatgtttcttgctggccaaatcagggacatgccggcattccccacccacagccagggggcttgggttctgagctgatggggtacccccctctgcagagcgggatgagtgggtgttccggcagggatgtggtcattgacggccagtgagggcgagagtaccacggcccacttcttccttggagctggagatgaggggctgggcacccgtggaataggcatgaggccagaagagagtgacagcgagctccttgaggatgaggaggatgaagtgcctcctgaacctcagatcattgttggcatctgtgccatgaccaagaaatccaagtccaagccaatgactcaaatcctagagcgactctgcagatttgactacctgactgttgtcattctgggagaagatgtaatccttaatgaacctgtggaaaactggccatcctgccactgcctcatctctttccactccaaag

SEQ ID NO: 2815 - DNA, 1289 bp, Homo sapiens
  source 1..1289: mol_type = genomic DNA
acgccagccttgatgatctgaccatggaggctgagtccttcccatgcctcctacggccattttttaaagaaagatcttgtgctttgcgcccagccttccatacagcaaagtgcgagaaactacaaaaggagaaggaggagctggagaggcggttcgaggcggaaatggcgcgcctgcaggaggagcacggtgaccagctgctgagcatccggtgtcaacaccaggagcaggtggaagatctcaccgccagccatgatgctgctctcctagagatggaaaataaccacacagttgccatcacaatcctgcaggatgaccacgaccacaaagtccaagaattgatgtccactcatgagcttgaaaagaaagaattggaagaaaattttgaaaaactgcggctgtcattgcaggaccaggtggacacgctgaccttccagagccagtctctgcgggacagagcccgccgcttcgaagaggccttgaggaagaacacagaggagcagctggagattgcattggctccttatcagcacttggaagaagacatgaagagtctgaagcaggtattagaaatgaagaatcagcaaatacacgagcaagaaaagaagattcttgagctggaaaagctggcagaaaagaacattatcctagaagaaaagatccaggttctccaacagcagaacgaagacctcaaagcaaggattgaccaaaacacagttgtcaccagacagctgtcggaggaaaatgctaacctccaggaatatgttgagaaggaaacccaggagaagaagagattgagccgaaccaatgaagagctgctttggaagctccaaactggggacccgaccagtccgattaaactctcgcccacatctcccgtttaccgcggctcctcctcggggccctcctctccggccagagtcagcacaacacccagatgacgccactacacggcctgcgggagctccggcttctcgtcctccggtctccaccctgagggagcaccgacccggtgccgccggagctggccctgtgcgcatgctcagtagctgcgaatgcatcctaggcgcgtcctcctctgatccccgtgtaagactgccctggtgtcggcacttaggaatgtgtaaatggtaaagtctgatgtgcaaacgttttaccatagttagagccaaaagaaagacacttgcaattgttcttgagcaatgaactttcactgcagaatttcaggttagttacaaaaagctcagttttcaatatacattgaataatcattgtgtactgcaccgata

SEQ ID NO: 2816 - DNA, 2749 bp, Homo sapiens
  source 1..2749: mol_type = genomic DNA
acgctcacttccgccgccgtcgggggctgcgcgggggctgtggctccgggactgcggttaaaattgcagagttttctcgtactccagaagactttctaaagaaatatgatgaactgaaatctaaaaatacaaggaaccttgacccgctggtgtacctgttgtcaaagctcacggaagacaaagagactctgcagtacttacaacagaatgcaaaagaaagagctgagcttgcagccgctgctgtgggcagcagtaccaccagcatcaacgtccctgccgcggcctccaagatctccatgcaggagcttgaggaactgaggaagcagcttggcagcgtggccacaggctccacgctgcagcagtctctggaacttaaaagaaagatgcttcgagacaagcagaacaaaaaaaattcaggccagcacctccccatcttcccagcatgggtgtatgagagacctgccctgatcggggatttcctgattggtgctggcatcagcacagacaccgctttgccgataggcacgttgcccctggcctcgcaggagtcggccgtggtggaggacctgctgtacgtgctggtgggcgtggacgggaggtacgtcagtgctcagcccctggctgggaggcagagccggaccttcctcgtggaccccaacctggacctgtccatcagggagctggtgcacaggatcctcccagtggccgccagctactccgctgtgaccaggttcattgaagagaagtcttccttcgagtacgggcaggtgaaccacgccctggcggccgccatgcgcaccctggtgaaggagcacctgattctggtgtcacagctggagcagctgcacaggcagggcctcctttcgctgcagaagctctggttctacatccagccagccatgcgcaccatggacatcctggcctccctcgccacctcggtggacaaaggcgaatgtcttggggggtccacgctgagcctgctccacgacaggagcttcagctacacaggggacagccaggcgcaggagctatgcctgtacctaaccaaggcggccagtgctccctacttcgaggttctggagaagtggatctacaggggcatcatccacgacccatacagtgagtttatggtcgaggagcacgagctgcggaaggagaggatccaggaggattacaacgacaagtactgggaccagcggtacaccatcgtccagcagcagatcccgtccttcctgcagaaaatggcggacaagatcctcagcacaggaaaatatctaaatgtggtcagagagtgtggccatgacgtcacctgcccggtggctaaagagatcatctacacgttaaaagagcgggcgtatgtggagcagatcgagaaggcgtttaactacgccagcaaggtgctgctggacttcctgatggaggagaaggagctggtggctcacctcaggtccatcaagcgctacttcctcatggaccagggcgacttcttcgtgcacttcatggacctcgcggaggaggagctccggaagccggtggaggacatcacgccccctcgcctggaagcgctcctggagctggcgctgcgcatgagcacggccaacactgaccccttcaaggacgacctcaagatcgacctgatgccccatgacctcatcactcagctcttgcgcgtcctggccatcgagaccaagcaggagaaggcgatggcgcacgccgaccccacggagctggcgctgagcggcctggaggccttctctttcgactacatcgtcaagtggcccctttcgctcatcatcaacaggaaagccctcactcgctaccagatgctcttcaggcacatgttctactgcaagcacgtggagcggcagctctgcagcgtctggatcagcaacaaaaccgccaagcagcactcgctgcactccgcccagtggtttgctggggctttcactctgcggcagcgaatgctcaacttcgtccagaatattcaatactacatgatgtttgaagtgatggaaccgacctggcacatcctggagaaaaacctgaaatccgcctccaacattgacgacgtccttggccaccacacaggcttcctggacacctgcctgaaggactgcatgctcaccaaccccgagctgctgaaggtcttctccaagctcatgtctgtgtgcgtcatgttcaccaactgcatgcagaaatttacacagagcatgaaattagatggcgagctgggcgggcagacgctggagcacagcaccgtcctggggctgcccgcaggggccgaggagcgggcccggaaggagctcgccaggaagcacctggctgagcacgcagacactgtgcagctggtgtccggcttcgaggccaccatcaacaagtttgacaagaacttctcagcccacctgctggacctcctggcccggctgagcatctatagcaccagtgactgtgagcacggcatggccagcgtcatctccaggcttgacttcaatggtttctacacggagcgcctggagcgcctgtctgcagagaggagccagaaggccaccccccaagtgcctgtcctgcgggggcccccggctcctgcacccagggtcgcagtcaccgcacagtgagccctggctgtgacaggaaggaagggtgtggggtcagcagggactggtgcaaatgggtccagaattttcaaatcgaatgctctgtgttctgtctttgcagtttaaatataaagcaggaatgattgactcagctc

SEQ ID NO: 2817 - DNA, 1468 bp, Homo sapiens
  source 1..1468: mol_type = genomic DNA
gggccgtgcgcggcggccgtgcgggcacgccatggacttcaacatgaagaagctggcgtcggacgcgggcatcttcttcacccgggcggtgcagttcacggaggagaaatttggccaggctgagaagactgagcttgatgcccactttgaaaaccttctggcccgggcagacagcaccaagaactggacagagaagatcttgaggcagacagaggtgctgctgcagcccaaccccagtgcccgagtggaggagttcctgtatgagaagctggacaggaaggtcccctcaagggtcaccaacggggagctgctggctcagtacatggcagacgcggccagtgagctggggccgaccaccccctatgggaagacactgatcaaggtggcagaagctgaaaagcaactgggagccgcggagagggattttatccacacggcctccatcagcttcctcacacccttgcgcaacttcctggagggggactggaagaccatctcgaaggagaggcggctcctccaaaaccggcgtctggacttggatgcctgcaaagcgaggctgaagaaggccaaggctgcagaagccaaagccacgacggtgcctgactttcaggagactagacctcgtaattacattctctcggccagcgcctccgcgctctggaatgatgaagtggacaaggccgagcaggagctccgcgtggcccagacagagtttgaccggcaagcagaagtgacccgtctcttgctggagggaatcagtagcactcacgtgaaccacctgcgctgcctccacgagttcgtcaagtctcagacaacctactacgcacagtgctaccgccacatgctggacttgcagaagcagctgggcagctcccagggtgccatatttcccggcaccttcgtgggcaccacagagcccgcctccccacccctgagcagcacctcacccaccactgctgcggccactatgcctgtggtgccctctgtggccagcctggcccctccgggggaggcctcgctctgcctggaagaggtggccccccctgccagtgggacccgcaaagctcgggtgctctatgactacgaggcagccgacagcagtgagctggccctgctggctgatgagctcatcactgtctacagcctgcctggcatggaccctgactggctcattggcgagagaggcaacaagaagggcaaggtccctgtcacctacttggaactgctcagctaggcaggtgcccccatcccccccgcattctggcctaggcaggagaggatgggcgcagccctgccacttaacttgtttgttggtgacacagttgttcagagtggggagaattcaccccattctgtccctgcccctagtcacctagctgtgagggtgcctgaggctgaatggctccacccctcccccagccctgcttctgacctgtggctctggagcccctgcccctgcctgcatccc

SEQ ID NO: 2818 - DNA, 2340 bp, Homo sapiens
  source 1..2340: mol_type = genomic DNA
aaaaggcctcagcctgatgcccacaggcagagcacacaggcagccgagtggccgcagccctgcagtggaggagtgcctcgtgcacctggtggttttctgcaccccaacaggtgtgtctggccactgctcctctcactgcagcccccgctgctccacaccatgcccttctggcccatcaggtgtctgaagaggagcaggcgtatgcccaggggtggtgccggggagcgggagaaggtgccggccaaccccgaggcgctcctgctcatggccagctcccagcgtgacatggaggactgggtgcaggccatccgccgagtcatctgggccccgctgggcggagggatctttgggcagcgcctagaggaaacagtccaccacgagcggaagtatggcccccgcctggcgcccctgctggtggagcagtgtgtggacttcatccgggagcgcgggctcactgaggaggggctgttccgcatgccaggccaggccaacctggtgagggacctgcaggattccttcgactgtggggagaagccactgtttgacagcacaacagacgtgcacacggtggcctccctgctgaagctgtacctgcgggagctccccgagcccgtggtccccttcgccaggtacgaggacttcctcagctgcgcccagctgctcaccaaggacgagggggagggcactctggagttggctaaacaagtgagcaaccttcctcaggcaaattacaacctgctcagatacatctgcaagtttctggatgaagttcaggcatactcaaatgtcaacaagatgagtgtccagaatctggcaaccgtttttggacctaacattctgcggccacaggtagaggacccagtaaccatcatggaaggcacttccctcgtccagcacctgatgaccgtcctcatccgcaaacacagccagctcttcacggcaccggtcccggaagggcccacctccccgcgcgggggcctgcaatgcgcagtggggtggggctccgaggaggtcaccagggacagccaaggagagcccggcggccccggcctgcccgcgcacaggacctcttccctggacggggcggccgtggcggtgctctccagaacagcccccacggggccggggagccggtgcagccctgggaagaaggtgcagaccctgcccagttggaagtcctccttccggcagccgaggtccctatcgggaagcccgaaggggggcggctcatccctggaggtgcccatcatctcctccggcgggaactggcttatgaacgggctgtcctccctgcgcggacaccgccgggcctcgtcgggagaccggctcaaggactcgggctccgtgcagagactctccacctacgacaatgtgcccgcgccgggcctggtccccggcatacccagcgtggccagtatggcgtggtccggggcctcgtccagcgagtcgtcggtggggggctcactcagcagctgcacggcctgccgcgccagcgactcgtctgcccgcagttccctgcacaccgactgggccctggagccctccccgctccccagcagcagcgaggaccccaagtccctggacctggaccacagcatggacgaggcgggcgcgggtgccagcaacagcgagcccagcgagccggacagccccacccgggaacacgcgcgccgctccgaggccttacaggggctggtcactgagctcagggccgagctgtgccgccagcggactgagtacgagaggagtgtgaaaagaatcgaagaagggagtgctgacctgagaaaacgaatgtcccggttagaagaagaactggaccaggaaaagaaaaaatacatcatgctggaaataaagctgcggaactctgaacgggcgcgggaggatgcggagaggaggaaccagctgttgcagagggaaatggaggagtttttttcgaccctaggaagcttgactgttggggcaaaaggtgccagggccccaaagtaaaaggaatggcagagctcacttctgtaccacgtctgctggtctccagccttgtatggagttagaagcgtctgtatctctggagcagccaggcgctctggagccagctggagagagagagatcctgatacctctgtggggactgtggggacttttgggaccccacacactccaggtgggatcagatgctgctccaaccatgcagttcctggtgagggtcagaaggggacggtaccaagagtagcgcttagcccttacccaggaaatatccttcatggccacagaaatggagggcgcccaggatccaggcagccaccgggaacagtcagctttctttattaaatgtgctcacaaagc

SEQ ID NO: 2819 - DNA, 1943 bp, Homo sapiens
  source 1..1943: mol_type = genomic DNA
gaaaatgagggttatattaaaaagctcctggagctttttcatgtgtgtgaagatttggaaaatattgaaggactgcaccacttgtatgaaattatcaaaggcatctttctcttgaatcgaactgctctttttgaagttatgttctctgaagaatgtataatggacgtcattggatgtttagaatatgatcctgctttatcacaaccacgaaaacacagggaatttctaacaaaaacagccaagtttaaagaagtgattcccatatcagatcctgagctgaaacaaaaaattcatcagacatacagagttcagtatatacaagatatggttctaccaactccttcggtctttgaagaaaacatgttatcaacacttcactcttttatctttttcaataaggtagagattgttggcatgttgcaggaagatgaaaaatttctgacagatttgtttgcacaactaacagatgaagcaacagatgaggaaaaaagacaggaattggttaactttttaaaagaattttgtgcgttttcccaaacgctacagcctcaaaacagagatgcttttttcaagactttgtcaaacatgggcatattaccagctttagaagtcatccttggcatggatgatacacaggtgcgaagtgctgctactgatatattctcatacttggttgaatataatccatccatggtacgagagtttgtcatgcaggaggcacaacagaatgatgatgtaagtaagaagttaacagagcaaaaaataaccagcaaggtaaatattatttgtactaatagtaagtatttatacataggaagctataactgtttttattattcattttaagatttaattgttgctgtttgggaaaagtgtagccataatatcagacagcttattgttcccctaaattggttcctgtctcagtttatcaatttgtcctacagcaactatttatgttcatttaaattgccttttaaaatattcatgtcagtttttttttgttttgttttgttttaattctgaagtcaacttgctatattgtgttttttaaatcatttagtcaatcaattcttgtatctggggaattaagagtaagttacctaggaaaacattgactttagggtagattctcaaaatcgccaagaatgaagaaatgtagcacagtcccttaaaatatgaagggtgctgtttctttactgcctagccatagagaacaagctgttacgttgttcacaaacactcacgttagcatctgagatataccagattttaaagtagtagagaatatatcctggtaatgtgaagggtgcgcctggatcacatagtgcgtgacatgtgagagcactaaatgtgtgtgctctcctttattttaaaataattgaaccaatgattctgattttttcctgcttcccccataacaatttggaagcaactttttacgtaagaatgagtaagaaggacctgctctcaggtccttcttaagggaggaggggaataaagatcccctaaggaaaaaaaaaaaatctgtttagaattccagcctgtggtatttttacgaaataggaaaatagactgtcttactttttgaaaagatcctatttaatgtattgtgatgtcaaaaggaaatggaatgccatgtaactgctatgtttaagtttttatttttatagtgcaggataggtgcaaaaaagcaccagtttgaactgttgtgtcatgtttttcttttataaaatattaacatcggcctcagcaacatagcaagaccctcctttagtacaaaattaatttttaaaacttagatatggtggcatgcacccatagtcccagatactcaggaggatgagaaggaagagtctcttaagaccaggagtttgactctgcagtgagctatgattgctccactgcactccagtctgggtgacgaagccagaccccatctc

SEQ ID NO: 2820 - DNA, 4251 bp, Homo sapiens
  source 1..4251: mol_type = genomic DNA
gtctataagggtcgacatgttaaaacgggtcagttggcagccatcaaagttatggatgtcactgaggatgaagaggaagaaatcaaactggagataaatatgctaaagaaatactctcatcacagaaacattgcaacatattatggtgctttcatcaaaaagagccctccaggacatgatgaccaactctggcttgttatggagttctgtggggctgggtccattacagaccttgtgaagaacaccaaagggaacacactcaaagaagactggatcgcttacatctccagagaaatcctgaggggactggcacatcttcacattcatcatgtgattcaccgggatatcaagggccagaatgtgttgctgactgagaatgcagaggtgaaacttgttgactttggtgtgagtgctcagctggacaggactgtggggcggagaaatacgttcataggcactccctactggatggctcctgaggtcatcgcctgtgatgagaacccagatgccacctatgattacagaagtgatctttggtcttgtggcattacagccattgagatggcagaaggtgctccccctctctgtgacatgcatccaatgagagcactgtttctcattcccagaaaccctcctccccggctgaagtcaaaaaaatggtcgaagaagttttttagttttatagaagggtgcctggtgaagaattacatgcagcggccctctacagagcagcttttgaaacatccttttataagggatcagccaaatgaaaggcaagttagaatccagcttaaggatcatatagatcgtaccaggaagaagagaggcgagaaagatgaaactgagtatgagtacagtgggagtgaggaagaagaggaggaagtgcctgaacaggaaggagagccaagttccattgtgaacgtgcctggtgagtctactcttcgccgagatttcctgagactgcagcaggagaacaaggaacgttccgaggctcttcggagacaacagttactacaggagcaacagctccgggagcaggaagaatataaaaggcaactgctggcagagagacagaagcggattgagcagcagaaagaacagaggcgacggctagaagagcaacaaaggagagagcgggaagctagaaggcagcaggaacgtgaacagcgaaggagagaacaagaagaaaagaggcgtctagaggagttggagagaaggcgcaaagaagaagaggagaggagacgggcagaagaagaaaagaggagagttgaaagagaacaggagtatatcaggcgacagctagaagaggagcagcggcacttggaagtccttcagcagcagctgctccaggagcaggccatgttactgcatgaccataggaggccgcacccgcagcactcgcagcagccgccaccaccgcagcaggaaaggagcaagccaagcttccatgctcccgagcccaaagcccactacgagcctgctgaccgagcgcgagaggtggaagatagatttaggaaaactaaccacagctcccctgaagcccagtctaagcagacaggcagagtattggagccaccagtgccttcccgatcagagtctttttccaatggcaactccgagtctgtgcatcccgccctgcagagaccagcggagccacaggttcctgtgagaacaacatctcgctcccctgttctgtcccgtcgagattccccactgcagggcagtgggcagcagaatagccaggcaggacagagaaactccaccagtattgagcccaggcttctgtgggagagagtggagaagctggtgcccagacctggcagtggcagctcctcagggtccagcaactcaggatcccagcccgggtctcaccctgggtctcagagtggctccggggaacgcttcagagtgagatcatcatccaagtctgaaggctctccatctcagcgcctggaaaatgcagtgaaaaaacctgaagataaaaaggaagttttcagacccctcaagcctgctgatctgaccgcactggccaaagagcttcgagcagtggaagatgtacggccacctcacaaagtaacggactactcctcatccagtgaggagtcggggacgacggatgaggaggacgacgatgtggagcaggaaggggctgacgagtccacctcaggaccagaggacaccagagcagcgtcatctctgaatttgagcaatggtgaaacggaatctgtgaaaaccatgattgtccatgatgatgtagaaagtgagccggccatgaccccatccaaggagggcactctaatcgtccgccagactcagtccgctagtagcacactccagaaacacaaatcttcctcctcctttacaccttttatagaccccagattactacagatttctccatctagcggaacaacagtgacatctgtggtgggattttcctgtgatgggatgagaccagaagccataaggcaagatcctacccggaaaggctcagtggtcaatgtgaatcctaccaacactaggccacagagtgacaccccggagattcgtaaatacaagaagaggtttaactctgagattctgtgtgctgccttatggggagtgaatttgctagtgggtacagagagtggcctgatgctgctggacagaagtggccaagggaaggtctatcctcttatcaaccgaagacgatttcaacaaatggacgtacttgagggcttgaatgtcttggtgacaatatctggcaaaaaggataagttacgtgtctactatttgtcctggttaagaaataaaatacttcacaatgatccagaagttgagaagaagcagggatggacaaccgtaggggatttggaaggatgtgtacattataaagttgtaaaatatgaaagaatcaaatttctggtgattgctttgaagagttctgtggaagtctatgcgtgggcaccaaagccatatcacaaatttatggcctttaagtcatttggagaattggtacataagccattactggtggatctcactgttgaggaaggccagaggttgaaagtgatctatggatcctgtgctggattccatgctgttgatgtggattcaggatcagtctatgacatttatctaccaacacatatccagtgtagcatcaaaccccatgcaatcatcatcctccccaatacagatggaatggagcttctggtgtgctatgaagatgagggggtttatgtaaacacatatggaaggatcaccaaggatgtagttctacagtggggagagatgcctacatcagtagcatatattcgatccaatcagacaatgggctggggagagaaggccatagagatccgatctgtggaaactggtcacttggatggtgtgttcatgcacaaaagggctcaaagactaaaattcttgtgtgaacgcaatgacaaggtgttctttgcctctgttcggtctggtggcagcagtcaggtttatttcatgaccttaggcaggacttctcttctgagctggtagaagcagtgtgatccagggattactggcctccagagtcttcaagatcctgagaacttggaattccttgtaactggagctcggagctgcaccgagggcaaccaggacagctgtgtgtgcagacctcatgtgttgggttctctcccctccttcctgttcctcttatataccagtttatccccattctttttttttttcttactccaaaataaatcaaggctgcaatgcagctggtgctgttcagattctaccatcaggtgctataagtgtttgggattgagcatcatactggaaagcaaacacctttcctccagctccagaattccttgtctctgaatgactctgtcttgtgggtgtctgacagtggcgacgatgaacatgccgttggttttattggcagtgggcacaaggaggtgagaagtggtggtaaaaggagcggagtgctgaagcagagagcagatttaatatagtaacattaacagtgtatttaattgacatttcttttttgtaatgtgacgatatgtggacaaagaagaagatgcaggtttaagaagttaatatttataaaatgtgaaagacacagttactaggataacttttttgtgggtggggcttgggagatggggtggggtgggttaaggggtcccattttgtttctttggatttggggtgggggtcctggccaagaactcagtcatttttctgtgtaccaggttgcctaaatcatgtgcagatggttct

SEQ ID NO: 2821 - DNA, 1805 bp, Homo sapiens
  source 1..1805: mol_type = genomic DNA
gtcattatccatcgagtccttgagaaacaggaagttgaagtgttctacccagactttggaaatattggaattgttcagaagtcctccctgaggttcctcaagtgctgctacacaaagcttccagctcaggctatcccttgttctttggcttgggtgagaccagtagaggaacactggacatcgaaagctattttgcagttccagaagttgtgcggtttgaagccattagtgggggtagtggatgaatatgtagatggaatccttaacatttttttgtgtgacacatcctcaaacgaagatgtctatttccatcatgtcttgagaacagagggccatgctattgtatgccgagaaaatatctcttctaagggtttcagtgagctcaaccctttagctttatacacgacatccagtggagggccagaggacattgtcttgacagaactgggttatccttcccagcagcactattttaatgaagaccgaaagataagtccacagtcaaaagagagtgagttacgtatcttgcaagatattaatgatgaaaagtctttaagtcatcttaaatctgagtcaaaggagccattaaaggattctgaatttgagtctttgaaaacctgtaataagagctttgaagaagatccaaagtggtccaacccagaaccaaacgatctgaaggaagaaaatgaggatgagatccccactggaatgccatgcctggagtcagtgaccataggtgatgatatttgggatgagaactggttacctctacaggctaagatgggaaaaggaggtgatgctgcctcccatctatttactgcaagccttggtggaaagaatcagtattcatcatgtaaagaaatgccacagaaggactggtgtttttctacccctaaagatacatgggatgattcttggcagccttcaggccttgtaaatggaacgaaagtagaagttcataagccagaagtactgggtgctcaggaaaaaaatactggcacaaacaggactcaaaagcaactagacataaatggttcttcagattcttccacactgcccaaattggaagaattctgtacctctcttacccagtcagagcagtcagcagacgggagccagtctgaacccaacaacagtcagactcagccaaagcaaattcagctttccacagcagcaccctgttcaacaactgcagtggatgattccgcagaaaagccctctggttctgtggaaagctcaccagagatcctaaagaatgaagatttttctagcagccgtgctattacattgtacaaagacaagcgtcaagaatctgtagaccagctgtctttgattttgtcttatgagtgccagatttctcagaagctctacattcctcgaagtacagccactgctgccttaggtgctgccgcacggttagctacatccaggagcctcctacactggtaccccagtgtgaaaaggatggaagcatgagggagggagggaggagggagaaaaacagaatccagccgcttaggctttgatgaactcccaggccaaaatgaggagttattgaagcaaaatagtatcttgatcattgatacttttgtctttctgtgactatatgttagctttattatgctaacagtctactttgatgtgtaagtaagtattgatatttactgttaatcttgatttttcttgattttattctgtgtcattttgttcacctttgtttttaatgtagtttaaaggaatttgtttttttgtgtttgtttttcttgtacattatcatgactgataaatgaaaattgaaaaactaa

SEQ ID NO: 2822 - DNA, 560 bp, Homo sapiens
  source 1..560: mol_type = genomic DNA
agcaccggacttggagtcagagagacctggctgcgaatcccggctccgccactttctagcgctgtgaccttggcacaacagctccagctggcagcatcacttcccgccaatttatccaacttctgccaaggctctgaaatgccaacaacgtcgaggcctgcacttgatgtcaagggtggcacctcacctgcgaaggaggatgccaaccaagagatgagctccgtggcctactccaaccttgcggtgaaagatcgcaaagcagtggccattctgcactaccctggggtagcctcaaatggaaccaaggccagtggggctcccactagttcctcgggatctccaataggctctcctacaaccacccctcccactaaacccccatccttcaacctgcaccccgcccctcacttgctggctagtatgcacctgcagaaacttaatagccagtatcaggggatggctgctgccactccaggccaacccggggaggcaggacccctgcaaaactgggactttggggcccaggcgggaggggcagaatcactctctccttctgctgg

SEQ ID NO: 2823 - DNA, 3007 bp, Homo sapiens
  source 1..3007: mol_type = genomic DNA
gagtgtgtgacccagcccttcccccgtggccaagcagagagagtggccttgaggaagccatagcagcaggaccagcatggcctctgctgcctctgtgaccagcctggcagatgaagtcaactgccccatctgtcagggtaccctgagggagccggtcactatcgactgcggccacaacttctgccgggcctgccttacccgctactgtgagataccaggcccagacctggaggagtcccctacttgcccactctgcaaagaacccttccgtcctgggagcttccggcccaactggcagctggctaacgtggtggagaacattgagcgcctccagctggtgtccacactgggtttgggagaggaggatgtctgccaagagcacggagagaagatctacttcttctgtgaggatgatgagatgcagttgtgcgtggtgtgccgggaggctggggagcacgctacccacaccatgcgcttcctggaggatgcagcggctccctatagggaacaaatccataagtgtcttaaatgtctaagaaaagagagagaggagattcaagaaatccagtcaagagaaaataaaaggatgcaagtcctcctgactcaggtgtccaccaagagacaacaggtgatttctgagttcgcacacctgaggaagtttctagaggaacagcagagcatcctcttagcacaattggagagccaggatggggacatcttgaggcaacgggatgaatttgatttgctggttgctggggagatctgccggtttagtgctcttattgaagaactggaggagaagaatgagaggccagcaagggagctcctgacggacatcagaagcactctaataagatgtgaaaccagaaagtgccggaaaccggtggctgtgtcgccagagctgggccagaggattcgggactttccccagcaggccctcccgctgcagagggagatgaagatgtttctggaaaaactatgctttgagttggactatgagccagctcacatttctctagaccctcagacttcccaccccaagctcctcttgtccgaggaccaccagcgagctcagttctcctacaaatggcagaactcaccagacaacccccagcgttttgaccgggccacctgtgttctggcccacactggcatcacaggggggagacacacgtgggtgtggatggccagggtacctggggactcaggctgctgccagttctgctcaccaccatccgtgcttggcacagaagtagctgcatagaaagggcactggatttgaagtcagaagacctgggttcttgaaccagcctgtcaaccagttgtatgactttaaacaaggcatctcacctcttttcatcttgttttcttccaataatgttagagttcatgtaatcacattctctagaaccatttagtttgtgttaactatgaaccaagcagtgtggtggccactggtgacttgaaaatatagagaaaaaaaaaacctgctctatatctgaaagagctcttgggaagacagagaaacataaagaggaaattacagcacagtgtggtgggtgttacgggaagtccaaccccagcattatgggagttcaggggaaggggcatagcccagcctggaaggagagggtgagtgggggatggctttctgaaaagggtggtctaaaggatgcctatggtcaatagggaaaagaggggaagaagcatcttaagaagaggaaacagcagagaactggctggatgacctgtgactctggagcactgggttgtctccattgtcattatgggcagatgtgtgccatccccagccgacgccactcactgcctccttcctcctggtgttgccacttctgggtgagattaaggtgcagggcctgggggcaggaggacataaggtatagccataaatcataacccagggaccacactcaaccctagggaaattgtcttcctgatcagttgattaccatctgaggtcaagaaatgagatagtgggagcaaatgggtcacaaatagctcagctgtgggctcagaaactgctaggtaaaagaattccagaaggaggccagggcataagttggatgacctatgaactttagtctaaagaattgagactaccgtaattgagactactgtagtgacatctgagaaatgggatggaagagtgaccatgttttattttcttgttcttgtcactattgtattttattttgcataatcatgcccttcactgacagtctccttaacatcatctgtttactctgctcagtgtaaactacaatgctctgtcatctccctactgggtctcctgggaggaggggagccatccagggtgcaaactcaaaggcagagggcacagcgtgcttaggcccaagcttagaattcaattgagaagttctgttgttcatccttacctcagcaggtagaaaagaggtggagatcagaagccagggattagagattgaattgctttccctgggagtgtgcagtatctcattaaaatgttgtatattcaaaaaaatacagacacacacaagtgcctatataatgataaaacatatccaaagcacccaaacctgtgattccagaaaagtagatcctatttttgtttatttttattggctttagctgtgtcttttgaaaggactattatcctctaaaatgtatgtgtatgaagatcctggcttgcagctcgggagctttacacaccttgtgtcactttatcttggtaacgagccaagatcatgcaaccagttcatccatgtctgacccaagagctcttaactgctatgctgcactgcctcattcagagatagatgcctgcatgggtcctggcgattattttaatgctggctacacccccacaggtgacttggattcagaaatacaatttatatttcttctttttaaattgttttattttatttttcttttaatagttatatgtcagtgagaacaatttatatgtcttacactgagaaataaaactgctcataagtgaaaa

SEQ ID NO: 2824 - DNA, 1703 bp, Homo sapiens
  source 1..1703: mol_type = genomic DNA
cgtggtgcagcgcatattttcacaagtgggtctcccttgtccgggactatggccaccgactcgtgggccctggcggtggacgagcaggaagcggctgtcaagtcgatgaccaatttgcagatcaaggaagagaaagtcaaagcagataccaatggtattatcaaaaccagtaccactgccgagaaaacagatgaagaggagaaagaggacagagctgcccagtccttactcaacaagctgatcagaagcaaccttgttgataacacaaaccaagtggaagtcctgcaacgggatccaaactcccctctgtactcggtgaagtcgtttgaagagcttcggctcccacagaatctgattgcccagtctcagtctggcactggtaaaacagctgcctttgtcttagccatgctcagccgagtggagccatcagacagatacccccagtgtctgtgcctctccccaacatatgagctggcgcttcaaacaggaaaagtgattgagcagatgggcaaattttacccagaactgaagcttgcctatgccgttcgaggcaataaattggaaagaggccagaagatcagtgagcagattgtcattggcacccctgggaccgtgctggactggtgctccaagctcaagttcattgatcccaagaaaatcaaggtgtttgttctggatgaggctgatgtcatgatagccactcagggccaccaagatcagagcatccgcatccagaggatgctgcccaggaactgccagatgctgcttttctccgccacctttgaagactctgtgtggaagtttgcccagaaagtggtcccagacccaaatgttatcaaactgaagcgtgaggaagagaccctggataccatcaagcagtactatgtcctgtgcagcagcagagacgagaagttccaggccttgtgtaacctctacggggccatcaccattgctcaagccatgatcttctgccatactcgcaaaacagctagttggctggcagcagagctctcaaaagaaggccaccaggtggctctgctgagtggggagatgatggtggagcagagggctgcggtgattgagcgcttccgagagggcaaagagaaggttttggtgaccaccaacgtgtgtgcccgcggcattgatgttgaacaagtgtctgtcgtcatcaactttgatcttcccgtggacaaggacgggaatcctgacaatgagacctacctgcaccggatcgggcgcacgggccgctttggcaagaggggcctggcagtgaacatggtggacagcaagcacagcatgaacatcctgaacagaatccaggagcattttaataagaagatagaaagattggacacagatgatttggacgagattgagaaaatagccaactgagaagctccaccagccactgatgccagccctggcactgcccctgcacaggagacaagtgcatttagggcacaggccccgacatcaccccaaggacaacggcagaagtagagagaaactacctacctcacttcaaattatgtttggacttgacaaaaataggtgcaaatgatggggggcaatagaagaaaaaatttgcattttggaaaattgggtcctttccccacttttttaaagccacattcccccatctttataataatctggtcacagtggtagtcgctggccccaggaccccctcctgattttggcta

SEQ ID NO: 2825 - DNA, 2731 bp, Homo sapiens
  source 1..2731: mol_type = genomic DNA
agcctgcgcttcggaagcatggatgtgcgcctgcgctgcgctagggcgcggcgggcggtttgaattttgcttacagagtcccgtctcaccatcctgggcttccaacggagactgcggtatccgcagctggagacccagcggcgagtagccttttgctcccggacggacttgagaggcttaaaggatggcctcgtcagatctggaacaattatgctctcatgttaatgaaaagattggcaatattaagaaaaccttatcattaagaaactgtggccaggaacctaccttgaaaactgtattaaataaaataggagatgagatcattgtaataaatgaacttctaaataaattggaattggaaattcagtatcaagaacaaaccaacaattcactcaaggaactctgtgaatctcttgaagaagattacaaagacatagaacatcttaaagaaaacgttccttcccatttgcctcaagtaacagtaacccagagctggtacatgaaatcccgcttaacctataatcaaattaatgatgttattaaagaaatcaacaaggcagtaattagtaaatataaaatcctacatcagccaaaaaagtctatgaattctgtgaccagaaatctctatcacagatttattgatgaagaaacgaaggataccaaaggtcgttattttatagtggaagctgacataaaggagttcacaactttgaaagctgacaagaagtttcacgtgttactgaatattttacgacactgccggaggctatcagaggtccgagggggaggacttactcgttatgttataacctgagtcccttgtgaacttttgaacataccaacagggtatagagtatagaggctatttctataattttcttatatataatttttttaacttttaatcttttttgtttccttttttttttttttgagacaggatcttgctttgtcacccaggggcttgctttgtcacgcaggctagagtgcagtggcgcaaacatggctcactgcagcctcaacctcccaggctcaagtgatcctcccacctcagccccctgaatggctgggactacaagcgtgcgccaccatgcctggctaatttttgtattttttggagagatggggtttcaccatgttgcctaggctggtcttgagctcctgagctcaaacaatccaccctcctcagcctcccaaagtgctgggattacaggcttgagccaccacacctgacctattcttgtttcttataaaaataaaacttttttggataaagcttatttcttgtttttttctttttctttttttttttttttgagacagtctcgctctttcacccaggccggactgcagcggcgctatctcggctcactgcaaactctgcctcccaggttcacgccatcctcctgcctcagcctcctgagtagctgggactacaggcacctgccaccacgcccagctaattttttgtatttttagtagagatggggtttcaccgtgttagccaggatggtctcgatctcctgacctcatgatccgcccacctcggcctcccaaagtgctgggattacaggcgtgagccaccgcgcccggccaacttatatattttcaagattcacctcctctcaccaaatatttaactacctgctgaatacgcctctgtactaggcacataatggaactaaaaaatgctcatgtccagtttttgtgttgagtgaacaatgctgcagaccctaataagattgggtacagatcggcatgcgcctgtagtcccagctactcaggagaattgcttgaacctaggaggtggaggttgcagtgagccgagatcgtgccactgcactccagtctgggcaacagagcgagactccatctcagaaaaaaagaaaaaaagactgggtacagatgtgatattggaagaaaaagatcaagctgatgaggttaggatacccaggccctttggacttaaagatcactagtgtctaaattccatcgatggcatttcagtctataggtaaacttcctggaagctggatttggagacagtttatcatctgattattgggctttcgtataggtccttagggagcagcttacctgaaatgcatttagtgtacaccagtctgtaaacttcaacctgtaatgaaagtgtaataaatgtacattgagttgatgtgataatgtgatataataagaaatatatatttgatcttcctatctagttccttgttcagagctcctaaaacccttgtaatttccaaagtgatggagtacatcttttgttctagtatttggtctttgaccccagttcctgacacaaagctcctaaattcctttaaatttcccagtgataggagaattttttgttctaatgaggtcactcttgatgggcacctggataactcaggatgggggctgctcacaaagaccacatcatgattggaagtttcaaactttcagtctcccacctccagagaggggagaggggctggagatttgtgtcaataatccatcaggcctatgtcaacaagacataatccgttaactatggagttcagggagcttcagggttggcaaacattttgatgtgccaggaaggtgacgcactccagctttatgaagtcagcaagtcctgtgctcaggatgcttctggaccttgccccaggtaccccttcatgtggctgttgttcatctgtatcctttgtagtagccttaaaataaactgttaaac

SEQ ID NO: 2826 - DNA, 2163 bp, Homo sapiens
  source 1..2163: mol_type = genomic DNA
agttgccgctgtcgtccgcagagccagttcctagcgcagagccgcgcccgccatgagggagatcgtgcacatccaggcgggccagtgcgggaaccagatcggcaccaaggtgggcctggcgcggtgcagggcctctccgcgggtcggctgctggcgggccccgggtctcccggcgcgacccccgccggggcgcgcacccgctgtgcgcccctgggtcctcggagcccggtgcggacccgcgagggccgcagggagggagcgcccggggcgtggccggccggggaccttctactcttcgctccccacccccatcccaactgggagcggctgccggcggctcaggcgcgcctggaattcggccgccggggcgcctggggtgggcgcgggtggcggcgtcccgggctctgggttctgagcgtctgtccccccgccttgccctgcccaagttttgggaagtgatcagcgatgagcacggcatcgacccggccggaggctacgtgggagactcggcgctgcagctggagagaatcaacgtctactacaatgagtcatcgtctcagaaatatgtgcccagggccgccctggtggacttagagccaggcaccatggacagcgtgcggtctgggccttttgggcagcttttccggcctgacaacttcatctttggccagacgggtgcagggaacaactgggcgaaagggcactacacggagggcgcggagctggtggacgcagtgctggacgtggtgcggaaggagtgcgagcactgcgactgcctgcagggcttccagctcacgcactcgctgggcggcggcacgggctcaggcatgggcacgctgctcatcagcaagatccgtgaggagttcccggaccgcatcatgaacaccttcagcgtcatgccctcgcccaaggtgtcggacacggtggtggagccctacaatgccacactgtcggtgcaccagctggtggagaatacagacgagacctactgcatcgacaacgaggcgctctatgacatctgcttccgcactctgaagctgacaacgcccacctacggggacctcaaccacctggtgtccgccaccatgagtggggtcaccacctcgctgcgcttcccgggccagctcaatgctgacctgcgcaagctggcggtgaacatggtgcccttcccgcgcctgcacttcttcatgcctggcttcgcgccgctcaccagccgcggcagccagcagtaccgggccctgaccgtgcccgagctcacccagcagatgttcgacgccaggaacatgatggccgcctgcgatccgcgccatggccgctacctgaccgtggccaccgtgttccgcgggcccatgtccatgaaggaggtggacgagcagatgctggccatccagagtaagaacagcagctacttcgtggagtggattcccaacaacgtgaaggtggccgtgtgcgacatcccgccccgcggcctgaagatggcctccaccttcatcggcaacagcacggccatccaggagctgttcaagcgcatctccgagcagttctcagccatgttccggcgcaaggccttcctgcactggttcacgggtgagggcatggatgaaatggagttcaccgaggcggagagcaacatgaacgacctggtatccgagtaccagcagtaccaggatgccaccgccaatgacggggaggaagcttttgaggatgaggaagaggagatcgatggatagtcggaatagagccgccccaactcagatcctacaacacgcaagttccttcttgaaccctggtgcctcctaccctatggccctgaatggtgcactggtttaattgtgttggtgtcggcccctcacaaatgcagccaagtcatgtaattagtcatctggaacaaagactaaaaacagcagagaattgcgggttctacccagtcagaagatcacaccatggagactttctactagaggacttgaaagagaactgaggggccacaaaataaacttcaccttccattaagtgttcaagcatgtctgcaaattaggagggagttagaaacagtctttttcatcctttgtgatgaagcctgaaattgtgccgtgttgccttatatgaatatgcagtatgggactttgaaataatgattcataataaaatactaaacgtgtg

SEQ ID NO: 2827 - DNA, 2738 bp, Homo sapiens
  source 1..2738: mol_type = genomic DNA
gtagaagaggggaggaaacaagccagtgcaaggggagcaaaagagaaaaggagccaggctgggcttcctgatcccacagcatcgcagagctcgggaggcacagctcacagacacaggaaacacaggactgctattctgctctcctgcccacggtgatctggtgccagctggtggaacagtgggtgatggcgtccctgctgcaagaccagctgaccactgatcaggacttgctgctgatgcaggaaggcatgccgatgcgcaaggtgaggtccaaaagctggaagaagctaagatacttcagacttcagaatgacggcatgacagtctggcatgcacggcaggccaggggcagtgccaagcccagcttctcaatctctgatgtggagacaatacgtaatggccatgattccgagttgctgcgtagcctggcagaggagctccccctggagcagggcttcaccattgtcttccatggccgccgctccaacctggacctgatggccaacagtgttgaggaggcccagatatggatgcgagggctccagctgttggtggatcttgtcaccagcatggaccatcaggagcgcctggaccaatggctgagcgattggtttcaacgtggagacaaaaatcaggatggtaagatgagtttccaagaagttcagcggttattgcacctaatgaatgtggaaatggaccaagaatatgccttcagtctttttcaggcagcagacacgtcccagtctggaaccctggaaggagaagaattcgtacagttctataaggcattgactaaacgtgctgaggtgcaggaactgtttgaaagtttttcagctgatgggcagaagctgactctgctggaatttttggatttcctccaagaggagcagaaggagagagactgcacctctgagcttgctctggaactcattgaccgctatgaaccttcagacagtggcaaactgcggcatgtgctgagtatggatggcttcctcagctacctctgctctaaggatggagacatcttcaacccagcctgcctccccatctatcaggatatgactcaacccctgaaccactacttcatctgctcttctcataacacctacctagtgggggaccagctttgtggccagagcagcgtcgagggatatatacgggccctgaagcgggggtgccgctgcgtggaggtggatgtatgggatggacctagcggggaacctgtcgtttaccacggacacaccctgacctcccgcatcctgttcaaagatgtcgtggccacagtagcacagtatgccttccagacatcagactacccagtcatcttgtccctggagacccactgcagctgggagcagcagcagaccatggcccgtcatctgactgagatcctgggggagcagctgctgagcaccaccttggatggggtgctgcccactcagctgccctcgcctgaggagcttcggaggaagatcctggtgaaggggaagaagttaacacttgaggaagacctggaatatgaggaagaggaagcagaacctgagttggaagagtcagaattggcgctggagtcccagtttgagactgagcctgagccccaggagcagaaccttcagaataaggacaaaaagaagaaatccaagcccatcttgtgtccagccctctcttccctggttatctacttgaagtctgtctcattccgcagcttcacacattcaaaggagcactaccacttctacgagatatcatctttctctgaaaccaaggccaagcgcctcatcaaggaggctggcaatgagtttgtgcagcacaatacttggcagttaagccgtgtgtatcccagcggcctgaggacagactcttccaactacaacccccaggaactctggaatgcaggctgccagatggtggccatgaatatgcagactgcagggcttgaaatggacatctgtgatgggcatttccgccagaatggcggctgtggctatgtgctgaagccagacttcctgcgtgatatccagagttctttccaccctgagaagcccatcagccctttcaaagcccagactctcttaatccaggtgatcagcggtcagcaactccccaaagtggacaagaccaaagaggggtccattgtggatccactggtgaaagtgcagatctttggcgttcgtctagacacagcacggcaggagaccaactatgtggagaacaatggttttaatccatactgggggcagacactatgtttccgggtgctggtgcctgaacttgccatgctgcgttttgtggtaatggattatgactggaaatcccgaaatgactttattggtcagtacaccctgccttggacctgcatgcaacaaggttaccgccacattcacctgctgtccaaagatggcatcagcctccgcccagcttccatctttgtgtatatctgcatccaggaaggcctggagggggatgagtcctgaggttgcaactagaaattcagaggggcttggaatagagaaacctaaagaagcatcatcccctccatccccaacttcctcaaagcccaaagccaagggaaggataaatcaaggctcaaggcttccccagcaaagattagggaaagagacttgaccccaggactgtactacgactcttaagagaacactgcacagcactcaaagtcccccactggactgcttcctccttagccccactggtataaatacatctctctccaatttggc

SEQ ID NO: 2828 - DNA, 1567 bp, Homo sapiens
  source 1..1567: mol_type = genomic DNA
cgccgccgtcgccgccgctcctcctctcccggtcctgggtttccttggcgctgcggccgccgctccctctgcgacctgtatgaggaggaggaggaggaggatgtgaagatggcggagctgcagatgctgctggaagaggaaatcccggggggccgccgggccctcttcgacagctacacaaatctggaacgggtggccgattactgcgagaacaactacatacagtcagcagataagcagagagccctagaagaaaccaaagcctacaccacccaatccttagcaagtgttgcctatctgataaacaccttggccaacaatgtcctgcagatgctggatatccaggcatcccagctacgaaggatggaatcttcaatcaatcatatttcacaaacagttgatattcataaagagaaagttgcaagaagagaaattggtattttgactaccaataaaaacacttcaaggacacataagattattgctccagccaaccttgaacgaccagttcgttatattagaaaacctattgactatacaattctagatgatattggacatggagtaaagtggttgcttagatttaaggtgagtacccagaacatgaagatgggtgggctgccgcgtacaacacctccaactcagaagccccctagtccccctatgtcagggaaagggacacttgggcggcactccccctatcgcacactggagccagtgcgtcctccagtggtaccaaatgattacgtacctagcccaacccgtaatatggctccctcgcagcagagccctgtgaggacagcttctgtgaatcaaagaaatcgaacttacagcagcagtgggagtagtggagggagccacccaagtagtcggagcagcagtcgagagaacagtggaagtggtagtgtgggggttcctattgctgttcctactccatctcctcccagtgtctttccagcccctgctggctctgctggcactcctccccttcctgctacttctgcatctgcccctgctcctcttgttcctgctactgtcccttcctccactgccccagacgctgctgctgggggtgcccagacccttgctgatggcttcacttctccaactccccctgttgtttcttccactccccctacaggtcatcctgtacagttctacagcatgaataggcctgcctctcgccatactcccccaacaatagggggctcgttgccctatagacgccctccttccattacttcacaaacaagccttcagaatcagatgaatggaggacctttttatagccagaatccagtttcagatacaccacctccaccgccacctgtggaagaaccagtctttgatgagtctcccccacctcctcctcctccagaagattacgaagaggaggaagctgctgtggttgagtatagtgatccttatgctgaagaggacccaccgtgggctccacgttcttacttggaaaaggttgtggcaatttatgactatacaaaagacaaggaagatgagctgtcctttcaggaaggagccattatttatgtcatcaagaagaatgacgatg

SEQ ID NO: 2829 - DNA, 2352 bp, Homo sapiens
  source 1..2352: mol_type = genomic DNA
caggagaggtagccgagggagcctgacgggtgacgccagcggccacggggccccgaacgagcaggacatgaggggcgactaggcgcgaggacgagcaaaagcaagtggatgacagcatgaacggccctgcggggctggccggacggctgcaagaacatgctgagcccaaagatcaggcaggccaggagggcccgctccaaaagcctagtgatgggggagcagagccggagccctgggcggatgccgtgccctcacaggctgggccccgtgctgaaggcgggctggctgaagaagcagaggagcatcatgaagaactggcagcagcgctggtttgtgctgcgtggggatcagcttttctactacaaggacaaagatgagatcaagccccagggatttatttctctacaagggacacaggtgactgaacttcctcctggccccgaggacccagggaagcacctctttgagatcagcccaggtggtgccggggagcgggagaaggtgccggccaaccccgaggcgctcctgctcatggccagctcccagcgtgacatggaggactgggtgcaggccatccgccgagtcatctgggccccgctgggcggaggtactgcccgtagatcgcatgcccaccctctagaacccttgcctccagggatctttgggcagcgcctagaggaaacagtccaccacgagcggaagtatggcccccgcctggcgcccctgctggtggagcagtgtgtggacttcatccgggagcgcgggctcactgaggaggggctgttccgcatgccaggccaggccaacctggtgagggacctgcaggattccttcgactgtggggagaagccactgtttgacagcacaacagacgtgcacacggtggcctccctgctgaagctgtacctgcgggagctccccgagcccgtggtccccttcgccaggtacgaggacttcctcagctgcgcccagctgctcaccaaggacgagggggagggcactctggagttggctaaacaagtgagcaaccttcctcaggcaaattacaacctgctcagatacatctgcaagtttctggatgaagttcaggcatactcaaatgtcaacaagatgagtgtccagaatctggcaaccgtttttggacctaacattctgcggccacaggtagaggacccagtaaccatcatggaaggcacttccctcgtccagcacctgatgaccgtcctcatccgcaaacacagccagctcttcacggcaccggtcccggaagggcccacctccccgcgcgggggcctgcaatgcgcagtggggtggggctccgaggaggtcaccagggacagccaaggagagcccggcggccccggcctgcccgcgcacaggacctcttccctggacggggcggccgtggcggtgctctccagaacagcccccacggggccggggagccggtgcagccctgggaagaaggtgcagaccctgcccagttggaagtcctccttccggcagccgaggtccctatcgggaagcccgaaggggggcggctcatccctggaggtgcccatcatctcctccggcgggaactggcttatgaacgggctgtcctccctgcgcggacaccgccgggcctcgtcgggagaccggctcaaggactcgggctccgtgcagagactctccacctacgacaatgtgcccgcgccgggcctggtccccggcatacccagcgtggccagtatggcgtggtccggggcctcgtccagcgagtcgtcggtggggggctcactcagcagctgcacggcctgccgcgccagcgactcgtctgcccgcagttccctgcacaccgactgggccctggagccctccccgctccccagcagcagcgaggaccccaagtccctggacctggaccacagcatggacgaggcgggcgcgggtgccagcaacagcgagcccagcgagccggacagccccacccgggaacacgcgcgccgctccgaggccttacaggggctggtcactgagctcagggccgagctgtgccgccagcggactgagtacgagaggagtgtgaaaagaatcgaagaagggagtgctgacctgagaaaacgaatgtcccggttagaagaagaactggaccaggaaaagaaaaaatacatcatgctggaaataaagctgcggaactctgaacgggcgcgggaggatgcggagaggaggaaccagctgttgcagagggaaatggaggagtttttttcgaccctaggaagcttgactgttggggcaaaaggtgccagggccccaaagtaaaaggaatggcagagctcacttctgtaccacgtctgctggtctccagccttg

SEQ ID NO: 2830 - DNA, 567 bp, Homo sapiens
  source 1..567: mol_type = genomic DNA
aggctaggcgtggacccaactggcgaggctgctggggttgcagcgggacagttggggcggccccgcaggcccaggtttttgaaaataaagttaattcagagaaggtaaaactttctcttcggaatttcccacataatgattatgaggatgtttttgaagagccttcagaaagtggcagtgatcccagcatgtggacagccagaggccccttcagaagagacaggtggagcagtgaggatgaggaggctgcagggccatcacaggctctctcccctctactttctgatacgcgcaaaattgtttctgaaggagaactagatcagttggctcagattcggccattaatattcaattttcatgagcagacagccatcaaggattgtttgaaaatccttgaggaaaaaacagcagcgtatgatatcatgcaggaatttatggctttagaacttaagaatctgcctggtgagttcaactctgggaatcaaccaagcaacagagaaaaaaatagataccgagatattcttccatttcaacatcatggatatagtggcccaaatgagagaacaa

SEQ ID NO: 2831 - DNA, 3086 bp, Homo sapiens
  source 1..3086: mol_type = genomic DNA
aggttgacgatgtgtcacactgtgtaagggaatcgcatggagatgggcattccgaactgttaatggggacatgggactccagttgtctctgatcacttgtgtggattttcctggcgtagaacgacagaagccgctagtaagtcgccaagacctacagcaggaattctgcaccaaagggcataaaatcttgttattttaatttgcatctgggagaatgtctgagcaaggagacctgaatcaggcaatagcagaggaaggagggactgagcaggagacggccactccagagaacggcattgttaaatcagaaagtctggatgaagaggagaaactggaactgcagaggcggctggaggctcagaatcaagaaagaagaaaatccaagtcaggagcaggaaaaggtaaactgactcgcagccttgctgtctgtgaggaatcttctgccagaccaggaggtgaaagtcttcaggatcaggaatcaattcatttacagctttccagtttttccagcctgcaagaggaggataaatctaggaaagatgactctgaaagagaaaaagaaaaggataaaaacaaagataaaacctctgaaaaacccaagatcagaatgttatcaaaagattgcagccaagaatacacggattctacaggcatagacttacacgagtttctgattaacacattaaagaataattccagggacaggatgatacttttgaaaatggagcaggaaattattgatttcattgctgacaacaataatcattataaaaagttccctcagatgtcatcgtatcagaggatgcttgtccatcgagtggcagcttattttggattggatcacaatgtggatcaaacaggaaaatctgttatcatcaacaagaccagcagcaccagaataccagagcaaaggttttgtgaacatttaaaagatgaaaaaggtgaagaatcccagaagcggtttatcttgaagcgagataactctagtattgataaagaagacaatcagtcagtttgctcccaggaaagcctttttgtggaaaacagtaggctcttggaagacagtaacatatgcaatgagacctataagaaaagacagctctttcggggcaacagagatggctcagggagaacatctgggagtcgacagagcagctcagaaaatgaactcaagtggtctgaccaccaaagggcctggagcagcacagactccgacagttccaaccgcaatctaaagcccgccatgaccaagacggcgagttttgggggcatcacggtgctgaccaggggtgacagcacttccagtactaggagtaccgggaagctgtccaaagcaggttccgagtcttccagcagtgcaggctcctcaggatcgctgtcccgcacccatccacctctccagagcacacccctagtctcaggtgtggcagctggctctccaggctgtgtgccttatccagagaatggaatagggggccaggttgctcccagcagcaccagctacatcctccttccacttgaagctgcaacaggcatcccgcctggaagcatccttcttaatccacacacaggccagccctttgtgaatcccgatggaactcctgcaatatacaacccacccaccagtcagcagcccctgcgaagcgccatggtggggcagtcccaacagcagccaccacagcagcagccctccccgcagccccaacagcaggtccagccaccgcagccacagatggcaggccctctggtcactcagtctgtccaggggctgcaggcttcctcccagtcagtgcaatatccagcagtctcttttcctccccagcacctcctacctgtgtctccaacgcagcactttcccatgagagatgatgtggcaacacagtttggccagatgaccctgagccggcagtcctcgggggagactcctgaacccccatcaggtcctgtctacccatcctcccttatgccacagccggcccagcagcccagctatgtaatcgcctctacaggccagcagcttcctacaggaggattctcaggctctggccctcccatctcccagcaggtcctccagccccctccctcaccacagggatttgtgcaacagcctccgcctgcacagatgcctgtatattattacccatctggtcagtaccctacctcaaccacgcaacagtaccggcccatggccccggttcagtacaacgctcagaggagtcaacagatgccacaggcagcacagcaagcaggttaccagccagtcttgtctggtcaacagggattccaaggcctaataggagtgcagcagccacctcagagtcagaacgtgataaataaccaacaaggaactccggtgcaaagcgtgatggtttcctacccaacaatgtcttcttatcaggtgccaatgacccagggttctcaaggactgccccagcagtcataccaacagccaatcatgctacctaaccaggcaggtcaagggtcactcccagccactggaatgcctgtttactgtaatgtcacaccgcccacccctcagaacaaccttaggctgattggcccacactgcccctccagcactgtcccagtgatgtcagctagctgcagaacaaactgtgcaagtatgagcaatgctggttggcaggtcaaattctgagagctctggctgtggtacatttcttcagatatttctcatggcctttgatggaagaggaacaaggtgggaaaactggctgaggacttaagtattcactcaacactcaaatgattgctgctggtattctgtaaaaaataaacaaagactaatatacacgttagctggttaatggtgcatatttctgtcatgtctgctaggtatgcctttatagcttagctagtgacatgaattcatcaaggtaagattttctcctaccactgaataccactgtgtagattataatatccctaatttggattagttttgtactttgtgttgagtttgtgatgctaaaagtatttaaaaattatatactaaatcacattgtaccaaagctgtaatggaaaagcaaagaagaattgatgaattgaaggaataatttatatacatt

SEQ ID NO: 2832 - DNA, 2378 bp, Homo sapiens
  source 1..2378: mol_type = genomic DNA
cctgctcgttcctgacagaattaacggcacagccaacaagatgaacggagctttggatcactcagaccaaccagacccagatgccattaagatgtttgtcggacagatcccccggtcatggtcggaaaaggagctgaaagaactttttgagccttacggagccgtctaccagatcaacgtcctccgggaccggagtcagaaccctccgcagagtaaaggttgttgtttcgtaacattttatacaagaaaagctgcacttgaggcccagaatgcactgcacaatattaaaactttacctgggatgcatcatcccattcagatgaaacctgcagatagtgaaaagtccaacgctgtggaagacagaaaattgttcataggaatggtatcgaagaaatgtaatgagaacgacatcagggtgatgttctctccatttggccagatagaagaatgccggatcctccggggacctgatgggctgagtcgaggctgtgcgtttgtcacattttctacaagggcaatggcacagaatgcaatcaaagccatgcatcagtctcagaccatggagggctgctcttcacctatcgtggtgaagtttgctgacactcagaaggacaaagagcaaaggcgcctccagcagcagctcgctcagcagatgcagcagctcaacactgccacctgggggaacctgacagggctgggcggactgaccccacagtatctggcgctcctgcagcaggccacctcctccagcaacctgggtgcgttcagcggcattcaacaaatggcaggcatgaatgctttacagttgcagaacctggcgacgctggctgctgctgcagctgcggcccagacctcagccaccagcaccaatgcaaaccctctctctaccacgagcagcgccctgggagccctcacgagtcccgtggctgcttcaacccccaactccactgctggtgcagccatgaactccttgacctctctcgggactctgcaaggactggctggagccactgttggactgaataatattaatgcactagcaggtaccatcaacagtatggcggctctgaatggaggacttggcgccacaggcttgacgaatggcacggctggcaccatggacgccctcacccaggcctactcaggaattcaacagtacgcagccgccgcgctgcccactctgtacagccagagcctgctgcagcagcagagcgctgcaggcagccagaaggaaggtccagagggggcaaacctctttatttaccaccttccacaggaatttggagaccaggacattctgcagatgttcatgccttttggaaatgttatctctgctaaagtcttcattgacaaacagaccaatctgagcaagtgctttggttttgttagctacgacaatccagtctctgcacaagctgctatccaagctatgaatggctttcagatcggcatgaaacgcttgaaggtgcagctgaagcgttccaaaaacgacagcaaaccttactgatcctaaccccagaggctccctgctctcattttagctttcttaggacatcttcatgcccgttagttcatcgtttgcctagcatgtccctgtggcgtctcaaaaaaaagtttcatcgtcccgtcattgtttctgatgtctttctgacctcacatcatatttggttctcctactgacctttgatctagtttgacctttgaaatttgcatgtgacctcatctagctatgaattctgggaagtcaatgtgaaaaacattgctgcattcatgcaagactgaaatttattattagacaaattcattatagaaaaaacctgtggcaaaaacgtttctttcttattttttttcttttcctaaaacagacttgaaagtattatacagggattggcattcttcccggtcactggtaacaatagcaatatgtgtccagggacacagaatgttggtttctaacagactacttccaaaaacagtttgagaaaaaaactgtctgattttaagtctctagaggtctgtaatagtttttacatttttcaggcagtgtaaagttttttgataaggccattttaggtggctcactttctcattaagatatatatatagaaccactttttgtagattagtataagaaaaatatttaccctgttttggggcaaatgctacctatttgtgtcaccttttgctgaactcacagttagacaatccatggtttaatgcacatgaaattacctatattttatactgtttcaatgtacaggagaaaggttactgtaaactgtgttatgttggtgcttctgtgaattaagttgtggtttcatcatgagtcttaatgttctttgttgataagacaagtttagaattggtttacttaatac

SEQ ID NO: 2833 - DNA, 603 bp, Homo sapiens
  source 1..603: mol_type = genomic DNA
gtgcaggagcgggacccggaacagaccgccgtgagagaggaggggtgccggccgggattcgcggcccggagctcgggaccggagaagaagtcctcaccagtgaacggagacctctctgaactaaggataccatggccacgtcagccccactacggagcctggaagaggaggtgacctgctccatctgtcttgattacctgcgggaccctgtgaccattgactgtggccacgtcttctgccgcagctgcaccacagacgtccgccccatctcagggagccgccccgtctgcccactctgcaagaagccttttaagaaggagaacatccgacccgtgtggcaactggccagcctggtggagaacattgagcggctgaaggtggacaagggcaggcagccgggagaggtgacccgggagcagcaggatgcaaagttgtgcgagcgacaccgagagaagctgcactactactgtgaggacgacgggaagctgctgtgcgtgatgtgccgggagtcccgggagcacaggccccacacggccgtcctcatggagaaggccgcccagccccacagggaaaaaatcctgaaccacctgagtaccctaagga

SEQ ID NO: 2834 - DNA, 650 bp, Homo sapiens
  source 1..650: mol_type = genomic DNA
gtctcccggccacggttgaaaccagacgtgcagtggggctgacccctgtgccccaccccagagtcatgccagcgtgggtggtggggcattctctgggatgaatgatctggatcccatagccatctgtgtcctgtttgaggaatgggaccctcaaacagagaacagccaagatgctcaagcagtgatttatctctagggtctccatagcaggggaggtagggtcagactcctgagatggctgatgtcctaccctgcccccaaccaggggccccaggagactcctttttcttactgcaactttggcctcctcagtctgcagatctccaggggagcccaccagcctagtcaacatggcctcggaagacattgccaagctggcagagacacttgccaagactcaggtggccgggggacagctgagtttcaaaggcaagagcctcaaactcaacactgcagaagatgctaaagatgtgattaaagagattgaagactttgacagcttggaggctctgcgtctggaaggcaacacagtgggcgtggaagcagccagggtcatcgccaaggccttagagaagaagtcggagttgaagcgctgccactggagtgacatgttcacgggaaggctgcggaccgagatcccaccagccctg

SEQ ID NO: 2835 - DNA, 622 bp, Homo sapiens
  source 1..622: mol_type = genomic DNA
ctttccagaagacattccaaccaccatggtagagtcacagtaatgtcatggagaatgaagggagtcggggactaaacaagtggctgcaggtttgtctacagattttgagcgttcgaagttgacccctgactaagtatactttgctgctccctcagcctttgaaaaaatgtctgtcacatatgatgattccgttggagtagaagtgtccagcgacagcttctgggaggtcgggaactacaagcggactgtgaagcggatcgacgatggccaccgcctgtgcagcgacctcatgaactgcctgcatgagcgggcgcgcatcgagaaggcgtatgcgcagcagctcactgagtgggcccggcgctggaggcagctcgtggagaaagggccccagtacgggaccgtggagaaggcctggatggccttcatgtccgaggcagagagggtgagcgagctgcacctcgaggtgaaggcctcactgatgaacgatgacttcgagaagatcaagaactggcagaaggaagcctttcacaagcagatgatgggcggcttcaaggagaccaaggaagctgaggacggctttcggaaggcacagaagccctgggccaagaagctgaaagaggta

SEQ ID NO: 2836 - DNA, 576 bp, Homo sapiens
  source 1..576: mol_type = genomic DNA
gtgtcctccggtcccctctgcctcaggcagctgcatgtttgcctctgacctcctcagggctttagattgctgccctggggcgggaagctccggcctcctcccccagctgggcccccgacagctcctggcattcacagtgaactgtctggggaatcatcgctatttggggttcttcgaggacctggagcagcggcacaaggcccaggtgctggtcgaggacatcagtgacatcctggaggagcacgctgagaagcacttccacccctacatcgcctactgctccaacgaggtctaccaacagcgcacgctgcagaagctgataagcagcaacgccgccttccgagaggccctgagagagattgagaggcggccggcgtgcgggggcctgcccatgctctccttcctgatcctccccatgcagcgggtgacccggctgcccctcctgatggatacgctctgcctcaagacccagggccactccgaaaggtacaaggctgccagccgtgcactgaaggccatcagcaagctggtgaggcagtgcaacgagggggcccacaggatggagcgcatggagca

SEQ ID NO: 2837 - DNA, 3122 bp, Homo sapiens
  source 1..3122: mol_type = genomic DNA
cttcctaagccttaaagagacaggacggtcgattggtctgaaattcttgaagagacaggcgcccgctccggccggcaccatggacagcgaggcattccagagcgcgcgggactttctggacatgaacttccagtcgctggccatgaaacacatggatctgaagcagatggagctggacacggcggcggccaaggtggatgaactgaccaagcagctggagtcgctgtggtcagactctcccgcgcctcctggcccgcaggccggacccccttctaggccgccccggtacagctccagctcgatccctgagcccttcggcagccgagggtccccccggaaggcggccaccgacggcgcagacaccccgttcggacgatcagagagtgccccaaccctacacccctacagcccgctgtcccccaagggacggccgtcgtcgccgcgcaccccgctctacctgcagccggacgcctacggcagcctggaccgcgcgacctcgccccggccccgcgccttcgatggcgcaggcagctccctcggccgtgcgccctccccgcggcccgggccaggcccgctccgccagcagggtccccccacgcctttcgacttcctgggccgcgcaggctccccccgcggcagccccctggcggaggggccccaggccttcttccccgagcgtgggccgtcaccgcgcccccctgccacagcctacgacgcgccagcgtccgccttcgggagctccctgctaggctccggcggcagcgcattcgccccgcctctgcgcgcgcaagacgacctgacgctgcgccggcggcctccgaaagcctggaacgagtctgacctggacgtggcgtacgagaagaagccttcgcagacagcgagctatgaacgcctggacgtcttcgcaaggcctgcctcgccgagcctgcagctgttgccttggagggagagcagcctggatggactggggggcaccggcaaggacaacctcactagcgccaccctgccgcgcaattacaaggtctctcctctggccagcgaccggcgttcagacgcgggcagctaccggcgctcgctgggctccgcggggccgtcgggcactttgcctcgcagctggcagcccgtcagccgcatccccatgcccccctccagcccccagccccgcggggccccgcgccagcgtcccatccccctcagcatgatcttcaagctgcagaacgccttctgggagcacggggccagccgcgccatgctccctgggtcccccctcttcacccgagcacccccgcctaagctgcagccccaaccacaaccacagccccagccacaatcacaaccacagccccagctgcccccacagccccagacccaaccccaaacccctaccccagccccccagcatccccaacagacatggccccctgtgaacgaaggaccccccaaaccccccaccgagctggagcctgagccggagatagaggggctgctgacaccagtgctggaggctggcgatgtggatgaaggccctgtagcaaggcctctcagccccacgaggctgcagccagcactgccaccggaggcacagtcggtgcccgagctggaggaggtggcacgggtgttggcggaaattccccggcccctcaaacgcaggggctccatggagcaggcccctgctgtggccctgccccctacccacaagaaacagtaccagcagatcatcagccgcctcttccatcgtcatggggggccagggcccggggggccggagccagagctgtcccccatcactgagggatctgaggccagggcagggccccctgctcctgccccaccagctcccattccacccccggccccgtcccagagcagcccaccagagcagccgcagagcatggagatgcgctctgtgctgcggaaggcgggctccccgcgcaaggcccgccgcgcgcgcctcaaccctctggtgctcctcctggacgcggcgctgaccggggagctggaggtggtgcagcaggcggtgaaggagatgaacgacccgagccagcccaacgaggagggcatcactgccttgcacaacgccatctgcggcgccaactactctatcgtggatttcctcatcaccgcgggtgccaatgtcaactcccccgacagccacggctggacacccttgcactgcgcggcgtcgtgcaacgacacagtcatctgcatggcgctggtgcagcacggcgctgcaatcttcgccaccacgctcagcgacggcgccaccgccttcgagaagtgcgacccttaccgcgagggttatgctgactgcgccacctacctggcagacgtcgagcagagtatggggctgatgaacagcggggcagtgtacgctctctgggactacagcgccgagttcggggacgagctgtccttccgcgagggcgagtcggtcaccgtgctgcggagggacgggccggaggagaccgactggtggtgggccgcgctgcacggccaggagggctacgtgccgcggaactacttcgggctgttccccagggtgaagcctcaaaggagtaaagtctagcaggatagaaggaggtttctgaggctgacagaaacaagcattcctgccttccctccagacctctccctctgttttttgctgcctttatctgcacccctcaccctgctggtggtggtccttgccaccggttctctgttctcctggaagtccagggaagaaggagggccccagccttaaatttagtaatctgccttagccttgggaggtctgggaagggctggaaatcactggggacaggaaaccacttccttttgccaaatcagatcccgtccaaagtgcctcccatgcctaccaccatcatcacatcccccagcaagccagccacctgcccagccgggcctgggatgggccaccacaccactggatattcctgggagtcactgctgacaccatctctcccagcagtcttggggtctgggtgggaaacattggtctctaccaggatccctgccccacctctccccaattaagtgccttcacacagcactggtttaatgtttataaacaaaatagagaaactttccttataaataaaagtagtttgcacagaaattga

SEQ ID NO: 2838 - DNA, 6548 bp, Homo sapiens
  source 1..6548: mol_type = genomic DNA
gctcggcccgggctgccacgagcgtgcgggcctcgccgggcatgtcctaggcggcggccccgcccagcgctcggccgggcgggcgggcgggcgcgagggcagggaccgagccgggccgagctggggaacaagccggggaccaagccggggaccaagccggggactaaggcgagccggagaccgagcccgaacagcagtcccgcagcgtggacaagcagcatgccgtcatcaactacgaccaggacagggacgagcactgggtgaaggacctgggcagcctcaatgggacgtttgtgaatgacatgcgcatcccggaccagaagtacgtcacgctgaagctcaacgatgtcatccgcttcggctacgattccaacatgtatgtgctggagcgtgtgcagcaccgagtcccggaggaggcactcaagcatgaaaagtacaccagccagctgcaggtgagcgtgaagggtttggcgcccaagaggagcgaggcactgccggaacacacaccatactgcgaggcctcgaaccccaggccggagaagggggaccggagaccaggaacagaggcagcctcttaccgcacacccctgtatgggcagccctcctggtggggtgaggacgatggtagcacgctgcctgacgcccagcgccagggagagccctacccagagcgccccaagggaccagtgcagcaggacggggagctccacggcttccgcgcccctgctgagcctcagggctgctcgttccggcgggagcccagctacttcgagatccccacgaaggagaccccgcagccgtcgcagccccccgaggtgccggcacacgagatgcccacgaaggatgcagaggcaggtgggggcggagcggcccctgtggtgcagagccacgcctccttcaccatcgagtttgatgactgcagccctggcaagatgaagatcaaggaccatatcaccaagttttccctgcgccagcggcggcccccgggcaaggaggccacacctggcgagatggtgtcggctgagaccaaggtggccgactggctggtgcagaatgacccgagcctgctgcaccgggttggccctggggatgaccgccacagcaccaagagcgacctgcctgtccacacccgcaccctgaagggccacaagcacgaggacggcacgcagagtgactcagaggaccccctggccaaggcggcctcggccgctggggtgcccttggaggccagcggggagcaggtgcggctgcagaggcagatcaagcgggacccccaggagctactacataaccagcaggcctttgtcatcgagttcttcgacgaggacacaccccgaaagaagcgctcccagtccttcacgcacagcccgtccggggaccccaaggccgacaagcgccgtggcccaacgccggccgatagggaccgccccagtgtcccagccccagtccaggcagggggccgcagctcggggccacagagggccggctcgctcaagcgggagaagacagaggaacggctgggcagcccctcgcccgcctcccgaacccctgcccgccccttcggaagcgtggggcgccgctcccgcctggcccaggacttcatggcccagtgtctgcgggagagctccccggccgcccggcccagccccgagaaggttcctccggtgctgcccgctcccctgacaccccatgggaccagccccgtgggccccccgaccccaccgcccgcccccacggacccccagctgaccaaggcacggaaacaggaggaggacgacagcctcagtgacgcagggacatacaccatcgagaccgaggcgcaggacacggaggtggaggaggcccggaagatgatcgaccaggtctttggggtgttggagtcccctgaactctccagggcatcttcggccacctttcgcccagtcatcagaggggacagagatgagtctgatgacgggggcgtggcccagcggatggcgctactgcaggagtttgcctcccggccactgggtgcggccccccaggcggagcaccagggcctcccggtgccgggctcccctgggggtcagaagtgggtgtcccgctgggccagcctggctgacagctactcagacccgggcctcacagaggatggcctgggacgtagaggcggggagccggaggggtccctgcctgtgcgcatgcggcgacggctccctcagctgcccagtgagagggctgacagccctgcgggcccagagagcagcaggaggagtgggcctgggccaccggagctggacagtgagcagcccagccgcctcttcggccaggaggagttggatcctgacagcctcagcgatgccagtgggtcggacgggggccgaggccccgagccaggggtggagccacaggacagcagacgcaggagcccccaggaggggcccacgtggagcaggggtcggcgctcaccaagggcccccggggagccaactcccgcctctttcttcattggggaccagaatggggacgctgtgttatctaggaaaccgcttgcggctccaggggatggggagggcctagggcagacagcccagcccagccccccagcacgggatggcgtctatgtcagtgccaatgggagaatggtcatccagctacggcctggacggtccccagaacccgacggccctgccccagcctttctccggcaagagagcttcactaaggagccagccagtggtcccccagcgcccggcaagcccccccacatctccagccacccgcttctacaggacctggccgctacccgggccgcacgcatggacttccactcccaggacacccacctgatcttgaaggagacggagacggccctggcggccctggaggcccgactcctctctaattctgtggatgccgagtgtgaggggggcagcaccccgaggccgccggaggacgccctgtctggggactcggacgtggacacagccagcaccgtcagcctgcgtagtggcaagagcgggcccagccccacaaccccccagcctctgcgggcacagaaggagatgtcgccatccccgccagctgcacaggacccgggaggcaccgccctggtcagtgcccgtgagcagtcctcagagaggcagcatcacccacttggcccgacggacatgggccgtggagagccggtacggcgctcagccataaggcgtggccacaggccccgagggtccctggattggcccagtgaggagcgtggccctgtcctcgcccacctacccagctcagatgtgatggcctccaaccacgaaacccctgaggccaccggggcaggacggctaggttctcgccggaaaccagcggccccaccgccatccccagctgcccgggaggagcagagccgtagctcagccagctcccagaaggggccgcaggccttgacccgctccaacagcctgtccacccctcgccccacacgggcctcccggctgaggcgggcccggctgggggacgcttcagacactgaggctgcggatggtgagcgggggtccctgggcaaccctgagcccgtgggccggccagctgctgagcaggccaagaagctgtcacgcctggacatcctggccatgccccggaagcgggccggctccttcacagggactagtgaccccgaggcagcccctgcccgcaccagcttctctggccgcagtgtggagttgtgctgtgccagccgcaagcccaccatggccgaagcacgggctgtctccaggaaggctgccaacacagccaccaccacgggtccccgccagcccttcagcagggcccgctcaggcagtgcccgatacacctccaccactcagaccccgagggctggcagctccagccgggctcgttcccgggcccccggcccccgggacacggacgacgatgaggaggagcctgacccttatggtttcatcgtgcagacggcagagattgcggagattgccaggctgagccagacgctggtgaaggacgtggccatcctagcccaggagatccacgatgtggctggggacggtgacacactgggctcctcggagcctgcccacagcgcctccctcagcaacatgcccagcacccccgcctcgaccatctctgcccgggaggagctggtgcagcgcatccccgaggccagcctcaacttccagaaggtgccgcccggctcgctgaactctcgggactttgaccagaacatgaacgacagctgtgaggacgccctggccaacaagacgcggcctcggaaccgagaggaggtgatcttcgataacctgatgctgaacccggtgtcccagctgtcgcaggccatccgtgagaacacagagcaccttgccgagaagatgaagatcctctttcagaacacagggagagcttgggaggacctggaagccaggatcaacgccgagaacgaggtgcccatcctgaagacatctaacaaggaaatcagctccatcctgaaggaactgaggcgggtgcagaaacagctggaagttatcaatgccatcgtggaccccagtgggagcctggacctgctcacaggaaacaggagcttggccagctctgcacagccggggctggggaagggccgcgtggctgcccagagcccaccctcacccgcctcagccgaggccctgctgccagccctgcccctgaggaatttcccacagcgggccagctgtgggcctcccagcctcccggaccccaccttcctccctgatgccgagaggttcctgatctaggccccagacctggccaggccagcctccctgtgcgtgtgcgtctctgccttccgtccgccgcacacccgcctgcctggccgcaggtggttctccctgaagacccccacatgtgccatatccctgtgggcgggtgcctcccacgcccttgccccctcgtcagctcccagccagcaccctactcaccctgtccagccccatggccacccccacccctgcctcgccccctacaggcctctgggcccagctcctggccaggctgctgccaaggtcaagccctcaagggcattaccccgcctcctcttcatcactgttatttttgtctttagctttaaaggaaagagttgttggtgccattgcaggtgccccctccaggcctgactggctccgccaggcactaacctgccataaccctttgtgctggcctgcggccaggcagaggaagagaggtcgactgtggggtcatttggtgccaaacatggaggtgggcaggctcacctgttcctgggactgtctgagatggcagggcacttgccctggtggctcccacctgaccccaggccttttataggcaggagccccactgcttccagcctctggtgccaacacagttgccaaacccattgagcttggggctgccctgtggaggcctcctgggtatggaccaggggcttgttgagagctgagccatgcacacaggtgcagacaccccccaactcccatgcacacggctagtccaggcgcctccacgctgcaccgtgaggactgcagggcatgtccccgtgaggggctatgggcctctgtaggtgggcttccaaggtcctgggtgcagccgggtgcatggcagcccttctggcgggggtgagcgcacgaccaaagtcactggaagccgggtttccggaagctcgcagcttggcctgcaccacacgccctccccttttggcttcacgccatcaggcctcaagtgggcatgggggcagggacgggcccaggaactgttgttttctcaggattctttcagctgggaacatggcaggtgagcagagcttggtgcctctgccgtggcccctgctggggcagcccgtgttgccggagcctctaagccaaagagcccgttggccgtggttggtgggggtggacgtgggggtgtcccacctggaccagactggcgtgggtgagctccacaccctgcctggcaatggtatgagagtcggacctggacagggccagctgctgggggagcggcactggggactggaggctggaagcgggtggtgtgtgtcccctgtttacttttagctgagctggggttgggtgtacgggttctgttcctctgagcctgcggcccacctgatgtttacgtgtgtgtgtgagggggggcgggggtggcaggtgtccccccctggtccccgccccaagagcctgctgtctgtatggaggaggtgctagcccggtccaccgggctgctgcccacccctgcatgccccagttgcccaccccgcctgcccctggacatgaagtggtcacgcttcatccacggctccttcccacccctcggcagtggctgtgcaatgttttaagttcacaagttcctgctcctccccacactgagctcctttgttcctccccctccagcctttgcctgggaactggtccttgtttgccgggcttctcggagggttcactgtacattcgttctcaggtggtcttgtggctgtctttcggaaaatggttattttatatgatttgtcatggaatttgttctaataaatcattcttctatcacatggcagc

SEQ ID NO: 2839 - DNA, 458 bp, Homo sapiens
  source 1..458: mol_type = genomic DNA
ctcagtagcttcatctatagtatcagcataacaataattgagcagttttacctggctcacagcaaggactcggctatggcaaattttattttattttaattattttgttttatttttatttgtatcttattttattttttgagacgaagtctcactcttcacccaggctggagtgcagtggcacaatctcagctcactgcaacctctgcctcccaggttcaagcaatcctcccacctcagcctcctgagtagctgggactatagcaagagcctcctgatctagcagccaagactccccctgacctttggccatgtaccccaaccctctcatctactgcacctgctgggacccctggaacttgggaccacggaagctaatcaagacccctcaactaccacgcaagaactccacagggagttccaagctaactcctcttgtaccagctccaaaaaatcac

SEQ ID NO: 2840 - DNA, 1457 bp, Homo sapiens
  source 1..1457: mol_type = genomic DNA
ccagggcgcggtctggaggctcacgggagagaggctgtagccctgggcaatcccgggggtcgttacaggaaggtaggaaaatgccaccctcagggcactggttgggctaaaggtgacactggcgtctcacgggctatgaagacggaatgcctcttaatgccggaattccaagacggaatgcctcttaatgccgggcaagtctcacatgaagctactcatcatttgcttcgtgtcctccgagctccgagagttggcaaagctgatgaaggagcagtagacagcgacccaagcacaccacttcagctagggaaagaccgatttaaggctgcaaggaaggagtcctgggagcatggctttccctgagccaaagccgcggcctccagagctgccgcagaaacggttgaagacgctggactgcgggcagggggcagtgcgagccgtacgatttaatgtggatggcaattactgcctgacgtgcggcagtgacaagacgctgaagctgtggaacccgcttcgggggacgctgctgcggacgtacagcggccacggctacgaggtgctggatgcggccggctcctttgacaacagtagtctctgctccggcggcggggacaaggcggtggttctgtgggatgtggcatcagggcaggtcgtgcgcaaattccggggccacgcagggaaggtgaacacggtgcagtttaatgaagaggccacagttatcctgtccggctctattgattccagtatccgctgttgggattgccgctcacggaggcctgagccagtgcagacgctggatgaggccagagatggcgtgtccagtgtgaaggtgtcagaccacgagatcctggcaggctccgtggatggccgcgtgagacgctatgacctaaggatggggcagctcttctcagactacgtgggcagccccatcacctgcacctgcttcagccgggatgggcagtgcaccctggtgtccagcctggactccacattgcggctcctggacaaagacacaggggagctgctgggcgagtacaagggccataagaaccaggaatacaagctggactgctgcctgagcgagcgtgacacacatgtggtcagctgttctgaggacgggaaggtgttcttctgggacctggtggagggtgcgctggctctggccctgcctgtgggttccggtgtggtgcagtcgctggcctaccacccaacagagccctgcctgctgaccgccatgggaggcagcgtccagtgctggcgagaggaggcctatgaggcagaggatggagcaggctgaagccaggggacccaccaacaggaccaaggaccgagacacagacatggaaggacttcagataccatcttattctagagacgtagctgaccaaaaagtaggggaggggctgggtctgcaaattaataaatagaagagggggtaagaccttcctgggaccgca

SEQ ID NO: 2841 - DNA, 5529 bp, Homo sapiens
  source 1..5529: mol_type = genomic DNA
gatttgggagttgggaggtgagatgattggagtgaagagagttaatgtcatggaaaggaaaagctgtctgaagaaaaatacacattttaatgtccctcttcagccgtgcctgctgagagctctcctgggatgataagtgaaagtgtttggatttttttttaagttttaaaactctgccaaagcattgctcagtgtatctgggcagccccttccggcaaaacgcagcagtagcagaggcagcttctgagagcctgggcaggcagcagctggctgaccaagtccactggaagagaaggcttgtgccagccgggagaaggaagccggggacaggatgaaagcaacaacacctttgcagacagtcgaccggcccaaggactggtacaagacgatgtttaagcaaattcacatggtgcacaagccgggtctgtacaacccaccctacagtgctcagtcacaccctgctgcaaagacccaaacctacagacctctttccaaaagccactccgacaacagccccaatgcctttaaggatgcgtcctccccagtgcctcccccacatgttccacctccagtcccgccgcttcgaccaagagatcggtcttcaacagaaaagcatgactgggatcctccagacagaaaagtggacacaagaaaatttcggtctgagccaaggagtatttttgaatatgaacctggcaagtcatcaattcttcagcatgaaagaccagcctccttgtatcagtcctctatagacagaagcctggaaagacccatgagttctgcaagcatggccagtgacttcaggaagcggaggaagagcgagcctgcagtgggtccaccacggggcttgggagatcaaagtgcgagcaggactagcccaggccgagtggacctcccaggatcaagcaccactcttacaaagtctttcactagctcttctccttcttccccatcaagagcaaaaggtggggatgatagcaaaatatgtccatccctttgcagttactcagggctcaacggcaacccctccagtgagttagattactgtagcacttacagacagcacttggatgtccctcgggactcaccaagagccattagtttcaagaacggctggcaaatggcccggcaaaacgcagaaatctggagcagcacggaagaaaccgtctctcccaaaatcaaatcccggagctgtgacgatctcctaaacgacgactgcgatagcttcccggacccgaaagtcaagtcggaaagcatgggctccctgttatgtgaggaggactccaaggagagctgccccatggcgtgggggtccccctacgtcccggaggttcgcagtaacggcagatcaaggatcagacacaggtcagcccgcaacgccccggggttcctgaagatgtacaagaaaatgcaccgcatcaaccgcaaggacctgatgaactccgaggtgatctgctccgtgaagtccaggattctgcagtacgagagcgagcagcagcacaaggacctgctgcgcgcctggagccagtgctccacggaggaggtgccccgggacatggtgcccacacgcatctccgaattcgaaaagctgatccagaagtccaaatccatgccaaatttaggggatgacatgctgtctcccgtaaccctagaaccaccgcaaaatggcctatgtcccaagaggcggttttccattgagtatttgctggaggaagaaaatcaaagcggcccccccgctcggggccggcgaggctgccagtctaacgccctggtgcccattcacattgaagtcaccagcgatgagcagccccgagcacacgtggagttttccgacagcgaccaggacggggttgtgtccgaccacagtgactacattcacctagaggggtcatccttctgcagtgaaagtgactttgatcacttttccttcacatcctccgaaagcttttacggatccagccaccaccaccaccatcaccaccaccaccaccaccgccacctcatcagctcctgcaaaggcaggtgcccggcctcctacactcgatttaccacaatgttaaaacacgaaagagccagacacgaaaacaccgaggagcccagaaggcaagaaatggaccctggcctttctaaacttgcttttctagtcagtcctgtgcctttccggaggaaaaaaaattcggctcctaagaaacagactgaaaaggcaaaatgtaaagcatctgtgtttgaggctctggactctgcccttaaagacatctgtgaccaaattaaagctgaaaagaaaagggggagcttgccggacaacagcatcctgcaccgcctcatcagtgagctgctgccagatgttcccgagaggaactcatccctgagagcgctgaggaggagccccctgcaccagcctctccacccactgcctcccgatggtgctattcattgtccaccctaccagaatgactgcgggagaatgccccgcagtgcctctttccaagacgtggacacagccaacagcagctgccaccaccaagaccgtggcggtgcactccaagaccgtgagtcccctagaagttactcatccactttgactgacatggggagaagtgcaccaagggaaagaagaggaactccagaaaaagagaaattgcctgcaaaagctgtttatgattttaaggctcagacatctaaggagttgtcatttaagaaaggagatactgtctacatcctcaggaaaattgatcaaaattggtatgagggagaacaccacgggagagtgggcatcttcccgatctcatacgtagagaaactcacacctcctgagaaagcacagcctgcaagaccacctccgccagcccagcccggagaaatcggagaagctatagccaaatacaacttcaacgcagacacaaatgtggagctgtcactgagaaagggagatagagttattcttcttaaaagagttgatcaaaactggtatgaaggtaaaatcccaggaaccaacagacaaggcatcttccctgtttcctatgtggaggtcgtcaagaagaacacaaaaggtgctgaggactaccctgaccctccaataccccacagctattctagtgataggattcacagcttgagctcaaataagccacagcgtcctgtgtttactcatgaaaatattcaaggtgggggggaaccgtttcaggctctgtataactatactcccaggaatgaagatgagctggagctcagagaaagtgatgtcattgatgtcatggaaaagtgtgatgacggctggtttgtggggacctcaagaagaaccaaattctttggtactttccccggaaactacgtcaagaggctgtgaattgcgctccctccttctgtagaggccgcctgccagccatgcacctgcgtcaacgcgcctgaaacaccccgcgggcctcccgttgtcatgccttacggtttccaatgcgccgtcaccatctccacctgccaccaaaccaccagcagagtagccgccgctgctgtgagcctggggacgacatggcaggctggtccccctccgtgaaagtgtggattcctacttcctgctctaagctttgacacgtcaaaatgtgggatcagaaagaaaaaaatcatgatatttaaaaatggtcaaatatttgaggcaaaaaaaaaaaaaaaaagtgtctccaggaggctgtccagcctcgtggctccatttcaacatctccccccaggcgatgttctcccccaagacgaccagaaaattgtttattggggaatgctgtggtttgcattttcatattcttcgcttggcagtgtgtattcttttcacaagtttgcctagtgtcttggtttacacaatatgacaactgtaactgtactttagctattgtttgcctgcacatacatgttgtaatatgcacagtgattacaacctttaaagcaagaggaggcgagttaatttggatgagtgtgattttgctgattgaatgtgagttttcaaataggagtctttttctgcaatttgtttgcattttttagaagtgcaaacagtaagtaaataaaagccttcggtaataatcatgacaatacaagaggctgagctaggctacaggggaaaactattgtgttgtaaagttgcatcgctattttatattaaaatgtaatgatcagcatcatgaacaatgagctcttagtgttttatttatctgaaaaaatgtaagtaaaagcagtgttagtgagaggtgcaaagaattattctaacagacacctgaaagtatctgtaagcaatactagtaggtaagatttcactgtgtgtacacatacacatttgagattgtatgagaacatataatccatatgatatgttgtacattttatggaaatgtaatagaatctcacacattattttatagaaatagagtacagaagcatcacaagtattaaagttggttttagcaaggattaggattactacaattatttttactataataattatttttcttctatggaactcagaatcctggctacatttgaggacaggaatatgttgagcctgattttcctggtgtgtgtaaaatatttcctaggaataaattaggcactttttagaagcaatgttaaatcattcaggttttattttctgccctgaagcagaaatttaaaaaatgatattgggacctggaaggtttaatatggttcacagtgcctgaattacacctgctccgaaaactagctttgtatttcttatgactttgcataagaactgttcatctttggatcttgagcaccttacagataaaactttttatggcatctctttcatggacagtgatattgatcttttcacaatgtacgtagcctctagaattttgtacatatgtttgctctttttttgtacagactagttgttgagaaaacaggggcgtttcctaatttggtctttatcctgcgacaacactttcagcagactagcctctccttatctcacagatcacaagcacccctagatagtgtgattctgtcagatagcatttatgcaaaaatctatgaagttaaaagatcgtagaagccaaatgaaatgtacatatctactgactgatgacaagggaatttcattaggaagaaggtaaagaaacatcgttgagtagcctaccttgatttctgtcaagttcataaccagcttcatattttaaaggcttcaggtttgaaattaagtcaactgcatgcagctttgctgataaatgaataattctctttgatgccatttatgagaaaagacttcaatatctgttgcctgtcatatttaagaaaaattactgtttctactctctgtatctgattttaaaagaaaaaactattcatacctggcttccaggtaattgactttgaattcttacaagcaaaggtcattgtgtttttcttgaatagacatctaataaattttgcttggaagtatacttcagtttttcttcttgacatttatctttataaaaattgtgtattttattccaacttgttaaactaagagaaaatgca

SEQ ID NO: 2842 - DNA, 1107 bp, Homo sapiens
  source 1..1107: mol_type = genomic DNA
cgcggggaaaatggcggcggcggcggcggcggctgcagctacgaacgggaccggaggaagcagcgggatggaggtggatgcagcagtccccagcgtgatggcctgcggagtgactgggagtgtttccgtcgctctccatccccttgtcattctcaacatctcagaccactggatccgcatgcgctcccaggaggggcggcctgtgcaggtgattggggctctgattggcaagcaggagggccgaaatatcgaggtgatgaactcctttgagctgctgtcccacaccgtggaagagaagattatcattgacaaggaatattattacaccaaggaggagcagtttaaacaggtgttcaaggagctggagtttctgggttggtataccacaggggggccacctgacccctcggacatccacgtccataagcaggtgtgtgagatcatcgagagccccctctttctgaagttgaaccctatgaccaagcacacagatcttcctgtcagcgtttttgagtctgtcattgatataatcaatggagaggccacaatgctgtttgctgagctgacctacactctggccacagaggaagcggaacgcattggtgtagaccacgtagcccgaatgacagcaacaggcagtggagagaactccactgtggctgaacacctgatagcacagcacagcgccatcaagatgctgcacagccgcgtcaagctcatcttggagtacgtcaaggcctctgaagcgggagaggtcccctttaatcatgagatcctgcgggaggcctatgctctgtgtcactgtctcccggtgctcagcacagacaagttcaagacagatttttatgatcaatgcaacgacgtggggctcatggcctacctcggcaccatcaccaaaacgtgcaacaccatgaaccagtttgtgaacaagttcaatgtcctctacgaccgacaaggcatcggcaggagaatgcgcgggctctttttctgatgagggtacttgaagggctgatggacaggggtcaggcaactatcccaaaggggagggcactacacttccttgagagaaaccgctgtcattaataaaaggggagcagcccctgagca

SEQ ID NO: 2843 - DNA, 1867 bp, Homo sapiens
  source 1..1867: mol_type = genomic DNA
cttcactgcgcaggcgccgagcggccgaggcgccgcggtcggctctgggactcgtctggcgtccctcagattgctgacagaactggaatctcctgcttggtggccctttagctccaagctttggaagacaccaccggaaacaaagcccagggaagatgtctccatgaccagttgtgaaccctttgggaaagaagggatactgataaaaattcctgctgttatttcccacagaacagagtctcacgttaaaccagggaggctcaccgtccttgtgtctgggttggaaatacatgactccagttctttgctcatgcacaggtttgaaagagaagacgtggacgacatcaaggtccactcaccttacgaaattagcatccgccagcggtttattggaaagccagacatggcctatcgtttgatatctgccaagatgccagaggttatccccattttagaagtgcagttcagcaagaagatggagctgttagaagatgcattggtgctcagaagcgcaagaacctcttcccccgcagagaagagctgctcagtctggcatgcagcatctgggctgatgggccgtaccctgcaccgtgagccacccgcaggagaccaggagggcacagcactgcacctgcagacaagcctgccagccctttctgaggcagatacccaggaactaacccagggcttccggcctatgtcgctgtcaacccagacagtgttggtgatgctttgctccgagtctgcaggagctttgtggagacagagactttcctagcagggcagcaagcggaagcttttcttccagaacagcctttgctcagggcatgagggagccggccaggcccacagcgcccagggcatcctcctcacggatgtgttggaggaaagtggctttggtgctatcctgggggaccatggccataagctggcagtgtcagccacgcatcagttgcgtttctttgttcaggttgtgcctcttgctgcctgcctgagtcacccagggctgctccccttcctggctctgacgccctcagcgggtcccacaagccgctcaggaccacagagtctggccatgggtctggccaggcatccactgatgctctaagctgcagcttctcttaggaacacttctatcaggtctggctcgcaggcatgccccagggccagcctggattgtactgtccttcaagcactccttgctctatttctttgaagtttataaaagtttgtttcccccaaaacccaaagcacttttaatcaggtagtttctgtggaggtcgaactggctggaaggaaggctggttcctggatttctttactcatgtagcagggactcaaggaagtctgatttgcgcctcgcctctgactcagagcccatgaaggttcctgtgtgaggccactggctgcctcggagctgacagcatcctgcacaatggctagatggcttgtcaccccaggccgcagaggaacaactgtttctagggtttggccagacttcacattctccattctttccatccctgttatgtggaatgcacacgatgccatgtaattacttcagtcccttctcaaaggaaaaagaatctggacctgcactccaggacactagcagtttgaaggttcgctcaggaatgttctttgtctgcagacctagcagctgtacagatcgctcttgtgtttttgcactattaattaacttcaagtgcaattttggcaggcaggccaagggtctcaacaggctatttggaatgagttctcttttaaggccttcaacgtagtgagacattttcaaatcaaaaagtacagcaggagccagcctttattttgtctgtgtacacaataaaatattccgcttctataggca

SEQ ID NO: 2844 - DNA, 1890 bp, Homo sapiens
  source 1..1890: mol_type = genomic DNA
gcggaggcccggcgtgacaagcggcccagactcccgtgggcgccgcacacctgttgtttgcagcagccagcgacccgcactaccgctctcggcgggcggggaagcggccgcagcggagccgacccggcaggtggccgcgggcggggccggcgagcgaaagtgcgcgggggcccgaccaccgcggggccgggacgcgatggcggcggcagagcccgcgagctcgggccagcaggcgccggcagggcaggggcagggccagcggccgccgccgcagcctccgcaggcgcaagccccgcagccgcccccgccgccgcagctcgggggcgccgggggcggcagcagcaggcacgagaagagcctggggctgctcactaccaagttcgtgtcgctgctgcaggaggccaaggacggcgttctggatctcaaagcggctgctgatactttggctgtgaggcaaaaaaggagaatttatgatatcaccaatgtcttagagggaattgacttgattgaaaaaaagtcaaaaaacagtatccagtggaaaggtgtaggtgctggctgtaatactaaagaagtcatagatagattaagatatcttaaagctgaaattgaagatctagaactgaaggaaagagaacttgatcagcagaagttgtggctacagcaaagcatcaaaaatgtgatggacgattccattaataatagattttcctatgtaactcatgaagacatctgtaattgctttaatggtgatacacttttggccattcaggcaccttctggtacacaactggaggtacccattccagaaatgggtcagaatggacaaaagaaataccagatcaatctaaagagtcattcaggacctatccatgtgctgcttataaataaagagtcgagttcatctaagcccgtggtttttcctgttcccccacctgatgacctcacacagccttcctcccagtccttgactccagtgactccacagaaatccagcatggcaactcaaaatctgcctgagcaacatgtctctgaaagaagccaggctctgcagcagacatcagctacagatatatcttcaggatctattagtggagatatcattgatgagttaatgtcttctgacgtgtttcctctcttaaggctttctcctaccccggcagatgactacaactttaatttagatgataacgaaggagtttgtgatctgtttgatgtccagatactaaattattagattccatggaaacttgggactgttatctacctctaactgtgtaacattttagacttcttaataacctaaatatttaaaataatgaatgtaacaccttttttagttcactgattctgaagtgttcttccctaatactttctttacttcacaaaacttcaaccataaaaacaaagggctctgattgctttaggggataagtgatttaatatccacaaacgtccccactcccaaaagtaactatattctggatttcaacttttcttctaattgtgaatccttctgttttttcttcttaaggaggaaagttaaaggacactacaggtcatcaaaaacaagttggccaaggactcattacttgtcttatatttttactgccactaaactgcctgtatttctgtatgtccttctatccaaacagacgttcactgccacttgtaaagtgaaggatgtaaacgaggatatataactgtttcagtgaacagattttgtgaagtgccttctgttttagcactttaagtttatcacattttgttgacttctgacattccactttcctaggttataggaaagatctgtttatgtagtttgtttttaaaatgtgccaatgcctgtacattaacaagatttttaaaaataaaattgtataaaacattcaa

SEQ ID NO: 2845 - DNA, 261 bp, Homo sapiens
  source 1..261: mol_type = genomic DNA
gcgcctcggcccgggccttactctccaccgactgcgtcaggatgagctccaggttttctttgggccgatgcttcgtgtcctccaccagcttatagacgcgatgtcgccggtgcaggcgcggcttccggccctccccggccagcggtaccttccaccagcgctccacgatgaccgtgccctggcggccaggaaagcgacgcatcacttataaggaagaggaggacttgacactccagccccgttcctgcctccagtgctcct

SEQ ID NO: 2846 - DNA, 557 bp, Homo sapiens
  source 1..557: mol_type = genomic DNA
aatttgaagggtttcttgtagagagaaatgcacattttgacgtacatttgattcaagtgcagggtgtcttttatgaataatcaaaagcagcaaaagccaacgctatcaggccagcgttttaaaactagaaaaagagatgaaaaagagaggtttgaccctactcagtttcaagactgtattattcaaggcttaactgaaaccggtactgatttggaagcagtagctaagtttcttgatgcttctggagcaaaacttgattaccgtcgatatgcagaaacactctttgacattctggtggctggtggaatgctggccccaggtggtacactggcagatgacatgatgcgtacagatgtctgcgtgtttgcagcccaagaagatctagagaccatgcaagcatttgctcaggtttttaacaagttaatcaggcgctacaaatacctggagaaaggttttgaagatgaagtaaaaaagctgctgctgttcttgaagggtttttcagagtcggagaggaacaagctagctatgttgactggtgttcttctggctaatggaac

SEQ ID NO: 2847 - DNA, 565 bp, Homo sapiens
  source 1..565: mol_type = genomic DNA
gagcggcggtaagtgagccgcggcgggcgagggtgtagtggggtcttgctgggccggttttggaggcctggagtcaaggggcgagctcgccagggagggcgagggtcacagcaagtctcaggatcctcctctgccagtttctgggtggtccttcctcctccagggactcactgattccggctggcgcccttcgtctgtagccgcgtcccctcagactggttcagtccggggtcttctgacttggaagctcgtgctgatttcctaagtcagcccctcctgtcctcttggcaagaaataatggcggcagctacgggggatcctggactctctaaactgcagtttgccccttttagtagtgccttggatgttgggttttggcatgagttgacccagaagaagctgaacgagtatcggctggatgaagctcccaaggacattaagggttattactacaatggtgactctgctgggctgccagctcgcttaacattggagttcagtgcttttgacatgagtgctcccaccccagcccgttgctgcccagctattggaacactgtataaca

SEQ ID NO: 2848 - DNA, 3700 bp, Homo sapiens
  source 1..3700: mol_type = genomic DNA
ggtgaaaaccggcagaaagacattaagagattttcctgcagtcactgctggcagatgatagagccaggatttgaaagcaggcagcctggctccagaccctgtgctcttaactcccgttttgcatcaagaacagaatcctatgaaaggcttgcacagtgcttggtactgagtaggcactccgtcagtattttagtagctattattccaaaggacactgtattctaggtactaagacaatgtgaatggaatggaaaacaattcctccctgcagaagccaactgtctaggaagacagataatgacattattaaaataatcagaacattggcaaaataaagaagattgaaatgcagttcatatgacagtgctaattaatcatactttttagatctaggaaaggccataaaggttaaattgacttggaaatggtaaacaagacaatggttgtgtcactgatcggtgatggccagtttttggttatccttatttgccatttaaatgattgaattgaaaggaagaagtaagacttggaagatgaatattgaaggaaaggtgaagatggaaaagagaagggggtttattctgagaacagtgactagaactctgaggtatggtagaaatttcaggataacagatgataaaggggaatgaagccatggagaggaagagaatgataatattaattgtgaaagtttgtgtcaagtgttttctgagtcacctttctttcagtttctcatttctagtattgtataaatgagtttaacatcaaaatggtatagtgaaaaaaaggatgaactgcttgacagaagaggtcagatctagttttgactctagcttatttagctttacagctttaaataaattacagtgtctttaaagctctggatcttaagttttctaattgttttttaaacaaagatttgtgaacacctacttacaatgtgacaaatgtctttgtaaggcattatgggagataaaagctgcattaaacctggctgttgtacttacaagtaatttggaaggcaaaatttcaaatacttgaacctaaagtagggtttcttggttttcatttaattgaaatactgttaggaaacaaaaatttttcataaatttttcttgtggatatgtaagtaaattctatatatctagcaatatgatacatctatagttctgtttaaaggtaacaatgtgaggaagcttatgcgaataacttgacagaagaaatctaaagtaaaagcattttcctagtaggctagcttgttctcttatttcatttattgtaacagtttcactttttaataattatgtgaaattaggaaacagatattctagggcattctgtttagggtgatgaacttattcatgaatgttattaaaaccatttaaatatgccatagtttaaatttgtgatccatgctgttcaatctgtgacctaggatagcagcatcaaggagcattgtgtacatgcagaagtgcacagtacctggagtgaaactgcttgtgttcgatttctgataccattcataactggctgtgtgatctcaaaacctctaaaatgcagacctccagctctagatctgtgcacctgagtgaatggcagaagaattacttcgcaattacatctggcatatgtaccggaccgaaggcagatgcataccgtgcacagatattacgcattcagtatgcatgggcaaactctgagatttcccaggtctgtgctaccaaactgttcaaaaaatatgcagagaaatattctgcaattattgattctgacaatgttgaatctgggttgaataattatgcagaaaacattttaactttggcaggatctcaacaaacagatagtgacaagtggcagtctggattgtcaataaataatgttttcaaaatgagtagtgtacagaagatgatgcaagctggcaaaaaattcaaagactctctgttggaacctgctcttgcatcagtggtaatccataaggaggccactgtctttgatcttcctaaatttagtgtttgtggtagttctcaagagagtgactcattacctaactcagctcatgatcgagaccggacccaagacttcccggagagcaatcgtttgaaactccttcagaatgcccagccacctatggtgactaacactgctaggacttgtcctacattctcagcacctgtaggtgagtcagctactgcaaaattccatgtcacaccattgtttggaaatgtcaaaaaggaaaatcacagctctgcaaaagaaaacataggacttaatgtgttcttatctaaccagtcttgttttcctgctgcctgtgaaaatccacagaggaagtctttttatggttctggcaccattgatgcactttccaatccaatactgaataaggcttgtagtaaaacagaagataatggcccaaaggaggatagcagcctgcctacatttaaaactgcaaaagaacaattatgggtagatcagcaaaaaaagtaccaccaacctcagcgtgcatcagggtcttcatatggtggtgtaaaaaagtctctaggagctagtagatcccgagggatacttggaaagtttgttcctcctatacccaagcaagatgggggagagcagaatggaggaatgcaatgtaagccttatggggcaggacctacagaaccagcacatccagttgatgagcgtctgaagaacttggagccaaagatgattgaacttattatgaatgagattatggatcatggacctccagtaaattgggaagatattgcaggagtagaatttgctaaagccaccataaaggaaatagttgtgtggcccatgttgaggccagacatctttactggtttaaggggaccccctaaaggaattttgctctttggtcctcctgggactggtaaaactctaattggcaagtgcattgctagtcagtctggggcaacattctttagcatctctgcttcatccttaacttctaaatgggtaggtgagggggagaaaatggtccgtgcattgtttgctgttgcaaggtgtcagcaaccagctgtgatatttattgacgaaattgattccttgttatctcaacggggagatggtgagcatgaatcttctagaaggataaaaacagaatttttagttcaattagatggagcaacaacatcttctgaagatcgtatcctagtggtgggagcaacaaatcggccacaagaaattgatgaggctgcccggagaagattggtgaaaaggctttatattcccctcccagaagcttcagccaggaaacagatagtaattaatctaatgtccaaagagcagtgttgcctcagtgaagaagaaattgaacagattgtacagcagtctgatgcgttttcaggagcagacatgacacagctttgcagggaggcttctcttggtcctattcgcagtttacaaactgctgacattgctaccataacaccggatcaagttcgacccatagcttacattgattttgaaaatgcttttagaactgtgcgacctagtgtttctccaaaagatttagagctttatgaaaactggaacaaaacttttggttgtggaaagtaagtgggatacttggaatcaaggcatctctgtagtacagtcttctttattttttagcatagaaagttggggatgtgttaattgtatttttaagaatatattctaagttctgtacttcaaataa

SEQ ID NO: 2849 - DNA, 2959 bp, Homo sapiens
  source 1..2959: mol_type = genomic DNA
tttgaggcccaagggggagcgagccggtgctgctgcaggctgaggctgcggcagaggcggcgaggcgcgggcggtgaggacggacagtcaccgacttagtccagttccctgtgatctcaaaacaattgttgcagcaggctcctggcagtctcaagcagttcatcttcttggtgtactggtttcctattgtgattttatcatggaaaatcaattggctaaatcaactgaagaacgaacatttcagtaccaggattctcttccatcactgcctgttccttcacttgaagaatcattaaaaaaataccttgaatcagtcaccagaacatgctaccagataaggggtcttgatccagatgctaagagagggttcttggatctcacgcgggaaggaattcaagtgaaaccatttgcaaatcaagaagaatataagaaaactgaagaaatagttcaaaaatttcaaagtgggattggagaaaaattgcaccagaaattgcttgaaagagcaaaaggaaaaagaaattggctggaagagtggtggctgaatgttgcctatctggatgttcgtataccatcacaattgaatgtcaactttgcgggtcctgcagctcattttgaacactactggcctccaaaggaagggactcaattagaaagaggaagtataactctttggcataacttgaactactggcagctattaagaaaagaaaaagtgcctgttcataaagttggaaatactcctctagatatgaatcaattccgaatgctattttctacctgcaaggttccaggaattactagagactccattatgaattattttaggactgagagtgaagggcgttccccaaaccacattgtagtgctgtgtcgaggccgagcttttgtctttgatgtaatacatgaaggatgtttggtcaccccgccagagcttctcagacaactgacatatatccacaagaagtgccatagtgaacctgatggacctgggattgcagcattaactagtgaggagcgaactcgatgggctaaggcacgagaatatctgattggtcttgatccagagaacttggctttgttagaaaaaattcagagtagtttactggtatattccatggaggatagcagtccacatgtaacaccagaggattattctgagattattgcagccatccttattggagatccaacagtacgctggggtgacaaatcctataacttgatttccttttctaatggagtatttggctgtaattgtgatcatgctccttttgatgcaatgattatggtgaacatcagttattatgtggatgagaaaatttttcagaatgaaggaagatggaagggttcagagaaggtacgagatataccacttccagaagagctcattttcattgtggatgagaaagttttaaatgacatcaaccaagctaaagcccagtatctcagggaggcatctgatctacagattgcggcttatgcctttacatcttttggcaaaaagctaaccaagaacaagatgcttcacccggatacgtttattcagcttgcacttcagctggcctattacagacttcatggacaccctggttgttgctatgaaacagctatgacaagacatttttatcatggccgtacagagactatgcgatcatgcacagttgaagcagtgaggtggtgccagtccatgcaggatccttctgtcaatcttcgtgagcggcagcaaaagatgttacaagcttttgcaaagcataataaaatgatgaaagattgttcagctggaaaaggatttgatcgtcaccttttaggtctcttactcatagcaaaagaggaaggtcttcctgttccagaactctttacggacccacttttttccaaaagcggaggaggtggaaattttgttctctcaacaagtctggttggctatttacgagtccagggagtggtagttcccatggtacacaatggttatggatttttctaccatatcagagatgacaggtttgttgtggcctgttcagcctggaaatcctgtcccgagactgatgcggaaaagctagttcagctgactttttgtgcttttcatgatatgatacagctgatgaactctactcatctttagagatgaatcatctattaagcacttaccaaaacatatcattaaactgagtgctgggagtgagttggtaatatgagatgggaaggaatgttgacttgctaacattcctttaacaagttaagaaaacttgttaaatgtagaaattagtagaatcatgctctctaaatttattctgccatagaaggtagaaatatttttaagctcctctgatgcagcagcaatgcaaattatgacatagtgaatatagaactatgcagtatttaagcctcaacaatccaaatctacaaactttaacaatgcaagtcttactctaatttttaagtatttttgttggtacttacatgggttataaatcctctctctggacatcaatgtagagtccatctttcaagcactttaatttttttagctgccaaagggtatgaattacattattgtatgctaatttccctgaaatcaatgccttctatgttcaccacagggatacaagcctgttatgtttgatgggaaagaccactacaatctaatggtgatctaaaataacttttttgggctgggtgcagtggctcatgcctataatcttagcactttgggaggccaaggtaggaggattgcttgaagctaggagtttgagaccagcctgggcaacagggtaaggtcctgtctctacaagatcaaaaacttagccgggtatggtggtgcatgtgtgcctgtagtccaagctacttgaaggctgagacaggaggatcggttgagcccaggaggttgtggctgcagtgagctgtgatgtgcccttatgctatagcctgggcaagagcgtgagaccctgtctcaaagaag

SEQ ID NO: 2850 - DNA, 603 bp, Homo sapiens; identical to SEQ ID NO: 2833
  source 1..603: mol_type = genomic DNA

SEQ ID NO: 2851 - DNA, 2198 bp, Homo sapiens
  source 1..2198: mol_type = genomic DNA
gacaagacatttcaaagaaagtattaaattcattcacgagtgccggctccgcggtgagagctgccttgtacactgcctggccggggtctccaggagcgtgacactggtgatcgcatacatcatgaccgtcactgactttggctgggaggatgccctgcacaccgtgcgtgctgggagatcctgtgccaaccccaacgtgggcttccagagacagctccaggagtttgagaagcatgaggtccatcagtatcggcagtggctgaaggaagaatatggagagagccctttgcaggatgcagaagaagccaaaaacattctgggtaaatataaggagcaagggcgcacagagccccagcccggcgccaggcggtggagcagttttccggcactggctccgctgacctacgataattatacgacggagacctaacgcaagcgacctgctgccttccttcccactgcttgtcttcagtgtgcccggctgggcaggggtgcggtggtggtggccgatgaggacaggaaagggagatagccagggcgaggtggggcgagggctccttcccccaagcaacaccgcccagccctgctccaggcccctgcactccgcccacccctaccctggctgcacctgagcttgctgcccctggggatgttgcccagtggctgtgcactgctctgtgcacgtgcgtgtgtgtgagtgcacttgtgtgtgggtgactaagtggatgcatgtgtgtgcctgtgtgagtgagggtatgtgcacctaagtgtgtacatgtgtgtatgttgtgaaagtgtctgtgcacatgaatgtttgtgtgtgtgtgaactctttcttactgctggaagtcacagaattcatattgctgcccgggttggtgtggccacctttccctttgtccaagactccacatggaaggcatttgagctcgacctccgaaaagctacccagcaaagagcagtctgtgcctctgagcagaccgtgagaactcaggggacgagtggctaagagcatggcctctcccagaacccacccagggtggtgtggtgggggcaacaggggccagactcctctagagggagggtggctctggggccctggaaaacgtgagagactgccctgagctggtccagtgggccagcactttataccaactcagcatttaagggaagtatcttagattgcctccatctcaatgtgaatgcaccaggctgagggttccctagcgccttgagtcaaggccacttttcagcccatcgagccctgagttctacttggtgtttgttctctggagctgattgcacttgagctctgtggtgggcaggcgcactttagcctaagttgggtgccccagggcaccccctcctctctgctccttgccagcttcattcactcccagcctctcgctgtcctcactttgcaggggctcctcctcaacatttgcatgcacctgcaagaattgggaagaaagagcatttattaggcactgtagcaatttgcattttaaaatgcctgagcatttattaagcttcttggtattcacttgggtttgataattgatctgagctacctcattgaatgtttttggaaaggtgttttttggtatgcaagtcagctttgcctcacagttgaaaatgttcggtcatgattgcttttgaaaccaaaggggaaggtaccgatatcattgagctatttaaagttgccagtttgggctccagtaatgctttctggtgggtaaaattccacattcaggccacgagagcatctacagtttgtactctggggctgcaggcatcctgggacgctgtacgcaattcagtggtctagtcctttataccgactcagattccttaagcatgcagagtcactcgaatgaaaaaacatactcgacctctccctaaaaagatgttgcaacccagtttctctgaattccaccacaaaaagagaccctgaataagaagagcagttttcctgtgcatatagagggtgtgtcaaaggtgagctttttggggaccgggaaaaacaaagttgcctgattccgcgcaggtgcacaggccccggatgtacacccggaaaggggagtgtggctgtagaatcatccatccgtctacagctaaaacaatttgccaataaagtacatgtttttcctaagccaaaaataaatacgttaacagaaaaatgatttaggatatagctt

SEQ ID NO: 2852 - DNA, 738 bp, Homo sapiens
  source 1..738: mol_type = genomic DNA
gccgccatcgctgtgagccctgtactatcagccatggtcaactccgtcatcttttttgacatcaccgtcgacggcaagcccttgggccgcatctccatcaaacagtttgcagacaagattccaaagacagcagaaaactttcgtgctctgagcactggagagaaaggatttcgttataagggttcctgctttcacagaattattccagggtttatgtgtcagggtggtgacttcacacaccctaatggcaccggtgacaagtccatctatggggagaaatttgatgatgagaacctcatccgaaagcatacaggttctggcatcttgtccatggcaaatgctggacccaacacaaatggttcccagtttttcatctgcactgccaagactgagtggttggatggcaagcatgtggcctttggcaaggtgaaagaacgtgtgaatattgtggaagccatggagcactttgggtacaggaatagcaagaccagcaagaagatcaccattgctgactgtggacaattctaatgagtttgacttgtgttttattttcaccaccagacccattccttctgtagctcaggagagcacccctccaccacatttgcttgcaatatcctagaatctttgtgctcttgctgcagttccctttgggttccatgttttccttgttcccttccatgcctagctggattgcagagttaagtttatgattatgaaataaaaactaagtaacaa

SEQ ID NO: 2853 - DNA, 674 bp, Homo sapiens
  source 1..674: mol_type = genomic DNA
gaggtggccgccgctggctccctgggccccagcctggttcccgcgcgggccgcggctgccttccagacgcagggcatgcgacctgttggagtgtgaaattctaggggccgggttcctccccagagcggttttatttccgactggactgtgctgcgggtctcagaggccctctggtccgttcaggtgcaggcctgagtgttccttccagcatgtcggagggggagtcccagacagtacttagcagtggctcagacccaaaggtagaatcctcatcttcagctcctggcctgacatcagtgtcacctcctgtgacctccacaacctcagctgcttccccagaggaagaagaagaaagtgaagatgagtctgagattttggaagagtcgccctgtgggcgctggcagaagaggcgagaagaggtgaatcaacggaatgtaccaggtattgacagtgcatacctggccatggatacagaggaaggtgtagaggttgtgtggaatgaggtacagttctctgaacgcaagaactacaagctgcaggaggaaaaggttcgtgctgtgtttgataatctgattcaattggagcatcttaacattgttaagtttcacaaatattgggctgacattaaagagaacaaggccagggtcatttttatcacagaatacatgtcatct

SEQ ID NO: 2854 - DNA, 1272 bp, Homo sapiens
  source 1..1272: mol_type = genomic DNA
tgcccctctaccatgtggcccttcccgagccgctctctcttcccacccccgactcaggcctggctccagacggtctcctcagaccctgaggcccagggctggggggcctggaacgagaccaaggagattctggggccagagggtggggaagggaaggaggagaaagaggaggaagaggatgcagaggaagaccaggatggggatgcaggctttctgctgtctctgctggagcaagagaacctggctgagtgcccattgcctgaccaggagctggaggccatcaagatgaaggtgtgtgccatggagcaggccgaggggacgccacggcctccaggagtgcagcaacaggccgaggaagaggagggcaccgcggccgggcagctgctgagccctgagaccgtgggctgccccctctctgggacccccgaggagaaggtggaggctgaccacagatccgtctacgtgggcaacgtggactacgggggctccgccgaggagctggaggcccacttcagccgctgtggggaggtccaccgagtcacgatcctgtgtgacaagttctctggacaccccaagggttatgcctacatagagtttgccaccaagggctccgtgcaggccgccgtggagctggaccagagcctcttccggggccgggtcatcaaggtgctgccgaaaagaaccaacttccctgggatcagctccacagaccgcgggggccttcgaggacacccaggctccaggggggcacccttcccccacagcggcctccagggcaggccccggctcagaccacaagggcagaaccgggcccgtggaaaattctcaccatggttttcaccgtattaaagggaagacccgattttgagagaggggctggggcctggatcaggagtaaaccacttgtgctccatcctggggctggggcagggagtggcgcgggggcgaggccagaggagaggggtgtccagagcagccactggccccctcttggcggggggatggcccagtagggccttgtatggtggtccagacccaaggccacagccacgagtcacagccacggcccggtggtgagcctggcatgggccccacggggatctgcggggctctgggtgttgagggaggggaggagcagagtcccaggcagtgccaggccagcttggggttggcatgctcagctcttcaactaagtcattttaagaaaaatagaaacgtgtgtcttaatggtgaagcataaattattaaacttgggctctttttaaaagcaaa

SEQ ID NO: 2855 - DNA, 543 bp, Homo sapiens
  source 1..543: mol_type = genomic DNA
acaatatacaaggtagccagaagtgaatatgattgagaattctcattagtgtgaggagacagtttgaagtccataaggttggaaattgcaaattaatcatttgtatataagtcagtttaattcagatctgctttgtgacaaggttaggagagaatgtggggcttaaaggtgatgtcgacaatgaaagccatttcttcttatggttgacgatgtgtcacactgtgtaagggaatcgcatggagatgggcattccgaactgttaatggggacatgggactccagttgtctctgatcacttgtgtggattttcctggcgtagaacgacagaagccgctagtaagtcgccaagacctacagcaggaattctgcaccaaagggcataaaatcttgttattttaatttgcatctgggagaatgtctgagcaaggagacctgaatcaggcaatagcagaggaaggagggactgagcaggagacggccactccagagaacggcattgttaaatcagaaagtctggatgaagaggagaaactggaactgcag

SEQ ID NO: 2856 - DNA, 966 bp, Homo sapiens
  source 1..966: mol_type = genomic DNA
agtggtcaaggccgcgctcgcgccgaggggctgcgagagtgaccgcggctgctccagcgctgacgccgagccatggcggacgaggagcttgaggcgctgaggagacagaggctggccgagctgcaggccaaacacggggatcctggtgatgcggcccaacaggaagcaaagcacagggaagcagaaatgagaaacagtatcttagcccaagttctggatcagtcggcccgggccaggttaagtaacttagcacttgtaaagcctgaaaaaactaaagcagtagagaattaccttatacagatggcaagatatggacaactaagtgagaaggtaagcttagacagccttgaggaactttactgttacctgctttatcaaaacatggcttcaaaaggtcagctgcatcttcactggattacagaattcttgctgactctcagaagaaattgttggagagaatagtcatacctactttaaaagagaataaattgcctttcctaaattcctctgcttcgctcctttcctggcgttgctctggaaccttgttggtgtctgtgacccaatgactgttagggtcagctagcttcaattgcccctgcactggaagcaaggtttgtcagtaacaccaattaaaatactaccagtgtaagtagaaggtgtgttttgcagatgagaaggtgctaagatgccttgcttatgttctctgtgttgctgtaataccatgaggggtatgttgtggcaaacctggcctttgagatcaagacgaaccccacctgccctgagaagccgtctgctaccaccacagcctacccgaattggtcctgtcccctaaacccctcacactgagaactgcttgtgtgggagagagctggttgggttgatcttttccgagtgtgacttacctccttcaaggggatgtttaagcttctcgggcagaagtggtgtgtctattcctgacaccaaaca

SEQ ID NO: 2857 - DNA, 6603 bp, Homo sapiens
  source 1..6603: mol_type = genomic DNA
gccacagggacagccggtgggctcggtggggctgcagaaggtcggggctgcactgctctcggcccccacacggttggttggttggcgtggtaagtgccctgatccctggtcctgagaactcaggctggcacagggattcccagggcatctaccaccacgcagctggagcagggctgagcccaggagcatggagatggacgcccccaggccccccagtcttgctgtccctggagcagcatcgaggcccgggagggctgccatcagcagcagtgagccatcacctctgctggccacattgtgttttttctcctagaactgtggacaacggaaggctgagccccatccattgagttcctggggccccactggaggggctgctgtggccagggtgcacggtcacaaatgaagacaccaaggcgcagagaggtgactcagcctgccctcagtcacctatctgctcctggaggtgatccccgactccatgaggaagcaagaggtgcggacgggcagggaggccggccagggccacggtacgggctccccagccgagcaggtgaaagccctcatggatctgctggctgggaagggcagtcaaggctcccaggccccgcaggccctggataggacaccggatgccccgctggggccctgcagcaatgactcaaggatacagaggcaccgcaaggccctgctgagcaaggtgggaggtggcccggagctgggcggaccctggcacaggctggcctccctcctgctggtggagggcctgacggacctgcagctgagggaacacgacttcacacaggtggaggccacccgcgggggcgggcaccccgccaggaccgtcgccctggaccggctcttcctgcctctctcccgggtgtctgtcccaccccgggtctccatcactatcggggtggccggcatgggcaagaccaccctggtgaggcacttcgtccgcctctgggcccatgggcaggtcggcaaggacttctcgctggtgctgcctctgaccttccgggatctcaacacccacgagaagctgtgtgccgaccgactcatctgctcggtcttcccgcacgtcggggagcccagcctggcggtggcagtcccagccagggccctcctgatcctggacggcttggatgagtgcaggacgcctctggacttctccaacaccgtggcctgcacggacccaaagaaggagatcccggtggaccacctgatcaccaacatcatccgtggcaacctctttccggaagtttccatctggatcacctcccgtcccagtgcatctggccagatcccagggggcctggtggaccggatgacggagatccggggctttaacgaggaggagatcaaggtgtgtttggagcagatgttccccgaggaccaggcccttctgggctggatgctgagccaagtgcaggctgacagggccctgtacctgatgtgcaccgtcccagccttctgcaggctcacggggatggcgctaggccacctgtggcgcagcaggacggggccccaggatgcagagctgtggcccccgaggaccctgtgcgagctctactcatggtactttaggatggccctcagcggggaggggcaggagaagggcaaggcaagccctcgcatcgagcaggtggcccatggtggccgcaagatggtggggacattgggccgtctggccttccatgggctgctcaagaagaaatacgtgttttacgagcaagacatgaaggcgtttggtgtagacctcgctctgctgcagggcgccccgtgcagctgcttcctgcagagagaggagacgttggcatcgtcagtggcctactgcttcacccacctgtccctgcaggagtttgtggcagccgcgtattactatggcgcatccaggagggccatcttcgacctcttcactgagagcggcgtatcctggcccaggctgggcttcctcacgcatttcaggagcgcagcccagcgggccatgcaggcagaggacgggaggctggacgtgttcctgcgcttcctctccggcctcttgtctccgagggtcaatgccctcctggccggctccctgctggcccaaggcgagcaccaggcctaccggacccaggtggctgagctcctgcagggctgcctgcgccccgatgccgcagtctgtgcacgggccatcaacgtgttgcactgcctgcatgagctgcagcacaccgagctggcccgcagcgtggaggaggccatggagagcggggccctggccaggctgactggtcccgcgcaccgcgctgccctggcctacctcctgcaggtgtccgacgcctgtgcccaggaggccaacctgtccctgagcctcagccagggcgtccttcagagcctgctgccccagctgctctactgccggaagctcaggctggacaccaaccagttccaggaccccgtgatggagctgctgggcagcgtgctgagtgggaaggactgtcgcattcagaagatcagcttggcggagaaccagatcagtaacaaaggggccaaagctctggccagatccctcttggtcaacagaagtctgacctctctggacctccgcggtaactccattggaccacaaggggccaaggcgctggcagacgctttgaagatcaaccgcaccctgacctccctgagggtgaaattcatgtaccataaaattgactgttttaggcgggtcccagaggctgatgcctgtaatcccagcactttgggaggccaaggcaggtggatcacttgaggtcgggagttcgagaccagcctggccaacatgcctccagggcaacaccgttagggatgatggtgccaggtccatggctgaggccttggcctccaaccggaccctctccatgctgcacctgcagaagaacagcatcgggcccatgggagcccagcggatggcagatgcccttgaagcagaacaggagtctgaaagagctcatgttctccagtaatagtattggtgatggaggtgccaaggccctggctgaggccctgaaggtgaaccagggcctggagagcctggacctgcagagcaattccatcagtgacgcaggagtggcagcactgatgggggccctctgcaccaaccagaccctcctcagcctcagccttcgagaaaactccatcagtcccgagggagcccaggccatcgctcatgccctctgcgccaacagcaccctgaagaacctggacctgacagccaacctcctccacgaccagggtgcccgggccatcgcagtggcagtgagagaaaaccgcaccctcacctcccttcacctgcagtggaacttcatccaggccggcgctgcccaggccctgggacaagcactacagctcaacaggagcctcaccagcttagatttacaggagaacgccatcggggatgacggagcgtgtgcggtggcccgtgcactgaaggtcaacacagccctcactgctctctatctccaggtggcctcaattggtgcttcaggcgcccaggtgctaggggaagccttggctgtgaacagaaccttggagattctcgacttaagaggaaatgccattggggtggctggagccaaagccctggcaaatgctctgaaggtaaactcaagtctccggagactcaatcttcaagagaattctctggggatggacggggcgatatgcattgccacagcactgtctggaaaccacaggctccagcatatcaatctccagggaaaccacattggggactccggggccaggatgatctcagaggccatcaagacaaatgctcccacgtgcactgttgaaatgtgatcctggtggacggatcaggagaatgggcagatgctcagctggaagcttttgaacagaaaggccgacttctggggggcctgtctgggagctgggaacgctgcttgctcagcacgagagccgggctctgcagggaggaaggagaggtgctgccggaggaggtcgtgagctcctcttctgctgcaggagtggtccaggcagggggtgacgggtactctgttatggcacagagaagggaggggccacccccaagggactaggggccaaaggcctgaaagctgagcagtacaggaggctggttccagctttacaccctgaggacttcatgtgtccccaacctttaaaaatgtttattactgcccctttccactcacctggttaaaaatcatcccatgctctgagatgagctgccacctcaagcccgtgaggagcatccgtttggtaggggtaacagaggggacccttctttatcttctcaagaagaagatttcagggtatcatccttacagacatgaaaaagctatgggaaaattgtgaagataaatgaaagttttaattctaggattctggaaacagagacagtaagagttctccaaggattttgccttttttgtttgtttttgagatggagtctcgctcttgtcgcccaggctggagtgcagtggcacgatctcagctccctgcaacctccgcctcccgggttcatgtgattctcctgcctcagcctccccagtagctgggaatacaggcacccgccaccatgcccggctaatttttgtagttttagtagagacggggtttcatcatgttggccaggctggtctcgaactcctgacctcaggtgatccatcagcctgggcctcccaaagtactgggattacaggcatgagccaccacacctggccccattttttatttattacaaaatcaaagacatgggtgatgcctggcacatgttgtctggagtctggcacactggttatcaatagcacattcagtgtattcagtgatgtcattctttatttatttttgagacagaatctgtcacccaggctggagtgcagtggcatgatctcagctcactgtaggctctacctcatgggttccagtgattctcctgcctcggcctcccaagtagttgggtctacaggcacgcaccaccacacccagctaatttttgtatttttagtagagatggggtttcaccatgttgatcaggctggtctttaactcctgacctcaagtgatccacccacctcagcctcccaaagtgctgggattacaggtgtgagccactgcacctggcagtgatgtcattccttactaggcttccaaagccactgctgtggccacagcttccatggagacaggcaagctgagcctctatgtggcaccaattcctgcagctgtttgtgttggagggaaaaaaatccaaatggacatcaacagctttcatcaactaaataaccacagaaaatatttatgaagactataaagcaatgattacttttgaattggaaaggaatcactattatttgaaatgtttcttcaaaagtgagcatccggacaggaaccatcatggatgctgaggccatggatgaaggcctactcgggaagatgatatccttgcagtctcaaaacggcaccccacaaaggtgatatcctaatttacaaagggaaaaaggtaccttaatctgaaatctggcaaatgcagcctcaacagaagtgacagaattgaacatcgccaataatgggacacacagacatcacatgcccccagtctgatgcaccacggagtcgtctctgatgtattcttgtcaaaaaatgtttgcctgattctaatcatgaaagaacaattagaaaaaatccaaattgacagatattctgcagaataaatggcctgacctcatcaaaaacatcaatgtcatgaaaaacacaaaacattgcagatagcgtgaaattaaagattacagagatataatttaatgcaagatctctgactggatcctagactgcaggaaaaagtctgctataaagaacatttggatcacttgtagtagctgggaaataaaacaaaacattatttgtaaaaggggggaaatctgaacatgggtcttgcagtatttatgacagtttttgcggggcagagatttctagattgacagctgttttagtactttcaaggtgatgctctgtctgctggtttgcattgtttctgtctgagttaagagactggcagaacacagagttgcagtagccaaacactggagaaagctgggccctacagaaacctaacgctgaagaaacctcaggagccaaactggtggagaaaacaaagagtcctccctctctcccttttcaaataatgatcatacatcttcaagctgtctgaaatggttaaggagttcagtctgtcgtcaggcacacaccagagccagctagcccacacagaccccatcagagcaaaacagacaagagaatttaattcatatccacatagaaaggacttctaggtaggaggtagaccctttagctcccttccaattaaaggagtccccaattctggcacctgagagtcccctgggtctaacagctatgatatttatgtagtgtgttgcttacctaaatgaatacaatttccttccagacacgtgacactgatattaaagtgctaatgagagggatctatttcttcttgtacgctaaaagagaaacagcagttcagatttcccatcagaagtccgaggactttgttcttgataactactaccaataaaaattgagtatttg

SEQ ID NO: 2858 - DNA, 554 bp, Homo sapiens
  source 1..554: mol_type = genomic DNA
ggccgggattcgcggcccggagctcgggaccggagaagaagtcctcaccagtgaacggagacctctctgaactaaggataccatggccacgtcagccccactacggagcctggaagaggaggtgacctgctccatctgtcttgattacctgcgggaccctgtgaccattgactgtggccacgtcttctgccgcagctgcaccacagacgtccgccccatctcagggagccgccccgtctgcccactctgcaagaagccttttaagaaggagaacatccgacccgtgtggcaactggccagcctggtggagaacattgagcggctgaaggtggacaagggcaggcagccgggagaggtgacccgggagcagcaggatgcaaagttgtgcgagcgacaccgagagaagctgcactactactgtgaggacgacgggaagctgctgtgcgtgatgtgccgggagtcccgggagcacaggccccacacggccgtcctcatggagaaggccgcccagccccacagggaaaaaatcctgaaccacctgagtaccctaagga

SEQ ID NO: 2859 - DNA, 4433 bp, Homo sapiens
  source 1..4433: mol_type = genomic DNA
gggatgctgaaggtgctgaaatagcaatgacaagagacttggctcagtgttaaataactgccgcgctggcctgacagtctctgagatgacaatagggagaatggagaacgtggaggtcttcaccgctgagggcaaaggaaggggtctgaaggccaccaaggagttctgggctgcagatatcatctttgctgagcgggcttattccgcagtggtttttgacagccttgttaattttgtgtgccacacctgcttcaagaggcaggagaagctccatcgctgtgggcagtgcaagtttgcccattactgcgaccgcacctgccagaaggatgcttggctgaaccacaagaatgaatgttcggccatcaagagatatgggaaggtgcccaatgagaacatcaggctggcggcgcgcatcatgtggcgggtggagagagaaggcaccgggctcacggagggctgcctggtgtccgtggacgacttgcagaaccacgtggagcactttggggaggaggagcagaaggacctgcgggtggacgtggacacattcttgcagtactggccgccgcagagccagcagttcagcatgcagtacatctcgcacatcttcggagtgattaactgcaacggttttactctcagtgatcagagaggcctgcaggccgtgggcgtaggcatcttccccaacctgggcctggtgaaccatgactgttggcccaactgtactgtcatatttaacaatggcaatcatgaggcagtgaaatccatgtttcatacccagatgagaattgagctccgggccctaggcaagatctcagaaggagaggagctgactgtgtcctatattgacttcctcaacgttagtgaagaacgcaagaggcagctgaagaagcagtactactttgactgcacatgtgaacactgccagaaaaaactgaaggatgacctcttcctgggggtgaaagacaaccccaagccctctcaggaagtggtgaaggagatgatacaattctccaaggatacattggaaaagatagacaaggctcgttccgagggtttgtatcatgaggttgtgaaattatgccgggagtgcctggagaagcaggagccagtgtttgctgacaccaacatctacatgctgcggatgctgagcattgtttcggaggtcctttcctacctccaggcctttgaggaggcctcgttctatgccaggaggatggtggacggctatatgaagctctaccaccccaacaatgcccaactgggcatggccgtgatgcgggcagggctgaccaactggcatgctggtaacattgaggtggggcacgggatgatctgcaaagcctatgccattctcctggtgacacacggaccctcccaccccatcactaaggacttagaggccatgcgggtgcagacggagatggagctacgcatgttccgccagaacgaattcatgtactacaagatgcgcgaggctgccctgaacaaccagcccatgcaggtcatggccgagcccagcaatgagccatccccagctctgttccacaagaagcaatgaggactgcccagtggaggaggggcgatgtggctggggagctagggagagactctggaggtggtgggtctctcgggagacccctaatgaggaagttgaggtaatgcttaacattgttgctgtgagaatttactgccctatgtttcccagagccattttggctcaattcaagtctattcaattcaagttaactctagcccagcccagatcaactcctcctacaaatattattggatgataggccctagaacccaataaaggagctccaaatgtcgttgggtggggaagcaaaatgtagagaaacatttaaagcacactgtaataataaatgcaattataaactatatggaggagggtgcagaggagggaatgtgtctggtgtgtgatgtgtgtgtgtgcagtgggggtatcacagagagtatgacatctgagttgagggtagcaggtgcctggagtctcaggtggctgctcacccatctgtgcaggtgtctctggggctgctggtctcacctgtggtctgcagtagacacaattggctgagcaggatatgtgatactgtgtggttggtgtggagttttgaagaaggggctgtgtttgggccacgtaggctctactcagagacctgaaaccacttcagaatggtgcatatgtcgaaagagctggctgggggccttgcccaaaccaactgaggtcttaaagtccagggaaaaaaagtctgggttccaactagaattctagaaatatttctagaacacacagagagggaataagtccctctatcacccttattaccaagccttgtggttccctgtgattttagataatgtctgatatttttctggctatttgcctagtaggatttaaaaaatattttcaaagtgaagctgagagagaatcttggaaacacacatacctgttgatcatgggccctgcagaattggcccttgggggctttatttggttacatgtgcctgggtggtctttaccagcttagactctatcatgggcccccatgaagctccattctcaatactgaataattattacttcccttgttgagtttctttttctgtcatgccctgggggcttctgctcttctcaccagaaagaacatttgaatctggattcttgtacacctgggttagaccctgttcagaggtgtggccaatttatcccgatctcctggaaggctgttgtgatttccatctaagaaatgagggtcttgagaatcaaccagtcccaagattagcctgttatcctgttatctactgagaccccaaatttctcaccaatgttttgggagatcctggaaaagatcccttcagtttggggtgtcaccaagacttctacacaacccaggactaccattgacctcagagctgtaccccacatcttgaagtaaattgatcccaccaggtcccacgtttgttatctctgcctaaatgttagcttctccatcctcaccacatgatgacctgctgtgtccctctgagcactacccagtggctgaaaactctgcaaatgggccacacttttgcaaaatacttgtatctgacacttaggtcttgtttgaagaatttcctttctggaaggttttacaagaagactgatagtctttcaagcccccacatcacaggcttagggacggcactaactttctcccagggatctaactggctagttcaaattatcactcttttaccttcatataaaatgtctcccccaaacctttttcccttctttgtcattgttatctgctaagcccctggtcatttccccatattcgtagtctttttttccatcctatctttctaatatttgttgtctttaacaaactgtgttctgtgtctgtgctcctccttccctctcagaccactggaatgcaagtccttcttccctttggaatgtactctggatcccttcccctgctttgacccccagactttgctccatctattattgcttctccatcctggatccttgacatttgtcaccccactggccttctcaggtgcaatcagtaaaaatgctgagaactcttggatcttaatcttcatgactgagttttttttagttgtatagttatcatctgcctttcttcactttgcatttcttcttgaatccattgcagattgacttccactcccactccttcactaaaagggctcttaccaagatcaaatctaatgggtacattttagttcctatgtgatttggcctttcgatgtcaatcatcactcccagccattgattttggtgacccacttccctgtgatgatcttctgatctagtttctcaggttccttcgctggtcctttttctttccctgcccctgacatattgacatttcctggagttggttttgtccttgattcattctcatgtcattctgcacacagtctctgcatgaactcaggcagacccttcatttaatgaccaccttagggctgatgattctcaaatctgtattccccgatcttgcatttgagctccagccccactcatcctctcggatgttctgcaggcccagcaaactcatcatgtccaaagtgaaactttttctctttcctgtctcctctcctctgatctgttctttcttggaacaccacccaagaacgtcacctcctccatcagattgtgagctcctggagggcaggagctgtgtccttctattcatcttcctatccccagaaccttgcacagatcctggaatgtggtaggtgctcagtaaatgtgtgttgaataaatgaatgaatgaatgaacaaatgaatgaatttgcttacttcaaggcaaaagaaccatgaaactgtattttgagtttctatgttatagcagtcagcaaatcctattaaatactttgtgtttccaagcaaataa

SEQ ID NO: 2860 - DNA, 2079 bp, Homo sapiens
  source 1..2079: mol_type = genomic DNA
agtatcgcaaaataggccaagtcgctgccctctactcaactcgcagggcgggaggatggagacagagggatgcggcgggagggcgggacagcccagtcgccgccaaggaggcgaagcggggtcggggtagctcacccgccccccgcagtccccgccccccgcagtccccgccccgcgcggcgccgcgcacgcctgaagtcattgcccgaggccccgccccctcgcggccccagccccggctctggctctgccggcggagggggcggagagaacccgcagctgcaacttcgcctggagcctttgagcctgggctcagccggggatctagcagccgtcaccgccgagtcgccgcttccccggcgcgggcctcagcccagccggcttggccatggcaggcgccggcagtgcggcgaatctggcccctgcgctccccgcccgtagctgagcagccgttaaccagccatcccgcctttcctcctgcccgtgtcgccgaggcccacgctccgcgcaagtttccgccgccgaagaagcaggaggacggacgtgaggagtcgggcgtccctggcccacccggccctctcgcccgcgatgtgggggcgcttcctggctccggaggccagcggccgggatagccccggcggagcccgcagcttccctgccggcccagattattcatcagcatggctacctgctaatgaatcattgtggcaggccacaactgttccatctaaccatcgaaataaccatatcaggagacacagtatagcttctgacagtggagacactggcattggaacttcctgttctgatagcgtggaagatcattcaacttcaagtggcacattatcttttaagcctagtcaatcattgattactcttcctactgcccatgtgatgccgtctaattccagcgcttcaatttccaaacttagggaatcattgacaccagatggctcaaaatggagtacaagcctcatgcaaacattgggaaaccacagtaggggggagcaggactcttccctagacatgaaggacttccggccacttcggaaatggtcatctttatccaaactcactgccccggataactgtggccagggtggcactgtatgcagagaagagtcaaggaatggtttggagaagatagggaaggctaaggctttaacatcacaactgaggacaattgggcctagctgtttacatgatagtatggagatgcttaggttagaggacaaggaaataaataaaaaacggtcatcaactctggactgcaagtataaatttgagagctgtagcaaggaggactttagagcctcttcctctactcttaggagacagcctgtagacatgacatatagtgccttacctgaaagcaagcccattatgacaagctcagaggcttttgaacctccaaaatatttaatgcttggtcaacaggcagtaggtggagttcccattcagccttccgtaaggactcagatgtggcttacagagcagctgcggacaaatcctttggaaggtagaaatacagaggattcttacagtttagctccttggcaacagcagcaaattgaagactttcgacaaggaagtgaaacaccaatgcaggttttgactggatcatctcgtcaaagttattcacctggctatcaggatttcagtaagtgggaatcaatgttgaaaataaaagaaggacttctaaggcagaaagaaattgtaatcgatcggcagaagcaacaaattacccacctgcatgagaggataagggataatgaattacgggctcaacatgccatgttaggacattatgtaaattgtgaggattcttatgtggctagtttgcagccacaatatgagaacacttcactccagacaccattttcagaggaatcagtttcccattcccaacaaggggaatttgagcaaaagcttgcatctactgagaaagaagttttacagcttaatgagtttctcaaacaaagactaagcctatttagtgaagagaagaagaaactagaggaaaaagtaggtttttctaataaagttgaattaggtcaacaacatttcctcagcatataa

SEQ ID NO: 2861 - DNA, 1718 bp, Homo sapiens
  source 1..1718: mol_type = genomic DNA
ccaggaccagggagcaatcacagctgccccgaccttggcttcctctgctgggtgggattgggggctgggcccccaaatgggcccctggcttcccccttcctctgggcaggggacagagagacacaggctcggggagcaggactgacttcctcttgtcccggaatgagcatgcctgccctttgcaagcaggtttgggtctcacgcagaggaaaccaaaagcaataagagggagggaaggcagagcaaccaatcaagggcagggtgagactcaaaacgagcgggctccctggggagccagacagaggctgggggtgatggcggagctacagcagctgcaggagtttgagatccccactggccgggaggctctgaggggcaaccacagtgccctgctgcgggtcgctgactactgcgaggacaactatgtgcaggccacagacaagcggaaggcgctggaggagaccatggccttcactacccaggcactggccagcgtggcctaccaggtgggcaacctggccgggcacactctgcgcatgttggacctgcagggggccgccctgcggcaggtggaagcccgtatggtgaacatgcatatggagaaggtggcccgaagggagatcggcaccttagccactgtccagcggctgccccccggccagaaggtcatcgccccagagaacctaccccctctcacgccctactgcaggagacccctcaactttggctgcctggacgacattggccatgggatcaaggacctcagcacgcagctgtcaagaacaggcaccctgtctcgaaagagcatcaaggcccctgccacacccgcctccgccaccttggggagaccaccccggattcccgagccagtgcacctgccggtggtgcccgacggcagactctccgccgcctcctctgcgttttccctggcctcggccggcagcgccgaaggtgtcggtggggcccccacgcccaaggggcaggcagcacctccagccccacctctccccagctccttggacccacctcctccaccagcagccgtcgaggtgttccagcggcctcccacgctggaggagttgtccccacccccaccggacgaagagctgcccctgccactggacctgcctcctcctccacccctggatggagatgaattggggctgcctccacccccaccaggatttgggcctgatgagcccagctgggtgcctgcctcatacttggagaaagtggtgacactgtacccatacaccagccagaaggacaatgagctctccttctctgagggcactgtcatctgtgtcactcgccgctactccgatggctggtgcgagggcgtcagctcagaggggactggattcttccctgggaactatgtggagcccagctgctgacagcccagggctctctgggcagctgatgtctgcactgagtgggtttcatgagccccaagccaaaaccagctccagtcacagctggactgggtctgcccacctcttgggctgtgagctgtgttctgtccttcctcccatcggagggagaaggggtcctggggagagagaatttatccagaggcctgctgcagatggggaagagctggaaaccaagaagtttgtcaacagaggacccctactccatgcaggacagggtctcctgctgcaagtcccaactttgaataaaacagatgatgtcctgtgactgccccacagagataa

SEQ ID NO: 2862 - DNA, 553 bp, Homo sapiens
  source 1..553: mol_type = genomic DNA
agtcggcggccggactgggaagatggacgcagtaaccagtagattctccaagctgcttttccgtgacgagaaagagaaacagtgaatttgtatcatcgggtcttagtttcttggggtcctaagagagagagaaagagaaggactactctgacctacgacactctccggtttgctgagtttgaagattttcctgagacctcagagcccgtttggatactgggtagaaaatacagcattttcacagaaaaggacgagatcttgtctgatgtggcatctagactttggtttacatacaggaaaaactttccagccattggggggacaggccccacctcggacacaggctggggctgcatgctgcggtgtggacagatgatctttgcccaagccctggtgtgccggcacctaggccgagattggaggtggacacaaaggaagaggcagccagacagctacttcagcgtcctcaacgcattcatcgacaggaaggacagttactactccattcaccagatagcgcaaatgggagttggcgaaggcaagtccataggcc

SEQ ID NO: 2863 - DNA, 2820 bp, Homo sapiens
  source 1..2820: mol_type = genomic DNA
ccgcggagttacgggaaagttggtccgagttcccagagtttccctctgtggtgccctaggctcggccggccggtgccccggctcctttcctcctttcggccttcgccgtccaccaggtccctctctctgtccccggccgccatggagcagccgccggcgcctaagagtaaactaaaaaagctgagtgaagacagtttgactaagcagcctgaagaagtttttgatgtattagagaagcttggagaagggtcttatggaagtgtatttaaagcaatacacaaggaatccggtcaagttgtcgcaattaaacaagtacctgttgaatcagatcttcaggaaataatcaaagaaatttccataatgcagcaatgtgacagcccatatgttgtaaagtactatggcagttattttaagaatacagacctctggattgttatggagtactgtggcgctggctctgtctcagacataattagattacgaaacaagacattaatagaagatgaaattgcaaccattcttaaatctacattgaaaggactagaatatttgcactttatgagaaaaatacacagagatataaaagctggaaatattctcctcaatacagaaggacatgcaaaattggcagattttggagtggctggtcagttaacagatacaatggcaaaacgcaatactgtaataggaactccattttggatggctcctgaggtgattcaagaaataggctataactgtgtggccgacatctggtcccttggcattacttctatagaaatggctgaaggaaaacctccttatgctgatatacatccaatgagggctatttttatgattcccacaaatccaccaccaacattcagaaagccagaactttggtccgatgatttcaccgattttgttaaaaagtgtttggtgaagaatcctgagcagagagctactgcaacacaacttttacagcatccttttatcaagaatgccaaacctgtatcaatattaagagacctgatcacagaagctatggagatcaaagctaaaagacatgaggaacagcaacgagaattggaagaggaagaagaaaattcggatgaagatgagctggattcccacaccatggtgaagactagtgtggagagtgtgggcaccatgcgggccacaagcacgatgagtgaaggggcccagaccatgattgaacataatagcacgatgttggaatccgacttggggaccatggtgataaacagtgaggatgaggaagaagaagatggaactatgaaaagaaatgcaacctcaccacaagtacaaagaccatctttcatggactactttgataagcaagacttcaagaataagagtcacgaaaactgtaatcagaacatgcatgaacccttccctatgtccaaaaacgtttttcctgataactggaaagttcctcaagatggagactttgactttttgaaaaatctaagtttagaagaactacagatgcggttaaaagcactggaccccatgatggaacgggagatagaagaacttcgtcagagatacactgcgaaaagacagcccattctggatgcgatggatgcaaagaaaagaaggcagcaaaacttttgagtctaatttcctctctgtttttaactattctggagaccaagaaaccactaggaattgaaggaatatttggatatttttaatcctaagattttgccctacaattaggcagaggtcaaaaagtgacaatggtacatgcccaggtaaattcccaaaaggcagaattgacagttgtatctgctgtgcattcactctaagatgaggagaacaaaagaagtgtattctcttgttctgtcagctgcataccagtaataaaactgttatgaaatggattttcaaggtctctaaaccttgaaaatccaaagctattgttgcattgtacagcactgaagggctttatgttacaatattctttattcctatctagtatactaggctatttattgtatccccttaggtaaacttatttatttatgctattttgctttgtttcattttttaaggacaagatcaggatagctttggtgaaggtagggtcatattaatatgatgataatgtgcaaccaatttatactttctgcagggagctatggggtacattccttgatttccaggatagtttttcaaataggaaagcaataatggcagtagttctcaaatgggctaggccttttttatattgaagcaataattccatttttaccctttgaaattttgtttttttgatttttgatgtttggtacaaatagaactatatatatttaggtaaaatagatctatcgtgtttaaaaccaaagaaatcaatggaacccttgcacaaaaaagtgtgataaatatttttaaataaaaacttaatacaaatgtaatttgttaatattgtttcatgttttatgtgtagatctaatagctgaactgattcaaactgtaataagctcatcaatttcatttctatgaaaatgtgctctgttgtcacaggatgtttctgttgattttattcatttcctgggaattggtaaacatcatgttcctgatgataacccagtagcaaaaacatttgtactgagtggtacaagccttggggactgaaaaaaaaaagattaaaaccattaaaaagaaactcatttttacgctgaatgaacatttatatgattgcattgggaccagtcatttcctaagctacatatggccatcttgacagtgttttttcttttgtgtgtttaattattatgtgtaaatcataaagacaaataaatttcactgtgccac

SEQ ID NO: 2864 - DNA, 439 bp, Homo sapiens
  source 1..439: mol_type = genomic DNA
gctgggcctggaacagtcggagcagccgctagcagaaggatgacccaagacgggaagcgggctgctgagcctcgccgattcccgtgcttgtaactgccccagccggacaccccccctcccttgacctacccggtctgtgtctcgttccggctcggcctgcgccccccctcgcttcccagccggtttcccctaaggatgggcctgacccgtatcccaagctcttagcgctcaggtcttttccttccgccgacccgaagtcatcgctgggagtactggttgccctttcctcaggctggctacagcaaacatcattcaagatgtccagcaaagggagcagcacagatggcagaacagacttagctaatggaagcctgtctagcagtccagaggagatgtctggagctgaagaggggagggagacatcctcaggcattgaagt

SEQ ID NO: 2865 - DNA, 1765 bp, Homo sapiens
  source 1..1765: mol_type = genomic DNA
aaacaccacagatgcccatcaaaggggcgcacgggtctggaggcgcagctcaggtttttgcgttggtcaccctgccctccgcacgtggagagggcaggcataaagcaccttgaaaggaaggtgctgtcaatgctatccgacgacctgtcgccgggcaccgcagcatcctcgctcgctccgatgggacgagggacgccggccccagggtaacaggaggcgcctcgccggccgcgcgctggatgctgtgatccaggtccggagccgggttccgccgcggccgcagcgacccgaccccacccgacaggccagaggagctcattttgcagctctcaagcttttatagcatgctgtaaacaattgtcaaagttgtttatcaagaaacagatagagttgcaacttgtttctagtaatagaaacttttacactgcattcaatgcctaacgttgcagaaacagaaaggtcaaatgattctggaaatggtgagcacaaatctgagagaaagtcacctgaagagaatctacaaggtgctgtaaaatctttctgcacaagtgcctcaggagcacccttgggtcccaaaggagatggtcattatccatggagttgtccagtgactcatacacgggaaaaaatttatgccatctgttcggactatgcctttctcaaccaggcgacctcaatctataaaactccaaatccatcccgctctccttgcctccctgatagtacctctttatctgctggaaataattcatcaagatacattggtatcccgactagtacatcggaaattatctacaatgaagaaaatagcttggaaaacttatccaacagcctgggcaagctacctctcgcatgggaaattgataaatctgaatttgatggggtgaccacaaattcgaaacacaaatcaggcaatgcaaagaaacaagtttccaagagaaaaacttcagataaaaagggaagatatcagaaggaatgtcctcagcattctcctcttgaagatattaaacagcggaaagtattagacctcagacgatggtactgcataagccgaccacagtataagacttcttgtggcatctcttcattaatttcttgttggaatttcttatacagcacaatgggagctggaaaccttccacctattacccaagaagaagctttacatattctgggctttcaacctccatttgaagatattaggtttggtcctttcacggggaatacaacacttatgaggtggtttagacaaattaatgaccacttccatgtaaaaggatgctcttatgttctatataagcctcatgggaagaataaaacagcaggagaaactgcaggggacctctctcaccacaggaagttgaatattggatcttaattggagaatcaagtagaaaacatcctgccattcactgtaaaaaatgggcagatattgttactgatctaaacactcaaaatccagaatacctggatatccggcacttagagaggggactgcagtatagaaaaacaaagaaggttgggggaaatttgcattgcatcatagcattccagagacttaactggcaaagatttggcctttggaactttccatttggaaccattagacaagaatcacaacctccaacacatgcccagggaattgccaaatctgagagtgaagacaatatttccaagaagcagcatgggcgtctgggccggtctttcagtgctagtttccatcaggactcggcatggaaaaagatgtctagtatccatgagagaa

SEQ ID NO: 2866 - DNA, 1798 bp, Homo sapiens
  source 1..1798: mol_type = genomic DNA
atcaccgcaggcgggcctcgcgggtccgggagcgcggcggagacgatgcctgagatcagagtcacgcccttgggggccggccaggacgtgggccgaagctgcatcctggtctccattgcgggcaagaatgtcatgctggactgtggaatgcacatgggcttcaatgacgacgtagatgatgagctggagatcaaggcctactatgcaggccacgtgctgggggcagccatgttccagattaaagtgggctcagagtctgtggtctacacgggtgattataacatgaccccagaccgacacttaggagctgcctggattgacaagtgccgccccaacctgctcatcacagagtccacgtacgccacgaccatccgtgactccaagcgctgccgggagcgagacttcctgaagaaagtccacgagaccgtggagcgtggtgggaaggtgctgatacctgtgttcgcgctgggccgcgcccaggagctctgcatcctcctggagaccttctgggagcgcatgaacctgaaggtgcccatctacttctccacggggctgaccgagaaggccaaccactactacaagctgttcatcccctggaccaaccagaagatccgcaagactttcgtgcagaggaacatgtttgagttcaagcacatcaaggccttcgaccgggcttttgctgacaacccaggaccgatggttgtgtttgccacgccaggaatgctgcacgctgggcagtccctgcagatcttccggaaatgggccggaaacgaaaagaacatggtcatcatgcccggctactgcgtgcagggcaccgtcggccacaagatcctcagcgggcagcggaagctcgagatggaggggcggcaggtgctggaggtcaagatgcaggtggagtacatgtcattcagcgcacacgcggacgccaagggcatcatgcagctggtgggccaggcagagccggagagcgtgctgctggtgcatggcgaggccaagaagatggagttcctgaagcagaagatcgagcaggagctccgggtcaactgctacatgccggccaatggcgagacggtgacgctgcccacaagccccagcatccccgtaggcatctcgctggggctgctgaagcgggagatggcgcaggggctgctccctgaggccaagaagcctcggctcctgcacggcaccctgatcatgaaggacagcaacttccggctggtgtcctcagagcaagccctcaaagagctgggtctggctgagcaccagctgcgcttcacctgccgcgtgcacctgcatgacacacgcaaggagcaggagacggcattgcgcgtctacagccacctcaagagcgtcctgaaggaccactgtgtgcagcacctcccagacggctctgtgactgtggagtccgtcctcctccaggccgccgccccttctgaggacccaggcaccaaggtgctgctggtctcctggacctaccaggacgaggagctggggagcttcctcacatctctgctgaagaagggcctcccccaggcccccagctgaggccggcaactcacccagccgccacctctgccctctcccagctggacagaccctgggcctgcacttcaggactgtgggtgccctgggtgaacagaccctgcaggtcccatccctggggacagaggccttgtgtcacctgcctgcccaggcagctgtttgcagctgaagaaacaaactggtctccaggctgtcttgcctttattcctggttagggcaggtggtcctagacagcagtttccagtaaaagctgaac

SEQ ID NO: 2867 - DNA, 394 bp, Homo sapiens
  source 1..394: mol_type = genomic DNA
ggaaccatcagttgttcaacaggcacgttacagaggaggaatctgggcccagagaggcagactggattactgctgctgggaatgaaagagaatcaagaattaaagacaatccaggccaatctgtcgaggcagagggtagaacaccagtgtctttcatctgaggaactgaagcaacgtttcccaaatattcggttgcccaggggagaagtggggctcttggacaattccggaggagttatctatgcatataaggccctcagagccctgcaggatgcaattcgacagctaggaggcatagtgcgtgacggagagaaggtggtggagataaacccagggctactggtcacggtgaaaaccacctccaggagctaccaagctaagagcttggtcatca

SEQ ID NO: 2868 - DNA, 2749 bp, Homo sapiens
  source 1..2749: mol_type = genomic DNA
gcggggcttggggctggatctatgagccgggagcggggatccaggagcgaggagccgggagcggggaacagggagtcggggagccgggaaccagggctggcagcggccgccatgagcacggtggaccttgctcgcgtgggcgcgtgcatcctgaagcatgcggtgaccggggaggccgtggagctgcggagcctgtggcgggagcacgcgtgcgtggtggccgggctgcggcgcttcgggtgcgtggtgtgccgctggatcgcccaggacctcagcagccttgctgggctcctggaccaacacggcgtgcgcctggtgggcgtagggcccgaggccctgggtctgcaggagttcctggacggcgactacttcgcgggagagctctacctggatgagagcaagcagctttacaaggagctaggcttcaagcggtacaacagcctgagcatcctcccagcagctctggggaagcccgtgcgtgatgtggctgccaaggccaaggctgttggcatccaggggaacttgtctggggacctgctgcagagcggagggctgctggtggtcagcaaaggtggtgataaagtgctcctgcatttcgtccagaagtccccaggcgactacgtccccaaggagcacatcctgcaggtcctgggcatctctgcggaggtctgtgccagcgacccgcctcagtgtgacagagaggtgtgagggaggcgaaggccctggcctccgaggatctgggtggcgtctgctgccctaggtgtgctggaagtccacttggaagaactgttccggaggcgctgggtcgggatgccgaacctctcctgatccgccggcagcaacgagccattaaaactgcagttcctgaccacgcactgcttcgcaggctccgagccctgcatcctccacagcccccgccttgctcactgttgggccctcagggcgggcagggtggctgtgagtcccaggtgtcatcttcctgctctgcgactttctctggagaccttgggcctttggcctgtggggcactggggatggtaacctcactgccccgtcactcccttcaaaggcgacagacccaagcccacgtcaggagaggagcgtggggtcagctccagcagggtcggggtcagtgcctgtgtctggtgggggccactcaggagagttgggttttcagggcagagatgggcttgattccacctggtggggtgggtggaccctggagactctcaggtgatgggccagcctgccccaaggctctttactgatgtcagaatcattgtttgcacctgctgggtatggcctttggggcggccggcccgggagggtcttagtctaattaggtgtgtccagcttcttggccacctttccctggggaccctaacaggcccagagcagagccccttacctcccaggtcagactacctgctcaggccctcccctcccatgcaggccgatgacaactgcagccctctctgcactccctagtccagacctggggaccactgtgggttcctgtgggtctcccggctcccttcctgcccccaatgccacccttgcagtggccatttaaaaatgcatagcaggtgacccactgcgtccctttgcgttcagcccctcctctggctttcagttacaccaagctaaaatttcaggttcccagctgcagctctctgggtcccccggtgccccagtggggctccccgcatctgaatgtgtggtccctgggggtgggcacttgggggcatcctggtcactgctggccctagcattggaccctaggagacctgactggaactggctccctccccatcagctcccagctgtcactctctcccacccccgggcagctgttttgcccaagaccactgctacctgtttacccaccctggtccctcccagacaagcaaggcctctgatttctttgaagcatttacttagctcaagtctgaagctgtagatactggaagacaatgcaccttggagggtgggcaggacacagttgattgtctctacagagctgtgacgggggcactgagccccgcgggtgtctgtggagggggctccggtccaggtactgcactggacactgctcatccctgggtgtcaggcaggtggctgcaccctaggccaggcgcagaggcctggcaggcaggcttggcatggttggccggggcgggacgtacactgggtcgccgctagctgcaccttcgcacagatgcctccgagcagcgggtgggcgtgggccgcacagcgcggcagggccttggctaccacacgcggcatcgctccttggggtgcatgggggtgccccgggcacagtggaacgtgtctgcgaaggcggccaggttctgcagcgaccccagtaccctgtgggtgggtgggtgtgacagcaggagcattgccatcttggacaaacatggccattttaagttctccgtgattaaaaaccagcccaaaacatcagcctaatggctcatgtcagtatgagcagaaacatttcaaccatgagataaacccccatctgaccagaaacatgccaatcctgagaataacctcccctccagccagagatattccaactctgcaataaaactctccttcacacagaaacattcgcagcctgcggtaggctcccccttcctaaacccttaaatgcccttagtctgtaagagaatgtccctgaccgaaatcggccagaagcccctctcaggtttattcccaaaataaacctgtctctgttgagcca

SEQ ID NO: 2869 - DNA, 715 bp, Homo sapiens
  source 1..715: mol_type = genomic DNA
gctgcgcgcccaggggtcccgcgggttttcgggcgcagggtggcgcccgcggcaggcggcggccatgaacttctccgaggtattcaagctctccagcttactctgcaagttctccccggacggcaagtacctggcttcctgtgtccagtaccggttagtggtccgggatgtgaacacccttcagatccttcagctgtacacgtgcctagaccagatccagcacatcgagtggtcggcagactcgctcttcatcctgtgcgccatgtacaagcgagggctggtgcaggtctggtctttagagcagcccgaatggcactgcaaaatagacgagggctcagccgggctggtggcctcgtgctggagcccggacgggcgccacattctcaacaccacggaattccatctgcggataaccgtctggtccttgtgcacaaaatccgtgtcttacatcaaatacccgaaagcttgtctgcagggaatcaccttcaccagggacggccgctacatggcgctggcagaacggcgcgactgcaaagattacgtgagcatcttcgtctgcagtgattggcagctcctgcggtacaagattctgctgtactcattggatggccggttgttgtccacgtacagcgcttacgagtggtccctgggcatcaagtctgtggcctggagccccagcagtcagttcctggcagttgggagctatgatggaaag

SEQ ID NO: 2870 - DNA, 1456 bp, Homo sapiens
  source 1..1456: mol_type = genomic DNA
ccggagcggggatcacctcaacttgactgtggtcccccagccctccaagaaatgcccataaaccaaggaggagagggtaaaaaatagaagaatacatggaattggggagaagaatgggaaaaaagatgggagtgactgcataatgtcagcattttgtgcttttggctcagcatttggattggatggaggattttcatcctgaaaccagccctccgtcgccaccgaccatggaataattgtcttccacgaaactcttccctggtgccaaaaagggttttatgtatatatttgagagctccacatccctggatctgaatcctccacttcccactggaaccatgcccctcccagtcccgtttctcccctctaggggatggaggctgagagaccccaggaagaagaggatggtgagcagggcccccctcaggatgaggaaggctggccccctccaaactccaccactcggccttggcgatctgctcctccgtcccctcctcctccagggacccgccacacagccctgggaccccgctcggcctccctgctctccctgcagactgaactccttctggacctggtggctgaagcccagtcccgccgcctggaggagcagagggccaccttctacaccccccaaaacccctcaagcctagcccctgccccactccgtcctctcgaggacagagaacagctttacagcactatcctcagtcaccagtgccagcggatggaagcccagcggtcagagcctcccctccctccaggggggcaagagctcctggagttgctgctgagagttcagggtgggggtcgaatggaggagcaaaggtcccggccccccacacacacctgctgagacttgagccccaaccagcccttccttgccactggtctcaaagctgggcagcccattgcatgccctcaactcttgcttggcaggggtaccagagactgaaagacacggcacaaatctcaatattcatctcccacatcaccttccctgggaactggacagggtgaaagtcctcaaactctgggaacaggcgagatggaacagggatttaactccccgcccacaggtccatgggagcttgaggcagtaagggggatcccaggcacccatctcaaggagtggctgggagtcttttccctaacttgtggggacaccaccagttgtcaagctactaggcagtagggtctgagggctcaggcctccacctgagaggttataacctgagagacagctctacccttcctcccagtaagaagggaaggtgggtgggcacctgagagattaagactattctcccagtcccactaccagcacccccgatccctgagactgaggggtttacgggctgtgaatggaccttcagccctgcccaccctccctccccactgctgctgagtctgtctgatgttttggttgtgtgaataaatataattcccctctgga

SEQ ID NO: 2871 - DNA, 1244 bp, Homo sapiens
  source 1..1244: mol_type = genomic DNA
ggcgagccccgcggggaggccgaggcgcgggtgcgggcgccggcgtagccgcggcggtagcgtcacgcagcgaggccgtgcgtgcgcgggcgtcagggcggcgctgagttgaggacgctggcggctccgcgacgagctttgttttttcggttgggcatgctgcttaccgcaggatgatggaagcgacggcccgtacaaagacagaagcgttggtttcactgagtcagtgctgattctctcaaatagagcttgaaggataaatcttcatttttgtttcaacaaaacttcgaaacaaaatggaagaaaataatctacagtgcagtagtgtggttgacggtaattttgaagaagttcccagggagacggcaattcagtttaaacctccactatacagacagcggtaccagttcgttaaaaatttagtggatcaacatgagcctaagaaggttgcagacctgggatgtggtgatacttcactcttaaggctgctaaaagtcaatccatgcattgaattgcttgttggagtagatattaatgaggataaattacgatggagaggggattcgttagctcctttcctgggggattttctgaaacctcgggatctgaatttgaccatcacattgtatcatggctccgttgtggagagagactctcgtttgcttggatttgacttgataacgtgtattgaattaatagaacatttggattcaggtgatctggccagatttcctgaagtggtatttgggtacctgtctccatccatgattgtcatcagcacaccaaactctgaattcaatcccctgtttccatcagtgaccttaagagattcagatcataaatttgagtggaccagaatggagtttcagacctgggctttatatgtggcaaatcgctatgattactctgtggagtttactggtgtcggggaaccaccagctggagctgagaatgttggatactgtacccagataggaatcttccggaaaaatggaggaaaggcaacagaatcatgtctttcagagcagcatgatcagcatgtttataaagctgtttttaccacctcatacccaagcttacagcaggaaaggttctttaaacttgtgttggttaatgaggtgtcccaacaagtggaaagcttaagagtgagccacctgccaaggcggaaagaacaggctggggaacggggtgataagcccaaagacattggtggctcaaaggcccctgtcccatgctttggacca

SEQ ID NO: 2872 - DNA, 1748 bp, Homo sapiens
  source 1..1748: mol_type = genomic DNA
gctgggccccaggccagcctctgcctgggaagttctctctgggaacatctggtgggtactacaggccctattccaggccctatggcctgtggaacctcaccacgggggggagggctgggccagacggagacatcacctgtggtgtcagccccatggatgagacagagtggatacacagacatcccaaggctgaggacctaagggttgggctcatcagctgggcaggaacctacctcacctttgaggcatgcaagaatacagtcactgcaactgcgaagagtttgggcaggagacagggcctgcctataagagcttttgcttctgtcttgccatgctggaaggcaacctttggggatggaggtattggctaagtgtgctctctgcggacaacagtgaggaagaaaaaaacctgggagatcttggtgagcaatgagcatgagacacaggccgtggtgcgactaaagagcgtgcagggcctctacctgctgtgtgagtgtgatggcaccgtgtgttatggccgcccaaggaccagccaccatgggtgctttctactgcgtttccaccggaacagcaagtggaccctccagtgcctaatctctggtcgttatttggagtccaatggcaaggacgtgttttgcacttcccacgtcctctcagcttaccacatgtggaccccccgaccagccctccatgtccacgtgatcctctacagccccatccaccgctgctatgcccgggctgaccccactatgggccgcatctgggtggacgcagcagttccctgcctggaggagtgtggcttcctgttgcatttccgagatggatgctaccacctggagacctctacacaccacttcttgtcccatgtagaccggctgttctcccaaccctcatcacagacagcttttcacatgcaagtgcggcctggagggcttgtggcactgtgtgatggagaaggaggcatgttatatccacagggcacgcatctgctcttgggcatgggctgcaaccccatgaggggtgaggagtggttcatcctacagcactgcccaacctgggtcagcctcaggtcaaagactgggcggttcatctcagtcatctacgatggtgaggtgcgtgctgcttctgagcgcttaaaccgaatgtccttgttccagtttgaatgtgacagtgagagccccactgtgcagcttcgttcagccaatggctactacctatcccagaggcgccacagggcagtaatggctgatgggcaccccctggagtctgacacgttcttccgaatgcactggaactgtggcaggatcatcctgcagtcctgcagggggcgcttcctgggcattgcacccaacagcctgctgatggccaatgtcatccttccaggcccaaatgaggaatttgggattttatttgccaatcgctccttccttgtattgcgaggtcgttatggctatgtgggctcctcatcgggccatgacctcatacagtgcaaccaggatcagcccgaccgcattcatctactaccctgccgaccgggtatctaccacttccagggggggatccttctggtcaataacatcctttggcacctttcgcccttggggcaagtttgccctcaacttctgtatcgagcttcaggggagcaacttactcactgtactggcccccaatggcttctacatgcgagccgaccaaagtggcaccctgttggcagacagtgaagacattaccagagagtgtatctggga

SEQ ID NO: 2873 - DNA, 3621 bp, Homo sapiens
  source 1..3621: mol_type = genomic DNA
accccttccgatatccgcggtggagccgcccttcccaccccgcgtcgctcggcgttagccaaggcccgggcggcgccaccctccgggggcactaggtctggggccgcagtgcccagcacagagcagcgtttatcgggacgaagatgaatggaaagaattggagcaaaaagaggttgattacagcggcctcagggttcaggcaatgcaaataagcagtgaaaaggaagaagacgataatgaaaagagacaagatccaggtgataactgggaagaaggtggaggtggtggtggaggtatggaaaaatcttcaggtccctggaataaaacagctccagtacaagcacctcctgctccagtaattgttacagaaaccccagaaccagcgatgactagtggtgtgtataggcctcctggggccaggttaaccacaacaaggaaaacaccacaaggaccaccagaaatctacagtgatacacagttcccatccctgcagtcaactgccaagcatgtagaaagccggaagtacttaaaatgaatgctacctggaattaaatgactacatatggcacatctacatcttactttagggacatgaattttttaaaataaataaaatgggaagaaatgtaaatgacatcagatggaaatgtgttttttggggtggcttttagaataaatcccagccttttcaccactttgagagcacagctggcttgaatttaaacctccacgtggacttgctcctctgctctgtcttaaaaaatgtgtaagggaccttgggagggcagtgattcaccacactcgagtttctttacctgatctaatcagatccactcccacaaaatcgatgtgaggagaaatcattgactaatgagtagaatttacttgaatgagaaaattgttacccttgtgcataaagagagagatgtattatctattacttgctaaaagtaagagtcttaggaggaatgtcattacacagcttttaacagttttcttcaagtttgtcctgaaatagggtcacagttaatactgttcagtagaagataggaccctagagcttcaatacagcgttctgtgttttctgtttgaattgaagccttaaaatggtttgataaggattttctatatgcctccactcctacccctccccaggattcttctaaggggtggcttttttttaaattcaaggacgaatattttcaaaaaccctagtgaagaagaaatatttactgattacatttcttttcccttagggataaagaaatggagaagagctttgaagtagtaagacacaaaaatagaggtagggatgaggtttcaaaaaaccaggcccttaaacttcagctagacaaccaatatgctgtgcttgaaaatcagaaaagcagccactcacaatacaattaaggaatgggctttgctaacccttctgaggtaactagactgcagctaaccaccaccaacagccattcatcatctgatctctgctggatctacagacaccgatgcagaccactcgatttcatgaccggccctattgcactatggaagttaaagtgtcacgactgctctatgcatattggatttaggggaattttcattgttacataaatgtgtgaactagtttcaacagtgttctttcatatttactctgcaaatacaaaaaaccaaaacctgcagccagtggtcatttcaaaatctttttatgttcagatactgagccttcataagggttgactacctcagatttgctgcactcattgtggacttcatgtggatcacaacttctggataagaagattacaactattaagtgtcgatgtgaaccttgcaaccagctctactggattcttatcagaaatcctgcataaaaagtcagccatctgggttctgatctgctgtaaaagatgaagatttaagtgaccttaattaacctgtcctgtgccctacccttaaggaatactctctgtagtaggctgttgttatattagacttcctggaacacactgctgaaaagaactgatgtgttcagatcatctgtgtagggctgtgatttgtaatttaaactaattgtattctgaggtaaccacaaaataaattcaaccaaactggggtccaccaagtgggggaaggggaagggagagaataatcttgggggttttttttttttggtaatttttttatttggatagtgcttttttgttttgtttttgttctgcattaaggccttttttgctttgacttgaaataagttctttgacagagcatattgcttggttaattaagtaacctaaagtatgcattaggattgtgaaatgtctcgtgagtatgccaatcctgagggtggaaccaaatagcctttgatgaaaagggcagtggattctggaggctctacttcaggtgctgctataatgcctcatctaatcaggactaaattgtgtaggaaactgcagtgggaagaatatgctttctgctcaggctaagagggtcactgatctgtccttagaaattcagagtaacatgagcaaaacctcagctaaaacccatttaagtggcatggattgtgcatgatctttgataagaattcctcatgtacttgtgcctagtttttcaaggtattggctgttctatagatgcagtgattgtcccagctagctctgttaccagccttttggtgtgtctttatgttcatttggagagtcagggcgaaagacaggtgatgtagcacttctgtttttaataattattgcttaaaatacctattaatagttttgggtcatttaaagggacttgaggaagctacccaggattacagaagagtgtccacctaacaagatggtctggcagtttcctagttttgtatctggttcaatagaaatatgtgaaagtggtaatgtcatcatttgatgcagagtccgggtttctctataataaatccctttgccaaatgcatgagttgcagacttgctactggcaagagtgaagcaagtgggtgagtaaaactattttgacgtgggagcgttttcagataggagtttagtcttgacgaaagtgtccgtgcaggaattggactccgaggagggttacagtatctcctgacgggacctgccactcgcatctgggcaatgttgacatttgaggtggcaggcaggatgcctgccttctaatatatttgggtgagtaactgagccagccaagggaaggttgaatgattaaatcagaaatgggattcttggtaaactgaagacttttatttgggaatgaaaaaccttaaaaaaatctcttcatcgttgaactgtgcattttccctgcattttttcccaacaaaattttgttgggggttatgttactgaagaatgaacagatgagtaagtggaggtgttatgtaaaggcatattgtactcgaaatctgaagacctgcagcagatttaaattacaactcttgttataactttttaaaagattgtgaaaatatcaaaatataaatgaatcaagttttaatatactgtatgatgggtggatgaggctgtccattgtaccatttgtttgaattctcaggcatggtttggcagtgcaagaattctgtaacattaacaaattcaataaaaagtaaatatatgg

SEQ ID NO: 2874 - DNA, 1435 bp, Homo sapiens
  source 1..1435: mol_type = genomic DNA
gaactcgagttggaagaggcgagtccggtctcaaaatggagggccatgatccaaaggaaccagagcagttgagaaaactgtttattggtggtctgagctttgaaactacagatgatagtttacgagaacattttgagaaatggggcacactcacagattgtgtggtaatgagagacccccaaacaaaacgttccaggggctttggttttgtgacttattcttgtgttgaagaggtggatgcagcaatgtgtgctcgaccacacaaggttgatgggcgtgtagtggaaccaaagagagctgtttctagagaggattctgtaaagcctggtgcccatctaacagtgaagaaaatttttgttggtggtattaaagaagatacagaagaatataatttgagagactactttgaaaagtatggcaagattgaaaccatagaagttatggaagacaggcagagtggaaaaaagagaggatttgcttttgtaacttttgatgatcatgatacagttgataaaattgttgttcagaaataccacactattaatgggcataattgtgaagtgaaaaaggccctttctaaacaagagatgcagtctgctggatcacagagaggtcgtggaggtggatctggcaattttatgggtcgcggagggaactttggaggtggtggaggtaattttggccgtggtggtggcaactatggcggtggtcctggttatagtagtagagggggctatggtggtggtggaccaggatatggaaaccaaggtggtggatatggtggaggtggaggatatgatggttacaatgaaggaggaaattttggcggtggtaactatggtggtggtgggaactataatgattttggaaattatagtggacaacagcaatcaaattatggacccatgaaagggggcagttttggtggaagaagctcgggcagtccctatggtggtggttatggatctggtggtggaagtggtggatatggtagcagaaggttctaaaaacagcagaaaagggctacagttcttagcaggagagagagcgaggagttgtcaggaaagctgcaggttactttgagacagtcgtcccaaatgcattagaggaactgtaaaaatctgccacagaaggaacgatgatccatagtcagaaaagttactgcagcttaaacaggaaacccttcttgttcaggactgtcatagccacagtttgcaaaaagtgcagctattgattaatgcaatgtagtgtcaattagatgtacattcctgaggtcttttatctgttgtagctttgtctttttctttttcttttcattacatcaggtatattgccctgtaaattgtggtagtggtaccaggaataaaaaattaaggaatttttaacttttcaatatttgtgtagttcagtttttctacattttagtacagaaact

SEQ ID NO: 2875 - DNA, 606 bp, Homo sapiens
  source 1..606: mol_type = genomic DNA
aacatccagctggtggcagacggctgctgtaacctccagaagcaaattcagatcactcagctctttggggttcccgttgtggtggctctgaatgtcttcaagaccgacacccgcgctgagattgacttggtgtgtgagcttgcaaagcgggctggtgcctttgatgcagtcccctgctatcactggtccgttggtggaaaaggatcggtggacttggctcgggctgtgagagaggctgcgagtaaaagaagccgattccagttcctgtatgatgttcagccattctcttgatcccagtgggggctggatgaaggaagagcaaaacaaaccacgaagacagcctggagccgcagccagctctgctgacttctgaacttcacgctctcactgcccagatggccaggggtgtttcctcctctgctggtcttttttaaggcaggatgtttgttgttattgttgttgtttttctggttggttcttaagaaattattttctacatcttgaaaatgccagctggaacctacaccagttgttggtggggtgtgagaactatcctttacatggacttggagcatttgcaactagagcctccacattgaaataaac

SEQ ID NO: 2876 - DNA, 541 bp, Homo sapiens
  source 1..541: mol_type = genomic DNA
atagacctgaatgggctcagccctagacacacttttaaagatcggattcaaccgcacatcatgacagatgttccggctacatttacccaggctgagtgtaatggggataaaccacctgaaaacggtcaacaaacaatcactaaaatcagtgaggaattgactgatgtggacagccccctgccacactacagggtagaacccagtctggaaggtgcactcaccaaaggaagtcaggaggaaagaagaaaattacaagggaacatgctgctcaactcatccatggaggacaaaatgctaaaagaaaacccagaagagaaactctttattgttcataaggctatcacagatctttctctccaagaaactagtgctgatgaaatgacattcagagaagggcatcagtgggagaagattcctctgagtggcagtaaccaggaaataagaagacagaaggagaggattactgagcagcctctcaaagaggaagaagatgaggacaggaagaacaaaggtcaccaggcagctgaaattgaatggctgg

SEQ ID NO: 2877 - DNA, 682 bp, Homo sapiens; identical to SEQ ID NO: 2784
  source 1..682: mol_type = genomic DNA

SEQ ID NO: 2878 - DNA, 801 bp, Homo sapiens
  source 1..801: mol_type = genomic DNA
aggcgcagtgtggtgagcgagccgaagcgcgggaagcagctcttgtggatcctcagtggcggaggctcggtcacccggttttattgtgacttgtggaagtgatggtgatgtgaggatttgggaagacttggatgatgatgatcctaagttcattaatgttggagaaaaggcatattcatgtgctttgaagagtggaaaactggtcactgcagtttctaataatactattcaagtccacacatttcctgaaggagttccagatggtatattgactcgcttcactacaaatgcaaaccatgtggtctttaatggggatggtactaaaattgctgctggatctagtgattttctagtcaaaattgtggatgtgatggatagcagccaacagaaaacatttcgaggacatgatgcccctgttttaagtctttcctttgatcctaaggacatctttctggcatcagctagttgtgatggatctgtcagagtgtggcaaatttcagatcagacatgtgctattagttggccactgctacaaaaatgcaacgatgtgataaatgcaaaatcaatctgcagacttgcttggcagccaaaaagtgggaagttactggcaattcctgtggaaaaatctgttaagctatatagaagagaatcttggagtcatcaatttgatctttcagataatttcatctctcagaccctcaatatagtaacctggtctccctgtgggcaatatttagctgcaggtagtattaatggtctaatcatagtttggaatgtggaaaccaaagactgcatggaaag

SEQ ID NO: 2879 - DNA, 2682 bp, Homo sapiens
  source 1..2682: mol_type = genomic DNA
cccgctcctcccccgacaaggcgatgaggtaatcgcgccgctgagaggcacgcgcagccggtgcctagccggttggtccctgcgcccctgccccgccggccaccgcccccccacaccgtcccggccccggcagcctggccccaccatgaccgagcggtgcagcctgtggagtgccctgtcggccgccgcctgctgcttctaccgcggctccttcgtgcaggtgcagttctccaaggagaagtacatcctggactcatcgccagagaaactccacaaggaattggaggaggagctcaaactcagcagcacggatctccgcagccatgcctggtaccatggccgcatcccccgagaggtctcggagaccttggtacaacgcaacggcgacttcctcatccgggactcactcaccagcctgggcgactatgtgctcacgtgccgctggcgcaaccaggccttgcacttcaagatcaacaaggtggtggtgaaggcaggcgagagctacacacacatccagtacctgtttgagcaggagagctttgaccacgtgcccgccctcgtgcgctatcatgtgggcagccgcaaggctgtgtcagagcagagtggtgccatcatctactgcccggtgaaccgcaccttcccactgcgctacctcgaggccagctatggcctgggacaggggagtagcaagcctgctagccccgtcagcccctcaggccccaagggcagccacatgaagcggcgcagcgtcaccatgaccgatgggctcactgctgacaaggtcacccgcagcgatggctgccccaccagtacgtcgctgccccgccctcgggactccatccgcagctgtgccctcagcatggaccagatcccagacctgcactcacccatgtcgcccatctccgagagccctagctcccctgcctacagcactgtaacccgtgtccatgccgcccctgcagccccttctgccacagcattgcctgcctcccctgtcgcccgccgttccagtgagccccagctgtgtcccggaagtgccccaaagacccatggggagtcagacaagggcccccacaccagcccctcccacacccttggcaaggcctccccgtcaccatcactcagcagctacagtgacccggactctggccactactgccagctccagcctcccgtgcgtggcagccgagagtgggcagcgactgagacctccagccagcaggccaggagctatggggagaggctaaaggaactgtcagaaaatggggcccctgaaggggactggggcaagaccttcacagtccccatcgtggaagtcacttcttccttcaacccggccaccttccagtcactactgatccccagggataaccggccactggaggtgggccttctgcgcaaggtcaaggagctgctggcagaagtggatgcccggacgctggcccggcatgtcaccaaggtggactgcctggttgctaggatactgggcgttaccaaggagatgcagaccctaatgggagtccgctggggcatggaactgctcaccctcccccatggccggcagctacgcctagacctgctggaaaggttccacaccatgtccatcatgctggccgtggacatcctgggctgcaccggctctgcggaggagcgggcagcgctgctgcacaagaccattcagctggcggccgagctgcgggggactatgggcaacatgttcagcttcgcggcggtcatgggtgccctggacatggcccagatttctcggctggagcagacatgggtgaccctgcggcagcgacacacagagggtgccatcctgtacgagaagaagctcaagccttttctcaagagcctcaacgagggcaaagaaggcccgccgctgagcaacaccacgtttcctcatgtgctgcccctcatcaccctgctggagtgtgactcggccccaccagagggccctgagccctggggcagcacggagcacggcgtggaggtggtgctggctcacctggaggccgcccgcacagtggcacaccacggaggcctgtaccacaccaatgctgaagtcaagctgcaggggttccaggcccggccggagctcctggaggtgttcagcacggagttccagatgcgccttctctggggcagtcagggtgccagcagcagccaggcccggcgctatgagaagttcgacaaggtcctcactgccctgtcccacaagctggaacctgctgtccgctccagcgagctgtgaccccagggacatttcccctctgcagctgcggacagcgtcaggggcagaggggcacacaactttccccagagcaccccaaggacactgtgatcaacccgagaatgttctgggttcaactcaagcatctcccttgcacctccagggtcctgcgtggactctgggttccatcccacctgctacatgctcaccaggtctccattgaggaagaacaggaacgccggttcccccaccagcttttgctgctccccttcctgctggggttccctgttttcgagccatgggaggcaggctgctcacgcctcctcactctctgtctgtccctcaccaacaccaaggcctccatctcactgtaaataagtctctgttctgtaaatagatgtacagaagccatgttatttctttcatataataaacttttatgactcttt

SEQ ID NO: 2880 - DNA, 790 bp, Homo sapiens
  source 1..790: mol_type = genomic DNA
tgctttttgggaaatgcatcagatcttttctgttcttgaaacgccaaatctaacttggtctttttttggatgaattaccgccagtattatgaaggttactgtgaaggaacttgagaccactgaactttttgagttcttgcgactcacttttccccttcgtctttctctccctttctgtctttctgtgtctcctccaagaatgaaatatgactgaggactctcagagaaactttcgttcagtatattatgagaaagtggggtttcgtggagttgaagaaaagaaatcattagaaattctcctaaaagatgaccgtctgggaatcttgcctccacaccacgagtcccatgccaaggtgatgatgtatcgtaaggagcagtacttggatgtccttcatgccctgaaagtcgttcgctttgttagtgatgccacacctcaggctgaagtctatctccgcatgtatcagctggagtctgggaagttacctcgaagtccctcttttccactggagccagatgatgaagtgtttcttgccatagctaaagccatggaggaaatggtggaagatagtgtcgactgttactggatcacccgacgctttgtgaaccaattaaataccaagtaccgggattccttgccccagttgccaaaagcgtttgaacaatacttgaatctggaagatggcagactgctgactcatctgaggatgtgttccgcggcgcccaaacttccttatgatctctggttcaagaggtgctttgcgggatgtttgcctgaatccagtttacagag

SEQ ID NO: 2881 - DNA, 5454 bp, Homo sapiens
  source 1..5454: mol_type = genomic DNA
tcacagccaggtaaccctggagtgaagcggtttagttagaagggagcagataaactcgtcactctagtagctttaaccctcaccctgaggcaccttagcaatcagccattgcctgcaagcctccaaagcttgtctttgcctaatatggagcccaaagaagccactgggaaagaaaacatggtcaccaagaaaaagaatctggccttcttgaggtctagactctatatgctggagagaaggaagactgacactgtggttgagagcagtgtttctggggaccactctggcaccttgaggaggagccaatctgacaggactgaatacaaccagaaattacaagaaaagatgactccacagggtgagtgttctgtagctgagaccttaaccccagaggaagagcatcatatgaagaggatgatggcaaagcgggaaaagatcattaaggagctgatacagacagaaaaggattatctcaatgatctagagctgtgtgttagggaagtggttcagcccctgagaaataaaaagactgataggctggatgtggatagcttgtttagcaacattgagtccgtgcatcagatatcagccaagctgctgtcattgttggaagaggccacaacagacgtggaaccggccatgcaagtaattggagaagtattcttgcagattaaagggccactggaagatatttataaaatctactgctatcaccatgatgaagcacatagtatactggagtcctatgaaaaggaagaagagctgaaggaacatttgagccactgtatccagtccttaaagaaaatatacatgcaagaaggcaaaccaaacttattggacatgggctctttgatgatcaaaccaattcaacgtgtgatgaaataccccctattactgtgcgaacttcggaattccacccctccctctcacccagattacagagcactggacgatgcctttgctgctgtgaaggacattaatgttaacatcaatgaacttaaaagaaggaaagatttagttctaaaatacaagaagaatgacgaggatgaatcacttaaagacaaattgtctaaactaaatattcattcaattagcaagaaatcaaaaagagtgacaaatcatctgaagattctgaccagaggagaatcacaggttaaagacaatacctttaacagagaagaaaagctgtttagagctttagaaaagactgtgaggctttgtgtgaagaacatttcactctgtcttcaacacatacaggatgccatgcccctggctctgcagagtgtgatggaccttcaggagatttcatacaacaaagacgatgagatggactattctgagaccctaagtaatgccttaaattcgtgtcatgactttgcatctcacttacagagactcatcctgacccccttgtcagccctgctgtccttattcccagggcctcacaagctcatccagaaacgctatgacaaactgctggattgcaacagctacctgcagcgatcaacgggagaggagtcagacttggccaaaaaggagtatgaggccctcaacgcccagcttgtggaggagctccaggcattcaaccaggctgctcggaagattctgttgaactgtctatgcagcttcattaccctccttagggacctgatgctcgtggcacagcaggcttactccacacttgtgccgatgccactgttggtttcaagcatttctgagattcagaatcaagtactagaagagatccaaaatttgaattgtgtgaaagaaaacagtgccacctttattgagaggaaactcagttttgaaaagaagaaacctgtgcagattctgccagaaatgccacatcaaactgacattcatcgctccaaacttctatccacatatagtgcagaggaactctatcaagctaagcgcaagtgcaatgctacacaagaatatgacatcaatcttctggaaggagacttggtggctgtgatagaacagaaagatccactggggagtacaagcaggtggcttgtggacacaggaaatgtgaaaggatatgtttattcctccttcctaaaaccctacaatccagcaaaaatgcagaaagtggatgctgagaacaggttctgtgacgatgattttgagaacatcagcctcttcgtgtcttcacggccagctagtgacagtgtcacaggcacctcagaaagcagcattggtgatagcagctcatctcttagtggcacatgtggaaagtttgaaacaaatggtactgatgttgacagttttcaagaagtagacgaacagattttctatgcagttcatgcttttcaagcacggagtgaccatgaactcagccttcaggaataccagagagttcatatactcaggttttgtgacctaagtggcaataaagagtggtggttagctgaagctcaagggcagaaaggatacgtgccagctaactaccttggaaagatgacttatgcttaagaaaataagccttcaacttttattttccagcaagttgttgattgactacctcataaaactgacattacaaaactttggaccagaaagcaagaaacctctgaactacagaaactgatactgtactgggttttcaggaatactgtacttcctaacaggattattgcatgaatgtattataaaggatacatgttgaaagaaatactaagccaacagaaatagcaaagcaaatgacccaagcttcaactatcaactatttaaaagtgaagatcttttgaaggagtaattatattcttttatcatcaagaaaggttggatccaaaggtttttcaatttacttttttttttactgtatgatgtattttgccttaaatgtttttgtttttcatattgctctcttgcaaatgcatacatgtttatatacatacatataaaccatatatattatgtagctttatacacgtatgtggataatatgaattatacacctatatgtataaatcagagtatacaccaaatatacataagaagaatataccaccaactagaagtctttgataatatattttgttaatgtttcgtttatatgttttgaactaaaactgaataacttgatattaacatgtaacattactgaatgcacactatatgccagacattgttctaagtgctttatatgtagtaacttgtttaatattcaaaacattatgaagaaaccatggcccaaaaaggtgaagtaatttaatccaaatcacattgctattaagtggtgggcctggacttaaacctaggtagtgtaaaccaaaaataaaattctaaggcttccaaccatctaaatagacttccccttcagccagggcttttttctttcttttcttgttgtttttttttttttttaaagagacaataaaaggaggtttttttattcaaaggtataactggataagtagatttgtttacaatcattcttgtgaaatacttttttaaaaaaatacgatcaacttctttgcaaatagtagacacatacctcaacaatgatgacctaatttttgatccataatgtaagattaggtagaaataggcaagctcacactgctaaattaactatcaaatactcagtcaaaactccatttgtggcccccacttcttgatctatttctgttccacttcgtcttctaccatcttgccgactttcctgagcaactgctttgtcgactctctctacctgaccaattgccagatcgacaacctgactggcctgaccagccactcctctgtctggaattaaaagatgtttccatcataatattctttaatttcaggtaatttagctggcactgagagtatccagccggaatcatgccactttgcctgtaacctttgactcaattggaggaatatcaaagcaaacacccatatttcctttcaggaggcacactctggtaatctgagacactgcattactattcagctttctaagttctttccaagcacagctgacatcctgtatttcctctaggctttccagagtcatggtcacaaaccccttatcagagttgattaaagatcatggttcaaagcttgatacaccagaaatgtgggctaaagctgcagccaatgcatctatcgcccctttctcttctatcagtatctgagctgatggttggaaaaaaatcaacagcagcataagaaatggaagccagagaccttatggcatccatgcttttaaatttaactaaatccattgtagaaggaacacctacacatttaaaagtaatttgtgttttttgttccacatgtcttagttgacctttctcttggttgataaaaacatatacaaacccctgtctgtccagctttacccacgcatccagagagatggatataggactcaatatcctgaggaggagaactttgaatcaccaggtcaactacaggaatgtccaaaccacgaggagccacattggttgccaccaaaactttataattacctctctgaagccttttagtgtaatttctctttgtgactgtgcaatgtccccatgtaaacacagtgcattctgttttgtgcggattcatggccatgtcagttacattcttcttcgtctcacagaaaataatagccctcccttcagatccactgtagacttgaaggacatctcattttcatctgtgttttataaaggaggaaattgaggacctcacatggagggactggaatttaaaaccaggtcttctgactttaaggcctttcttttagtgttttcccttttcttttccttaagtcactaaaatctgtagttatataatcttacataaagcatatgcaaaatagaaaaatgatagtcaccacatatctactaatgggattaaaatgtacaatcctaaaagcttacttgttagcacacttgcttatctgtccattcattcattgaaccagtaagtatttattgagagttagtgggaatacaatgctgtgcaagacaaacaagatccctccattcataccacttaaattctagtggggaaaacatctgcacataacaaactaaataaaatgatcataaaataataaatgctatttatataaaactggctactttcattactgctcagttaaagggtcttgtagctcattttatgacatgaaaaaaatcaaggtctaaaagctccttgagacaatttaaactctaataccaaatatacctctataaaataccaaactgagctaaatacggtatatgtgtacttatacatatgtacataacctaaatatacgtgtgcacacattatctatacaaagagccatactcagtgaaagataaattacctcctaaactaaagtcccctctgaggtacaacagaaattaaaataattgcttctcttctcaactctatgtagcacgtattttccatgatgggataaatgttttcatttcaagtgccaatgtgtgaactgtaataaacattactgctttc

SEQ ID NO: 2882 - DNA, 538 bp, Homo sapiens
  source 1..538: mol_type = genomic DNA
cttcacagcctaaaagctttgaaaattcacctggagatttgggtaattccagccttcctacagcaggatataagcgggctcaaacttctggcatagaagaagaaactgtaaaggaaaagaaaaggaaaggaaataaacaaagtaagcatgggcctggcagacccaaaggaaacaaaaatcaagagaatgtttctcatctctcagtttcttctgcttcaccaacatcatctgtagcatcagctgcaggaagcataacaagctctagtctgcagaaatctcctacattgctcaggaatggaagtttacagagcctcagtgttggctcatctccagttggttcagaaatttccatgcagtatcggcatgatggagcttgcccaacaactagtatttataacagcaatgatgtagcagtatcgtttccaaatgtagtatctggctcgggatctagtactcctgtctccagctctcacttacctcagcagtcttctgggcatttgcaacaagtaggagcgctctctccctcagctgtgtcatc

SEQ ID NO: 2883 - DNA, 795 bp, Homo sapiens
  source 1..795: mol_type = genomic DNA
gtttaacagctggcccggaagtttaagtgaatatgcggcttgggctccaaaagttgctgtacggtattttattttaaagtagaaatctgtccgcttttcacttacggaggccttacagtgtgtgttctgtgttacttgagtttatacgcactgcagaatttgtttaccctgctcttttggaaacgtattccggaagcgaaaccctgagtaatcggaagtggttaggagtgagagagctgctggatatgcggagggactgggcgggtcggcttccgaatggaagaggtctgtgagaagttaacctggtgataccgatccgaagagcctatcaagtgaagccccctgaaatacggagaataagaatcttagagcagaagtcttggagtgcattttcagtggttaaggtgaaaaaatgactactaaaaatttagaaaccaaagtcaccgttacttcatccccaatccgaggagcaggagatggaatggaaactgaggaaccacctaaatctgttgaagttacctccggagtccaatctagaaagcatcatagtcttcagagtccatggaagaaagcagttccatcagagagcccaggagttcttcagctagggaaaatgctcactgaaaaagcaatggaagttaaagctgtaagaatattagttcccaaagctgctataactcatgatatccccaacaaaaatacaaaggttaagtctctgggacatcataaaggagaattccttggtcagtcagagggagttatagaacctaataaggaactctcagaggtaaagaa

SEQ ID NO: 2884 - DNA, 4086 bp, Homo sapiens
  source 1..4086: mol_type = genomic DNA
atcactcctagctgctcagcaaaccactgaggttcctgggaaaaaaaaaaaaatatctcaagggtgtgttaacttgggacactcgttaactgggggaccttcttgaggcttttttccttctttttaaaaatcatctttgattattcttcttttctagtaaaataatatttagaaaaaataatgtcagagcacagcagaaattcagatcaagaagaacttctcgatgaggagattaatgaagatgaaatcttggccaacttgtctgctgaagaactgaaagaactgcagtcggaaatggaagtcatggcccctgaccccagccttcccgtgggaatgattcagaaagatcaaactgacaagccaccgacaggaaacttcaatcataaatctcttgttgattatatgtattgggaaaaggcatccaggcgcatgctggaagaggaacgagttcctgtcacctttgtgaaatccgaggaaaagactcaagaagagcatgaagaaatagaaaaacgtaataaaaatatggcccagtatttaaaagaaaagctcaataatgaaatagttgcaaataaaagagaatcaaagggcagcagcaatatccaagaaacagatgaagaagatgaagaagaagaagatgatgatgatgacgacgaaggagaagatgatggtgaagagagtgaagaaacgaacagagaagaggaaggcaaagcaaaggaacaaattagaaattgtgagaacaactgccagcaggtaactgacaaagcattcaaagaacagagagacagaccagaggcccaagaacaaagtgagaaaaaaatatcgaaattagatcctaagaagttagctctagacaccagctttttgaaggtaagtacaaggccttcaggaaaccagacagacctggatgggagcttgaggagagttaggaaaaatgatcctgacatgaaggaactcaacctgaacaacattgaaaacatccccaaagaaatgttactggactttgtcaatgcaatgaagaaaaacaagcacatcaaaacattcagtttagccaatgtgggtgcagatgagaatgtagcatttgccttggctaacatgttgcgtgaaaatagaagcatcaccactctcaacatcgagtccaatttcatcacaggtaaagggattgtggccatcatgaggtgtctccagtttaatgagacgctaactgagcttcggtttcacaatcagaggcacatgttgggtcaccatgctgaaatggaaatagccaggcttttgaaggcaaacaacactctcctgaagatgggctaccattttgagcttccgggtcccagaatggtggtcactaatctgctcaccaggaatcaggataaacaaaggcagaaacgacaggaagagcaaaaacagcagcaactcaaggaacagaagaagctgatagccatgttagagaatgggttggggctgccccctgggatgtgggagctgttgggaggacccaagccagattccagaatgcaggaattcttccagccaccgccacctcggcctcccaacccccaaaatgtcccctttagtcaacgcagtgaaatgatgaaaaagccatcgcaggccccgaagtacaggacagaccctgactccttccgggtggtgaagctgaagagaatccagcgcaaatctcggatgccggaagccagagaaccacccgagaaaaccaacctcaaagatgtcatcaaaacgctcaagccagtgccgagaaacaggccacccccattggtggaaatcactcccagagatcagctgctaaacgacattcgtcacagcagtgtcgcctatcttaaacctgtgcaactgccaaaagaactggcgtaagaggcaacagagccatctagaagaacaagaaatggaaatagtgactcttggattacagcatggagactatgtcagcagcaatactttaggatccacgtggcagaactggaaacaatgctaccatctgataagggtatttgtaaaaggcagaatgtttgggccatgaagaagtaggggctgaagaggaaggtggaaggagataaaatataatatttagaggcaatattttctacttgcaatcaatttgagtgactcaggtgaaatttagagtcatatttcccgaagcagaagttaaagaaaattttttaaacatttgctttattattgttttcttctggtaaataataaatataacagaagtgttaactattgtattcccatttttttctccttccatctcttctgcggtaattcatcacatagtatcttaaagggaacaaataatgtttcatcctatggaaatgtgaaggatgaattgagctcctggcccttctgatgctttgaaatggaaggattgttccttagagcttctctgcagaatcagtggagattttcagtttcccaccctgcctggctttctctcttggtgactcccttggtgttttggagtattctttctataggggtacctgtgaggggcagaacacgtaagccacagaacatggtgaaaactaagtgtcactaggaaaagtaatgggaaagtaaaccctgcatatatgaaaacttcctggcagcaagttttcatatatagagggacaatgggagacagcatgctgtttttatagaaaagaagttttacataatatagttattgacaagcttttggttttggctaaatacacacacacacacacacgctcatatgtgtttactctgtaagtctaatttgattttatcactctcaaacatattttaaaggaaacttgcttacaggaaggattaaacttgaactacttatcctattctttaaggcactccattgcctggccccaatttactaatcctgtcttatttcccacaaatcctttatactctactcgatgaaacatccttgtgcacacccttgtgcctttgctcgcattaatccttccaagagacttccctcctgttctccattaatgaacgtcctacccagtcttcaactcccgggtcagatcctgtgtcctccataaaaaattttccagacaactccaatctgtccttcttccaagttcctagaggccttaattattcattctagccactaggtgcatagaatttgagatttttgtaataatagaagtagtgtgaaccctagaaattagaaaatcaagctttgggccaggtgcggtggctcatgcctgtaatcccagcactatgggaggccagggagggaggatctccagaggtcaggagttcgagaccagcctggccaacatggtgaaaccccgtctctattaaaaatacaaaaattagctgggcatgatggcaggcacctgtaatcccagctactcgggaggctgaggcaggagaattgcttgaactggggaggcagaggttgcagtgagacaagatcacgtcactgtactccagcctgggtgacagagtgatactccatctcaaaaaaaaaaaaaaaaaaaaaaaaaaaaaaaaaaaaaaaaacctttggtgccttttctctcttctttacctgagtaaataattggcacctgccttctttctccttttatgttatcataagtggcatgtatcaaaccaaacaggctaggggagaataggtctaattgtgacagacttaaaaacaacacattatttggaaagacaagccatgggaaagaaatatggcgtttctatttttttaagataatttagtatgtacaaaagtatccaaatttaaatatagttttcaatggctgatagttttgttttctcacccttcaatatttctagaaaacatccttgcatacaaagcaggatagctaagaaagggctgtaacaaacaaaacttcaagtgtctagcacatactacatctaagaggctaaactctgataggaaaagcactttaaacataattaaaagcttaatgtaaattagtagttgaaattctaggccggtgcggtggctcatgcctgtaatcccagcactgtaggcggccgaggtgggtgaatcacatgaggtcaggagttcaagaccagcctgaccaacatggtgaaaccccatttctactaaaaaaaaaaaaaaaa

SEQ ID NO: 2885 - DNA, 134 bp, Homo sapiens
  source 1..134: mol_type = genomic DNA
ctggagtgctgctttcctccgaattagcaaatctggtttgccaacacagtatctgccttccaggggattccttaccccatcaccatgtgcacctcagaaactttccaagcgctggacaccttcgaagccagaca

SEQ ID NO: 2886 - DNA, 903 bp, Homo sapiens
  source 1..903: mol_type = genomic DNA
gtgctcccccgccccgcgtagcggcggtcgccgccaccggcgcctccacctctaccatctcctctttctccaccacctcgggccccggtgtccccggccagcactatgcccatcttactgttcctgatagacacgtctgcctctatgaaccagcgcagccatctgggcaccacctacctggacacggccaaaggcgcggtagagaccttcatgaagctccgtgcccgggaccctgccagcagaggagacaggtatatgctggtcactttcgaagagccgccctatgctatcaaggctggatggaaagaaaaccatgcaacgtttatgaatgaattgaaaaaccttcaggctgaaggacttacgactcttggccaatccctaaggacagcttttgatttattaaatttaaatagattagtaactggcatagacaactatgggcagggaagaaacccttttttcttggagccagcaataattatcacaattactgatgggagcaagttgactaccaccagtggagtccaggatgaggccgttcatattctgtgtgttctccaagaatgcttaatcagtgtctggagtccttggtgcagaaagtacaaagtggggtggtaataaactttgaaaaagcaggaccagatccttcccctgtagaagatgggcagccagatatatcaaggccttttggatctcagccttggcatagctgtcacaaactcatatatgtcagaccaaatcctaaaactggggttcctataggtcattggcctgttccagagtctttttggccagatcaaaattcgccaacactaccacctcgtacatctcatcctgtagtgaagttttcctgtacagactgtgaaccaatggttattgataaacttccttttgacaaatatg

SEQ ID NO: 2887 - DNA, 507 bp, Homo sapiens
  source 1..507: mol_type = genomic DNA
aggaaaactgcagacagaaaaatgtggccggatgctctgtgggcgggcggcagcgatgttcggccaggtggctccaaggagaggaagcagtgatgcattgagggagtaaacatggaatcggtgagaatcactttccttgatcattatgtggtcagtatgcggtgactgacttgatgtgactggggaaggtcccttccctggacagaatatggtgagtgtcgtgccattaccggagaggatcaccttccctggccacatgtggtaaaaataagtgactaaagaagcagacctgggaatcacctaacatgtcgaggaggagatttgattgccgaagtatttcaggcctactaactacaactcctcaaattccaataaaaatggaaaactttaataatttctatatacttacatctaaagagctagggagaggaaaatttgctgtggttagacaatgtatatcaaaatctactggccaagaatatgctgcaaaatttctaaaaaagagaa

SEQ ID NO: 2888 - DNA, 4288 bp, Homo sapiens
  source 1..4288: mol_type = genomic DNA
ggccatttttcttcctggtgtttgaatgactcataaaatgagtttggagtggtctgaagcctctgcctccttccttgaatgctttctaagaggggctgccatgcaagaatatatgctgattttcccatacggcgcctcatctcccagagatcttccttggagaccctggaagatattgaggagaacgcccctctccggagatgtcgaactctctcaggttcacccagaccaaagaattttaagaagattcattttatcaagaacatgcggcaacacgataccaggaatggcagaatagtccttatcagtggcagaagatccttctgtagtatattttcagtgctgccgtatcgcgacagtacccaagtcggggacttgaagttggacggaggaagacaatcaactggtgcagtgagtttgaaagagatcattggtctggaaggtgtggagctgggtgctgatgggaagactgtttcctatacccaatttctgttacccacaaatgcctttggagcccggagaaataccatagactccacctcctctttctcccagttccgtaacctgagccaccgcagcctctccataggccgggcaagcggcacccaggggagcctcgacacaggtagtgacctgggagactttatggactatgacccaaatctcttggatgacccccagtggccttgtggcaaacacaaacgcgttctgatcttcccttcctacatgacaacagtgattgactacgtgaagccctcggatctcaagaaggacatgaacgagaccttcaaggagaagtttcctcacattaagctgacactcagcaaaattaggagtctgaaacgagagatgcggaagcttgcgcaggaggactgtggccttgaggagcccacggtggccatggccttcgtctactttgaaaagctcgccctcaaggggaaactcaacaaacagaaccggaagctgtgtgctggggcatgtgtgctgttagcagccaaaattggaagtgacctcaaaaaacacgaagtcaagcatttaattgacaaactggaagagaagttccggctgaacaggcgagaactgattgcctttgaattcccggtgttagtggccttggaattcgccctccacttgcccgagcacgaagtcatgccccactacagacggctggtccagagttcctagcactggccccgaggacagccaagggccatttcttctcagcttggtggagcagcacttacttactactggaaatgaaaaaaagtagaactcagaataccagacttttcttcctctcgacatagtttggggagaagcagtactagaaactttccaaggagtcttgggtgtgtagccaagaggagccatgagctatggactcctcaagcacgggaagaggaggtgtgtgctgagaacagagaggccctgccctctgtccactagcgagaatccctagctgccccagcccagtctttctccccggcattcacaaactttgcaagcgtggtccagggccttctccagatctgttccaacttggagtgtgaagggcttgagcatacgggggaagagagtctgcagaagttgggggaaaacttttaaaagataccctcattgtgtcaaagagtgtgccaatctatttttgtatcagcattggaagtgcactttcccctggggcgtgtgggtgtgtgaatgtgcaagtgtctgagagatactgcatcagccctagacccccagagccagtcccgccctttacagagcagcccttagcctggggccatgggtcaggctgaccttcaacaattatttctagatgatttctggataagaattgctctctcggtaccagacagtttgacatcctccacccttagaaaatgactgacattgttttgttactgctcctacccaccaaggggataaagaaggcgagttctgagtgttggatgagtcagtcgcgtggaaggacgtggagcgtggcgctctgtaacttcctgccgtctgccaccccgccacgtgtatttaaccctcgcactttctccactgtggagatggctggggcggcgccccacagtgtgtattcctgtcctctatgttagagtgcatcagaagcacatttactgtgctatctatatcgctatataaaagtgttttataaaaacccagaataggagcacgacgcatgattggtgtttgaggcgtttgccagctgggacaaactgcgtttggagctgtggttaagctgactaaggaggcggtggctctttcttaacattcccacgtgcccagggctgttcatgcaagattttaatggtgacttgtcctggcttactgggacagtctgtatgaggcatgtcaccacactgtcgcctcatagctgcaagagagaggcaccagctgaagttcccctgactgaagagagcctgtggccatgtaaaaagagaattaaactcttgttgctttttgtatacctgtatgcgtttgtgtagacgtgtgtctcaccagtcacctttgccctgcattgctgatccccttgcgcacactgattctagtgaggtcacagattcggagcttcacacaccagcccagagaaagggcgatggaaccgaaccgagggtctgcagctttcgttagcagagctgtcagattcttgacagtcttggaggatggagaaattcaagcagcagctggtgagggccaaaacagaatacttggcttcttcagaatcttagattgcactgagtttagtcctaaatattttgctaacaaatttccttggccagaatcagttgtaagacagtgatttgggtggtggggggagggaggagggagaggatatgattaatgtggtctctttggctgatcgaaagctagatcaactggtacttagggcacttgctgtttataaagcaaaattgagaaaatattcaaggtgcctccatcgcctgaactacaaaatgcccttggccttcctcacatggggtctgtcaccttgcatctctgataagccatccaccttcctggtcagtgcctacagggggagagcctttctgagaagcaggtcctgtggtatctgagaatggtctagagagctccccactgcccatctgcccccgaatttcctgccaagctctggggagtggggtggggggagggacgtccgatggatgacaggccgccagcccagacgtggggagagaagcctgagtcctttcctgtgtgataaaatcaggctaatttacttggatttggggtgatttgtttggtttttagcatttatgaggtgagcccatgaagttagtggtccattactttttaaagatgcattttcattttaaactgtctcctggcctgtggatttgtggaatggacagttttgtgggttttaatttatttgtgaggagtcggggctgagaaggcattttatcaggaggtctccttttgcacgtccatgacatgagcttttcggaggcaaaggaagtggaggagggtgagagatgcaggtcactgccagaggcacctctgtgacacggaacattccagacacgtcgcagccttgggcttcggcgaggaggaagtctgagcctgtgaagcgagaaggccaggcagtagactggctctgaggttttgccctttgacctcctccacagagggcagcttcagccccttgtaagccctgccccctctcaggactgccctgaggcctctccagtcctccccacactcagagatctgtggggaagctccgcccagccacactccttgggataatactagccggttctgcctgattccttttcccccggagccagcctagggggcccgggactcctctagtgagccttgactgttaggtaagagacaggaagcagacaagccaagaggttgctgcagctgcccccaggaggaaacgggcagcagggagtgtggcccagcccccactgtacccctccaggggcccgagcccttgccagcccaatgacaccttgaagtcaccacttttcctttcttgcccgctaataaaacctatttaaacaggaaattcataccaaatgcaaatgggttttgttttccttggcattttgttgttccgatcacagatttccctgccagggtgtctgtggttatcagctgcaggctcagcttggggcggccgcttcacacaagccactctgtaccacgtgccctaccttagtgacgggagtaaggagcttccttcccctccatgtcattccttcctgttcccttcattccccaacagcaaataaaactgttgaatgctctg

SEQ ID NO: 2889 - DNA, 1246 bp, Homo sapiens
  source 1..1246: mol_type = genomic DNA
aatctctgtctggatacttttaggaaaagaaccttgttattatgtactaaagtgaataatttgtgctcttagagtaggagttggaactataggacttgaaggcaagagcaggtatcttatcaaggatctactcactcagtttccctaaagctctctctccagatcggattcaaccgcacatcatgacagatgttccggctacatttacccaggctgagtgtaatggggataaaccacctgaaaacggtcaacaaacaatcactaaaatcagtgaggaattgactgatgtggacagccccctgccacactacagggtagaacccagtctggaaggtgcactcaccaaaggaagtcaggaggaaagaagaaaattacaagggaacatgctgctcaactcatccatggaggacaaaatgctaaaagaaactagtgctgatgaaatgacattcagagaagggcatcagtgggagaagattcctctgagtggcagtaaccaggaaataagaagacagaaggagaggattactgagcagcctctcaaagaggaagaagatgaggacaggaagaacaaaggtcaccaggcagctgaaattgaatggctgggatttcgaaaacctagccaagctgacatgttacattctaaacatgatgaggagcagaaggtttgggatgaagaaattgatgatgatgatgatgataattgcaataatgatgaagatgaagttcgagtgatagaatttaagaaaaaacatgaagaggtttctcaatttaaagaggaaggtgatgcaagtgaggactccccactgagcagtgccagttcccaagctgtgacacctgatgagcagccaaccttagggaagaagagtgatatctccagaaatgcttattccagatacaatacaatatcctatcggaaaatcagaaagggaaataccaagcaaagaattgatgaattcgagtctatgatgcatttataaactaactggaactgagaaattctcatgcccactaaaggaaaagctaattctattgccccagggtgcatatttctatgccttatttgagttatcacttggagggaggtggaagttgactctctttttcactgtagaataatgtggaaataaccctagataaaaattcagtctgataacctcaaatcaaaaagctttaaataaattcttgggcatttatcttttaaaacttcactaatatagcattgtgtgataagcactaagcagtcagt

SEQ ID NO: 2890 - DNA, 5697 bp, Homo sapiens
  source 1..5697: mol_type = genomic DNA
gattgggccgctgtcaggtgtcgctgcctgcaggttcggctgcgcgagcggagggaggcgggactcaagagtagccttcctcgaggacctgcctttcccatttgctgcctgaagttaatgtttcttgctggccaaatcagggacatgccggcattagcgggatgagtgggtgttccggcagggatgtggtcattgacggccagtgagggcgagagtaccacggcccacttcttccttggagctggagatgaggggctgggcacccgtggaataggcatgaggccagaagagagtgacagcgagctccttgaggatgaggaggatgaagtgcctcctgaacctcagatcattgttggcatctgtgccatgaccaagaaatccaagtccaagccaatgactcaaatcctagagcgactctgcagatttgactacctgactgttgtcattctgggagaagatgtaatccttaatgaacctgtggaaaactggccatcctgccactgcctcatctctttccactccaaaggctttcctctggacaaagctgttgcttactccaagcttcgaaacccctttcttatcaatgatctggccatgcagtattacatccaagataggagggaggtgtaccggatcctgcaggaagagggtattgatctgcctcgatatgctgtgctcaaccgtgatcctgcccggcctgaggaatgcaacctgatagaaggtgaagaccaagtagaggtcaatggagctgtctttcccaagccctttgtggagaagccagtgagtgcagaagaccacaatgtttacatctactaccccagctcagctggaggaggaagccagcgtctctttcgtaagattggcagccgaagcagtgtttactctcctgagagcagcgtccgaaagacggggtcgtacatctatgaggagtttatgccaacagatggcacagatgtcaaggtgtatacagtggggccagattatgcccatgctgaagctagaaaatctccagctttggatgggaaggttgaacgagacagtgaggggaaagagattcgatatccagtcatgctgactgccatggaaaagctggtggccaggaaagtctgcgtagctttcaagcaaacagtttgtggatttgaccttcttcgtgccaatggtcattcctttgtgtgtgatgtcaatggctttagttttgtcaagaactcgatgaaatactacgatgactgtgccaagattctggggaacaccataatgcgggagcttgccccacagttccagattccatggtccatccccacggaggctgaggacattcccattgttcccaccacatctggcactatgatggaacttcgttgtgtcattgcaattattcgtcatggggatcgtactcccaagcagaagatgaagatggaagtgaaacacccaaggttttttgctctgtttgaaaaacatggtggctacaagacagggaaattaaaactcaagcgacctgagcagctccaggaggtgctggatatcacaaggctgttgttggctgaactggagaaagaaccaggtggtgagatcgaggagaagactggaaaactagagcagctgaagtctgtactggagatgtatggtcacttctcaggtataaaccggaaggtacaattgacttactaccctcatggagtaaaagcttctaatgaggggcaagatccacagagggaaactctggccccatctctgttgctggtactgaagtggggtggagaactgactcctgctggccgtgttcaggctgaggagctggggcgagcttttcgctgcatgtaccctggaggacagggtgactatgctggcttccctggttgtgggctgcttcgtctccatagcactttccgccacgatctcaagatctatgcctctgatgagggtcgtgttcagatgactgctgctgccttcgccaagggccttctggctctagaaggggagctgacacccattttggtgcaaatggtgaagagtgccaacatgaatgggctactggacagcgatggggattccttgagcagctgccagcaccgggtgaaggctcggctgcaccatattctacagcaggatgcgccctttggccctgaggactacgatcagctggctcccaccagaagtacttccctgctcaactccatgactatcatccagaatcctgtgaaggtctgtgatcaggtatttgccctgatcgaaaacctcacccaccagatccgggaacgaatgcaggaccccaggtctgtagacctgcagctctaccacagtgagacactagagctaatgctacagcgttggagcaagctggagcgtgactttcgacagaagagtgggcgctatgatatcagtaagatccctgacatctatgactgtgtcaagtatgatgtgcagcacaatgggagtctgggacttcaaggcacagcagagttgctccgtctctctaaggcactggctgatgtggtcattccccaggagtacgggatcagtcgggaggagaaactggaaattgctgtgggcttctgtcttccactgttgcggaagatactacttgacctgcagagaacccacgaggatgagtctgtcaacaagctgcatcccctctgttatctcaggtactcccgaggcgtgctctccccaggtcgccacgttcgaacgcgtctctatttcaccagtgagagccatgtccactccctgctcagtgtcttccgttatggaggacttcttgatgagacccaggatgcacaatggcagcgagctttggattatcttagtgccatctcagagcttaactacatgacccagattgtcatcatgctttatgaggacaacacacaggatcccttatcagaggaacggttccatgtggagctacacttcagccccggagtgaaaggtgttgaggaagaaggcagtgccccggctggctgtggattccgtccagcctcttctgagaatgaggagatgaaaaccaaccaaggcagtatggagaacctgtgtccaggaaaggcatcagatgaaccagaccgggcattgcagacttcaccccagcctcctgagggccctggccttccgaggagatcacccctcattcgtaaccgaaaagctggttccatggaggtactttctgagacttcatcctcgaggcctggtggctaccggctcttttcatcttcacggccacccacagaaatgaagcagagtggcctaggctcacagtgcacagggctgttcagcaccacagtgctgggtggctcctccagtgccccgaatcttcaggactacgcccgcagccatggcaaaaagctaccacctgccagtctgaagcaccgagatgagctcttgtttgtcccggccgtaaaacgattttctgtgtcgtttgcaaagcatccgactaacgggtttgaagggtgttccatggtgcctaccatctaccctctggaaacactgcataatgccctttccctacgtcaagtgagtgaattcttgagtagagtctgccagcgccacactgatgcccaggcacaggcatctgcagccctctttgattccatgcacagcagccaggcctcagataacccattttctccaccacgtactcttcattcacctcccctgcaactccagcagcgctctgagaagcccccttggtacagcagtggcccttctagcactgtgtccagtgctggtccttcttcccctactacagtagatggtaactcccaatttggcttcagtgatcaaccctccctaaattcacacgtggctgaagaacatcaaggccttgggctgctccaggagacccctgggagtggagcacaagagctctccatagaaggggagcaagagctttttgaaccaaatcagtccccacaggtgccacctatggaaaccagccagccatacgaggaggtcagccagccatgtcaggaggtccctgacatcagccagccatgccaggacatttctgaggcgctcagccagccatgtcagaaggtccctgacatcagccagcaatgccaggagaaccatgacaatggtaaccacacatgccaggaggtccctcacatcagccagccatgccagaagtccagccaactgtgccagaaagtctctgaggaagtttgccagctatgtctggagaactccgaggaggtcagccagccatgccagggggtctctgtggaggttggcaagctggtccataagttccatgtaggggttggtagcttggtccaggaaacccttgtagaagttggcagcccagctgaagagatccctgaggaggtcatccagccataccaggagttctctgtggaggttggcaggctggcccaggagacttctgcgatcaatctgttatctcagggcatccctgagattgataaaccatcccaagagttccctgaggagattgatctgcaggcccaggaggtccctgaggagataaattagaagtcctgggtggtccctgaagtgattgatcagctgcctggagagggtattcctcaagcccagcatccatctggtgatccaaaccctcagagccagtctctagcccatgaccagcactcaccccttccaccagcaacatgtgattaattttctcattagtggtatcacactataccagccatttgagccagcaaccttttctgttggctaactcactggccagctctcaccagcggtgtctggggaagtagttctctttgtatgaagcatacctgtgccagagctgtggttgaggaggagccagttttaggttcgaagaagccattggctcctcacttagccattagacttgaataggatttccttggggtgggttggtctgtcattacccagccttctctgagcatcctaggaaatcacagattgttaaaggaaatgccgcttcactgctgaagacaccatctggcgacagcaaatgcaaaagaggggactctagggtcttcacttttctggggaaatgttcacgacttctcaaggtacgcttagaccatatgtgcattcaggggactcttgtctttgccagcactcctcaggtgagcccgggatggctatctgaaatgtctggaaaatagagtcccttccccaaacatctgacatggccactaaatctttagacttgccttatagatccttccatatcatccccaagtgccccttctgcctcagtcctgttcctctgggcaatagctctagggaaaagtaggtattagactgctgtgcaaaattcagagcaactacttaaaatgctctagaggattcttagccagtctgtgaaagtgggcctcctctgtggtggggctgtttggcttaggagatgctgtagtagtagagataatcaggttctattttaagcaatcagcagagatcaatattgtacagatacaagcaaaggtttaataaatatatatatatatatttatttctgtagttgtgccagggacagactggccaaagaccaaacactgcagggtccccaagaaatttgtccttatatcattgtgtctgagggccagatatgattatgaagctttttccaaagatccagggatgggaatgggagtgggtaggaggggtaatgcggtcattggagtcgggggctggaacattatgagtgctcaataaatataaactaatgagaatggtggtgatgga

SEQ ID NO: 2891 - DNA, 1287 bp, Homo sapiens
  source 1..1287: mol_type = genomic DNA
agactacccgggccctcacagaaggcggtggcgggcgggtgcagcgagtttgtccccttgcccgcacactgcttggcctctgtacttaagtgcggtggccgcctgcctcgctggagcttctctgccgcagccatccgtgctgcttgggacgggccggggcgcgaaggcggtcgcatccatcgctctgccctcctgcttctcttgtgtaatcagctgcctatttggaaattgggcagggtttgcgactggatgctaatgtcactgactagttttcagcctaccatccagaagtaacatgttcccagctttggaaacgcacctaaagcagactattcctgatccttatgaagactttatgtaccgtcacctccaatattatggctactttaaagctcagagaggcagtttaccaaactctgctacgcatcagcatgttcggaagaataaccctcaatgcctgttgaatggctctcttggggaaaaagatgatttgataccagacaccctgcaaaaggagaagcttctatattcacatatgctgagtttaccacatcttaggagcagacagcttctttatgatgagttggatgaagtaaacccacgtcttcgagaaccccaagagctcttttccattttgtctaccaagaggccactgcaggctccaagatggccaattgaatgtgaggtcatcaaggaaaacatccatcatattgagtgggctccacctcaaccagaatatttctatcagcctaaaggaaatgaaaaggtaccagagattgtaggagagaaaaaaggaacagttgtctatcaattagattcagtgcctatagaaggttcctattttaccagttccagagtgggaggcaaacgaggaattgtcaaggaacttgctgtcacgttgcaaggaccagaagataatactctactgtttgaatcaaggtttgagagtgggaatctgcaaaaagctgtcagagtagaccctatgagtatgaactcaccttgcgaactgacctctacactaacaaacacactcagtggttttattttcgtgttcagaacaccagaaaagatgctacctatcgcttcaccattgtcaacttgctaaaacccaagagtctttatactgtagggatgaagccactcttgtactcccaattggatgccaacacccgcaatattggctggaggagagaaggaaatgaaatcaagtactacaagaacaacacggatgatgggcagcagcccttctactgtctcacgtggaccattcagtttccatatgaccag

SEQ ID NO: 2892 - DNA, 1293 bp, Homo sapiens
  source 1..1293: mol_type = genomic DNA
gttgctaccggaatgcctcttcaggttagcgattacagctggcagcagacgaagactgcggtctttctgtctctgcccctcaaaggcgtgtgcgtcagagacacggacgtgttctgcacggaaaactatctgaaggtcaactttcctccatttttatttgaggcatttctttatgctcccatagacgatgagagcagcaaagcaaagattgggaatgacaccattgtcttcaccttgtataaaaaagaagcggccatgtgggagaccctttctgtgacgggtgttgacaaagagatgatgcaaagaattagagaaaaatctattttacaagcacaagagagagcaaaagaagctacagaagcaaaagctgcagcaaagcgggaagatcaaaaatacgcactaagtgtcatgatgaagattgaagaagaagagaggaaaaaaatagaagatatgaaagaaaatgaacggataaaagccactaaagcattggaagcctggaaagaatatcaaagaaaagctgaggagcaaaaaaaaattcagagagaagagaaattatgtcaaaaagaaaagcaaattaaagaagaaagaaaaaaaataaaatataagagtcttactagaaatttggcatctagaaatcttgctccaaaagggagaaattcagaaaatatatttactgagaagttaaaggaagacagtattcctgctcctcgctctgttggcagtattaaaatcaactttacccctcgagtattcccaacagctcttcgtgaatcacaagtagcagaagaggaggagtggctacacaaacaagctgaggcacgaagagcaatgaatactgacatagctgaactttgcgatttaaaagaagaagaaaagaacccagaatggttgaaggataaaggaaaacctgaaagatgtctgaaaattccagtgacagtgattcatcttgtggttggactgtcatcagtcatgaggggtcagatatagaaatgttgaattctgtgacccccactgacagctgtgagcccgccccagaatgttcatctttagagcaagaggagcttcaagcattgcagatagagcaaggagaaagcagccaaaatggcacagtgcttatggaagaaactgcttatccagctttggaggaaaccagctcaacaattgaggcagaggaacaaaagatacccgaagacagtatctatattggaactgccagtgatgattctgatattgttacccttgagccacctaagttagaagaaattggaaatcaagaagttgtcattgttgaag

SEQ ID NO: 2893 - DNA, 582 bp, Homo sapiens
  source 1..582: mol_type = genomic DNA
ttttcggaggctgccagcgtcccacaccagccgcaggtgaaaaccggcagaaagacattaagagattttcctgcagtcactgctggcagatgatagagccaggatttgaaagcaggcagcctggctccagaccctgtgctcttaactcccgttttgcatcaagaacagaatcctatgaaaggcttgcacagtgcttggtactgagtaggcactccgatagcagcatcaaggagcattgtgtacatgcagaagtgcacagtacctggagtgaaactgcttgtgttcgatttctgataccattcataactggctgtgtgatctcaaataagaaaactgaagaaccagctgggcgcggtagctcacgcctgtaatcccagcactttgggaggctgaggcgggtggattacctgagaacctctaaaatgcagacctccagctctagatctgtgcacctgagtgaatggcagaagaattacttcgcaattacatctggcatatgtaccggaccgaaggcagatgcataccgtgcacagatattacgcattcagtatgcatgggcaaactctgagatttcccaggtct

SEQ ID NO: 2894 - DNA, 2423 bp, Homo sapiens
  source 1..2423: mol_type = genomic DNA
atggtaacgacgctcggcccgaagatggcggccgaatggggcggaggagtgggttactcgggctcaggcccgggccggagccggtggcgctggagcgggtctgtgtgggtccgaagcgttttactcctgttgggcgggctccgggccagcgccacatctactcccgtctccttgggcagttcccctccctgccggcaccacgtcccctctgacactgaggtcataaataaagttcatcttaaggcaaatcatgtggtcaagagagatgttgatgagcatttaagaatcaagactgtctatgataaaagtgttgaagagttgctccctgagaaaaagaatcttgtaaagaacaagcttttcccacaagcgatttcttatttagagaagacttttcaggtccgtcgacctgcgggcactatcttacttagcagacaatgtgcaacaaaccaatacctccggaaggaaaacgatcctcacaggtactgcaccggggagtgtgccgcacacacaaagtgcggccccgttattgttcctgaggaacatctccagcaatgccgggtctaccgtgggggtaagtggcctcatggagcagtgggtgtgccagaccaagaaggcatctcagatgcagactttgttctttacgttggtgctctggccaccgagagatgcagccatgaaaacatcatctcttatgcagcctattgtcagcaggaagcaaacatggacaggccaatagcaggatatgctaacctgtgtccaaatatgatctctacccagcctcaggagtttgttgggatgctgtccacagtgaaacatgaggttattcatgccctgggtttctctgctgggctgtttgcattctaccatgataaagatggaaatcctctcacttcaagatttgcagatggcctcccaccttttaattatagtctgggattatatcaatggagtgataaagtagttcgaaaagtggagagattatgggatgttcgagataataagatagttcgtcacactgtgtatctcctggtaacgcctcgtgttgttgaggaagcacgaaaacattttgattgtccagttctagagggaatggaacttgaaaatcaaggtggtgtgggcactgagctcaaccattgggaaaaaaggttattagagaatgaagcgatgactggttctcacactcagaatcgagtactctctcgaatcactctggcattaatggaggacactggctggtataaagcaaattacagcatggctgagaagttagactggggccgaggaatgggctgtgactttgtcaggaagagctgtaaattctggattgatcagcagagacaaaagagacagatgctgagcccttactgtgacacgctcagaagtaacccactgcagctaacttgcagacaggaccagagagcagttgccgtgtgtaatttgcagaagttccctaagcctttaccacaggaataccagtactttgatgaactcagtggaatacctgcagaagatttgccttattatggtggctccgtggaaattgctgactactgccctttcagtcaggaattcagttggcatttaagtggtgaatatcagcgcagctcagattgtagaatattggaaaatcaaccagaaatttttaagaactatggcgctgaaaagtatggacctcattccgtttgtctaattcagaaatcagcattcgttatggagaagtgtgagaggaagctgagttacccagactggggaagcggatgctatcaggtttcttgttctcctcaaggtctgaaagtttgggtccaagatacttcatatttgtgtagtcgggctgggcaggtcctccctgtcagtatccagatgaatggctggattcacgatggaaacctgctctgcccatcatgttgggacttctgtgagctctgtcctccagaaacagatcctccagccactaacctgacccgagctctgccacttgatctttgttcctgttcctcgagcctggtggtcaccctctggcttctgctaggcaatctgtttcctctgctggctggatttcttctgtgtatatggcactaggaatggaaaagtggatcttcaagatattcttttatgttatgttcttgtgaacaaagcacaaagtttgagtgagtgccaacctatgcagatggtagaagtggcattcctggctttggcttggaagaattgacgaccatcagaccttgaagcagaacttcacagcagcctgtcctcatcagcaacccaaccaccttcatcagcaacccaaccaccttcatcagcaacccaaccacctcgtcagcaacccaaccacctcgtcagcaacccaaccacctcgtcagcaacccagccaccttcatcagcaacccaaccacctcatcagcaacccagccaccttcatcagc

SEQ ID NO: 2895 - DNA, 3468 bp, Homo sapiens
  source 1..3468: mol_type = genomic DNA
gcgagccgaagcgcgggaagcagctcttgtggatcctcagtggcggaggctcggtcacccggataggtaaaggaaaacatgcctgccacacggaagccaatgagatatgggcatacagagggacacacggaggtctgttttgatgattctgggagttttattgtgacttgtggaagtgatggtgatgtgaggatttgggaagacttggatgatgatgatcctaagttcattaatgttggagaaaaggcatattcatgtgctttgaagagtggaaaactggtcactgcagtttctaataatactattcaagtccacacatttcctgaaggagttccagatggtatattgactcgcttcactacaaatgcaaaccatgtggtctttaatggggatggtactaaaattgctgctggatctagtgattttctagtcaaaattgtggatgtgatggatagcagccaacagaaaacatttcgaggacatgatgcccctgttttaagtctttcctttgatcctaaggacatctttctggcatcagctagttgtgatggatctgtcagagtgtggcaaatttcagatcagacatgtgctattagttggccactgctacaaaaatgcaacgatgtgataaatgcaaaatcaatctgcagacttgcttggcagccaaaaagtgggaagttactggcaattcctgtggaaaaatctgttaagctatatagaagagaatcttggagtcatcaatttgatctttcagataatttcatctctcagaccctcaatatagtaacctggtctccctgtgggcaatatttagctgcaggtagtattaatggtctaatcatagtttggaatgtggaaaccaaagactgcatggaaagggtgaaacatgagaaaggttatgcaatttgtggtctggcatggcatcctacttgtggtcgaatatcgtatactgatgcggaaggaaatctagggcttctagagaatgtttgtgaccccagtggaaagacatcaagcagtaaggtatctagcagagtggaaaaggattataatgatctttttgatggagatgatatgagtaatgctggtgattttctaaatgacaatgcagttgagatcccttctttttcaaaagggattataaatgatgatgaggatgatgaagacctcatgatggcttcaggtcgtcctagacagcgaagtcacatcctagaagatgatgaaaactcagttgatatttcaatgctaaaaactggttctagtcttctcaaagaggaggaggaagatggtcaagaaggcagcattcacaatctaccacttgtaacatcccaaaggccattttatgatggacccatgccaactccccggcaaaagccatttcagtcaggttctacaccgttgcatctcactcacagattcatggtgtggaactctattggaattattcgctgctataatgatgagcaagacaatgccatagatgtggagttccatgatacctccatacaccatgcaacacacttatcaaacactttgaattatacaatagcagatctttcccacgaagctattttgttggcatgtgaaagcactgatgaactagcaagcaagcttcactgcctgcactttagttcttgggattcaagcaaagagtggataatagacttgcctcagaatgaggatattgaagccatatgtctcggtcaaggatgggctgctgccgctactagtgccctgcttcttcgattgtttactattggaggggttcaaaaagaggtattcagccttgctggacctgtggtgtcaatggcaggacatggagaacagcttttcattgtttatcacagaggtacaggatttgatggggatcagtgccttggagttcaactgctagagctggggaaaaagaaaaaacaaattttgcatggtgaccctcttcctcttacaaggaaatcctaccttgcatggattgggttttcagctgaaggtaccccttgttacgtggattcagaaggaattgttcgaatgcttaacagaggacttggtaatacgtggactcctatatgtaatacaagagagcactgcaaaggaaaatctgatcactactgggtggttggtatccatgaaaatccccagcaactaaggtgcattccttgtaaaggttctcggtttcccccaacccttccacgccctgctgttgctatattatcctttaagcttccttactgtcagattgcaacagagaaaggacaaatggaggagcaattttggcgttcagttatatttcacaaccaccttgattatttagctaaaaatggttatgaatatgaagagagcactaaaaatcaagcaacaaaagagcaacaggaacttttaatgaaaatgcttgcgctttcttgtaaactggagcgagaattccgttgtgtggaacttgctgatctaatgactcaaaatgctgtgaatttagccattaaatatgcttctcgctctcggaaattaatactggctcaaaaactaagtgaactggctgtagagaaggcagccgaattgacagcaacccaggtggaagaggaagaagaagaagaagatttcagaaaaaagctgaatgctggttacagcaatactgctacagagtggagccaaccaaggttcagaaatcaagttgaagaagatgctgaggacagtggagaagctgatgatgaagaaaaaccagaaatacataagcctggacagaactcgttttccaaaagtacaaattcctctgatgtttcagctaagtcaggtgcagttacctttagcagccaaggacgagtaaatccctttaaggtatcagccagttccaaagaaccagccatgtcaatgaattcagcacgttcaactaatattttagacaatatgggcaaatcatccaagaaatccactgcacttagtcgaactacaaataatgaaaagtctcccattataaagcctctgattccaaagccgaagcctaagcaggcatctgcagcatcctatttccagaaaagaaattctcaaactaataaaactgaggaagtgaaagaagaaaatcttaaaaatgtattatctgaaaccccagctatatgtcctcctcaaaacactgaaaaccaaaggccaaagaccgggttccagatgtggttagaagaaaatagaagtaatattttgtctgacaatcctgacttttcagatgaagcagacataataaaagaaggaatgattcgatttagagtattgtcaactgaagaaagaaaggtgtgggctaacaaagccaaaggagaaacggcaagtgaaggaactgaagcaaagaagcgaaaacgtgtggttgatgaaagtgatgaaacagaaaaccaggaagaaaaagcaaaagagaacctgaatttgtctaaaaagcagaaacctttagatttttctacaaatcagaaactatcagcttttgcatttaagcaggagtaa

SEQ ID NO: 2896 - DNA, 1544 bp, Homo sapiens
  source 1..1544: mol_type = genomic DNA
gatgtcacgtccggcggcggcggcagcggcagcggcagcggcgctgagttttgtctcccgggccgtctgggcgcgcgcgggtgtcccagaatgaaatatgactgaggactctcagagaaactttcgttcagtatattatgagaaagtggggtttcgtggagttgaagaaaagaaatcattagaaattctcctaaaagatgaccgtctggatactgagaaactttgtacttttagtcagaggttccctctcccgtccatgtaccgtgcattggtatggaaggtgcttctaggaatcttgcctccacaccacgagtcccatgccaaggtgatgatgtatcgtaaggagcagtacttggatgtccttcatgccctgaaagtcgttcgctttgttagtgatgccacacctcaggctgaagtctatctccgcatgtatcagctggagtctgggaagttacctcgaagtccctcttttccactggagccagatgatgaagtgtttcttgccatagctaaagccatggaggaaatggtggaagatagtgtcgactgttactggatcacccgacgctttgtgaaccaattaaataccaagtaccgggattccttgccccagttggaaggcataaatgttggctgactgtcaaatgcttgtgggaggtccccacggagtggagaagcgggagactcagcttaatcacagacaaagttgtgcatgagagacggagtctcactctgttgcccaggctggagttcaatggtgcaatgatctcggctcactgcaacctccgcctcttgggtgcaagtaactctcctgcctcagcctcccgagtagctgggattacaggtcccttcagagccgtgaaggcgggcatcctgtgacacagctgacacagcatggagccttcatctcctatgtgcgtttcttaggtcactctgaggggtggggccacaagctaccacctacagaattgatacctttagttcaaagccattgaccaacccaggttcatgaattttcaggcagaaggtaccaagacaaccccattaggcaactaggaagacaggccaggaaaggcctacgatgtcgtcattacagctgccaccgtcagagggttcattatgtgctcagaggtgcacagggcctcactggctgctggacagaacaggggctgctcccaggaccaggcagggtggggctggaaaccaacccaaggctctcaaagctccagggctgagccatggcatctctgtgccctgttccccaccacccaacaccgagcagttcctcaaatggctgaaagctcagaaaatcagttttaaaacaaactattggaggatgttttcttataccactagacattttttttgtttaacaatcgcaatagattaaatttaaaaaaatatttaggagaacatagttccagaatacagggaaaaataagaacctatgggaaaacaagttgatttctgaaaagtttcaaaactatgaaatgaccaacctgttagaattggtcaagtagttctttaatttgcaactatgtggc

SEQ ID NO: 2897 - DNA, 3189 bp, Homo sapiens
  source 1..3189: mol_type = genomic DNA
atgatcagcaagggtggcagtgaagctcttctgcagaccctggtagacacagcgaggacagctcctccagactatgacatcctcctgcctctcttccggctgctggccaaagttggcctaagagataaaaagattggacggaaggccctagaattggaagcacttgatgtgacattgattctggccaggaagaacctatcccatggccagaatctcctccactgtctctgggctctgcgtgtgtttgcctccagtgtctccatgggagccatgctgggaattaatggagccatggaactgcttttcaaggttattactccttacacccgaaagcgcacccaagcaatcagggcagccactgaagttttggcagcattgctgaaatccaagtcgaacggccgcagagcagtgaaccgaggctacgtcaccagcctgctcgggctgcaccaggactggcacagccatgacacagccaacgcctacgtgcagatccgacggggcttgctgctctgcctcaggcacattgctgccctccggtccggcagggaggccttcctggcagcacagggcatggagatcctcttcagcaccacacagaactgcctggatgacaagagcatggagcccgtcatctctgtggtgcttcagatcctgaggcagtgctaccctacgagtccacttcccttggtcacagccagcagtgcctatgccttcccggtccccgggtgcatcaccactgaacctccacatgatctacctgaagaggattttgaagatgatggcgatgatgaagtggacaaagactctgatactgaagatgggaaagtggaagatgatgacttggaaacagacgtgaacaagctgagttccaaacctggtcttgaccgacctgaagaggaactgatgcaatatgaggtgatgtgtcttgagctctcctatagctttgaggaactgcagtccaaacttggagatgatttgaactctgaaaagactcagtatgccaatcaccaccacattccagccgctgcctcctcaaaacagcattgctacagcaaggaccaaagctcctgtgggcaagaaagagaatatgctgtccagacttcccttctgtgcagggtgaagacgggaaggtccactgtgcatctaggctccaaaaaaaatcctggagtgaacctgtaccaaaatgtgcaatccaatagtctcaggagagattcttctgaaagtgaaatccctgacattcaggcttccccgaaagcagatgcctgggacgtagatgcaattttctgcccaaggatgagtgcctccttttctaattccactaggactagagaagttgtcaaagtaatagataagcttctgcagacacatctgaagcgtgtccctttccacgatccctatctttatatggccaaagccagaagaaccagctctgtggtggacttcaagatgatggcatttcctgatgtctggggacactgtccccctcccaccacccagcctatgttggaacgaaaatgtggagtccaaaggatcaggatatttgaggatattcggaggctcatccagccaagtgatgttataaataaagttgtcttcagtttagatgagccttggcctttgcaagacaatgcttccaattgtttacggttcttctccaaatttgagtcaggaaatcttcgcaaagccatccaagtgcgtgagttcgagtatgacttgctggtcaacgcagatgtgaatagcacccagcaccagcagtggttctatttcaaagtgagcggtatgcaggcggccatcccttaccacttcaacatcatcaactgtgagaagcccaacagccagtttaattatgggatgcagcccaccctatattctgtgaaggaggctcttcttggcaaacccacctggataaggacaggccatgaaatatgttattacaaaaatcattatcgccagagtacagctgttgcaggcggagcatctgggaagtgctactataccctcacctttgctgtcaccttcccacacagtgaggatgtctgctacctggcctaccactatccctatacctacacagccctcatgactcatcttgacatcctggaaaagagtgtcaacctcaaagaggtctacttccggcaagatgttctctgccagacgctgggagggaatccgtgtcccttggtgaccatcacggccatgcctgagtccaacagtgatgagcatctagagcagttccgacatcgtccatatcaggtgatcactgctcgagttcatccaggagagagcaatgccagttgggtgatgaagggtaccttggagttcctggtcagcagtgaccctgtggctaggctcttgagggaaaacttcatcttcaagatcatacccatgctcaacccagatggtgtcatcaacggcaaccacagatgctcactgagcggggaagatttgaacagacaatggctttctcccagtgctcatctgcagccaaccatttaccatgccaaaggcctcctctaccacctgagcagcattggccgaagtcccgtggttttctgtgacttccatggccactcccaaaagaagaatgtgttcctttatggctgtagcatcaaggaaaccttgtggcaagcagcatgcactgtgggcacatctactatcctagaggaggtcaactacaggactcttcccaaaatccttgataagctagcaccagcattcacaatgagcagctgcagctttctcgtggagaaatctcgagcttccacggcccgggtggtggtgtggagagagatgggggtgtccagaagctacaccatggaaagcagctactgtggctgcaaccagggcccttatcagtgtacacagaggctgttggagaggacaaagaatgaaagggctcacccagtggatggccttcagggtctacagtttggtaccagagaactggaggagatgggagccatgttctgtttgggcctcctcatcctggagctcaaatctgccagctgcagccatcagctcctggctcaagctgcaactctgctgagtgctgaggaggacgctctggaccagcacctccaacgattaaaatcatccaatttcctgccaaagcatatttggtttgcttaccacttttttgccattacaaactttttcaagatgaaccttcttctgcatgtctccccgtga

SEQ ID NO: 2898 - DNA, 1001 bp, Homo sapiens
  source 1..1001: mol_type = genomic DNA
gacttggacgtgcgagtcaacaaggtacaggacacatttctctccggggaaatcttgtgtgggcgccgaggcccggacgtagcaaccaaacgtcgggaagaggcgccaaaaggatgctgggcctggctccttgaagcccgggttttcccttttgagagccacaaccaagaaataaaaatctagcaaagagggggccactttctgcggcgagatacgccctctcggccgctcctccagctcccaggccccctccctactcgacggatggctgcagctcctccaagttactgttttgttgccttccctccacgtgctaaggatggtctggtggtatttgggaaaaattcagcccggcccagagatgaagtgcaagaggttgtgtatttctcggctgctgatcacgaaccggagagcaaggttgagtgcacttacatttcaatcgaccaagttccaaggacctatgccataatgataagcagacccgcctggctctggggagcagaaatgggagccaatgaacatggagtgtgcatagccaatgaagccatcaacaccagagagccagctgccgagatagaagccttgctggggatggatctggtcaggcttggtttagaaagaggggaaacagctaaagaagccttagatgtcattgtctccttgttggaagaacatggacaaggtgggaattactttgaagatgcaaactcctgccacagcttccaaagtgcatatctgattgtggatcgtgatgaagcctgggtgctcgagaccatagggaagtactgggctgccgagaaagtcacagagggagtgaggtgcatttgcagtcagctttcgctcaccactaagatggatgcagagcatccggaactcaggagttacgctcagagccaaggttggtggacgggagagggcgagttcaatttttccgaagtcttttctccagttgaggatcatctagactgcggtgctggcaaagacagcttagaaaaacaaga

SEQ ID NO: 2899 - DNA, 544 bp, Homo sapiens
  source 1..544: mol_type = genomic DNA
aacaacaaaagccaagccaaaagccaaaacaaacaaatccagccaaatcaatcattgagaaacaataatattaataaaatccaaaactaaatcaaaccaatcaaggcaccaagacgcaggggggatatccacagttcgatcaaggttgacgatgtgtcacactgtgtaagggaatcgcatggagatgggcattccgaactgttaatggggacatgggactccagttgtctctgatcacttgtgtggattttcctggcgtagaacgacagaagccgctagtaagtcgccaagacctacagcaggaattctgcaccaaagcttaaaaaagtgaggaggaagtaaatgctaaattattcatgagcctcatttgacagcacatcagaaggggaagtgtcaggggttttataaagggcataaaatcttgttattttaatttgcatctgggagaatgtctgagcaaggagacctgaatcaggcaatagcagaggaaggagggactgagcaggagacggccactccagagaacggcattgttaaatcagaa

SEQ ID NO: 2900 - DNA, 373 bp, Homo sapiens
  source 1..373: mol_type = genomic DNA
ggtcctaggctcacctaagccagaagagattccccttacttggatacaaccaggaactactgttctcaactgctcccatgacttcctgtcagaaagtttgattatcattagaagaatggccatcttttaaagtgattcattgacttgtccctggagaaatcatgagttagatgagagtgtttagtgggaagtgaaaagacccgtccacggtttcggatgagatcctcgttggactgtgatcccaggatattacccaggcccagatcgtagacaacctcccaatggagtcctgcccctacacgggcagggggtgaaataatgattccctttcttaattttctttagccatgaaatttattaaaaatgtatgtct

SEQ ID NO: 2901 - DNA, 589 bp, Homo sapiens
  source 1..589: mol_type = genomic DNA
tgagaagcagtttggacccagctgaaaaattttatttatggagacttgtaatcagcctgatatacagagaacactctggactggaaatatagtcagatcctgtgttgccataagcccttggcccacatttaagtgggaatgcagctagcttggatgtctgaaactttgtaggcgcctctgtctgaatcctgaacacaggcaccaggactactgagagctcgtcatctgtgcaggatagccacacagcaaacatgtttgcaaaactgaagaagaaaattgcagaagagactgctgttgctcagaggccaggaggtgctactaggatcccacggtctgtgagcaaggaatcagttgcctcaatgggagctgactcaggagatgactttgcttccgatggaagcagctccagagaagatctttcatcccagcttctgagaaggaatgaacagatacggaagttagaggccagactttctgactatgctgaacaggtccgaaacttgcagaagataaaagagaagcttgaaattgcattagaaaaacaccaggattcttccatgcggaaatttcaagagcagaatgagacatt

SEQ ID NO: 2902 - DNA, 2018 bp, Homo sapiens
  source 1..2018: mol_type = genomic DNA
aaaactccagcccgaagggatctggaagcagtttttaagactgtgtgtgtatgagacaggtcgcgtcctagagcaaacggttttttttgtaaacagacggcatcctaacaggggcggtgctacccagtctgcggggagtcgctcgggatcgaagcacctcagagctccttcgagcgtatcccttcgggaaagccccacgccttccccgaggcgcctcctccggcctgcagcacgccctcgtcctgcacttcctcctcggaatctgcaagacagagtctagctctttcacccaggctggagtgaagtggtgcaatctcagctcagtgcaacctccgccccctgggttcaagtgattctcctgcctcagcctccccagtagctgggattacagtgatatcctgagagaagatgggaaagggctgcaaggttgtggtttgtggattgttatctgtggggaaaactgcaattttggagcagctcctttatggaaatcatactattggaatggaagattgcgaaacaatggaagatgtatacatggcttcagtagaaacagaccgaggagtaaaagaacagttacatctttatgacaccagaggtctacaggaaggcgtggagctgccaaagcattatttttcatttgctgatggcttcgttcttgtgtacagtgtgaataaccttgaatcctttcaaagagtggagcttctgaagaaagaaatcgataagttcaaagacaaaaaagaggtagcaattgtggtattaggaaacaaaatcgacctttctgagcagagacaagtggacgctgaagtggcacagcagtgggcaaaaagtgagaaagtaagactgtgggaggtgactgttacagatcggaaaactctgattgaaccattcactttattagccagtaaactttctcaaccccagagcaaatcaagctttcctttgcctgggaggaaaaacaaagggaactctaattctgagaactaaaaatcagtaatttccacaattgtatgttgaatagtgattgcctttaagtgtctgtgaacatggagtaatattactatttaaaataggccatttgtatctacctttggtccttaggaaaattcctaaggaagtcaattaatgcactttagatgttaaaagtatttgggctaaggttattattgcctgatatgaaataatatattcttattctcattgtttgaaacctgtctttgaaattagcacctttgttatttatgttgtacttgtgaaaacagtaaaatagtttggatagttatgcaaatgcacctatgtgtaacttccccccaaccccaagctgtttcggaagatatcataatcattctgtgtaacattatgcaaacttctaagcccaaacatgactttgtttttaaaaagttcattaatctaatgtctaggattataaaacatttttttgtgtctaaattggacccaaaacattgaacagtttggggtagtaagctaaatttcatcttgtggagattttgctaaacagactaagacccatgatttagctttgctcaaattagaatgtttagcatgagttgaggtaccaggtagtgttaagtaggttcatcacgctctaaggccgttttttccttagccagacccctgttgatagaccagatacttgagggcaaactgtttgctcctcctcttgaaaatgattaggcacttaaggacagtaaagctgtattttctggaaggaagactgtatcttctggaatagttttctagaaaactagtcatatacaataaaagtatcaaaaatattgggctctaatttgatctgacttagatgtctgagtttgtgttgtttctctaaagattttggcaagactcaagcaatgtggctgactgtaactttattaatttaaaaggtaggaagtaagctacttagtggtttcacctgtgaaataactattttgactgaaatgtaaaataagctattcaacaaagaacatattaaaacatcaagtaatttgtaacatctt

SEQ ID NO: 2903 - DNA, 2818 bp, Homo sapiens
  source 1..2818: mol_type = genomic DNA
gctcgggaaaggggttcggaaccggtctaggctcaagttaaatctccctctaaagagccaacactggtttctttggcgactcggtttctactctaaacaggtcccgctccacagtctgggcgggcctgtgtgtgcgttgagtagcctctagcgtgaaaacttcatggttaaaagggaagtaccggaggcaagaaatagctttcgaggcactggtttgttagagtagtggtacgtagtgcgccgccctgaacgggggctgagacgctgcttttccagaagtgccagtgaggacgtggcaagaccgcctcggacgtacgcttcctctacctcagcccgtcgggttaggggcgcgggaggcgcagaggctgctgggaacgcgcatgcgctcagcgcggcggggagtccacctttaacgtccgcgggcgcggggtgtgtcgggtgtcgacggcggcgctttgcggccggtcgtgcgggtcgggcgcgggcgggcgcggcggcagtggcgcgcacaggtgattgactggccagctgcctgaaggagcgccaggtcctccttgctggcaggtggcgaagcccattggggcggcggtgcagaccgcggcggcggctgcggcggtctggctcgggaggcgttcctggggccaaggccatggccccgcggctgcagctggagaaggcggcctggcgctgggcggagacggtgcggcccgaggaggtgtcgcaggagcacatcgagaccgcttaccgcatctggctggagccctgcattcgcggcgtgtgcagacgaaactgcaaaggaaatccgaattgcttggttggtattggtgagcatatttggttaggagaaatagatgaaaatagttttcataacatcgatgatcccaactgtgagaggagaaaaaagaactcatttgtgggcctgactaaccttggagccacttgttatgtcaacacatttcttcaagtgtggtttctcaacttggagcttcggcaggcactctacttatgtccaagcacttgtagtgactacatgctgggagacggcatccaagaagaaaaagattatgagcctcaaacaatttgtgagcatctccagtacttgtttgccttgttgcaaaacagtaataggcgatacattgatccatcaggatttgttaaagccttgggcctggacactggacaacagcaggatgctcaagaattttcaaagctctttatgtctctattggaagatactttgtctaaacaaaagaatccagatgtgcgcaatattgttcaacagcagttctgtggagaatatgcctatgtaactgtttgcaaccagtgtggcagagagtctaagcttttgtcaaaattttatgagctggagttaaatatccaaggccacaaacagttaacagattgtatctcggaatttttgaaggaagaaaaattagaaggagacaatcgctatttttgcgagaactgtcaaagcaaacagaatgcaacaagaaagattcgacttcttagccttccttgcactctgaacttgcagctaatgcgttttgtctttgacaggcaaactggacataagaaaaagctgaatacctacattggcttctcagaaattttggatatggagccttatgtggaacataaaggtgggtcctacgtgtatgaactcagcgcagtcctcatacacagaggagtgagtgcttattctggccactacatcgcccacgtgaaagatccacagtctggtgaatggtataagtttaatgatgaagacatagaaaagatggaggggaagaaattacaactagggattgaggaagatctagcagaaccttctaagtctcagacacgtaaacccaagtgtggcaaaggaactcattgctctcgaaatgcatatatgttggtttatagactgcaaactcaagaaaagcccaacactactgttcaagttccagcctttcttcaagagctggtagatcgggataattccaaatttgaggagtggtgtattgaaatggctgagatgcgtaagcaaagtgtggataaaggaaaagcaaaacacgaagaggttaaggagctgtaccaaaggttacctgctggagctggtctgtaagatattctgggacagcactgttgccattaagtgccttgtttttttatgttcacaaatgtatatgaagaaactttctcaaacttactctttctaataacccactaaagccagcttaaacactctaaaagtactttgtaaaccaacaataacttgatgtgtagcattccatattatttcattacgttgtactcctaaaaatgggaagctgttaataaattataacatttaggtcagcactctgcatccatgagtattgtagatatttatattttgtgagatattaacttgtttaagaaaaatccgattggattactatggaaaaagcaacttgcctgttctgtttctttgcatactttgtgacctaacagttttaacagacattctattatatgaatacagtttttttgatactattagattaacttgaagtttaataccaaatattatgctaagagtagaaaagctttctgctgacccctgatttcttagaaatatcccacataatccagcttatcccttttctgtatatgtttattcaggtttacctgatgtctcaaaatgaaaccaaattaagcctttttaaaggctgatgtgccatttgtattaagttatctttgtcattttaaagacatgaattccccaagcctaattcctacttaaggaagagagacaatttagtccttactttagaaaataaatacttaagcataa

SEQ ID NO: 2904 - DNA, 3212 bp, Homo sapiens
  source 1..3212: mol_type = genomic DNA
acgctgggagctgcggacggcgggcgcgggctgggccgggtctagtggcggccgcacacctcgcgtcgtctggggcagtgttgcgcgtgcgctgatgacaggcccgacacgcccctcttacgtccgcgaacccgtcttcgctcagcctctcgcagctttgcgctcgtgggagagtcccgcctccttctgcgaaccgcaccacccagatcccggggtgcgcggagggcgcgtctctgacggaagccggggcggacggtcggagtccggaagaaaaacagtccgcgacagctaggcgcgtgagaccggccgcccgcagggctgctctggccgggacccgctggccgggagacgcgaacctgccggaccaccgcgcggggacgacggcggccatgagctcgcggaagctgagcgggccgaaaggcaggaggctcagcacatacatcaggaggtctgcctgatcccatggtgaaccccgggaatccgaaatcagattgagataagatcctttagggaagtgacttagcctggtctcttgcctgctctttcacggggaacaacgctaatcgcccacttagtctaagtcacgatgcttggatttgctgctaatcgtcggatttgagagtgggaacaagaaatccggacttttgctctccatcctcttagacatacacgtcgtgacttggaacgtggcttcggcagcgccccctctagatctcagtgacctgcttcagctgaacaaccggaacctcaatcttgacatatatgttattggtttgcaggaattgaactctgggatcataagcctcctttccgatgctgcctttaatgactcgtggagcagtttcctcatggatgtgctttcccctctgagcttcatcaaggtctcccatgtccgtatgcaggggatcctcttactggtctttgccaagtatcagcatttgccctatatccagattctgtctactaaatccacccccactggcctgtttgggtactgggggaacaaaggtggagtcaacatctgcctgaagctttatggctactatgtcagcatcatcaactgccacctgcctccccacatttccaacaattaccagcggctggagcactttgaccggatcctggagatgcagaattgtgaggggcgagacatcccaaacatcctggaccacgacctcattatctggtttggagacatgaactttcggatcgaggactttgggttgcactttgttcgggaatccattaaaaatcggtgctacggtggcctgtgggagaaggaccagctcagcattgccaagaaacatgacccgctgctccgggagttccaggagggccgcctactcttcccgcccacctacaagtttgataggaactccaacgactatgacaccagtgagaaaaaacgcaagcctgcatggaccgatcgcatcctgtggaggctgaagcggcagccctgtgctggccccgacactcccataccgccggcgtcacacttctccttgtctctgaggggctacagcagccacatgacgtacggcatcagcgaccacaagcctgtctccggcacgttcgacttggagctgaagccattggtgtctgctccgctgatcgtcctgatgcccgaggacctgtggaccgtggaaaatgacatgatggtcagctactcttcaacctcggacttccccagcagcccgtgggactggattggactgtacaaggtggggctgcgggacgttaatgactacgtgtcctatgcctgggtcggggacagcaaggtctcctgcagcgacaacctgaaccaggtttacatcgacatcagcaatatccctaccactgaagatgagtttctcctctgttactacagcaacagtctgcgttctgtggtggggataagcagacccttccagatcccgcctggctccttgagggaggacccactgggtgaagcacagccacagatctgagccaggatgggagtgaatcccaggcggaggccagagctggcagccagctctgcctttccactgccgggagtgctgggggcccagcctggccccctgaagagacagccaagtgtcgtccacatactcctcccagagtgagctctaaccaggctcatttgctctctccactactcatctctggaattagccgcttaaatacaggtttttgttgctgagatgtgagtgaaaccagctagtgtgtcaacagtgaagacctggggacagttctgcgtctcatttctggattcctaccccctcttctagtcttgcccaagtagtcctgccaggcacatgccccatttggcacaggcctgcattcttgtcgtgccgtcctgggcctcaggctgtctgggaggggagatgctcacatttgtacaggctacatagactggtgcaagcagtgctggattccaggagtcttggcatctcatagcttgtccccgtgaggagtgagcagagggtctgggatttctgctttcagcaaaagcagtctgactcagtgggcagaatggaggggcccctctagccaggctcttacgccatggttatgagcaggttgatgagggtccttcggccagcacaaccttcctccctactcacggcatggagtctgactgcatggaagttccagatcctgacagagagaactgggaaggatccaggttcgcttccgttggtagcttgagtcccatgcctccaccctgccatctgaggaaggggtgacaagtggtcaaggagctgtggccacagacttttccagggtggtccttggcaggtgaggtgcgtctgtgccacccttgtcaggagccattgacgacgggccccccctggaccccccgggacctcagagtgggggcaggcagaagggagaaccagctcaagacattttggaggatctggccctggggttcttcagagaacaccctctaggggctttggggacatggcctgtccccacatccagcacttgcctccgccatggtcactcggcagcccttttcccaggagaagacacctctgggagcctgctcagtgcttgtcctgccatcctgtgtcctgggactgagggttactccagttgctctgtgttgcatactctcccccgcaagcctgtgtatgaagaattgtcccctggcttccagcaggccatggctggctgttttgtgactgttacattgtgcaggggtaattattagcgtggctttt

SEQ ID NO: 2905 - DNA, 1874 bp, Homo sapiens
  source 1..1874: mol_type = genomic DNA
atcgttggtccgggcgccgcgagggcggggcccgcagttcggttgcgctgcggagcgcagctgtgagggagtcgccagtgcaggcctgagtgttccttccagcatgtcggagggggagtcccagacatcagtgtcacctcctgtgacctccacaacctcagctgcttccccagaggaagaagaagaaagtgaagatgagtctgagattttggaagagtcgccctgtgggcgctggcagaagaggcgagaagaggtgaatcaacggaatgtaccaggtattgacagtgcatacctggccatggatacagaggaaggtgtagaggttgtgtggaatgaggtacagttctctgaacgcaagaactacaagctgcaggaggaaaaggttcgtgctgtgtttgataatctgattcaattggagcatcttaacattgttaagtttcacaaatattgggctgacattaaagagaacaaggccagggtcatttttatcacagaatacatgtcatctgggagtctgaagcaatttctgaagaagaccaaaaagaaccacaagacgatgaatgaaaaggcatggaagcgttggtgcacacaaatcctctctgccctaagctacctgcactcctgtgacccccccatcatccatgggaacctgacctgtgacaccatcttcatccagcacaacggactcatcaagattggctctgtggctcctgacactatcaacaatcatgtgaagacttgtcgagaagagcagaagaatctacacttctttgcaccagagtatggagaagtcactaatgtgacaacagcagtggacatctactcctttggcatgtgtgcactggagatggcagtgctggagattcagggcaatggagagtcctcatatgtgccacaggaagccatcagcagtgccatccagcttctagaagacccattacagagggagttcattcaaaagtgcctgcagtctgagcctgctcgcagaccaacagccagagaacttctgttccacccagcattgtttgaagtgccctcgctcaaactccttgcggcccactgcattgtgggacaccaacacatgatcccagagaacgctctagaggagatcaccaaaaacatggatactagtgccgtactggctgaaatccctgcaggaccaggaagagaaccagttcagactttgtactctcagtcaccagctctggaattagataaattccttgaagatgtcaggaatgggatctatcctctgacagcctttgggctgcctcggccccagcagccacagcaggaggaggtgacatcacctgtcgtgcccccctctgtcaagactccgacacctgaaccagctgaggtggagactcgcaaggtggtgctgatgcagtgcaacattgagtcggtggaggagggagtcaaacaccacctgacacttctgctgaagttggaggacaaactgaaccggcacctgagctgtgacctgatgccaaatgagaatatccccgagttggcggctgagctggtgcagctgggcttcattagtgaggctgaccagagccggttgacttctctgctagaagagaccttgaacaagttcaattttgccaggaacagtaccctcaactcagccgctgtcaccgtctcctcttagagctcactcgggccaggccctgatctgcgctgtggctgtccctggacgtgctgcagccctcctgtcccttccccccagtcagtattaccctgtgaagccccttccctcctttattattcaggagggctgggggggctccctggttctgagcatcatcctttcccctcccctctcttcctcccctctgcactttgtttacttgttttgcacagacgtgggcctg

SEQ ID NO: 2906 - DNA, 756 bp, Homo sapiens
  source 1..756: mol_type = genomic DNA
gacctttctgcccctggagtccccacgcaggctggagcccgagccccgagggcctgcgagctccgcggctcccacaggagaggttcaagaccctgcttaccatgactacgcgtggaggcggaaggaggcgacacggcctccagggctgggttagatcgtgatagacgtcgctccctgagcgcgtcctgggggcattagggagtcctggcagcgggccggaccgtgtccccgccagagctctgggctctggggatgacggagaggccgaggaggtgtgaagaagaatgttggagttcctgacagctggattctagaagtagaactatgagctcacctttggcctcccttagcaagacccgaaaagtgcccctgccctcggagcctatgaatcctgggaggcgaggaatccgcatctatggagatgaagatgaggtggacatgttgagtgatgggtgtggctcagaagaaaagatctcagtcccttcctgctatggcggcataggtgcccctgtgagtcggcaagtccctgcatcccatgactcggagctgatggccttcatgacgaggaagttgtgggacctggagcagcaggtgaaggcccagactgatgagatactgtccaaggatcagaagatagcggccctagaggacctggtgcagaccctccggccacacccagccgaggcaaccctgcagcggcaggaggaactggagacgatgtgtgtgcagctgcagcggcaggtcagggagatggag

SEQ ID NO: 2907 - DNA, 2107 bp, Homo sapiens
  source 1..2107: mol_type = genomic DNA
gcgtggtgggcagtgtgggcatcccagcactgagttctgcccgggagaagccgacccctcccgcaatgcccgccccgccgtgcgcctcctgccatgctgcacgcgccgccctccgccgtccgctctcgggccaagcgctgtgcggtgcctgcttctgcgccgccttcgaggccgaggtgctgcacacggtgctcgccggccgcctgctgccgcccggcgcggtggtggccgtgggcgcctcgggcggcaaggactccacggtgctggcgcacgtgctgcgcgcgctggcgccgcgcctgggcatctcactgcagctcgtggccgtcgatgagggcatcggtggctaccgggacgcggcgttggcggccgtgcggcgccaggcggcgcgctgggagctgccgctcacggtcgtggcctacgaagacctctttgggggctggacgatggacgccgtggcccgcagcacagccggctccggccgcagccgctcctgctgcaccttctgtggagtgctgcggcgccgggcgctggaggaaggggcgcgccgcgtgggagccacgcacatcgtgacaggtcacaacgccgacgacatggcggagaccgtgctcatgaacttcctacggggcgacgcggggcggctggcccggggcgggggcctgggctctcccggcgaggggggcgccctgccgcgctgccgcccgctgcagttcgcctcgcagaaggaggtggtgctgtacgcgcacttccgccgcctcgactacttctccgaggagtgcgtctacgcgcccgaggccttccgcggccacgcccgggacctgctcaagcgcctggaggcggcgcggccgtccgcggtgctggacctcgtgcactcggccgagcgcctggcgctggccccggccgcgcggcccccgcgccccggcgcctgctcccgctgtggggcgctggccagccgcgcgctctgccaggcctgcgcgctcctggacggcctgaaccgcggccggccccgcctggccatcggcaagggccgccggggtctggacgaggaggcgacgccggggacgcccggggatccggcccggccccccgcctccaaggccgtccccaccttctagcgacttcgggcctcccgccgggatctgatgccgcggggtgggggctgcctgtaaatgacactgtgaataaacccgttaccttacctggccttccatgtggggttgggaaggagacgggggcccattcacctgaaaccctgaagaagctgggaccccagacttcgaggtctcagggaagaagggtctcgaactgggcttcaggctctgagggaggagggggctgggggaccatcctaggtctgagagaggagagggccaggactaagcctagaagaagtgggactggggaccccaggcatctgtggctgaggaaggagggcctggggtcgtggactcctgggtctcagggaggagggggctgaacaccgtgtgattcttgagcgagtggggattggttggggacctcctgcccagggcctctgctggttctgggtgcgctcagcatggtcctgaccctccttgagcatcagattcctgatgtttcctgtttgcccgcagtggggtaagcggagcgtgacttgatggacacacgccattcacagccgccgtcacgatgcctcccttccagcgcttcgtgtgtagcacgcactgcaccctcatttcgtctccaccacggtctcactggctgtagcctgaagtggtaaatggccctaagacacccagtcggaaggggtcacaccgagggctccctccaaagctctcgaatatcacaggtcgtggaattggtcctcccccacccatcccctctcgaatctctcctggtatctctgtcacgggtgaggaggggttggatgcgttccccaaaccttggactctggaggcagggttgtgtgagcctgtcggtgacttagcctctttcatgtcccatttctcctatgaaaatataatcagcccccttcccccccgcccccccatcccccccgcatcaaggcaccactgggaggaaatggaagatcagagaagttgaggtgctcaataaatggtgaccacttgga

SEQ ID NO: 2908 - DNA, 564 bp, Homo sapiens
  source 1..564: mol_type = genomic DNA
gaaatgtgtatgtcatgtgtccaaattgtaagatacttgctgtaagtagcaaaaagatgggaaggaaagtctacagaccaaatcatatctgaatctccccattctccctctccacaaatattggtttaggaattctccgaagtttgaaggttatgaatggttatcactcaaggattcagaactaagcagaggaaagaaattcctaagggaacactgctcagaaagtactgcagcatgtcttcaaatgcctgaggatcaagttggaaaactagaagcaacagaaaacacaataagcgcaatggcggcggccgcggcggagcagcaacagttctacctgctcctgggaaacctgctcagccccgacaatgtggtccggaaacaggcagaggaaacctatgagaatatcccaggccagtcaaagatcacattcctcttacaagccatcagaaatacaacagctgctgaagaggctagacaaatggccgccgttctcctaagacgtctcttgtcctctgcatttgatgaagtctatccagcacttccctctgatgttcagactgccat

SEQ ID NO: 2909 - DNA, 559 bp, Homo sapiens
  source 1..559: mol_type = genomic DNA
aaagtgaggtcatgaatacaacagcatctcgtgttcgctacgtttcctctggaattagcccacaagcagaccccttgctctcctagtggcaattaaccatgaccatcttcctggagaagagaaactacctggcaaagggccaaagtcttaggactgctgggcaggagaactggcctgtgttcaagttgagtcccagtttctgccgctttatctttcccgcctcccggcaggcaggccgttaaccgtcttccggaagacgctgctagaaccctccggccgctcctgcccgccatcgtccccgaacgacactcgctcagctctcagggccagagcggggcaggaggatgctttcccagccccaccatggagctgcgctgtgggggattgctgttcagttctcgctttgattcagggaatctagcccacgtggagaaggtggaatctttgtccagtgatggggaaggggtaggaggtggggcgtcagccctgaccagtggcattgcctcttcccctgactatgaattcaacgtgtggacccgaccagactgtgctgaaacgg

SEQ ID NO: 2910 - DNA, 2338 bp, Homo sapiens
  source 1..2338: mol_type = genomic DNA
atccttccgcagctgcacgacgcctgtgtgtctggcctttccttcttcttctcttccccggcagcacagtgtggctgtttgtctccttgcccgccaaagttctgcccagtccaacgactccacgcagctcgcccttggttatttggacaagaggcacattgacccaatttggagacgtattttggaaggaggcgaacagttgtctccaaacgtggtgttgccgtcagtggtcccaccaagaggaggggaatggcagattcactggagtcaacccccttgccttcccccgaagatcgtctggccaaactccatccttctaaggagctcctggaatattatcaaaagaagatggctgagtgtgaggcagaaaatgaggacttgctgaagaaactggaactctacaaagaagcttgtgaaggacagcataaacttgaatgtgatttgcagcagagggaggaagagattgctgaattgcagaaagctctaagtgatatgcaggtctgcctcttccaggaacgggaacatgttttacgcctctactcagaaaatgaccgactgagaatcagggagctagaagacaagaaaaagattcagaatctcttggctcttgtgggaacagatgctggagaagtgacctatttttgtaaggagcctcctcacaaagtcaccattctccaaaagactatccaggctgtaggtgaatgtgagcagagtgaatcttcagctttcaaagcagatcctaaaataagcaaaagaagaccatcgagagagagaaaagaaagttctgagcattaccaaagagacatacagacactcatcctacaggtggaagcactgcaggctcagctgggagagcagaccaaactttctcgagaacaaattgaagggctcatcgaggacagacggattcaccttgaggaaatacaagttcagcaccagagaaatcagaacaaaatcaaagagctaaccaaaaatcttcaccacacccaagaactgctctatgagagcaccaaagattttctgcaactcagatctgaaaaccaaaataaagagaagtcatggatgcttgaaaaagataatttgatgtcaaagattaagcaatatagggtgcagtgtaagaagaaagaagataaaattggaaaagtgttgcccgttatgcatgagagtcaccatgctcaaagtgaatatattaagtccctaaaagataagttagtacaagagaaaaagctgtccaatatgtaccaagagcagtgcatttccttagaagaagaacttgcccgaattcgtgaggaagagggaatgaggagagagatcttcaaggatcgcactaacaagatggggaagcgtttacagataatgacaaaacgctatgaggcattggagcgtcgacgtatcctggaagtagaaggctttaagacagatattaaagttctccgacagaaactgaaagacttggagcaaatgttgtataaggcaacagttaatgcccgggcaaaccaggatcttgcccttctgtgtgaggtccgtgacagcaatagacgggcacataagatacaaggagaactgaagaatcttaagtcgaaagtgtttggtctggagaatgaacttagactctgttaatgtctacttttggaaatggcccccatttagaagaggtgtgcttcttgaaacctgaggacaaggtcatctgctgccagaaaatgtaaacctgagttgactagagtggtggtattcattattgtaaagacagcttgaagaatcggggaccactaggaaagcttttcttgcatactcagcttgctttatcatttttgctgtccttttaacacttgcgaggagtaggggcctggtcctgaatgacttggaggctttcattatttatcctgtctgtattgaccggtttttgttttttcagaaggcagtgatgatgaaaacttaggaagaaggtattttgcaataagcttggctgagtgtccatgggaagaatactttccctaaagagagagaagcactcacagaggctgcctttctcctgagctcggggagaaggcagcacatcacaacctgtcacattgaaataggcgctcattctgctatttcaccttccgtcctgagcagagcctgaattacgtttttgggcaatttcatggtgtttcaccagagggcgctagagactcaaacgaaatgtccatctggaaagattcgggagacactttgccgaggggatgaagctgagatgatgcttgtatggaaagtttgatatttttatcagtcacatggcttttgaaaaatgatgtatatattttaaattaactattttcaataaaatatttcactc

SEQ ID NO: 2911 - DNA, 5142 bp, Homo sapiens
  source 1..5142: mol_type = genomic DNA
acactgggctccggcggccagagtgggggactaggtgaagcggcgccgggccggggctggccgggaccaggcccgaggctgagcggcggcgacagcggtggccgggaggggggaggagaggcgcagccagaggagccgccgcagtagctcccccgcctcccgggctgagggcattttaagaaagaaagatggatcaacctagtggaagaagtttcatgcaagtattatgtgaaaaatatagtcctgaaaattttccttatcgccgtggcccggggatgggagtccatgtcccagccacacctcagggctctcctatgaaagatcgcctcaacctcccaagtgtactagtgttgaacagctgtggaataacctgtgcaggagatgaaaaagaaattgctgctttctgcgctcatgtgtcggaactagatctttctgacaacaaactcgaagactggcatgaggtcagtaaaattgtgtcaaatgttcctcagttggagtttctaaacctgagttccaaccctctgaatttgtcggttttagaaagaacatgtgctgggtccttctctggggttcgcaaacttgtcctcaacaacagcaaagcttcttgggagacggtccacatgatactacaggagttaccagatttggaggagctcttcctgtgccttaatgactatgaaacagtgtcttgtccttctatttgctgtcattctcttaagctactacatataacagacaataacctccaagactggactgaaatacgaaagttaggagttatgtttccttcactggataccctcgtcctggccaacaatcatttgaatgctattgaggagcctgatgattcattggccaggttgtttcctaatcttcgatccatcagcctccacaagtcaggtttgcagtcctgggaagacattgataaactaaattcatttcccaaactggaagaagtgagattgttaggaattcctcttctgcagccatataccaccgaggagcgaaggaaattggtaatagccagattgccatcagtttccaaacttaatggcagcgttgttactgatggtgaacgagaagattctgagagattttttattcgttactatgtggatgttccacaggaagaagtgccattcaggtatcatgaactgatcactaaatatgggaagttggagcctttggcagaagtggacctaagaccccagagcagtgcaaaagtagaagtccactttaacgatcaggtggaagaaatgagcattcgtctggaccaaacagtggcagaactaaagaaacagttaaaaactctagtacaattacccacaagcaacatgcttctctactattttgaccatgaagcaccctttggcccagaggaaatgaagtacagctctcgggcattgcattcctttggcattagggatggagataaaatttacgtggaatccaaaacaaaataacctctaccagccttgtgaaaaacatacacataaggacttgttgcagggcatttgtttttaatgtggttttctttaggagggagaggttgtttttgttttgttttgttctgtttaggtttgggaaggattttgtatatttttccccctggagtgagtaggggccatttttgggtgttttctaccacagattgatttggctcagccagcggaattggccacatttccagtgtatgtgccctctctaaggaaagatgacaaagaaatcaccgacttcttactgtgttcactgggatttgcctgccacttggttatcattactgttgggtgaacctgtgaagataacatgaacactgtagccccttagaagggtctcatagagaatttaaacagggtgacaaggaatcttcacaggaagggccagaacttctctctcccagttcttccttccgctaccctccctccttggcttttttggttcagttccatttttttttcattttgacatgtggtttacctaatagttttgttctgttcataattcttatttctcaacctgggtgatttttttgttctcatttctcccttttgaaataattgaaagtgttttaagcatttttaacctgattctaatctcaggtacgcagtaagaagctataactctgttagaacctcgaagagtagatgtagaatgaaaactccaggaaaacttgcagttattctggaagcaccggcagaacagtctgatctctttgtatgttactaactcacttttaatgtccctgtacattatgtcagccattactttcataacatgaaatatgtcagattccagagttcttttatttttgcttattgaatgtatttcctcatatctttctttttcattactttaaactattgggaattgaggcctgacttcataaataattcaatagagtcctggatacgtgcaccaggagagttgagaattagctcataaactatctgtggtgtgtgtggggaatgaagttgggggatgtgggggaagagcttatgactttcccacctgtgtcatccattggaagcccttgctcttgcactttgcattaaaagtgggaaacattaatcaaagggagattttattcccaggttttccctgggactttgtgatatcataattgaacagttcttttgttttacatttcaatttagttgcctcatagaagtataactgcccaatctatgagtaaagtgtaagtgtcaaaactttacaattgcctccaagtcatattttttgcagaagcacatttaaagcacttttctgtaaaagctagttccttacctgcttggaaatctttttgtttgttcttctattcctttgttaatcagatgtaatccctttctttaatgtgtatttttcttggtccaccatgtttacagatgggagacttgagagatacttagcataactggggcagaaagtgtgtaagtgaagtatttttcaaagaatgcagttattatctgattgcatttgaccttttgacctttgttacataattctacccctcctacaaatttaatttttttatgaaatttttaggtgacttgtaaattcttcatgtatgaggagttgtgtttattaatgctactttttaaattttcctgtgccatgtggcagatgtttattctcttaatgcacttcaggtttgctatctgtaaagcctttgacccaggcctactgagtcaaatctacattcagtgtaacattaaaggtggaaaccaaagggtttgagaaagacgaataaggcctattctccttctgctgcagactttatctttcaaaatcataaaaatgagcaatggagatccaggctgggtatagacaagaataattattttgcaaacacattttcctgacagatttttggaagtaggaaaaaagtatggcaacagtgtcatgaagattgaaactgtaggtgctttgtgtatgtatgcatgagtgcagatgagtttgagagagaaaaagtgtaattgagccctttgcttttgtcagcctgggaaacagatgcgttcttattttttgaagttgtgtgaccctggactgtcccacagcagaaggcagaacaaacacttatgttatgctttaatcataagtggaatggtcacaattaataagatattttatatatggcaaagttttatgaaatgcttttttactattagagacctgtttcttctgttattacagaacacagtgtttatcaactgcggacataattcttttattatacagttgcatgtaaagggagcttctcatttaattcagcggatgtgggtatttttagggcattgtaattgatggttttaataattgctgaataatttttgattaagagaaaaatgtaatacaattactggtctgagttacagaacagaagttaatgaaaaaggctatttgagcatgtgtacttatagattcatttgggtggctgagaaaagatgctgcttttgaaataaaattggtgctgtgtagacacttgtaaccaaaattatttttataacagaactaaaagaaggagagaagaggccatggacctttgagtttacatgttatacctaattgattgtctgcagcttatctgtattttaatattgactttgtccagattcagtgagaacatagtattgacattatgaggcaaaatgctgtcatagccagtattactgatatgttgctacagacacaatgtatagaacataccttttctaaaataggaattatttccagttatgaaaaaggaaaagagtaataaagaaaaccaaatcaaaaccaagggatcctttctacatgtgggtgaacggctgctaaagccacagtagaaaccaatttttgaatttgaattgttgaaatatcctagattgctttaatggaaaaaatccagagtcacatatcttttttattatcaagtttttgcagccttttgccagcattgccataaatacgtaagaaagcagcagatagtataagcccctagttattaagacttctcagttaatattaaggccaaaatataacttgagctaggtataacagggctgaatgctacagtgttgtttttaaagattttgcttatttttaaagacaggaaaattcagttctaaccagatgttccagctatgttactcaaccagcagtggtaggagcagagagcacttgcactaagagctgatcaccatttgagatacgcggcttaacgcacatgtgagtgtagcttgctacatgaaaatgctaggctctagggcatgtaaaacatgaatacagaatactagattgttctaagtaatgtcatttcggtttgtgaatttgatttttcccttcatttcatgtcatattgaaaatgcaaacaaactgctctcaagaacacccagaagctatctgtgttaccagatgtgttgtgaacactctactatttttcataggtgcttccttgaaatatatgtccattgtagtggtggagagggactggactctctcaggctctttacttgccagttgtctcccgcagttaatggaaatatatatacatatatatatatattttatttagaatataatttaaacatgaaggtctattctttgcactttttattaatatatatatagataatctttaaaaaaattaaaattcaagtccatttt

SEQ ID NO: 2912 - DNA, 604 bp, Homo sapiens
  source 1..604: mol_type = genomic DNA
attttgggggtggttggaggcggtggcggcggcggcgaggaggggaatttccttgtgcctccattcccgggaggggggagcggcgttggaggccaccgtttccagagtttcactctgtcacccaggctcgagtgcagtggcgtgttctcggctcactacaacctccgtcctctgggctcaagcagtcctcgcatctcagcctcccaaggagctgggacctcagcatcaacaacagcaacttgtgattggcggtgaccggatattcagttgcacatccccacatcaatgcactgccaatgggttatatcctgtgttgtgacctcatggtttaagtgggaataaagatgagtataagcagtgatgaggtcaacttcttggtatatagatacttgcaagagtcaggattttctcattcagcatttacctttggtatagaaagccatatcagtcagtccaatataaatggtgccctcgtcccacccgctgcattgatttctatcatccagaaaggtctacagtatgtagaagcagaagttagtattaatgaggatggtaccttgtttgatggtcgaccaatagagtctctgtccctgatagatgccgt

SEQ ID NO: 2913 - DNA, 461 bp, Homo sapiens
  source 1..461: mol_type = genomic DNA
accctctcttgggacctgtcataagtcggaccccgggcgcccggctgcgcagtcccagccgccttccccaggcagtggaaccttcgggctcctgagcttcaggatggttcgtactaagacatggaccctgaagaagcactttgttggctatcctactaatagtgactttgagttgaagacagctgagctcccacccttaaaaaatggagaggtcctgcttgaagctttgttcctcaccgtggatccctacatgagagttgtggaaagtaaaaatgtagccctaccaaaaggaactattgtactggcttctccaggctggacaacgcactccatttctgatgggaaagatctggaaaagctgctgacagagtggccagacacaataccactgtctttggctctggggacagttggcatgccaggcctgactgcctactttggcctacttgaaatctgtggtg

SEQ ID NO: 2914 - DNA, 24030 bp, Homo sapiens
  source 1..24030: mol_type = genomic DNA
gctgcccagagcccccatagagagaggtccccgccgccaccctcatggatcagccacagttcagcggggcgccccgctttctcacccggcccaaggccttcgtggtgtcggtgggcaaggacgccaccctcagctgccagatcgtgggtaatcccacgccacaggtgagctgggagaaggaccagcagccggtggcggccggcgcgcgcttccgtctggcccaggacggcgacctctaccgcctcactatcctggacctggcgctgggcgacagtgggcaatacgtgtgccgcgcgcgcaatgccataggcgaggccttcgctgctgtgggcctgcaggtggacgcggaggccgcgtgcgccgagcaggcgccgcacttcctgctgcggcccacgtccatccgcgtgcgcgagggctcagaggccaccttccgctgccgcgtgggtggctccccgaggccggcagtgagctggtccaaggacgggcggcgcctgggtgagcccgacggcccccgcgtgcgcgtggaggagctcggcgaggcaagtgcgctgcgcattcgggcggcgcggccgcgcgacggcggcacttacgaggtccgcgccgagaacccgctgggcgctgccagcgccgccgcggcgctagtggtggactcggacgccgcggacacggccagccggcccgggacctccacggccgcgctcctggcgcacctgcagcggcggcgcgaggctatgcgcgccgagggcgcccccgcctcaccgcccagcaccggcacgcgcacctgcacggtgactgaaggcaagcacgcgcgcctcagctgctacgtgaccggcgagcccaagcccgagacggtgtggaagaaggacggccagctggtgaccgagggccggcgccacgtggtgtacgaggacgcgcaggagaacttcgtgctcaagatcctcttctgcaagcagtcggaccgcggcctctacacctgcacggcgtccaacctcgtgggccagacctacagctctgtgctggtcgtagtgcgcgagcccgcggttcccttcaaaaagcggctgcaagatctggaggtgcgggagaaggagtcggccacgttcctatgtgaggtgccccagccgtccactgaggccgcgtggttcaaggaggagacgcggttgtgggcgagcgccaagtacggcatcgaggaggagggcaccgagcgccgcctgaccgtgcgcaatgtctcggccgacgacgacgcggtgtacatctgcgagacgccagagggcagccgcacggtggcggagctcgcagtccaaggaaacctcctccgaaagctccctcggaagacggcggtgcgcgtgggcgacacggctatgttttgcgtggagctggcggtcccggtgggccccgtccactggctgcggaaccaggaggaagtggtggcggggggccgcgtggccatctccgcggagggcacgcgccacacactaaccatctcccagtgctgcctggaggatgtgggccaggtggcctttatggctggcgactgccagacgtccacccagttctgcgtgtcggcccccaggaagcctcccctgcaaccccctgtggatcctgtggtaaaggccaggatggagagttccgtgattctcagctggtccccaccaccccatggggaacgccctgtcactatcgacggctacctggtagagaagaagaagcttggcacctacacctggatcaggtgccacgaggctgaatgggtggctacacctgagctgaccgtggctgatgtggcggaggaggggaacttccagttccgagtgtccgctctcaacagctttggtcagagtccctacctcgagttcccggggactgtccacctggcccccaagctggccgtgaggacaccgctgaaggcggtgcaggcggtagagggtggcgaggtcactttctccgtggacctcacggtggcctcagcgggtgagtggttcctggatgggcaggccctgaaggccagcagtgtgtatgagatccactgtgatcgcacccggcacacgctcaccatccgggaggtgcccgccagcctgcacggggcgcagctgaagttcgtggccaacggcattgagagcagcatccggatggaggtccgggcggccccagggctgactgccaacaagccgccagccgcagctgcccgggaggtgctggctcggctgcacgaggaggcgcagctgctggctgagctgtcagatcaggctgcggctgtgacgtggctgaaggatggtcgcacactgtccccaggccccaagtatgaggtgcaggcatcggccgggcggcgggtgctccttgtgcgagatgtggcccgggacgatgcaggcctctacgagtgcgtcagccgcgggggccgcatcgcctaccagctctccgtgcaaggcctcgcgcgctttctgcacaaggacatggcgggcagctgtgtggatgccgtggctgggggcccggcgcagtttgagtgtgagacctccgaagcccacgtccacgtgcactggtacaaggatggcatggagctgggccactccggtgagcgcttcttgcaggaggatgtggggacgcggcaccggctggtggcagccacagtcaccaggcaggatgaaggcacctactcctgccgcgtgggcgaggactctgtggacttccggctccgcgtctctgagcccaaggtggtgtttgctaaggagcagctggcacgcaggaagctgcaggcagaggcaggagccagtgccacactgagctgcgaggtggcccaggcccagacggaggtgacgtggtacaaggatgggaagaagctgagctccagctcgaaagtgtgcatggaggccacaggctgcacgcgcaggctggttgtgcagcaggcaggccaggcggatgccggggagtatagctgcgaggctgggggccagcggctctccttccatctggatgtcaaagagcccaaggtggtgtttgccaaggaccaggtggcacacagtgaggtgcaggctgaggcaggggccagtgccacgctgagctgcgaggtggcccaggcccagacggaggtgatgtggtacaaagatgggaagaagctgagctccagcttgaaagtgcatgtagaggccaagggctgcagacggaggctggtggtgcagcaggcaggcaagacagatgccggggactacagctgcgaggccaggggccagagggtctccttccgcctgcacatcacagagcccaagatgatgtttgcaaaggagcagtcagtgcataatgaggtgcaggctgaggcgggggccagtgccatgctgagctgtgaggtggcccaggcccagacggaggtgacgtggtacaaggatgggaagaagctgagctccagctcaaaagtgggcatggaggtcaaagggtgcacacggaggctggtgctgccacaggcgggcaaagcagatgctggggagtacagctgtgaggctgggggccagagagtctccttccacctgcacatcacagagcccaagggggtgtttgcgaaggagcagtcagtgcataatgaggtgcaggctgaggcggggaccactgccatgctgagctgtgaggtggcccagccccagacagaggtgacgtggtacaaggacgggaagaagctgagctccagctcaaaagtacgcatggaggtcaagggctgcacacgaaggctggtagtgcagcaggtgggcaaagcagatgctggggagtacagctgcgaggctgggggccagagagtctcctttcaactgcacatcacagagcccaaggcagtgtttgccaaggagcagttggtgcataatgaggtgcggactgaggcaggggccagtgccacactgagctgtgaggtggcccaggcccagacagaggtgacgtggtacaaggatgggaagaagctgagctccagttcgaaagtgcgcatagaggctgcgggctgcatgcggcagctggtggtgcagcaggcaggccaggcagatgctggggagtacacctgtgaggctgggggccagcggctctccttccacctggatgtttcagagcccaaggcggtgtttgcaaaggagcagctggcacacaggaaggtgcaggccgaggcgggggccattgccacgctgagctgcgaggtggcccaggcccagacagaggtgacgtggtacaaggacgggaagaagctgagctccagctcgaaagttcgaatggaggctgtgggctgcacacggaggctggtggtgcagcaggcatgccaggcggacaccggggagtatagctgcgaggccgggggccagcggctctccttcagcctggacgtggcagagcccaaggtggtgtttgccaaggagcagccagtgcacagggaggtgcaggcccaggcgggggccagcaccacactcagctgcgaggtggctcaggcccagacggaggtgatgtggtacaaggacgggaagaagctgagcttcagctcgaaagtgcgcatggaggctgtgggctgcacacggaggctggtggtgcagcaggcgggccaggcggtcgccggggagtacagctgcgaggcggggagccagcggctctccttccacctgcacgtggcagagcccaaggcggtgtttgccaaggagcagccagcgagcagggaggtgcaggctgaggcggggaccagtgccacgctgagctgcgaggtggcccaggcccagacagaggtgacgtggtacaaggacgggaagaaactgagctccagctcgaaagtgcgaatggaggccgtgggctgcacacggaggctggtggtgcaggaggcaggccaggcggacgccggggagtacagctgcaaggccggggatcagcggctgtccttccacctgcacgtggcagagcccaaggtggtgtttgccaaggagcagccagcacacagggaggtgcaggctgaggcgggggccagtgccacgctgagctgcgaggtggcccaggcccagacagaggtgacgtggtacaaggatgggaagaagctgagttccagctcgaaagtgcgcgtggaggccgtgggctgcacacggaggctggtggtgcagcaggcgggccaggcagaggccggggagtacagctgcgaggcagggggtcagcagctctccttccgcctgcaggtggcagagctggagccccaaatttcagagagaccctgccgcagggagcctctggtggtcaaggagcatgaagacatcatcctgaccgccacactggccacaccctctgcggccacggtgacctggctcaaggatggtgtggagattcgccgcagcaagcggcatgagacagccagccagggggacacccacaccctgaccgtgcatggcgcccaggttctggacagcgccatctacagctgccgtgtgggcgcagaggggcaggacttcccagtgcaggtggaagaggtggccgccaagttctgccggctgctggagcctgtgtgcggcgagctgggtggcacggtgacactggcctgcgagctaagcccagcgtgtgcagaggtggtgtggcgctgcggcaacacgcagcttcgggtgggcaagcgcttccagatggtggccgaggggcccgtgcgctcactcactgtgttggggctgcgcgcagaggacgcaggggagtacgtgtgtgagagccgtgatgaccacaccagtgcgcagctcaccgtcagtgtgccccgagtggtgaagtttatgtctgggctgagcaccgtggtcgcagaggagggcggcgaggccaccttccagtgcgtggtgtcccccagtgatgtggcagtcgtgtggttccgggacggtgccctgcttcagcccagcgagaagtttgccatatcacagagtggcgccagccacagcctgaccatctcagacctggtgctggaggacgcgggccagatcaccgtggaggctgagggcgcctcatcctctgctgccctgagggtccgagaggcgcctgtgctgttcaaaaagaagctggagccgcagacggtggaggagcggagctcggtgaccctggaggtggagctgacgcggccgtggccggagctgaggtggacacggaacgcgacggccctggcgccgggaaagaacgtggagatccacgccgagggcgcccgccaccgcctggttctgcacaacgtaggttttgccgaccgtggcttctttggctgcgagacgccggatgacaagacacaggccaaactcaccgtggagatgcgccaggtacggctcgtacggggcctgcaggcagtggaggcacgggagcagggcacggctaccatggaggtgcagctgtcgcatgcggacgtggatggcagctggactcgtgacggtctgcggttccagcaggggcccacgtgccacctggctgtgcggggccccatgcacaccctcacactctcggggctgcggccagaggatagtggccttatggtcttcaaggccgaaggagtgcacacgtcggcgcggctcgtggtcaccgagcttcccgtgagcttcagccgcccgctgcaggacgtggtgaccactgagaaggagaaggttaccctggagtgcgagctgtcgcgtcctaatgtggatgtgcgctggctgaaggacggtgtggagctgcgggcaggcaagacgatggccatcgcagcccagggcgcctgcaggagcctcaccatttaccggtgcgagttcgcggatcagggagtgtatgtgtgtgatgcccatgatgcccagagctctgcctccgtgaaggtacaaggaaggacatacactctcatctaccggagagtcctggcggaagatgcaggagagatccaatttgtagccgaaaatgcagaatcgcgagcccagctccgagtgaaggagctgccagtgaccctcgtgcgcccgctgcgggacaagattgccatggagaagcaccgcggtgtgctggagtgtcaggtgtcccgggccagcgcccaggtgcggtggttcaagggcagtcaggagctgcagcccgggcccaagtacgagctggtcagtgatggcctctaccgcaagctgatcatcagtgatgtccacgcagaggacgaggacacctacacctgtgacgccggtgatgtcaagaccagtgcacagttcttcgtggaagagcaatccatcaccattgtgcggggtctgcaggacgtgacagtgatggagcccgctcctgcctggtttgagtgtgagacctccatcccctcagtgcggccacctaagtggctcctggggaagacggtgttgcaggctggggggaacgtgggcctggagcaggagggcacggtgcaccggctgatgctgcggcggacctgctccaccatgaccgggcccgtgcacttcaccgttggcaagtcgcgctcctctgcccgcctggtggtctcagacatccccgtagtcctcacacggccgttggagcccaagacagggcgtgagctgcagtcagtggtcctgtcctgcgacttccggccagcccccaaggctgtgcagtggtacaaggatgacacgcccctgtctccctctgagaagtttaagatgagcctggagggtcagatggctgagctgcgcatcctccggctcatgcctgctgatgctggtgtctaccggtgccaggcgggcagtgcccacagcagcactgaggtcactgtggaagcgcgggaggtgacagtgacagggccgctacaggatgcagaggccacggaggagggctgggccagcttctcctgtgagctgtcccacgaggatgaggaggtcgagtggtcgctcaacgggatgcccctgtacaacgacagcttccatgagatctcacacaagggccggcgccacacgctggtactgaagagcatccagcgggctgatgcgggcatagtacgcgcctcctccctgaaggtgtcgacctctgcccgcctggaggtccgagtgaagccggtggtgttcctgaaggcgctggatgacctgtccgcagaggagcgcggcaccctggccctgcagtgtgaagtctctgaccccgaggcccatgtggtgtggcgcaaagatggcgtgcagctgggccccagtgacaagtatgacttcctgcacacggcgggcacgcgggggctcgtggtgcatgacgtgagccctgaagacgccggcctgtacacctgccacgtgggctccgaggagacccgggcccgggtccgcgtgcacgatctgcacgtgggcatcaccaagaggctgaagacaatggaggtgctggaaggggaaagctgcagctttgagtgcgtcctgtcccacgagagtgccagcgacccggccatgtggacagtcggtgggaagacagtgggcagctccagccgcttccaggccacacgtcagggccgaaaatacatcctggtggtccgggaggctgcaccaagtgatgccggggaggtggtcttctctgtgcggggcctcacctccaaggcctcactcattgtcagagagaggccggccgccatcatcaagcccctggaagaccagtgggtggcgccaggggaggacgtggagctgcgctgtgagctgtcacgggcgggaacgcccgtgcactggctgaaggacaggaaggccatccgcaagagccagaagtatgatgtggtctgcgagggcacgatggccatgctggtcatccgcggggcctcgctcaaggacgcgggcgagtacacgtgtgaggtggaggcttccaagagcacagccagcctccatgtggaagaaaaagcaaactgcttcacagaggagctgaccaatctgcaggtggaggagaaaggcacagctgtgttcacgtgcaagacggagcaccccgcggccacagtgacctggcgcaagggcctcttggagctacgggcctcagggaagcaccagcccagccaggagggcctgaccctgcggctcaccatcagtgccctggagaaggcagacagcgacacctatacctgcgacattggccaggcccagtcccgggcccagctcctagtgcaaggccggagagtgcacatcatcgaggacctggaggatgtggatgtgcaggagggctcctcggccaccttccgttgccggatctccccggccaactacgagcctgtgcactggttcctggacaagacacccctgcatgccaacgagctcaatgagatcgatgcccagcccgggggctaccacgtgctgaccctgcggcagctggcgctcaaggactcgggcaccatctactttgaggcgggtgaccagcgggcctcggccgccctgcgggtcactgagaagccaagcgtcttctcccgggagctcacagatgccaccatcacagagggtgaggacttgaccctggtgtgcgagaccagcacctgcgacattcctgtgtgctggaccaaggatgggaagaccctgcgggggtctgcccggtgccagctgagccatgagggccaccgggcccagctgctcatcactggggccaccctgcaggacagtggacgctacaagtgtgaggctgggggcgcctgcagcagctccattgtcagggtgcatgcgcggccagtgcggttccaggaggccctgaaggacctggaggtgctggagggtggtgctgccacactgcgctgtgtgctgtcatctgtggctgcgcccgtgaagtggtgctatggaaacaacgtcctgaggccaggtgacaaatacagcctacgccaggagggtgccatgctggagctggtggtccggaacctccggccgcaggacagcgggcggtactcatgctccttcggggaccagactacttctgccaccctcacagtgactgccctgcctgcccagttcatcgggaaactgagaaacaaggaggccacagaaggggccacggccacgctgcggtgtgagctgagcaaggcagcccctgtggagtggagaaaggggtccgagaccctcagagatggggacagatactgtctgaggcaggacggggccatgtgtgagctgcagatccgtggcctggccatggtggatgccgcggagtactcgtgtgtgtgtggagaggagaggacctcagcctcactcaccatcaggcccatgcctgcccacttcataggaagactgagacaccaagagagcatagaaggggccacagccacgctgcggtgtgagctgagcaaggcggcccccgtggagtggaggaaggggcgtgagagcctcagagatggggacagacatagcctgaggcaggacggggctgtgtgcgagctgcagatctgtggcctggctgtggcagatgctggggagtactcctgtgtgtgtggggaggagaggacctctgccactctcaccgtgaaggccctgccagccaagttcacagagggtctgaggaatgaagaggccgtggaaggggccacagccatgttgtggtgtgaactgagcaaggtggcccctgtggagtggaggaaggggcccgagaacctcagagatggggacagatacatcctgaggcaggaggggaccaggtgtgagctgcagatctgtggcctggccatggcggacgccggggagtacttgtgtgtgtgcgggcaggagaggacctcagccacgctcaccatcagggctctgcctgccaggttcatagaagatgtgaaaaaccaggaggccagagaaggggccacagctgtgctgcagtgtgagctgaacagtgcagcccctgtggagtggagaaaggggtctgagacccttagagatggggacagatacagcctgaggcaggacgggactaaatgtgagctgcagattcgtggcctggccatggcagacactggggagtactcgtgcgtgtgcgggcaggagaggacctcggctatgctcaccgtcagggctctacccatcaagttcacagagggtctgaggaacgaagaggccacagaaggggcaacagccgtgctgcggtgtgagctgagcaagatggcccccgtggagtggtggaaggggcatgagaccctcagagatggagacagacacagcctgaggcaggacggggccaggtgtgagctgcagatccgcggcctcgtggcagaggacgctggggagtacctgtgcatgtgcgggaaggagaggacctcagccatgctcaccgtcagggccatgccttccaagttcatagagggtctgaggaatgaagaggccacagaaggggacacggccacgctgtggtgtgagctgagcaaggcggcaccggtggagtggaggaaggggcatgagaccctcagagatggggacagacacagcctgaggcaggacgggtccaggtgtgagctgcagatccgtggcctggctgtggtggatgccggggagtactcgtgtgtgtgcgggcaggagaggacctcagccacactcactgtcagggccctgcctgccagattcatagaagatgtgaaaaaccaggaggccagagaaggggccacggccgtgctgcaatgtgagctgagcaaggcggcccccgtggagtggaggaaggggtctgagaccctcagaggtggggacagatacagcctgaggcaggatgggaccagatgtgagctgcagattcatggcctgtctgtggcagacactggggagtactcgtgtgtgtgcgggcaggagaggacctcggccacactcaccgtcagggccccacagccagtgttccgggagccgctgcagagtctgcaggcggaggagggctccacggccaccctgcagtgtgagctgtctgagcccactgctacagtggtctggagcaagggtggcctgcagctgcaggccaatgggcgccgggagccacggcttcagggctgcaccgcggagctggtgttacaggacctacaacgtgaagacactggcgaatacacttgcacctgtggctcccaggccaccagtgccaccctcactgtcacagctgcgcctgtgcggttcctccgagagctgcagcaccaggaggtggatgagggaggcaccgcacacttatgctgcgagctgagccgggcgggtgcgagcgtggagtggcgcaagggctccctacagctcttcccttgtgccaagtaccagatggtgcaggatggtgcagctgcagagctgctggtacgcggagtggagcaggaggatgcgggtgactacacgtgtgacacgggccacacgcagagcatggccagcctctctgtccgtgtccccaggcccaagttcaagacccggcttcagagtctggagcaggagacaggtgacatagcccggctgtgctgtcagctgagtgatgcagagtcgggggccgtggtgcaatggctcaaggagggcgtggagctgcatgcgggccccaagtacgagatgcggagccagggggccacgcgggagctgctgatccaccaactggaggccaaggacacgggcgagtatgcctgtgtgacaggcggccagaaaaccgctgcctccctcagggtcacagagcctgaggtgaccattgtacgggggctggttgatgcggaggtgacggccgatgaggatgttgagttcagctgtgaggtgtccagggctggagccacaggcgtgcagtggtgcctacagggcctgccactgcaaagcaatgaggtgacagaggtggctgtgcgggatggccgcatccacaccctgcggctgaagggcgtgacgcccgaggacgctggcactgtctccttccatttgggaaaccatgcttcctctgcccagctcaccgtcagagctcctgaggtgaccatcctggagcccctgcaggacgtgcagctcagtgagggccaggatgccagcttccagtgccggctatccagagcttcaggccaggaggcccgctgggctttaggaggggtgcccctgcaggccaacgagatgaatgacatcactgtggagcagggcacactccacctgctcaccctgcacaaggtgacccttgaggatgctggaactgtcagtttccacgtgggcacgtgtagctctgaggcccagctgaaagtcacagccaagaacacggtggtgcgggggctggagaatgtggaggcgctggagggcggcgaggcgctgttcgagtgccagctgtcccagcccgaggtggccgcccacacctggctgctggacgacgaacccgtgcacacctcggagaacgccgaggtggtcttcttcgagaacggcctgcgccacctgctgctgctcaaaaacttgcggccacaagacagctgccgggtgaccttcctggctggggatatggtgacgtccgcattcctcacggtccgaggctggcgcctggagatcctggagcctctgaaaaacgcggcggtccgggccggcgcacaggcatgcttcacctgcacgctcagcgaggcggtgcccgtgggagaggcgtcctggtacatcaatggcgcggcagtgcagccggatgacagcgactggactgtcaccgccgacggcagtcaccacgccctactgctgcgcagcgcccagccccaccacgccggggaggtcaccttcgcttgccgcgacgccgtggcctctgcgcggctcaccgtgctgggcctccctgatcccccagaggatgctgaggtggtggctcgcagcagccacactgtgacactgtcttgggcagctcccatgagtgatggaggcggtggtctctgtggctaccgcgtggaggtgaaggagggggccacaggccagtggcggctgtgccacgagctggtgcctggacccgagtgtgtggtggatggcctggcccccggggagacctaccgcttccgtgtggcagctgtgggccctgtgggtgctggggaaccggttcacctgccccagacagtgcggcttgcagagccaccgaagcctgtgcctccccagccctcagcccctgagagccggcaggtggcagctggtgaagatgtctctctggagcttgaggtggtggctgaggctggtgaggtcatctggcacaagggaatggagcgcatccagcccggtgggcggttcgaggtggtctcccagggtcggcaacagatgctggtgatcaagggcttcacggcagaagaccagggcgagtaccactgtggcctggctcagggctccatctgccctgcggctgccaccttccaggtggcactgagcccagcctctgtggatgaggcccctcagcccagcttgccccccgaggcagcccaggagggtgacctgcacctactgtgggaggccctggctcggaaacgtcgcatgagccgtgagcccacgctggactccattagcgagctgccagaggaggacggccgctcgcagcgcctgccacaggaggcagaggaggtggcacctgatctctctgaaggctactccacggccgatgagctggcccgcactggagatgctgacctctcacacaccagctctgatgatgagtcccgggcaggcaccccttccctggtcacctacctcaagaaggctgggaggccaggcacctcaccactggccagcaaggttggggccccagcagccccctctgtgaagccacagcagcagcaggagccactggctgctgtgcgcccaccactgggagacctgagcaccaaagacctgggtgatccctcaatggacaaggcagctgtgaagatccaggctgcctttaagggctacaaggtccggaaggagatgaagcagcaggaagggcccatgttctcccacacatttggggacaccgaggcacaggtgggggatgccctgcggctggagtgtgtcgtggccagcaaggcagatgtgcgagcccgctggctgaaggatggtgtggagctgaccgatgggcggcaccatcacatcgaccagcttggggatggcacctgctctctgctgatcactggcctggaccgtgctgatgctggctgctacacctgtcaggtgagcaacaagtttggccaggtgacccacagtgcctgtgtggtggtcagtgggtcagagagtgaagccgagagctcctctgggggtgagctggacgatgccttccgccgggctgcccgtcggctgcaccggctcttccgcaccaaaagtccggctgaagtttcagatgaggagctcttcctgagtgcagacgagggccctgcagagccagaggagcccgcggactggcagacataccgcgaagatgagcatttcatctgcatccgttttgaggcgctcactgaggcccgccaggcggtaactcgcttccaggagatgtttgccacactgggcattggggtggagatcaagctggtggaacaggggcctcggagggtagagatgtgcatcagcaaagagactcctgcccctgtggtgcctccagagccattgcccagcctactgacttctgacgctgccccagtgttcctgactgagttgcagaaccaagaagtgcaggatgggtatcctgtgagctttgactgcgtggtgacaggtcagcccatgcccagtgtgcgctggttcaaggatgggaagttgttggaggaggatgatcactacatgattaatgaagaccaacagggtggccatcagctcatcatcacagccgtggtgccagcagacatgggcgtctaccgctgcctggccgagaacagcatgggtgtctcctccaccaaggctgagctccgtgtggacttgacaagcacagactatgacactgcagcagatgccacggagtcctcatcctacttcagtgcccaaggctacctgtccagccgggagcaggagggaacagagtccaccactgatgagggccagctgccccaggtggtggaggagctgagagacctccaggtggcccctggcacacgcctggccaagttccagctcaaggtgaaaggctaccctgctcccagattatactggttcaaagatggccagcccctgaccgcatctgcccacatccgcatgactgacaagaagatcctgcacaccctggagatcatctccgtcacccgggaggactctggccagtatgcagcctatatcagcaatgccatgggtgctgcctactcgtctgcccggctgctggttcgaggccctgatgagccagaagagaagcctgcatcagatgtgcatgagcagctggtgccgccccgaatgctggagaggttcacccccaagaaagtgaagaaaggctccagcatcaccttctctgtgaaggtagaaggacgcccggtgcccaccgtgcactggctcagggaggaggctgagagaggcgtgctgtggattggccctgacacaccgggctacaccgtggccagctctgcgcagcagcacagcctggtcctgctggacgtgggccggcagcaccagggcacctacacatgcattgccagcaacgctgccggccaggccctctgctccgccagcctgcacgtctcgggcctgcctaaggtggaggagcaggagaaagtgaaggaagcgctgatttccactttcctgcaggggaccacacaagccatctcagcacaggggttggaaactgcgagttttgctgaccttggtgggcagaggaaagaagagcctctggctgccaaggaggccctcggccacctgtccctcgctgaggtgggcacagaggagttcctgcagaaactgacctcccagatcactgagatggtatcggccaagatcacgcaggccaagctgcaggtgcccggaggtgacagtgatgaggactccaagacaccatctgcatccccccgccatggccgatcacggccatcctccagcatccaggagtcttcctcagagtcagaggacggcgatgcccgaggcgagatctttgacatctacgtggtcaccgctgactacctgcccctaggggctgagcaggatgccatcacgctgcgggaaggccagtatgtggaggtcctggatgcagcccacccactgcgctggcttgtccgcaccaagcccaccaagtccagcccctcacggcagggctgggtgtcaccagcctacctggacaggaggctcaagctgtcacctgagtggggggccgctgaggcccctgagttccctggggaggctgtgtctgaagacgaatacaaggcaaggctgagctctgtgatccaggagctgctgagttctgagcaggccttcgtggaggagctgcagttcctgcagagccaccacctgcagcacctggagcgctgcccccacgtgcccatagctgtggccggccagaaggcagtcatcttccgcaatgtgcgggacatcggccgcttccacagcagcttcctgcaggagttgcagcagtgcgacacggacgacgacgtggccatgtgcttcatcaagaaccaggcggcctttgagcagtacctggagttcctggtggggcgtgtgcaggctgagtcggtggtcgtcagcacggccatccaggagttctacaagaaatacgcggaggaggccctgttggcaggggacccctctcagcccccgccaccacctctgcagcactacctggagcagccagtggagcgggtgcagcgctaccaggccttgctgaaggagctgatccgcaacaaggcgcggaacagacagaactgcgcgctgctggagcaggcctatgccgtggtgtctgccctgccacagcgcgctgagaacaagctgcacgtgtccctcatggagaactacccaggcaccctgcaggccctgggcgagcccatccgccagggccacttcatcgtgtgggagggtgcaccgggggcccgcatgccctggaagggccacaaccgtcacgtgttcctcttccgcaaccacctggtaatctgcaagccccggcgagactcccgcaccgataccgtcagctacgtgttccggaacatgatgaagctgagcagcatcgacctgaacgaccaggtggagggggatgaccgcgccttcgaggtgtggcaggagcgggaggactcggtgcgcaagtacctgctgcaggcacggacagccattatcaagagctcgtgggtgaaggagatctgtggcatccagcagcgtctggccctgcctgtgtggcggcccccggactttgaagaggagctggccgactgcacagccgagctgggtgagacagtcaagctggcctgccgcgtgacgggcacacccaagcctgtcatcagctggtacaaagatgggaaagcagtgcaggtggacccccaccacatcctcattgaagaccctgatggctcgtgtgcactcatcctggacagcctgaccggtgtggactctggccagtacatgtgcttcgcggccagcgccgctggcaactgcagtaccctgggcaagatcctggtgcaagtcccaccacggttcgtgaacaaggtccgggcctcaccctttgtggagggagaggacgcccagttcacctgcaccatcgaaggcgccccgtacccgcagatcaggtggtacaaggacggggccctgctgaccactggcaacaagttccagacactgagtgagcctcgcagcggcctgctagtgctggtgatccgggcggccagcaaggaggacctggggctctacgagtgtgagctggtgaaccggctgggctccgcgcgggctagtgcggagctgcgcattcagagccccatgctgcaggcccaggagcagtgtcacagggagcagctcgtggctgcagtggaagacaccaccctggagcgagcggaccaggaggtcacatctgtcctgaagagactgctgggccccaaggcgccaggcccctccacaggggacctcactggccctggcccctgccccaggggggcacccgcactccaggaaaccggctcccagcccccagtcaccggaacttcggaggcacctgccgtgcccccgagggtgccacagcccctcctccacgaaggcccagagcaggagccggaggccattgccagagcccaggaatggactgtgcccattcggatggagggtgcagcctggcccggggcaggcacaggggagctgctctgggacgtccacagccacgtggtcagagagaccacacagaggacctacacataccaggccatcgacacgcacaccgcacggcccccatccatgcaggtaaccatcgaggatgtgcaggcacagacaggcggaacggcccaattcgaggctatcattgagggcgacccacagccctcggtgacctggtacaaggacagcgtccagctggtggacagcacccggcttagccagcagcaagaaggcaccacatactccctggtgctgaggcatgtggcctcgaaggatgccggcgtttacacctgcctggcccaaaacactggtggccaggtgctctgcaaggcagagctgctggtgcttgggggggacaatgagccggactcagagaagcaaagccaccggaggaagctgcactccttctatgaggtcaaggaggagattggaaggggcgtgtttggcttcgtaaaaagagtgcagcacaaaggaaacaagatcttgtgcgctgccaagttcatccccctacggagcagaactcgggcccaggcatacagggagcgagacatcctggccgcgctgagccacccgctggtcacggggctgctggaccagtttgagacccgcaagaccctcatcctcatcctggagctgtgctcatccgaggagctgctggaccgcctgtacaggaagggcgtggtgacggaggccgaggtcaaggtctacatccagcagctggtggaggggctgcactacctgcacagccatggcgttctccacctggacataaagccctctaacatcctgatggtgcatcctgcccgggaagacattaaaatctgcgactttggctttgcccagaacatcaccccagcagagctgcagttcagccagtacggctcccctgagttcgtctcccccgagatcatccagcagaaccctgtgagcgaagcctccgacatttgggccatgggtgtcatctcctacctcagcctgacctgctcatccccatttgccggcgagagtgaccgtgccaccctcctgaacgtcctggaggggcgcgtgtcatggagcagccccatggctgcccacctcagcgaagacgccaaagacttcatcaaggctacgctgcagagagcccctcaggcccggcctagtgcggcccagtgcctctcccacccctggttcctgaaatccatgcctgcggaggaggcccacttcatcaacaccaagcagctcaagttcctcctggcccgaagtcgctggcagcgttccctgatgagctacaagtccatcctggtgatgcgctccatccctgagctgctgcggggcccacccgacagcccctccctcggcgtagcccggcacctctgcagggacactggtggctcctccagttcctcctcctcctctgacaacgagctcgccccatttgcccgggctaagtcactgccaccctccccggtgacacactcaccactgctgcacccccggggcttcctgcggccctcggccagcctgcctgaggaagccgaggccagtgagcgctccaccgaggccccagctccgcctgcatctcccgagggtgccgggccaccggccgcccagggctgcgtgccccggcacagcgtcatccgcagcctgttctaccaccaggcgggtgagagccctgagcacggggccctggccccggggagcaggcggcacccggcccggcggcggcacctgctgaagggcgggtacattgcgggggcgctgccaggcctgcgcgagccactgatggagcaccgcgtgctggaggaggaggccgccagggaggagcaggccaccctcctggccaaagccccctcattcgagactgccctccggctgcctgcctctggcacccacttggcccctggccacagccactccctggaacatgactctccgagcaccccccgcccctcctcggaggcctgcggtgaggcacagcgactgccttcagccccctccgggggggcccctatcagggacatggggcaccctcagggctccaagcagcttccatccactggtggccacccaggcactgctcagccagagaggccatccccggacagcccttgggggcagccagcccctttctgccaccccaagcagggttctgccccccaggagggctgcagcccccacccagcagttgccccatgccctcctggctccttccctccaggatcttgcaaagaggcccccttagtaccctcaagccccttcttgggacagccccaggcaccccctgcccctgccaaagcaagccccccattggactctaagatggggcctggagacatctctcttcctgggaggccaaaacccggcccctgcagttccccagggtcagcctcccaggcgagctcttcccaagtgagctccctcagggtgggctcctcccaggtgggcacagagcctggcccctccctggatgcggagggctggacccaggaggctgaggatctgtccgactccacacccaccttgcagcggcctcaggaacaggcgaccatgcgcaagttctccctgggtggtcgcgggggctacgcaggcgtggctggctatggcacctttgcctttggtggagatgcagggggcatgctggggcaggggcccatgtgggccaggatagcctgggctgtgtcccagtcagaggaggaggagcaggaggaggccagggctgagtcccagtcggaggagcagcaggaggccagggctgagagcccactgccccaggtcagtgcaaggcctgtgcctgaggtcggcagggctcccaccaggagctctccagagcccaccccatgggaggacatcgggcaggtctccctggtgcagatccgggacctgtcaggtgatgcggaggcggccgacacaatatccctggacatttccgaggtggaccccgcctacctcaacctctcagacctgtacgatatcaagtacctcccattcgagtttatgatcttcaggaaagtccccaagtccgctcagccagagccgccctcccccatggctgaggaggagctggccgagttcccggagcccacgtggccctggccaggtgaactgggcccccacgcaggcctggagatcacagaggagtcagaggatgtggacgcgctgctggcagaggctgccgtgggcaggaagcgcaagtggtcctcgccgtcacgcagcctcttccacttccctgggaggcacctgccgctggatgagcctgcagagctggggctgcgtgagagagtgaaggcctccgtggagcacatctcccggatcctgaagggcaggccggaaggtctggagaaggaggggccccccaggaagaagccaggccttgcttccttccggctctcaggtctgaagagctgggaccgagcgccgacattcctaagggagctctcagatgagactgtggtcctgggccagtcagtgacactggcctgccaggtgtcagcccagccagctgcccaggccacctggagcaaagacggagcccccctggagagcagcagccgtgtcctcatctctgccaccctcaagaacttccagcttctgaccatcctggtggtggtggctgaggacctgggtgtgtacacctgcagcgtgagcaatgcgctggggacagtgaccaccacgggcgtcctccggaaggcagagcgcccctcatcttcgccatgcccggatatcggggaggtgtacgcggatggggtgctgctggtctggaagcccgtggaatcctacggccctgtgacctacattgtgcagtgcagcctagaaggcggcagctggaccacactggcctccgacatctttgactgctgctacctgaccagcaagctctcccggggtggcacctacaccttccgcacggcatgtgtcagcaaggcaggaatgggtccctacagcagcccctcggagcaagtcctcctgggagggcccagccacctggcctctgaggaggagagccaggggcggtcagcccaacccctgcccagcacaaagaccttcgcattccagacacagatccagaggggccgcttcagcgtggtgcggcaatgctgggagaaggccagcgggcgggcgctggccgccaagatcatcccctaccaccccaaggacaagacagcagtgctgcgcgaatacgaggccctcaagggcctgcgccacccgcacctggcccagctgcacgcagcctacctcagcccccggcacctggtgctcatcttggagctgtgctctgggcccgagctgctcccctgcctggccgagagggcctcctactcagaatccgaggtgaaggactacctgtggcagatgttgagtgccacccagtacctgcacaaccagcacatcctgcacctggacctgaggtccgagaacatgatcatcaccgaatacaacctgctcaaggtcgtggacctgggcaatgcacagagcctcagccaggagaaggtgctgccctcagacaagttcaaggactacctagagaccatggctccagagctcctggagggccagggggctgttccacagacagacatctgggccatcggtgtgacagccttcatcatgctgagcgccgagtacccggtgagcagcgagggtgcacgcgacctgcagagaggactgcgcaaggggctggtccggctgagccgctgctacgcggggctgtccgggggcgccgtggccttcctgcgcagcactctgtgcgcccagccctggggccggccctgcgcgtccagctgcctgcagtgcccgtggctaacagaggagggcccggcctgttcgcggcccgcgcccgtgaccttccctaccgcgcggctgcgcgtcttcgtgcgcaatcgcgagaagagacgcgcgctgctgtacaagaggcacaacctggcccaggtgcgctgagggtcgccccggccacacccttggtctccccgctgggggtcgctgcagacgcgccaataaaaacgcacagccgggcgag

SEQ ID NO: 2915 - DNA, 972 bp, Homo sapiens
  source 1..972: mol_type = genomic DNA
gcggcggcggcagcggcagcggcagcggcgctgagttttgtctcccgggccgtctgggcgcgcgcgggtgtcccaggtaccccgccgcctccctccttcccgcaggactcgtccctcctggccctgggccccaacggtgcccgcctgcccggcggtcggtcagcgcacagggcacggcttcctctgcttctcccggaccacttagtctcaacccggaatgaaatatgactgaggactctcagagaaactttcgttcagtatattatgagaaagtggggtttcgtggagttgaagaaaagaaatcattagaaattctcctaaaagatgaccgtctggatactgagaaactttgtacttttagtcagaggttccctctcccgtccatgtaccgtgcattggtatggaaggtgcttctaggaatcttgcctccacaccacgagtcccatgccaaggtgatgatgtatcgtaaggagcagtacttggatgtccttcatgccctgaaagtcgttcgctttgttagtgatgccacacctcaggctgaagtctatctccgcatgtatcagctggagtctgggaagttacctcgaagtccctcttttccactggagccagatgatgaagtgtttcttgccatagctaaagccatggaggaaatggtggaagatagtgtcgactgttactggatcacccgacgctttgtgaaccaattaaataccaagtaccgggattccttgccccagttgccaaaagcgtttgaacaatacttgaatctggaagatggcagactgctgactcatctgaggatgtgttccgcggcgcccaaacttccttatgatctctggttcaagaggtgctttgcgggatgtttgcctgaatccagtttacagagggtttgggataaagttgtgagtggatcctgtaagatcctagtttttgtagctgtcgaaattttattaacctttaaaataaaag

SEQ ID NO: 2916 - DNA, 661 bp, Homo sapiens
  source 1..661: mol_type = genomic DNA
atgcaagcttgctgtggaaagcatgcttcccgtctgtcagggcttcctgagaggagacctggtgacacagtagcctttcggcagagctccttgggatgagtaggaagtgctgctgcaggttttgtctgggggatatctgagccatttctctgtgggcagctgtgtttcaaagtctgggcaggttgttgttgaattttgcgtgggctgccaggattttgtggaagtataatactttgtcattatgagatgtcgtctctcggtgcctcctttgtgcaaattaaatttgatgacttgcagttttttgaaaactgcggtggaggaagttttgggagtgtttatcgagccaaatggatatcacaggacaaggaggtggctgtaaagaagctcctcaaaatagagaaagaggcagaaatactcagtgtcctcagtcacagaaacatcatccagttttatggagtaattcttgaacctcccaactatggcattgtcacagaatatgcttctctgggatcactctatgattacattaacagtaacagaagtgaggagatggatatggatcacattatgacctgggccactgatgtagccaaaggaatgcattatttacatatggaggctcctgtcaaggtgattcacagagacctcaagtcaagaaacg

SEQ ID NO: 2917 - DNA, 1558 bp, Homo sapiens
  source 1..1558: mol_type = genomic DNA
gtccgctgtccggcctccggtcacgtgacagcagcgcaggtgagcgccgcttccggggtcgggcgcctggatagctgccggctccggcttccacttggtcggttgcgcgggagactatggcgtcctcctcggtcccaccagccacggtatcggcggcgacagcaggccccggcccaggtttcggcttcgcctccaagaccaagaagaagcatttcgtgcagcagaaggtgaaggtgttccgggcggccgacccgctggtgggtgtgttcctgtggggcgtagcccactcgatcaatgagctcagccaggtgcctcccccggtgatgctgctgccagatgactttaaggccagctccaagatcaaggtcaacaatcaccttttccacagggaaaatctgcccagtcatttcaagttcaaggagtattgtccccaggtcttcaggaacctccgtgatcgatttggcattgatgaccaagattacttgtacattgtgaagtgccatggcaacacgcttctgccccagttcctggggatgtaccgagtcagtgtggacaacgaagacagctacatgcttgtgatgcgcaatatgtttagccaccgtcttcctgtgcacaggaagtatgacctcaagggttccctagtgtcccgggaagccagcgataaggaaaaggttaaagaattgcccacccttaaggatatggactttctcaacaagaaccagaaagtatatattggtgaagaggagaagaaaatatttctggagaagctgaagagagatgtggagtttctagtgcagctgaagatcatggactacagccttctgctaggcatccacgacatcattcggggctctgaaccagaggaggaagcgcccgtgcgggaggatgagtcagaggtggatggggactgcagcctgactggacctcctgctcttgtgggctcctatggcacctccccagagggtatcggaggctacatccattcccatcggcccctgggcccaggagagtttgagtccttcattgatgtctatgccatccggagtgctgaaggagccccccagaaggaggtctacttcatgggcctcattgatatccttacacagtatgatgctaagaagaaagcagctcatgcagccaaaactgtcaagcatggggctggggcagagatctctactgtccatccggagcagtatgctaagcgattcctggattttattaccaacatctttgcctaagagactgcctggttctctctgatgttcaaggtggtggggttctgagacacttgggggaattgtggggatattctagccaccagttctcttcttcctttgctaaattcaggctgcaggctccttccatccagataactccatcctgtcgagtaggctctttctgaccctcagaaatacattgtcctttttcctctttgcccatttttcttccctctcttcctccccatgagaagtctgcttgtagtattagaatgttattgttgactctctcccaagtgccttgatctttgtaatatctcctgttgtttctatgatatagg

SEQ ID NO: 2918 - DNA, 793 bp, Homo sapiens
  source 1..793: mol_type = genomic DNA
gaagccgttttggggtcgcagcggggtggcagcttgttttgccttcacgggagtagaaggaggcggcgtccggccgcggccgacggtagttcgcttccccgagagtgcgcggaggcccgggtgcgaggagggcctgtttctcttcagccctggttcattcacctcgcggaccgagggccccgccgtcaggagccggcgaccgtgccctggtgcgagctgtgatggtcattgtcctccagagcagtgatggaggaaataccagcccaggaagcagcagggtcaccaagggtccagtttcagtctttggagacccagtctgagtgtctgtccccagagcctcagtttgtgcaggacaccgacatggaacagggactcactgggggatttccaatttccaagcctgatgggatctcccagctggaacaggatctacaggtctttgatctggaaactaagactagagaagtcttaagagatgactgctcagatggagagaccagagaagagaacaagctgttgattcctaagcagaaaatttcggaagaagtgcattcatacaaagtgagagtaggaagactcaaacacgatattacccaagttcctgagactagagaagtgtataagtctgaggacagattagaaagacttcaggaaattctaaggaaatttctgtacctggagagagagtttaggcaaataacaatcagcaaggaaaccttcaccagtgagaagaacaatgaatgtcatgaacccgaaaaaagcttcagtctggactctactattgatgcagatc

SEQ ID NO: 2919 - DNA, 2696 bp, Homo sapiens
  source 1..2696: mol_type = genomic DNA
agttgcaacttgtctttgagtgcagggacaggagaagtgtgggctacccggccactgccctggagctgtggtgactgctgcgtttttctcccatgcacttgcacgtccaggactcctgggagaacttgggccacactccttccttgccctcttgagctcattcgtcaccctgttgggtgagcacagccctagctcaggccactgggcaagccacaccatccaaagaggaggtcctctgccccaggacccccacaccaccccaggcctgctgtggcagctgcggcccagtgacgtggaggtggagcttctggcccacactcggcgggtggtgagccgggagctggaggaggagacgggactacacacgggctggatccagaatgggggcctcttcatcgcgtccaaccggcagcgcctggacgagtacaagaggctcatgtcgctgggcaaggcgtatggtgtggaatcccatgtgctgagcccggcagagaccaagactctgtacccgctgatgaatgtggacgacctctacgggaccctgtatgtgccgcacgacggtaccatggaccccgctggcacctgtaccaccctcgccagggcagcttctgcccgaggagcacaggtcattgagaactgcccagtgaccggcattcgtgtgtggacggatgattttggggtgcggcgggtcgcgggtgtggagactcagcatggttccatccagacaccctgcgtggtcaactgtgcaggagtgtgggcaagtgctgtgggccggatggctggagtcaaggtcccgctggtggccatgcaccatgcctatgtcgtcaccgagcgcatcgaggggattcagaacatgcccaatgtccgtgatcatgatgcctctgtctacctccgcctccaaggggatgccttgtctgtgggtggctatgaggccaaccccatcttttgggaggaggtgtcagacaagtttgccttcggcctctttgacctggactgggaggtgttcacccagcacattgaaggcgccatcaacagggtccccgtgctggagaagacaggaatcaagtccacggtctgcggccctgaatccttcacgcccgaccacaagcccctgatgggggaggcacctgagctccgagggttcttcctgggctgtggcttcaacagcgcaggaatgatgctgggtggtggctgtgggcaggagctggcccactggatcatccatgggcgcccggagaaggacatgcatggctatgacatcaggcgcttccatcactcgctcacggaccacccccgctggatccgagagcgaagccatgagtcctacgccaagaactactccgtcgtcttcccccacgatgagccgctggccgggcgcaacatgaggagagacccgctgcacgaggaactccttggacaaggctgcgtgttccaggagcggcatggctgggagcgaccgggatggtttcatccccgaggcccagctccggtcctcgagtacgactactacggggcttacgggagccgcgcgcacgaggactacgcctaccgcaggctgctggcagacgagtacaccttcgccttcccgccccaccacgacacgatcaagaaggagtgcctggcctgcagaggggccgccgctgtgtttgacatgtcctacttcgggaagttctacctggtggggctggatgcaaggaaggctgccgactggctcttctccgcagatgtcagccgacccccaggctccaccgtgtacacgtgcatgctcaaccaccgtgggggcaccgagagtgacctgactgtcagccgcctggcacccagccaccaggcctccccgctggcccccgcctttgaaggggacggttactacctggccatgggcggggccgtggcccagcacaactggtcccacatcaccaccgtgctgcaggaccagaagtcccagtgccagctcatcgacagctccgaggacctgggtatgatcagtatccagggcccagccagccgagccattttgcaggaggtgctggacgcagacctgagcaacgaggccttcccgttctccacccacaagctactgagagccgcagggcacctggtccgagccatgcggctgtcctttgtgggggagctgggctgggagctgcacattccaaaggcgtcctgcgtgcctgtgtaccgggctgtgatggccgcgggtgccaagcacggcctcatcaacgcagggtaccgcgccatcgactccctgagcattgagaaaggctaccggcactggcacgcggacctgcggccagacgacagccccctggaggcaggcctggccttcacctgcaagctcaagtcgccggtgcccttcctggggagggaggccctggagcagcagcgggccgcaggcctccgccggcgcctggtgtgcttcaccatggaggacaaagtacccatgtttggcctggaggccatctggaggaacggccaagtggtgggccatgtccggagggctgactttgggttcgccatcgacaagaccatcgcctacggttacatccatgaccccagcggtgggccggtctcgctggactttgtgaagagcggggactatgccctggagagaatgggggtgacctatggtgcccaggctcacctgaagtcgcccttcgaccccaacaacaagagggtgaagggaatctactgagggctca

SEQ ID NO: 2920 - DNA, 664 bp, Homo sapiens
  source 1..664: mol_type = genomic DNA
actttgatgagcaaggaacgctgttttagaaaatccttactacttgatgattaatccttggagctaatgttccacgttcccaaggttgtgagtgcttatggccacattcctgcatcagctcagccatcgcggtttgtctacagattttgagcgttcgaagttgacccctgactaagtatactttgctgctccctcagcctttgaaaaaatgtctgtcacatatgatgattccgttggagtagaagtgtccagcgacagcttctgggaggtcgggaactacaagcggactgtgaagcggatcgacgatggccaccgcctgtgcagcgacctcatgaactgcctgcatgagcgggcgcgcatcgagaaggcgtatgcgcagcagctcactgagtgggcccggcgctggaggcagctcgtggagaaagggccccagtacgggaccgtggagaaggcctggatggccttcatgtccgaggcagagagggtgagcgagctgcacctcgaggtgaaggcctcactgatgaacgatgacttcgagaagatcaagaactggcagaaggaagcctttcacaagcagatgatgggcggcttcaaggagaccaaggaagctgaggacggctttcggaaggcacagaagccctgggccaagaagctgaaagaggta

SEQ ID NO: 2921 - DNA, 3250 bp, Homo sapiens
  source 1..3250: mol_type = genomic DNA
gagtcaggaatggagagaagggtaatggttttacctcttattgtggaaacctgttgagatcacagagaatatactgacggcataaaagggcagaaccatagcagggtgcgcgctgctgtagttgccttccatggatctataggagagcaagtcctccaggagaagaagtcctcaccagtgaacggagacctctctgaactaaggataccatggccacgtcagccccactacggagcctggaagaggaggtgacctgctccatctgtcttgattacctgcgggaccctgtgaccattgactgtggccacgtcttctgccgcagctgcaccacagacgtccgccccatctcagggagccgccccgtctgcccactctgcaagaagccttttaagaaggagaacatccgacccgtgtggcaactggccagcctggtggagaacattgagcggctgaaggtggacaagggcaggcagccgggagaggtgacccgggagcagcaggatgcaaagttgtgcgagcgacaccgagagaagctgcactactactgtgaggacgacgggaagctgctgtgcgtgatgtgccgggagtcccgggagcacaggccccacacggccgtcctcatggagaaggccgcccagccccacagggaaaaaatcctgaaccacctgagtaccctaaggagggacagagacaaaattcagggcttccaggcaaagggagaagctgatatcctggccgcgctgaagaagctccaggaccagaggcagtacattgtggctgagtttgagcagggtcatcagttcctgagggagcgggaggaacacctgctggaacagctggcgaagctggagcaggagctcacggagggcagggagaagttcaagagccggggcgtcggggagcttgcccggctggccctggtcatctccgaactggagggcaaggcgcagcagccagctgcagagctcatgcaggacacgagagacttcctaaacaggtatccacggaagaagttctgggttgggaaacccattgctcgagtggttaaaaaaaagaccggagaattctcagataaactcctctctctgcaacgaggcctgagggaattccaggggaagctgctgagagacttggaatataagacagtgagcgtcaccctggacccacagtcggccagtgggtacctgcagctgtcagaggactggaagtgcgtgacctacaccagcctgtacaagagtgcctacctgcacccccagcagtttgactgtgagcctggggtgctgggcagcaagggcttcacctggggcaaggtctactgggaagtggaagtggagagggagggctggtctgaggatgaagaagagggggatgaggaggaagagggagaagaggaggaggaggaagaggaggccggctatggggatggatatgacgactgggaaacggacgaagatgaggaatcgttgggcgatgaagaggaagaagaggaggaggaagaggaggaagttctggaaagctgcatggtgggggtggctagagactctgtgaagaggaagggagacctctccctgcggccagaggatggcgtgtgggcgctgcgcctctcctcctccggcatctgggccaacaccagccccgaggctgagcttttcccagcactgcggccccggagagtgggcatcgccctggattatgaagggggcaccgtgactttcaccaacgcagagtcacaggaactcatctacaccttcactgccaccttcacccggcgcctggtccccttcctgtggctcaagtggccaggaacacgcctcctgctaagaccctgagccctgacatctgcccccagccccaaccctcagatgcttcacttctttggaattccaggactctcaatggggggacgggatgcctggcctaagcacctggagcaggggaccccatatccactggtagccacctccccattgctgtggccccctgaaatctcactcagtgctgttgctccatctactgccctaatggggctcttttcccacctcctgctggtttcccgagggaacttctgaccctggagtccatgagggctcctttcctttttgaccacgaccttggccccagctctgcactctctggaataagggcccgatgcagcattttcttgcccagtgtggcaagacctcagaaaaaccagtcaattacgcctaagatcattttgctgtccttaaaccccccaggttccttcttgcacaaatccactctgctgcccaccttccctggcattttaaacagacctaccccaccccaactcagagttaagcatacatggcaatgctgaaaataaacaaaatccactgaggcttcccaggccatttaaagcctggagtaccagcgcatatcatctcatggggtccagagtggagtccaggcttctctgaaaccagggctgagcatatttccatagccaaggaggtgggactccctggagctatctgtggtcttagggaaggatccagacatacacggctttggggtacaagctgtgatcactgatcaataaattatctctagattggtccttgtgaggggagttttaagaatccagaacatcttgctcttgatcagcacatccaaaaacaccaagacaaacatccagtggagcagaacctctcctgcctcgggagttctgaccaggttccccagcagggtgttaagcctctgtctctggccctaccagcatccaggttccactttcctaggagagagtggagatgggaagacagggaaaggaaggcagcaggaggccacaagcccaccaggtcttcatgtcaagagagggagtaacatgtcttctcattgcccacggacccaacctctgtccaggtgcccctcatcatcacagtttaacacaagctcccctgctccagccaaattgatctcccagtcttgtccttacccattccaagtgctctgccagcccctgttcatccaagttttaagtcctccaccctgttctaagagactgttccaacggctctgggcctcagtggtcacttgaccaccattgtctcagagctgcccactttgtgtgtgtcacatgctgcctgagtcacacgtacatcttatttctgcctctagttttgtaagctcctggagggcggataacatcttatactactcttgtattctcatggcacctagtgcagtgctgggcacagagtaggtgctcaataaagacttgttgaatgaa

SEQ ID NO: 2922 - DNA, 3905 bp, Homo sapiens
  source 1..3905: mol_type = genomic DNA
ggggtctcggcgatcgctgctcctcctcctccttctcctcctcttttttctcctccgcctcctccccccgccgcctcgccaccgccgcggctagggctggaggcgccgctgtcattcctgtgccggaggaaccggcgctgccggtgcctgggggtcggggcgcgggcgaagccgggccgcggaggacacaacaggtagagccgggggtgcccggccgcgcgccccccgcgcatcatgcagctctttgtcacctctctcgcccccaggccaaaatcctgagcatgatggaagacaataagcagctcgcgctccgcatcgatggggcggtccagtcggccagccaggaggtgaccaacctgcgagccgaactcacggccaccaaccggagactggcggaactgagcggcggcggcggccccggcccgggcccgggagccgcggccagcgcctcggcggcgggggactcggcggcgacgaacatggagaacccccagcttggagcgcaagtgctcctgcgggaagaagtgtcgcggctccaggaggaagttcaccttctccggcagatgaaggagatgttggcgaaggacctggaggagtcgcagggcggcaagtcctctgaggtcctctcggccaccgagctcagggtccagctggcccagaaggagcaggagctagccagagccaaagaagccttgcaggccatgaaagctgatcggaagcgcttaaagggcgagaagacagacctggtgagccagatgcagcagctgtatgccacactggagagccgcgaggagcagctccgagacttcatccgcaactatgagcagcaccgcaaggagagcgaggatgcggtcaaagcgctggccaaggagaaggacctgctggagcgtgagaagtgggagctgcggcgccaagccaaggaggccacagaccacgccacggcactgcgctcccagctggacctcaaggacaaccggatgaaggagctggaggccgagctggccatggccaaacagtccttagctacgctgaccaaggacgtccccaagcggcattccctcgccatgccgggcgagacggtgctcaatggcaaccaggagtgggtggtgcaggcggacctcccgctgaccgcagccatccggcagagtcaacagactctctaccactcacacccccctcaccctgcggaccggcaagcggtcagggtgagcccctgccactcccggcagccctctgtcatctccgacgcatctgccgccgaaggcgaccggtcgtccacaccgagcgacatcaactcccctcgacaccggacacactccctctgcaacggcgacagtcccggcccagttcagaagaacctgcacaaccctattgtacagtcactagaggatcttgaagaccaaaaacggaaaaagaagaaagagaagatgggattcggctccatctcccgcgtcttcgccagagggaagcagcggaagtccctcgaccccggcctctttgatggtaccgcccctgattattacatagaggaggacgcggactggtgatacgcgctcccctgcgcctgctgcccgcaggcgtgtctgtgcgtgtgggcgtgtgtgcaagcgagcgtgggtgcgcgtgtggccgtgcgtggggtgcgtgtgcacgtgtgcgctggcacacatgggtgctgggtgtggccgagcgcctctaacaagtgaaaacacgagtgtgaacctctctcccctgcgtcgccacctctgtaattgatgtacataccgcaaaccgtgtgtgaacctgtcaactctctgtcgtctttggagcgatacagttgtgttgttaatctggtttattatttttcttcagtgtttggtttttctttttctttttgtttggttcgtcggtttgtttttgtttttgtttttttccccctttctcctcccctcctcctttttatgaaacttgaaaacttgaaggactgctgtgtatttgtaaataacaaaactattgtgcactctgtgcttgtaaatgtccctcgtccaaaccgctactcctggagcccgtctggcagaggatgtggtctgtttttgatgtcccccctcccgcccccctggtgtgaacgtgtgggaccagaccctgtcctgggggtgcgcccaagtcactttaaccacaaaacgccatcgtcgtcagggtaagctctgctctctacaaagactcgcgagccgggccaaggggccttgtcttggctgggtttgtcagaggtcaaaccggctcttttaaacggcctaccagtttttaaattgcattgccgtttctttctttatgaaaaaaaagaaaaaaagaaaattgtttcatttaatttatttgcacaaatgctgaaaacttattctatctaaattattacataaatattggaatgtctatttttccatggggtgggcgggaggtgggtgtctctgttgacttgtctgttctgttaccatgctgctacccaactgtgcaaagtagtttagggtggccagaacccagggaccattggatttcaaagcttgctttttctgttggttcttctctctccttctctctctgtctctcccattctcctgcccatgcatgaaaggatcctccaccttcttcccacccagagctccctccaggcctttctctatatatttatttatctgacatacagaacacgactttagtgagcagagtgctgacagtcatggtccccttctttgggtctgtcttttgagagaggttgagttcagggcaagacagcctgccacacatccaagggtacgaccagtgggaccctggcctgagtctgttctccgaggggcctccagcagcttctgttcctccctgcagctgtgtctttcttgtcctgggtttaggatgcaggtgggccaggcaggtgttgttaggggaggcacccacttcaaaaggagggccacagtggggacacagagtccagcacctgagccctccaccctccccattctggttggttccatcagccacacttagaatctcccaggatcccttggactccgtcccccaacttgtcacagcagcctgagcctacccaccccaggagacaagagctggcaggaacatctgcctatatggggggtggcgttggccccaaagaggcttcaccagcaaaggaactgtgtgtattttaatgccaggggacggaggatgtgtgagctgttcagcaaggtctgcccaaggcctaaaactcaatttccttattcttttgcttctgctcgtccttaacaactaacagctcaacccacacctctagacaacagtagtcgtgctttctgctaacggtgacattttcagctcttaaaaagaagcaaggagattttcaaatgctagagtatctctatcagaaggcataggacattgtgtccaaagtctcaagaacaaacaacactttccttctgacctggtccaaaagtcagcaaacagcaagcaggcagaggccctcataaggacttttctgtcctcctttgaccaaactgtttaaccgagcctaggggtgacggggagcgacccaagctggcatctttctctacggagacagattttagaaaatacttttcttgcccatgaatttcttttctggttgatttttatcattttccctttacttacaagaaaataagattgcaaccactcctgctaatgatttagtagttccttttcatttcagtttttgtaaattaggagataattctaagagttactaaaggatgatttatttaagagaactacgtcaaatagcgaatgagttatgggtaacattagacgaaaataacctttcccgtgggaaaggtttctcgaaggcatggatgcaaatataaaatattaaaaaaaatctaaataaagcttattttaaaatatgatcg

SEQ ID NO: 2923 - DNA, 692 bp, Homo sapiens
  source 1..692: mol_type = genomic DNA
gcgggttggagcggaagcgcacgcctgctaggatcagcggtggtggttccgcgatggtaggcggcggcggggtcggcggcggcctcctggagaatgccaaccccctcatctaccagcgctctggggagcggcctgtgacggcaggcgaggaggacgagcaggttcccgacagcatcgacgcacgcgagatcttcgatctgattcgctccatcaatgacccggagcatccactgacgctagaggagttgaacgtagtagagcaggtgcgggttcaggttagcgaccccgagagtacagtggctgtggctttcacaccaaccattccgcactgcagcatggccacccttattggtctgtccatcaaggtcaagcttctgcgctcccttcctcagcgtttcaagatggacgtgcacattactccggggacccatgcctcagagcatgcagtgaacaagcaacttgcagataaggagcgggtggcagctgccctggagaacacccacctcttggaggttgtgaatcagtgcctgtcagcccgctcctgagcctggcctttgacccctcagcctgcatactggtatcctggtcccagctcctgccagggctgttaccgttgttttcttgaatcactcacaatgagaaactaacattttgctttttgtaataaagttaatttatattcagttcccagc

SEQ ID NO: 2924 - DNA, 797 bp, Homo sapiens
  source 1..797: mol_type = genomic DNA
ggctctttcccttagtaacagcttttaccttctgcctcaattcctctccccgctcgcgcccttcccccgcgcgccgcctccccccgccgccggccgcgtgcgcccccgcccctccccccgcggcgggagcacctccgctcgccacctggggacccgcgccgcgctccccgcccccgcccgcccggcgcccatcccccgcgccctccgctcgctggggttataattgcctctcaccccccggaggggttattttgggggtggttggaggcggtggcggcggcggcgaggaggggaatttccttgtgcctccattcccgggaggggggagcggcgttggaggccaccgtttccagcatcaacaacagcaacttgtgattggcggtgaccggatattcagttgcacatccccacatcaatgcactgccaatgatgaggaaactgaggccttggactagaacagaggtctcctgactcagtccaggactctttctattacatcatgcggcctgatatttgtctttatggaactcagcaacatcacatacaggggttatatcctgtgttgtgacctcatggtttaagtgggaataaagatgagtataagcagtgatgaggtcaacttcttggtatatagatacttgcaagagtcaggattttctcattcagcatttacctttggtatagaaagccatatcagtcagtccaatataaatggtgccctcgtcccacccgctgcattgatttctatcatccagaaaggtctacagtatgtagaagcagaagttagtattaatgag

SEQ ID NO: 2925 - DNA, 1664 bp, Homo sapiens
  source 1..1664: mol_type = genomic DNA
gtgcgcagcggcgtatgtggggccgtgtgcagacccgcgtgtggcgcaggcaaggaccctcaaaataaacagcctctaccttgcgagccgtcttccccaggcctgcgtccgagtctccgccgctgcgggcccgctccgacgcggaagatctgactgcagccatgagcagcaatgagtgcttcaagtgtggacgatctggccactgggcccgggaatgtcctactggtggaggccgtggtcgtggaatgagaagccgtggcagaggtggttttacctcggatagaggtttccagtttgtttcctcgtctcttccagacatttgttatcgctgtggtgagtctggtcatcttgccaaggattgtgatcttcaggaggatgcctgctataactgcggtagaggtggccacattgccaaggactgcaaggagcccaagagagagcgagagcaatgctgctacaactgtggcaaaccaggccatctggctcgtgactgcgaccatgcagatgagcagaaatgctattcttgtggagaattcggacacattcaaaaagactgcaccaaagtgaagtgctataggtgtggtgaaactggtcatgtagccatcaactgcagcaagacaagtgaagtcaactgttaccgctgtggcgagtcagggcaccttgcacgggaatgcacaattgaggctacagcctaattattttcctttgtcgcccctcctttttctgattgatggttgtattattttctctgaatcctcttcactggccaaaggttggcagatagaggcaactcccaggccagtgagctttacttgccgtgtaaaaggaggaaaggggtggaaaaaaaccgactttctgcatttaactacaaaaaaagtttatgtttagtttggtagaggtgttatgtataatgctttgttaaagaaccccctttccgtgccactggtgaatagggattgatgaatgggaagagttgagtcagaccagtaagcccgtcctgggttccttgaacatgttcccatgtaggaggtaaaaccaattctggaagtgtctatgaacttccataaataactttaattttagtataatgatggtcttggattgtctgacctcagtagctattaaataacatcaagtaacatctgtatcaggccctacatagaacatacagttgagtgggagtaaacaaaaagataaacatgcgtgttaatggctgttcgagagaaatcggaataaaagcctaaacaggaacaacttcatcacagtgttgatgttggacacatagatggtgatggcaaaggtttagaacacattattttcaaagactaaatctaaaacccagagtaaacatcaatgctcagagttagcataatttggagctattcaggaattgcagagaaatgcattttcacagaaatcaagatgttatttttgtatactatatcacttagacaactgtgtttcatttgctgtaatcagtttttaaaagtcagatggaaagagcaactgaagtcctagaaaatagaaatgtaattttaaactattccaataaagctggaggaggaaggggagtttgactaaagttctttttgtttgtttcaaattttcattaatgtatatagtgcaaaataccatattaaagaggggaatgtggaggactgaaa

SEQ ID NO: 2926 - DNA, 2098 bp, Homo sapiens
  source 1..2098: mol_type = genomic DNA
ggggaatctcacagccctcacctacctcaacctcagccgaaaccagctgtcgctgctgccaccctacatctgccagctgcccctgagggtcctcatcgtcagcaacaacaagctgggagccctgccccctgacatcggcaccctgggaagcctgcgacagcttgacgtgagcagcaacgagctccaatccctgccctcggaactgtgtggcctctcttccctgcgggacctcaatgtccggaggaaccagctcagtacgctgcccgaagagctgggggacctccctctggtccgcctggatttctcctgtaaccgcgtctcccgaatcccagtctccttctgccgcctgaggcacctgcaggtcattctgctggacagcaaccctctgcagagtccacctgcccaggtctgcctgaaggggaaacttcacatcttcaagtatttgtccacagaggccgggcagcgtgggtcggccctgggggacctggccccttctcggcccccgagtttcagtccctgccctgcagaggatctatttccgggacatcggtacgatggtgggctggactcaggcttccacagcgttgatagtggcagcaagaggtggtctggaaatgagtcaacagatgaattttcagagctgtcattccggatctcagagctggcccgggagccccggggacccagagaacgcaaggaggatggctcagcggacggagaccctgtgcagattgacttcatcgacagccatgtccccggggaggatgaagagcgaggcactgtggaggagcagcgaccacccgaattaagccctggggcaggggacagggagagggcaccaagcagcaggcgggaggagccggcaggggaggagcggcggcgcccggacaccttgcagctgtggcaggagcgggaacggcggcagcagcagcagagcggggcgtggggggccccgaggaaggatagcggctcgcctaagtccagtgcctcccaagcaggggctgcagcggggcagggagcccccgcccctgcccctgcctcccaagagccccttcccatagctggaccagcgacagcacctgctccacggccacttggctccattcagagaccaaacagcttcctcttccgttcctcctctcagagtggctcaggcccttcctcaccagactctgtcctgagacctcggcggtacccccaggttccagatgagaaggacttaatgactcagctgcgccaggtccttgagtcccggctgcagcggcccctgcctgaggacctggccaggctctggccagtggtcatcctgtgccagctggccaaccagctacggccgcgctccgtgcccttcatccatgtgccctcccctgctgtgccaaaactcagtgccctcaaggctcggaagaatgtggagagttttctagaagcctgtcgaaaaatgggggtgcctgaggctgacctgtgctcgccctcggatctcctccagggcactgcccgggggctgcggaccgcgctggaggccgtgaagcgggtggggggcaaggccctaccgcccctctggcccccctctggtctgggcggcttcgtcgtcttctacgtggtcctcatgctgctgctctatgtcacctacactcggctcctgggttcctaggccccaaaatcggccctccctcacccctttcccttcctctctatttataaggtccctgctccacccgaccccacctgcggtgccttcagccccaaccaaagacactagtgcacccccttcacagacactgacctcagaggccccactctggtgcccccagaccctgggcccccagcctctggcctccctccagtagccccacgagtccccacctctcagtgctgacggtgccttcatgtccccgccggccctgcccctgccctctgtaccccgtgaggggtggcaggagctggagtctcccccttcctcctgtgccctccccttccccccccaacagctgctatgggggggctaaattatctctattttgtagagaggatctatatttgtaggggttcggggcccaggccgggtccctatctctgtgtataaactgtacagaccgtg

SEQ ID NO: 2927 - DNA, 2371 bp, Homo sapiens
  source 1..2371: mol_type = genomic DNA
acctgctgggagctggaggaggcgcggagcgaagccggccctgccagccacgcggagaagcagaggcaggtgagcgcgatgcagccggcgccgggtctggggctcggggactcctccctgcaccgctacctggacggcgacttctggagcctcaagaacgagctgcgcggactcctcggcggcgcccgctcttccggcaaaggtatgatttaagcttggatgaaatgagagctttgacagttcagagagtgaagtttgccatggacctgcctctgttaaaacgtgcaggtcaggatctggcagagaaaacaaagaattttgtcagccgaagccttgtcataggagaagtcctctccatggcggacatggccacaggagtgaagtgcggaataatttattggctatttggtggtgctatcaggaatctcggaagccctgaacatgttactaagtggtttcagccactccaggagcagaaatacactgggatgtttgcaatgaccgagaggggccatgggagcaacgcgagagggatccagaccgaagccacctttgacctctctgcccaggagtttgtaattgacacgccgtgtgaaaatgcggagaagatgtatattggaaatgccatgtacgggaattatgcagctgtctttgcccagctcatcatagatggaagatctcaagggccccactgtttcatcgttcctgtccgggatgaaaacggaattgtacccaggagtcacagctattgatatgatgtacaaggagggtctgcatggtgtggacaatgggatattaatatttgacaaggttcggatacccagggagaacctgctggataagtttggttccgtggctccagatggacagtaccattcgcctattaggaacaagagtgcaagattcaatgccatgctggcagcactgaccccttcgagattagctgtggctttccaagctatgggtgccatgaagcttgggttgacgatagccattcgctatagccacagccggaggcagtttgggcccaaaaccaaggaagaggtgaagatcattgagcaccaaacacagaccctgcggctgatgccccacctggccacagccttggccctgaccttcgtcagcaggtatgctggggccctcctggatgaggatgtcttccagggaaaggagctggtcaacagtcgctcgctgcaggctctggtggcggggctgaaggcctacagcacctgggagaacatccgctgcctgcaggactgccgcgagtgcactggaggcatggttgtggggcgggaactgctggcccaatacaccaaacagtatgaagaaaaaccactctttggcctgctccaaaactgggctgaatctgtgggggacaagctgagaaccagtttcctggcatttaacatggacacagttgatgatctcgcctttctgttgaaagcagtgaaatttcgtgaaagggttcttcagcggggtttggtggccagaatttattataaggtaaagaccaagaaggaggattttttccatgcctggaactcgtgtctgcaccacgtggcttctctgtccctggcacacactcaccgagttaccttagagcagttctccctagcagtgaagagctgtcctgaccaagaggaccagactttgttaatgaagttttgtctgttgtatggaaccaagctggtgtttcaggagcgggcctggtatttagaacataaatacttgactcccatggccagcacgaggatcaggaatcagttgctggatttgtgcgactcggtgaaggatgatgcccggagggtgatctcgacctttaacattccacacacctacctccacgcaccaatcgccggaatctccaacccgcgggccgcgtgggctttctaccctgcaccgctgcagccgcggccacgggaagaggcgcgctcccggcggcccaagctgggagccaagctctaacgggtgtggcgggaagtgtggtggcccgccagcagctgccacgacgctcgctccaccgacgcccagagctgtggccgaggccgggggctggcacccgctgggccgccactctcggggattttggtggcaaagcggaggtcccgccgaggctggcgaggtgcgcggctggctgctaggaaagagatccagacggtcgcctggtgcgctggatccctgtgccctttccctgaaacccagcctggcctgactgcaacctctcccaacttcagtgccggatcccctagacaatcagggtgggctccccgctgcgagcgcgccccacagccgggtgccgccaaaggtctcctgctgttagcggtgactcacattcccagtgatttagaaaaactgtggtgccgagtgaaag

SEQ ID NO: 2928 - DNA, 2718 bp, Homo sapiens
  source 1..2718: mol_type = genomic DNA
gtatgaggaggaggaggaggaggatgtgaagatggcggagctgcagatgctgctggaagaggaaatcccggggggccgccgggccctcttcgacagctacacaaatctggaacgggtggccgattactgcgagaacaactacatacagtcagcagataagcagagagccctagaagaaaccaaagcctacaccacccaatccttagcaagtgttgcctatctgataaacaccttggccaacaatgtcctgcagatgctggatatccaggcatcccagctacgaaggatggaatcttcaatcaatcatatttcacaaacagttgatattcataaagagaaagttgcaagaagagaaattggtattttgactaccaataaaaacacttcaaggacacataagattattgctccagccaaccttgaacgaccagttcgttatattagaaaacctattgactatacaattctagatgatattggacatggagtaaagtggttgcttagatttaaggtgagtacccagaacatgaagatgggtgggctgccgcgtacaacacctccaactcagaagccccctagtccccctatgtcagggaaagggacacttgggcggcactccccctatcgcacactggagccagtgcgtcctccagtggtaccaaatgattacgtacctagcccaacccgtaatatggctccctcgcagcagagccctgtgaggacagcttctgtgaatcaaagaaatcgaacttacagcagcagtgggagtagtggagggagccacccaagtagtcggagcagcagtcgagagaacagtggaagtggtagtgtgggggttcctattgctgttcctactccatctcctcccagtgtctttccagacgctgctgctgggggtgcccagacccttgctgatggcttcacttctccaactccccctgttgtttcttccactccccctacaggtcatcctgtacagttctacagcatgaataggcctgcctctcgccatactcccccaacaatagggggctcgttgccctatagacgccctccttccattacttcacaaacaagccttcagaatcagatgaatggaggacctttttatagccagaatccagtttcagatacaccacctccaccgccacctgtggaagaaccagtctttgatgagtctcccccacctcctcctcctccagaagattacgaagaggaggaagctgctgtggttgagtatagtgatccttatgctgaagaggacccaccgtgggctccacgttcttacttggaaaaggttgtggcaatttatgactatacaaaagacaaggaagatgagctgtcctttcaggaaggagccattatttatgtcatcaagaagaatgacgatggttggtatgagggagttatgaatggagtgactgggctttttcctgggaattacgttgagtctatcatgcattattctgagtaaagctcagcagggctgtgcttgcctcacaggaatagtcaggtcttcccagattatctgaaggccctggggattccactccagtaaagtagaatgaaggatacaaatgataaaaattacacttttttttttggtttattccccagtattaaaaacaaagcaagctgagtctgaacaaatggatctttctgccatcatttgtacaatgctgagctgtctggattgaaataaaatgaccatttttatgtatgtcaaaggtataacagcataactgtgtagccaaaacaaaatcagattaagactgattcagaaaaatctgggatctttctcaggaatactgtatacccttgggatttctcctcctgcagaatctgtggcattggatgttcttcattgcctgtgctaaggggttaacctcatggcccagtgggtaccctagccccttcttttcttccacttgtatgaagaggagggaaccaacatttaaataccacacttaaccatttttacaattatttcagatggcttttttcctctgtgacactgtaaattctgcattctctcagcacttgagtgcaccaaacgagtgaatgctgaactcacttgcatcccttcatgtttctgtttgtggattataaggatgatgaaatgtgaaagtctcccaacactctgagggtggtgaacgattgccacccgtttgattttaatgtgctgctgcatgagactgcattgttgctaatggccagtgtacccagatgtgaagtgtggtaggctggttcatatgtggaggtgggtgtgtgaagctagacacgaaggtccctaaggttctgaagagacttgaactgtggaaatgctcttagcaggcatcccgaacccctgcttcggtgctgttttgaggagtaggatcttggagttcagaccaactatgactatcatttccttcactatctagaaaaacgctattctactttggaagagaatagtagttattttcaagtctcctgacagtcactgggagtacaaggtttgctaatgtgctctctggacgttattaatggccagtattagttgctgctgtattactgactcgcttagctgtagaaagggtaatactctcctgattttgtatgattggactcttaagtagctgctgttagtcagaattaaaacccatctcagactaagaatataatgaataagattaataggccaaaatatgtatctaatcacattgataaaaattaata

SEQ ID NO: 2929 - DNA, 3922 bp, Homo sapiens
  source 1..3922: mol_type = genomic DNA
gcggtacgggggtggtgccgcgctcctggccccgcgcgggcggacggcggaggcgcctcccagcctgctatgggatggatgaagaagagaaccactatgtctcgcagctcagggaagtctacagcagctgcgacaccacggggactggctttctggaccgccaggagctgacccagctctgccttaagcttcacctggagcagcagctgcccgtcctcctgcagacgcttctcggaaacgaccatttcgccagggttaactttgaggaatttaaggaaggttttgtggctgtgttgtcttcaaatgctggtgttcgcccctcagatgaagacagtagttctttggaatcagctgcctccagtgccatccctccaaagtatgtgaatggttctaagtggtatggccgtcggagccggcctgagctatgtgacgctgccacagaagccagacgcgtgccggagcagcaaacccaggccagcctgaaaagtcacctctggcgctcagcgtctctggagagcgtggagagtcccaagtcagatgaagaggccgagagcactaaagaagctcagaatgaattatttgaagcacaaggacagctgcagacctgggattctgaggactttgggagcccccagaagtcctgcagcccctcctttgacaccccagagagccagatccggggcgtgtgggaagagctgggggtgggcagcagcggacacctgagcgagcaggagctggctgtggtctgccagagcgtcgggctccagggactcgagaaagaggaactcgaagacctgtttaacaaactggatcaagacggagacggcaaagtgagtcttgaggaattccagcttggcctcttcagtcatgagcccgcgctacttctagagtcttccactcgggttaaaccgagcaaggcttggtctcattaccaggtcccagaggagagcggctgccacaccaccacaacctcatccctcgtgtccctgtgctccagcctgcgcctcttctccagcattgacgatggttctggcttcgcttttcctgatcaggtcctggccatgtggacccaggaggggattcagaatggcagggagatcttgcagagcctggacttcagcgtggacgagaaggtgaaccttctggagctgacctgggcccttgacaacgagctcatgacagtggacagtgccgtccagcaggcagccctggcctgctaccaccaggagctgagctaccagcaagggcaggtggagcagctggcaagggagcgtgacaaggcaaggcaggacctggagagggccgagaagaggaacctggagtttgtgaaagagatggacgactgccactccaccctggagcagctcacggagaagaaaatcaagcatctggagcaggggtaccgggaaaggctgagcctcctgcggtctgaggtggaggcggagcgagagctgttctgggagcaggcccacaggcagagggccgcgctggagtgggacgtggggcgcctgcaggctgaggaggctggcctccgcgagaagctgaccctggccctgaaggaaaacagtcgcctacagaaggagattgtggaagtggtggaaaagctttcggattcggagaggctggccctgaagctgcagaaggacctggagtttgtgctgaaggacaagctggagccacagagtgcagagctcctggcccaggaggagcggttcgcagcagtcctgaaggaatacgagctcaagtgccgggacctgcaggaccgcaacgatgagctgcaagctgagctggaaggcctgtgggcgcggctgcccaagaaccggcacagcccctcatggagcccggatgggcgcagacggcagctccctggactcggcccagcaggcatttcattcctgggtaattctgctccagtgagtatagaaacggagctgatgatggagcaggtaaaggagcattaccaagacctcaggacccagctggagaccaaggtaaattactacgaaagggaaattgcggcactgaaaaggaactttgagaaggagaggaaggacatggagcaggctcgcaggcgcgaggtcagcgtgctggagggtcagaaggccgacctggaggagctccacgagaagtctcaggaggtcatctggggcctgcaggagcagctgcaggacacagcccgcggccccgagcctgagcagatgggcctggcaccctgctgcacccaggcactgtgtggcctggccctgcggcatcacagccacctgcagcagatcagactggagttccatagactttctgaagaaaacactttgttgaaaaacgatctgggaagggttcggcaagagcttgaagctgcagaaagtactcacgatgcacagaggaaggaaattgaggttttaaagaaagacaaggaaaaggcctgctctgagatggaggtgctcaacagacagaatcagaactacaaggatcaattatcccagctcaatgtcagggttcttcaactgggacaggaggcttctacccaccaggcccaaaacgaggagcatcgtgtgaccattcagatgttaacacagagcctggaggaggtggttcgcagtgggcagcagcagagtgaccaaatccaaaaacttagagttgaacttgaatgcctgaatcaggaacatcagagcctgcagctgccatggtcagagctgacccagacccttgaggaaagtcaagaccaggtgcagggagctcacctgaggctgaggcaggcccaggcccagcacttgcaggaggtccggctggtgccccaggaccgtgtggccgagctgcatcgcctgctcagccttcagggagagcaggccaggaggcgcctggatgcacagcgggaagaacatgagaaacagctgaaagccacagaagagcgggtggaagaggcggagatgattctgaagaatatggaaatgctcctccaagagaaagtggataagctgaaggagcagtttgaaaagaacacgaagtccgacctgctgctgaaggagctgtacgtggagaacgcccacctggtgagagcacttcaggccaccgaggagaagcagcgaggcgccgagaaacaaagccgcctcttggaagaaaaagttcgcgctctcaacaaactcgtcagtaggattgcccccgcagccctctctgtgtaaagacagattattttctaggattcattcgaaagcacatcttttaaattaagccactgtgctgccttagattccgtgggtcatgagccatgagtcctgggacatctgaggattgggattctttgttcaccccgcagatagttaatgaatggtctgccctgggcaagatggaggtgggggctgggggaatatgcatgttgcagaagccggcgtttttattagcggtcctgagtaatttcccttggcaaaattcccagttttgccactctctggagccagatcctgggagctgtcagcaaggagcaggtaagtgagcagttatggacagcactttccatgtggtgcttccgaccctggctgtcagagtgaaatgtaaagtcagggctctgtacagttttgccatttcactgttctgctttaagcttagcttattagaactcttggtggagggtgcgtacacacattccagaaaaggcttcactcgctgggaacgtcaacccagcgagaaaggaggggaagccccttctccggggaccttatctgtggactcaggaatgatggtgtttattgcaaatgcacaatctttttcccattgaaatgtcatcacactggaaattgtactatatgtaaaaaaaaaaaaaagtatagttttatatttgaaatgtatgcaaattatggccatatggctgattggaatgtactactgtaatataaaaagtcactgtatttgcaataaattcttttctatt

SEQ ID NO: 2930 - DNA, 627 bp, Homo sapiens
  source 1..627: mol_type = genomic DNA
tgctgtggctgctccggaggctgtggctccggctgtggaggccgtggctccggctgtgggggctgtggctccggctgtggaggctgtggctctggctgtgggggctgtggctccggctgtggaggctgtgggggctgtggctccggctgtgcgggctgtgggggatgcaaagggggctgtggctcttgcgggggctccaagagaggctgtgtctcctgtggggtgtccaagggggcctgtggctcctgtggggggtccaaggggggctgtggctcctgtggggggtccaaggggggctgtggctcctgtggggggtccaaggggggctgtggctcctgtggggggtccaaggggggctgtggttcttatggctgctcccagtccagctgctgcaagccctgctgctgctcctcaggctgtgggtcatcctgctgccagtccagctgctgtaagccttactgctgccagtccagctgctgtaagccctactgctgccagtccagctgctgtaagccctgtagctgcttctcaggctgtggatcatcctgctgccaatccagctgctacaagccctgctgctgccagtccagctgctgtgtccccgtgtgctgccagtgtaagatctga

SEQ ID NO: 2931 - DNA, 1710 bp, Homo sapiens
  source 1..1710: mol_type = genomic DNA
agttccgacgaaaaatggcggggtctcctgagttggtggtccttgaccctccatgggacaaggagctcgcggctggcacagagagccaggccttggtctccgccactccccgagaagactttcgggtgcgctgcacctcgaagcgggctgtgaccgaaatgctacaactgtgcggccgcttcgtgcaaaagctcggggacgctctgccggaggagattcgggagcccgctctgcgagatgcgcagtggacttttgaatcagctgtgcaagagaatatcagcattaatgggcaagcatggcaggaagcttcagataattgttttatggattctgacatcaaagtacttgaagatcagtttgatgaaatcatagtagatatagccacaaaacgtaagcagtatcccagaaagatcctggaatgtgtcatcaaaaccataaaagcaaaacaagaaattctgaagcagtaccaccctgttgtacatccactggacctaaaatatgaccctgatccagttctcaacgggaatgctttcaacttttccccattcaacatgatgttggctgtggatttgtcatatatggtttttattacttcgagcccctcatatggaaaatttgaaatgcagaggggaaacagtagcaaaggagatcagtgaagccatgaagtccttgcctgcattaattgaacaaggagagggattttcccaagttctcaggatgcagcctgttatccacctccagaggattcaccaagaagtcttttccagttgtcataggaaaccagatgctaaacctgagaactttataacacagatagaaaccacaccaacagagactgcttccaggaaaacctctgacatggtactgaaaagaaagcaaactaaagactgcccccagagaaaatggtatccattgcggccaaagaaaattaatcttgatacatgagctctttctgtttattttgggagttgaaaataggcaccatcaacatttagattacagcctaattaatacctagataagacttcatttgaaataagaaataactcttttactagtgattcatttatacagatatagtatctctgtgcggggatatgatataatattgtatttccttactgttttatctattgtaaataaaaagcattttaaaaagtattgacacaaagcccatcagtgggcattaaaaatattaaaagtgcagacttttactgtccttaagtgccatcaactctcagctcccttgtagcttttgtgggatttaacaagtaacaaattctgttgtgtttccctggtatacatctttctaggaaaaaaaaaaaaaagagagagagctgtataatgatttttcgtttacatgctgaaaagtaattatcagttctgcacagcagcagatgcagggtttttttttaaagatgtagtttgatttatcaaattaatgtgctgatgataatactggctttgactttgttactccatgttcagctaatttaggtttgtgagattaactttaggattttttgttgtgtaagacaatgataactattatttgtgcaacattactctttgaaataaaaattggcatgtagccaatgtttcctgcccacactcacttttttctatagaccattaacataatttgacttggaactaatggtttctttttagggtttcttatttatttctttacaaatcattccagttcaa

SEQ ID NO: 2932 - DNA, 3990 bp, Homo sapiens
  source 1..3990: mol_type = genomic DNA
agcctcgtgtaacaatacttgtgccctggctgcagtctgcggggccgcgccctgggcctgccgcattcggccaacgcacagcatctgaggagggttatgaccatctggcagatgcagaaacaggcccagagagggagccccgcgcggactcactctatgatgtccctgtcggtgcggccgcagcgccgtctgctcagcgcccgggtcaataggagccagtccttcgcaggcgtcctcggcagccacgagcgggggcccaggagtttcccggtcttcagcccgccggggcccccacggaagccccccgcgctctcccgagtgtccaggatgttttccgtggctcacccagccgccaaggtgccgcagcccgagcggctggacctggtgtacacggcgctgaagcggggcctgacggcctacttggaagtgcaccagcaggagcaagagaaactccaggggcagataagggagtccaagaggaattcccgcttgggcttcctgtatgatctggacaagcaagtcaagtccattgaacgcttcctgcgacgactggagttccatgccagcaagatcgatgagctgtatgaggcatactgtgtccagcggcgtctccgggatggtgcctacaacatggtccgtgcctacaccactgggtccccgggaagccgagaggcccgggacagcctggcagaggccactcgggggcatcgcgagtacacggagagcatgtgtctgctggagagcgagctggaggcacagctgggcgagtttcatctccgaatgaaagggctggctggcttcgccaggctgtgtgtaggcgatcagtatgagatctgcatgaaatatgggcgtcagcgctggaaactacggggccgaattgagggtagtggaaagcaggtgtgggacagtgaagaaaccatctttctccctctactcacggaatttctgtctattaaggtgacagaactgaagggcctggccaaccatgtggttgtgggcagtgtctcctgtgagaccaaggacctgtttgccgccctgccccaggttgtggctgtggatatcaatgaccttggtaccatcaagctcagcctggaagtcacatggagccccttcgacaaggatgaccagccctcagctgcttcttctgtcaacaaggcctccacagtcaccaagcgcttctccacctatagccagagcccaccggacacaccctcacttcgggaacaggctttctataacatgctgcgacggcaggaggagctggagaatgggacagcatggtccctgtcatctgaatcttcagacgactcatccagcccacagctctcaggcactgcccgccactcaccagcccctaggcccctggtgcagcagcccgagccccttcccatccaagttgccttccgcaggcctgagacccccagctctgggcccttggatgaggagggggccgtggccccagtcctggcaaatgggcatgcaccctacagtcggactctgagccacatcagtgaggctagtgtagatgctgccttggctgaggcttcagtggaggccgttggcccagaaagcctagcctggggacctagcccacctacacacccagctcccacccatggagagcaccccagtcctgttcctcctgccctggaccctggccactctgccacaagctctaccctcggtacaacaggctctgtccccacatctacagaccctgccccatctgcacacctagactcagttcataagtccacagactctggcccttcagaactgccaggccccactcacaccactacaggctctacctatagtgccattaccactacccacagtgctccaagccccctcactcacactactacaggctccacccacaagcccataatctctacccttactactacaggccctaccctcaatatcataggcccagtccagactaccacaagccccacccacactatgccaagccctacccataccacagcaagccccactcatacttccacaagccccacccatacccccacaagtcccacccacaaaaccagtatgtcacctcccaccactacaagtcctacccccagtggtatgggcctagtccagactgccacaagtcccacccatcctaccacaagccccacccatcccaccacaagccccatccttataaatgtaagcccttccacttctctagaacttgctaccctctccagcccctccaaacactcagaccccaccctcccaggcactgactcccttccctgtagtcccccagtctccaattcctacactcaggcagaccctatggcccccagaactccccacccaagtcctgcccattccagtaggaaacccctcacaagccctgccccagatccctcagagtctacggttcagagtctaagccccactccctcacccccaacccctgcaccccagcattcagacctttgcctggccatggctgtccagaccccagtcccaacggcagccggagggtctggggacaggagcctggaggaggcactgggggccctaatggctgccctggatgactaccgtggccagtttcctgagctgcagggcctggagcaggaggtgacccgcctagaaagtctgctcatgcagagacaaggtctgactcgcagccgggcctccagtctcagcatcactgtggagcatgccttggagagcttcagcttcctcaatgaagacgaagatgaagacaatgatgttcctggggacaggcctccaagcagcccggaggctggggctgaggacagcatagactcacccagtgcccgccccctcagcacggggtgtccagctctggatgctgccttggtccggcacctgtaccactgcagtcgcctcctgctgaaactgggcacatttgggcccctgcgctgccaggaggcatgggccctggagcggctgctgcgggaagcccgagtactggaggcagtatgcgagttcagcaggcggtgggagatcccggccagctctgcccaggaagtggtgcagttctcggcctctcggcctggcttcctgaccttctgggaccagtgcacagagagactcagctgcttcctctgcccggtggagcgggtgcttctcaccttctgcaaccagtatggtgcccgcctctccctgcgccagccaggcttggctgaggctgtgtgtgtgaagttcctggaggatgccctggggcagaagctgcccagaaggccccagccagggcctggagagcagctcacagtcttccagttctggagttttgtggaaaccttggacagccccaccatggaggcctacgtgactgagaccgctgaggaggtgctactggtgcggaatctgaactcggatgatcaggctgttgtgctgaaggccctgagattggcgcccgaggggcgtctgcgaagggacgggctgcgggccctcagctccctgctcgtccatggcaacaacaaggtcatggctgctgtcagcacccagctccggagcctgtcactgggccctaccttccgggagagggccctcctgtgcttcctggaccagctggaggatgaggacgtgcagactcgagtggctggctgcctggccctaggctgcatcaaggctcccgagggcattgagcccctggtgtacctctgccaaactgacacagaagctgtgagggaagctgcccggcaaagcctacagcagtgtggagaagagggacagtctgcccatcgacggctggaggagtccctggacgccctgccccgcatctttgggcctggcagcatggccagcacagcattctaaactattcacccatgggttcctggtgcccctttccccccactttcagggctcaccaggcactggcagggagggtaagggctggctccagatacccctcccccacagattcctagcaatgaaaatctaatatattcttctgttgcccctggggttggagagtcagtgcctgcagtc

SEQ ID NO: 2933 - DNA, 1137 bp, Homo sapiens
  source 1..1137: mol_type = genomic DNA
agttcagcgcagcgactcggggacctggagctgacgcctagttgctatggtgacagactatggggcctttatcaaaatcccaggctgtcggaagcaaggtctggtccatcgaactcatatgtcatcctgtcgggtggataagccctctgagatagtagatgttggagataaagtgtgggtgaagcttattggccgagagatgaaaaatgatagaataaaagtatccctctccatgaaggttgtcaatcaagggactgggaaagaccttgatcccaacaatgttatcattgagcaagaagagaggcggaggcgatccttccaggattacactgggcagaagatcacccttgaggctgtcttgaacactacctgcaagaagtgtggctgtaaaggtagggtgaagcctctgccctttccacgtttctctccttgtggatggacccttttctggaagaaggaggcagcccagtgccactttgcaaaagattgtttcatgcaaccaggtgggactaaatactctctgatacctgatgaggaagaggaaaaggaagaggcaaagtcagcagagtttgagaagcctgaccctacaaggaatccttctagaaaaagaaagaaggagaagaagaaaaagaaacatagagataggaagtcatctgactctgacagctcagactctgagagtgatacaggcaagagggcaaggcacacatcaaaagacagcaaggcagcaaagaagaagaaaaagaagaagaagcacaagaagaagcacaaggagtgagagtataaagagtgtagggggtggttgagagtaagaaaccaggagccttgtgccttgagactcctggaaagactcaatagtgagaatatagcctcccaccccattaacttcgctcccatgggagatggcttcccctcatgcaacaggcaggtttgggagttagaggtcaaaagcagctgcctgaatgagttgttgtttccttatcactcctggtccctttgcaagtgaaccctgcagctcacccattcattcacccaacttccttcattcagcaggaggtcctattaccctctccagctgccactgccagagctggattcctgtaaaggagtccaggctagagccacagagactgttgt

SEQ ID NO: 2934 - DNA, 573 bp, Homo sapiens
  source 1..573: mol_type = genomic DNA
gttttggggtcgcagcggggtggcagcttgttttgccttcacgggagtagaaggaggcggcgtccggccgcggccgacggtagttcgcttccccgagagtgcgcggaggcccgggtgcgaggagggcctgtttctcttcagccctggttcattcacctcgcggaccgagggccccgccgtcaggagccggcgaccgtgccctggtgcgagctggtcttgatggtcattgtcctccagagcagtgatggaggaaataccagcccaggaagcagcagggtcaccaagggtccagtttcagtctttggagacccagtctgagtgtctgtccccagagcctcagtttgtgcaggacaccgacatggaacagggactcactgggggatttccaatttccaagcctgatgggatctcccagctggaacaggatctacaggtctttgatctggaaactaagactagagaagtcttaagagatgactgctcagatggagagaccagagaagagaacaagctgttgattcctaagcagaaaatttcggaagaagtgcattcatacaaagtgagagtaggaag

SEQ ID NO: 2935 - DNA, 4469 bp, Homo sapiens
  source 1..4469: mol_type = genomic DNA
atgagcctggagcgcgagcttcgccagctgagcaaggcgaaagccaaggcgcagagggccgggcagcggcgcgaagaggccgcgctgtgccaccagctgggggagctcctggccggccatggccgctacgccgaggctctggagcagcactggcaggagctgcagcttcgggagcgcgctgacgaccctctgggctgtgccgtggcccaccgcaagatcggagagcgcctggccgagatggaggactacccggctgccttgcagcaccagcaccagtacctggagctggcacattccctgcgcaaccacacggagctgcagagggcctgggccaccatcggccgcacccacctggacatctatgaccactgccagtcgagggatgctttgctgcaggcacaggctgcctttgagaagagcttggctattgtggatgaggagctggaggggacactggcccagggagagctgaatgagatgaggacccgcctctatctcaacctgggcctcacctttgagagcctgcagcagacagccctgtgcaacgattacttcaggaagagcatcttccttgcggagcagaaccacctttacgaggacctattccgcgcccgctacaacctgggcaccatccactggcgcgcgggccagcactcccaggctatgcgctgcttggagggtgcccgggagtgtgcgcacaccatgaggaagcggttcatggagagcgagtgctgcgtggttattgcacaggtcctccaagacctgggagactttttggctgccaagcgagccctgaagaaggcctacaggctgggctcccagaagcctgtgcagagggcagccatctgtcagaacctccagcatgtgctggcagtggtccggctgcagcaacagctggaagaggctgagggcagagaccctcagggtgccatggtcatctgtgagcagctaggggacctcttctccaaggcaggagactttcccagggcagctgaggcttaccagaagcagctgcgttttgctgagctgctggacagaccgggtgctgagcgggccatcatccacgtgtccctggccaccacactgggagacatgaaggaccaccatggggccgtgcgccactatgaggaggaactgaggctgcgcagcggcaacgtgctggaggaggccaagacctggctgaacattgcactgtcccgcgaggaggccggcgatgcctacgagctgctggccccgtgcttccagaaagcgctcagctgtgcccagcaggcccagcgtccccagctgcagaggcaggtcttgcagcatctccataccgtgcagctgaggctgcagccccaggaggcccctgagaccgaaaccagactacgggagctcagtgtagctgaagatgaagatgaggaggaggaggcggaggaggcggcagccacagcggagagcgaagccctggaggccggcgaggtggagctctcagagggcgaggacgacaccgatggcctgaccccgcagctggaggaggacgaggagcttcagggccacctgggccggcggaaggggagcaagtggaaccggcgaaacgacatgggggagaccctgctgcaccgagcctgcatcgagggccagctgcgccgcgtccaggaccttgtgaggcagggccacccccttaaccctcgggactactgtggctggacacctctgcacgaggcctgcaactacgggcatctagaaattgtccgcttcctgctggaccacggggccgcagtggacgacccaggtggccagggctgcgaaggcatcacccccctccacgatgccctcaactgtggccacttcgaggtggctgagctgctgcttgaacggggggcgtccgtcaccctccgcactcgaaaggcctcagcccgctggagacgctgcagcagtgggaagctgtaccgcagggacctggacctggagacgcggcagaaggccagggccatggagatgctgctccaggcggctgcctcgggccaagatccccacagctcccaggccttccacaccccaagcagccttctgtttgaccccgagacctctcctcctttgagcccctgcccagaacccccctctaatagcactagactcccagaggcctctcaggcccatgtcagggtctccccagggcaggcggcaccagccatggccaggcctcggaggagcaggcatgggccagccagcagcagcagcagctcagaaggcgaggacagcgcaggccccgcacggccgtcccagaagaggcctcggtgctcggccacagcacaacgggtggcagcctggacgcctggccccgccagcaacagggaagcagccacagccagcaccagccgggcagcctaccaggcagccatccggggtgtgggcagtgctcagagccggctggggcctggcccaccgcggggccacagcaaagcccttgccccccaggcagcgctcatcccggaggaggagtgcctggccggggactggctggagctggacatgcccctgacccgcagccgccggccccgcccccggggcactggagacaaccgcaggcccagtagtacctctgggtcggacagtgaggagagcaggccccgtgcccgagccaagcaggtccgcctgacctgcatgcagagttgcagtgcgccagttaacgcagggcccagcagcctggcttcagaacctccagggagccccagcacccccagggtctcagagcccagtggggacagctctgcggcaggccagcccttgggtccggccccgccccctcccatccgggttcgagttcaagttcaggatcatctcttcctcatccctgtcccacacagcagtgacacccactctgtggcctggctggccgagcaggcggcccagcgctactaccagacctgcgggctgctgcccaggctcaccctacggaaagagggggccctgctggccccacaggacctcatccctgatgtgctgcagagcaatgacgaggtgttggctgaggtgacttcgtgggacctgcccccgttgactgaccgctaccgcagggcctgccagagcctggggcaaggggagcaccaacaggtgctgcaggccgtggagctccagggcttgggcctctcgttcagcgcctgctccctggccctggaccaggcccagcttacacccctgctgcgggccctcaagctgcacacagcactccgggagctgcgcctggcagggaaccggctgggggacaagtgtgtggctgagctggtggctgccctgggcaccatgcccagcctggccctccttgacctctcctccaatcacctgggtcccgaaggcctgcgccagcttgccatggggctcccaggccaagccaccttgcagagtttggaggagctggacttaagcatgaaccccctgggggacggctgtggccagtccctggcctccctcctgcacgcctgccccttactcagcaccctgcgcctgcaggcgtgtggcttcggccccagcttctttctgagccaccagacagcactgggtagtgctttccaagatgctgagcacctgaagaccctgtccctgtcctacaacgccctgggagcccctgccctggccaggaccctgcagagcctgcccgccggcaccctcctgcacttagagctcagctccgtggcagccggcaagggtgattcggacctcatggagcctgtattccgatacctggccaaggaaggctgtgctctagcccacctgaccctgtctgcaaaccacctgggggacaaggctgttagagacctgtgcagatgtctctctctgtgcccctcactcatctcactggatctgtctgccaaccctgagatcagctgtgccagcttggaagagctcctgtccaccctccaaaagcggccccaaggccttagcttccttggcctgtcaggctgcgccgtccagggtcccctgggcctgggcctgtgggacaagatagccgcgcagctccgggaactgcagctgtgcagcagacgcctctgcgctgaggacagggacgccctgcgccagctgcagcccagtcggccgggccccggcgagtgcacgctggaccacggctccaagctcttctttcggcgcctctgaccctggcgctgcctttccccaccctcaccgaagcccctaataaatgaagctgctggccgggcgcggtggctcacgcctgtaatcccaacactttgggaggcccaggcgggcggatcacgaggtcaggagatcgagaccatcctggctaacatggtgaaaccccgtctctactaaaaataccaaaaattagccgggcgtggtggtggaagcctgtagtcccagctactccggaggctgaggcaggagaatggcgtgaacccgggaggcggagcttgcagtgagccgagatcgcaccactgcactccagcctgggcgacagaccgagactccgtctc

SEQ ID NO: 2936 - DNA, 679 bp, Homo sapiens
  source 1..679: mol_type = genomic DNA
ggggaaatgccgaccctattcaaaggagtttggggggttgtggagcattccagagctctgggaagattctgtcccgcctgcttaccctcaggcccacacctccacacacagccagctctgggcactgcagaaatgacgctcctctcctcccagtcttcatcactggtggccccttctgggtctgtgtctgccgaaaatccagagcagaggatgctggagaagagagccaaggtcatagaagaacttcttcagacagaaagagactacattcgggatctggaaatgtgtattgagcggatcatggtacccatgcagcaggcacaggtaccaaacattgattttgagggactttttggaaatatgcagatggtgattaaggtctcgaagcaattattggctgctctggaaatcagcgatgctgtaggacctgtgtttcttggtcaccgggatgagcttgagggaacatacaagatttactgccagaatcatgatgaggccattgcgctgcttgaaatctacgagaaggatgagaagatccagaagcatcttcaggactccttggcagatctgaagagcctatacaacgaatggggatgcacaaattatattaacctgggctccttcctcatcaaaccagtacagagagtaatgcgttacccgctgttgctaatggagttgc

SEQ ID NO: 2937 - DNA, 564 bp, Homo sapiens
  source 1..564: mol_type = genomic DNA
gtttgtggtgattatttactgtctagaatggatgttaccagctgcatctcttaccgaaattttgcaagttgtatgggagactcccgtttgttgaataaggttgatgcttatattcaggagcatttgttacaaatttctgaagaggaggagtttcttaagcttccaaggctaaagttggaggtaatgcttgaagataatgtttgcttgcccagcaatggcaaattatatacaaaggtaatcaactgggtgcagcgtagcatctgggagaatggagacagtctggaagagctgatggaagaggttagttttaaagtaaatgggattcaaccatttttaaaaattattttgctataacatgaaggattccctttcacttttattttataaccatgaccctaaagaatttaaattttgctataggtacccctaagctgagaaacagggggggtgtccaggtgagctgaatgaactgttcagtttggtcttctgcttttctttttttatttctttgcttattatgtgctgttaactttctttaaagtagcatgtaatttgctttagaaa

SEQ ID NO: 2938 - DNA, 579 bp, Homo sapiens
  source 1..579: mol_type = genomic DNA
ttattgtgacgccgaaaacggagaaaccccgggtccggcgagaggggctgtgacagtcggagtcccaagctgcggttcggctgctgccgagaactgcaaggtgtggaatatttctggcttctagtccaatgccaagtgtgtgacctgtgttttggccctacatttatttaaagcctgaatttggggagtatctgcaaagcactgaaggttttggacattgtcttttcctgctgttgaaagagaccctcttcatatatacaacattcaggctacatgattccctgaaagataagaacaatgttatgttggggatattggtctctgggccaacctggtatcagcaccaacctgcagggaattgtggctgagccccaggtgtgtgggttcatatctgacagaagtgtcaaggaagtggcctgtgggggaaaccactctgtgttcctgctggaagatggggaagtttacacatgtggtttgaacaccaaggggcaactgggccatgagagggaaggaaacaagccagaacaaattggagctctggcagatcagcatatcattcatgtggcatgtggcgagtcc

SEQ ID NO: 2939 - DNA, 1124 bp, Homo sapiens; identical to SEQ ID NO: 2733
  source 1..1124: mol_type = genomic DNA

SEQ ID NO: 2940 - DNA, 4090 bp, Homo sapiens
  source 1..4090: mol_type = genomic DNA
gcatgatgggagagtgtgtggagtgggcggggggtctccgcggaggaggtggaggaggcggcggcggcggcggaagagggcggagggtagtgggatgggggtcccgcggcagcggtgaaactccgggtgggcgtccatggtgctgctgcgctgacagggctgtgagcagccggccttccgctctcaccagttccgcgtcggaatagacggtccttccccggggagtcagttcctccccgggcccctgagccatgcccatcgcagccgccccgaaggagccaggtgtaaattaattatttgaaagcaactgaacaatggagccagacatcattcgaatgtactcttcatccccaccaccattagacaatggagcagaggatgatgatgatgatgaatttggggaatttggtgggttttcagaagttagcccttctggtgtagggtttgttgatttcgatacaccagattatactcgtcccaaggaagagtttgtaccttcaaaccattttatgccaattcatgaattctcagaaaatgtagatagccttacaagctttaagtccattaaaaatggtaatgataaggacatcactgctgaactttctgctcctgtgaaaggacagtctgatgttttactttctaccaccagcaaagaaataatttcatctgaaatgttagctacttccattgatggcatggaaagaccaggaaatttaaataaagtagtggagcagagacagaatgttggaacacttgaaagtttctctccaggagattttagaactaatatgaatgttgttcatcaaaacaagcagttagagagctgcaatggtgaaaagcctccttgtctggagattctaacaaatgggtttgcagtgttggaaactgtaaatcctcagggaacagatgatctggacaatgtagctgattcaaagggacggaagcctcttagcactcatagcactgagtataatttagactctgtacctagtcctgctgaggaatttgcagattttgccacattttccaaaaaggaaaggatacaattagaagaaatagaatgtgcagttttaaatgatagagaagcactaaccattcgggaaaacaataaaattaatagagtcaatgaactgaattctgtaaaagaagtggctttgggtagaagcttggataacaaaggagacactgatggagaggatcaggtttgtgtttcagaaataagcatagtgactaacagaggtttcagtgttgaaaaacaaggccttccaacactgcaacaggatgaatttttacagtcaggtgttcagtcaaaggcttggagtttggtagactcagctgataattcagaagccattaggagagaacaatgtaaaactgaagaaaaacttgacttacttacttctaaatgtgctcacctatgcatggattctgttaaaacttctgatgatgaagttggttctcccaaagaagaaagtagaaagtttactaatttccaaagcccaaacattgaccccacagaagaaaatgatttggatgattctttaagtgtaaaaaatggtgatagtagtaatgactttgtgacttgcaatgatatcaatgaagatgattttggtgattttggtgactttggctctgccagtggctcaactccaccttttgttactggtactcaagattcaatgagtgatgccacttttgaagagtcttcagagcactttccacattttagtgaaccaggtgatgactttggagaatttggggatataaatgctgtttcttgccaagaggagacaatattaacaaagtcagacctaaaacagacttctgataatttatcagaagaatgtcaattggcaagaaaatctagtggaacaggcactgaacctgttgcaaaacttaaaaatgggcaagaaggtgagattggacattttgattctgtgccaaatattcaggatgactgcaatggttttcaagactctgatgattttgcagacttcagttcagctggtcctagccaagttgtagattggaatgcttttgaggatgaacaaaaagatagttgttcttgggctgcttttggagaccagcaggctactgaatctcatcatcgaaaggaagcctggcagtcacataggacagatgaaaatattgatactccaggaacccccaaaacgcacagtgtaccttcagcaacttccaaaggagcagttgctagtggccatttacaggaatcagccacttcagttcagacagctttattaaaccgcctggagcgaattttcgaagcatgttttccttccatacttgtccctgatgctgaagaggaagttacttccctgaagcacttgctggaaacaagcactttgccaataaaaacgagagaggccttacctgaaagtggggaattgctagatgtgtggactgagctacaggatatccatgatgcacatggcttgagataccagtggggcggctcccatagcaacaagaagcttttgtcctccttgggaatagacacccgaaacattctcttcacgggcaataagaagcagcctgttatagtgcccatgtatgcagcaggattgggtatgttagagcccaccaaggaaccactgaaaccactttctgctgcagaaaaaatagcttccatcggtcagacagccaccatgtcaccagatatgaacacatgtacatctgatcagttccaggagtctctaccacccgtccagtttgactggagtagcagtggccttactaaccctttagatgctagtggaggttccactcttctgaaccttgatttctttgggcccgtggatgacagtagctctagcagcagcaccacaatcccaggtgtggatccggagttgtatgagttaacaacttctaagctggaaatctccacctcaagcctcaaagtgactgatgcatttgcaagactcatgtctacagtagagaagacaagcacatctaccagtaggaaaccgaaaagagaagagcacctaagtgaagaagctatcaaggtgatcgctggccttcctgacttaacattcatgcatgccaaggtgttgatgttcccagccacgttaacaccttccacaagctctcaagaaaaagcagacggataactgatgtgaattggacagtttctattgcttttccttttttccatcccttccctaccatcaaaagcatacctgctctaattaaaaaaaaaaaaaaaaaaaattcaagttcagctgatttgttggtaagccgcactagaaaggtatacatagtaatgtatatttatttacatactgaagtcctaaatttatattagaaaaatgtaaataatcgggggtaaacatttttgaagatttattctttttgtgttgctggggtgtatacatttatgtctttgtgaaatacactggtggtgtccttcttacaaaacttttgaaataaaaaaaaaactcaaatcttcactgtctgtgaaatccccttcagtcttttcagattgcattgactgtcctcttgatttttcatattacatgtcaaattacttttgctatcataaataagctccaaagtcccccatttaatttttttttaattttgtgtatgatgggtttcagatctggcttttgttaacattttggggcttttttaatcttttcaatctggcgtattgctgtttgaccttttgcaaggtacttaattgctcttttgttatagggtatggatcattgtcagaacttgattggaggggtttaaagagattgtgtctgtttaaaatcagtatgattcagagaaggaccaaattatatgaatgtcttacaatggaatttacttgttactgatttttttgttctattgtaccactattttttgaggattttgcacagtgtaaaatgacataatcatagattgctatggtttaggctgtatatacagtgaaaactatgggttttaaatgtttggggaaattcctatggaaaaaagagagacatgtagaagaacctctaacaaggttaatgtgcatgcccaaggtcttttgaaatttcagtgtgtaaatttccttttagcttatacaaaaataaaataattt

SEQ ID NO: 2941 - DNA, 946 bp, Homo sapiens
  source 1..946: mol_type = genomic DNA
cgccttctgcctgccccctcggccttcttcacttagccttcgacggccgagcgccccaggggtggcggtgggagtggggttgttgagcggcgctggctcctttcacaaatggggaaactgaggcttaaagggcgtctgactcgccagagcagctcagcctgcagctgctagcagtggcgtctcatattagcattgttgtcaaccggaggcggtgcgagtccgccggggattccagatggggctcctgcgccgcccgcctatcatttgcggcctgtattcgcgcgtcgctcccgcagagccacctcccagcaggcccacgcccgcgggggccccgggctggcgccgctgtccctggaatcgatgtgagtcactgctgacgctttgcaggagcatgcatctcacctcagaaagtctctgacgttgctgcggagcggggagaggatgtttctctattagccctttgcttttgctctggcgctgatcctttgctgaccttggacaaatcaatttacgtttctgtgctccagtttcttggtttataaaagacggtctccttctgtcacccaggctggagtgtagtggaacgatcaccgctgaactgcagcgtcggcttcctgggctcaagcgatcctcccacctcaacctcccaagtcatggggactacagatgccatcacacctggctaatttttaaatttttctgtggagacagggtctcattctgttgcccaggcttgtctcgaaccctggtctaaagtgatcttcccgcctagcctcccaaaatgttggaattacagtctgcagatctccaggggagcccaccagcctagtcaacatggcctcggaagacattgccaagctggcagagacacttgccaagactcaggtggccgggggacagctgagtttcaaaggcaagagcctcaaactcaacactgcagaagatg

SEQ ID NO: 2942 - DNA, 582 bp, Homo sapiens
  source 1..582: mol_type = genomic DNA
agcagcgcgcaggcgcacgtcagtccccgcgcttttcggaggctgccagcgtcccacaccagccgcaggatagcagcatcaaggagcattgtgtacatgcagaagtgcacagtacctggagtgaaactgcttgtgttcgatttctgataccattcataactggctgtgtgatctcaaataagaaaactgaagaaccagctgggcgcggtagctcacgcctgtaatcccagcactttgggaggctgaggcgggtggattacctgagaacctctaaaatgcagacctccagctctagatctgtgcacctgagtgaatggcagaagaattacttcgcaattacatctggcatatgtaccggaccgaaggcagatgcataccgtgcacagatattacgcattcagtatgcatgggcaaactctgagatttcccaggtctgtgctaccaaactgttcaaaaaatatgcagagaaatattctgcaattattgattctgacaatgttgaatctgggttgaataattatgcagaaaacattttaactttggcaggatctcaacaaacagatagtgacaagtggcagtctg

SEQ ID NO: 2943 - DNA, 603 bp, Homo sapiens
  source 1..603: mol_type = genomic DNA
gtgcaggagcgggacccggaacagaccgccgtgagagaggaggggcgccggccgggattcgcggcccggagctcgggaccggagaagaagtcctcaccagtgaacggagacctctctgaactaagaataccatggccacgtcagccccactacggagcctggaagaggaggtgacctgctccatctgtcttgattacctgcgggaccctgtgaccattgactgtggccacgtcttctgccgcagctgcaccacagacgtccgccccatctcagggagccgccccgtctgcccactctgcaagaagccttttaagaaggagaacatccgacccgtgtggcaactggccagcctggtggagaacattgagcggctgaaggtggacaagggcaggcagccgggagaggtgacccgggagcagcaggatgcaaagttgtgcgagcgacaccgagagaagctgcactactactgtgaggacgacgggaagctgctgtgcgtgatgtgccgggagtcccgggagcacaggccccacacggccgtcctcatggagaaggccgcccagccccacagggaaaaaatcctgaaccacctgagtaccctaagga

SEQ ID NO: 2944 - DNA, 593 bp, Homo sapiens
  source 1..593: mol_type = genomic DNA
ccggatccggtctcagctctgggagggaacgggagatgttgcaggcgccgagagggcgggccagggccgcactccggagactcgcggttgctacgcgcaccatggctggagcgcccacggtctcgcttcctgaactccgttcactcctagcctccggacgggcccggctcttcgacgtgcgctctcgcgaggaggcggcagctgggaccatcccaggggcgctcaacatcccggtgtccgagttggagagtgctctgcagatggagccagctgccttccaggctttatattctgctgagaagccaaagctggaagatgagcatctcgttttcttctgtcagatgggcaagcggggcctccaggccacgcagctggcccggagtcttggatacactggggctcgcaactacgctggagcctatagagaatggttggagaaagagagttaggcaggaggcagcttactgattgccaccccctggccccttaatggccaccttaactaagggtgtgaacgggctgacttggtgaattgggcaactccttatagtgttgtgcacacaaaagcatcaaataaagaacatttaatcaaa

SEQ ID NO: 2945 - DNA, 8683 bp, Homo sapiens
  source 1..8683: mol_type = genomic DNA
gcagaagtctgggcagctgcgggaggagaggtttgggaggcgcgggagatgtccaccctgggctggtggcgccgccgggcgccgggcgccatgagggtgcgctaggcggctgttcgtgcccgaggctgcgcagcactgaggtgagctttgccttcttgatcttccgtccttcttggagacgactggcgagaggaagagggactaggtccaaacgctaggtggctgggtccaggtccctgagtactgacggtcacaggctgccgcgtctttcctgttgactcatgtttggttcctccagtgaaaattttacttagagaaatgctgcctccaaagcacttgtctgccaccaaacctaagaagtcctgggccccaaatctgtatgagctagacagtgacttgactaaggagccggatgtcatcataggagaaggtccaactgactctgagttttttcatcagaggtttcggaacctaatctatgtggaatttgttgggcctcggaagaccctgatcaaactccgaaacctctgcctcgattggttgcagccggagacccgcaccaaggaggagatcatcgagctcttggtccttgagcagtacctgaccatcatccctgaaaagctcaagccttgggtgcgagcaaaaaagccggagaactgtgagaagctcgtcactctgctggagaattacaaggagatgtaccaaccagaagacgacaacaacagtgacgtgaccagcgacgacgacatgacccggaacagaagagagtcctcaccacctcactcagtccattctttcagtgaccgggactgggaccggaggggcagaagcagagacatggagccacgagaccgctggtcccacaccaggaacccaagaagcaggatgcctccgcgggatctttcccttcctgtggtggcgaaaacaagctttgaaatggacagagaggacgacagggactccagggcttatgagtcccgatctcaggatgctgaatcataccaaaatgtggtggacctcgctgaggacaggaaacctcacaacacaatccaggacaacatggaaaactacaggaagctgctctccctcgtgcagcttgctgaagacgatggccactcccacatgacgcagggccactcatcaagatccaagagaagtgcctacccaagcaccagtcgaggtctaaaaactatgcctgaagccaaaaaatcaacccaccggcgggggatttgtgaagatgaatcttcccacggagtgataatggaaaaattcatcaaggatgtgtcacgcagttccaaatcgggaagagcaagggagtcaagcgaccggtcacagagattccccagaatgtcagatgataactggaaggacatttcattgaacaagagggagtcagtgatccagcagcgggtttatgaagggaatgcatttaggggaggctttaggtttaattcaacccttgtttccagaaagagagttcttgaaagaaagaggcgctatcattttgacacagatgggaagggctcgattcacgatcaaaaaggctgtcccaggaagaagccctttgaatgtggtagtgagatgagaaaagccatgagcgtgagcagcctgagcagcctcagctccccctcctttaccgagtcacagccaattgattttggggcaatgccatatgtatgtgatgagtgtgggaggtcgttcagtgtcatctcagaatttgttgagcaccagatcatgcatactagagagaacctctatgagtatggtgagtcctttatccacagtgtggctgtcagtgaagttcagaaaagtcaggttggagggaaacgttttgaatgtaaggactgtggagagaccttcaataagagtgccgccttggctgaacatcggaagattcatgctagaggttatcttgtggaatgtaagaatcaggaatgtgaggaagccttcatgcctagccccacctttagtgagcttcagaaaatatatggcaaagacaaattctacgagtgcagggtgtgtaaggaaaccttccttcatagttctgccctgattgagcaccagaaaatccactttggggatgacaaagataatgagcgtgaacatgaacgtgaacgtgaacgtgagcgcggggaaacctttaggcccagcccagcccttaatgagtttcagaaaatgtatggtaaagagaaaatgtacgaatgtaaggtgtgtggggagactttccttcatagctcatccctgaaagaacatcagaaaatccatactagagggaacccatttgaaaacaagggtaaagtgtgtgaggaaacctttattcctggtcagtcccttaaaaggcgtcagaaaacttacaataaggagaagctctgtgactttacagatggccgggatgccttcatgcaaagctcagagctcagtgagcatcagaaaattcattctcgaaagaacctctttgaaggcagagggtatgagaaatctgtcattcatagtgggccattcactgaatctcagaagagtcatactataacaagacctcttgaaagtgatgaggacgaaaaggcgttcaccattagctctaacccctatgaaaaccagaagattcccactaaggaaaatgtctatgaggcaaaatcatatgagaggtctgttattcatagcttagcctctgtggaagctcagaaaagtcacagtgtagcagggcccagtaaaccaaaagtaatggcagagtctaccattcagagcttcgatgctatcaaccatcagagagttcgtgctggagggaacacctctgaaggaagggaatacagtaggtctgttatccatagcttagtggcttccaaacctccaagaagtcacaatggaaatgaattggtggaatctaatgagaagggagaatcctccatttatatctcagaccttaatgataagcgacagaagattcctgccagagagaacccttgtgaagggggcagtaagaatcgcaactatgaagactctgtcatacagagtgtattccgtgccaaacctcagaaaagtgttcctggagagggatctggtgagtttaagaaggatggcgaattctctgttcccagctcaaatgtccgtgaataccagaaggctcgtgctaaaaagaaatacattgagcataggagcaatgagacctctgtaattcactctctgccttttggtgaacaaacatttcgccctcgagggatgctctatgaatgtcaggagtgtggggagtgctttgctcatagctctgacctcactgagcaccagaagattcatgatagggagaagccctctggaagcagaaactatgaatggtctgtcattcgcagcttggcccctactgaccctcaaacaagttacgcccaagagcagtatgctaaagagcaagcgcggaacaaatgtaaggacttcagacaattttttgctaccagcgaagacctcaacacaaaccagaaaatctatgaccaagagaagtctcatggcgaggagtctcaaggcgagaatactgatggggaggagacccacagcgaggagacccatggtcaggagacaattgaagaccctgtcattcaaggctcagacatggaagaccctcagaaggatgaccctgatgacaaaatctatgaatgtgaggactgtggcctgggctttgtggatctcacagacctcacagaccatcagaaagtccacagcaggaagtgcctggttgacagtcgggagtacacacattctgtaattcacacccattccatcagcgagtatcagagagattacactggagagcagctgtatgaatgtccaaagtgtggggaatcttttattcatagctcattccttttcgagcatcagagaatccatgaacaagaccagttgtattccatgaaggggtgtgatgatggttttattgccctcttgcccatgaagccacggaggaatcgtgctgcagagaggaatcctgctcttgctgggtcggccattcgatgccttttgtgtggacaaggcttcattcatagctctgcccttaatgagcatatgagacttcatagggaagatgatttactggagcagagccagatggctgaggaagctatcattccaggcttagccctcactgagtttcagagaagtcagaccgaagagagactctttgaatgtgcagtctgtggagaatctttcgtcaacccagcagaacttgcagatcacgtaactgttcataagaatgagccctatgagtacgggtcctcctatactcacacctcatttcttactgagcccctcaaaggagctataccattctatgaatgcaaggattgtggtaagtcctttattcatagcacagtcctcactaaacataaggagcttcatctggaagaagaagaagaagatgaagcagcagcagctgcagcagcagcagcccaggaagttgaagccaatgtccatgttccacaagtagttctgaggattcagggcttaaacgtagaggctgctgagccagaagtggaggctgccgagccagaagtggaggctgctgagccagaagtggaggctgctgagccaaacggagaggctgaagggccagatggagaggctgcagagcccattggagaggctggacagccaaatggagaggccgagcagccaaatggggatgctgatgagccagatggtgcaggtattgaagacccagaagaaagagctgaagagccagagggaaaagctgaagagccagagggagatgccgacgagcctgacggtgtgggaattgaagacccagaagaaggtgaagatcaagagattcaggtagaagaaccatactatgactgccatgaatgcacagaaaccttcacttccagcacagcattcagtgaacacctgaaaactcatgccagcatgatcatatttgagcctgcaaatgcctttggggagtgctcaggctacatcgaacgtgccagcaccagcacaggtggtgccaatcaagctgatgagaagtacttcaaatgtgacgtctgtgggcagctcttcaatgaccgcctgtccctcgccagacaccagaatacccacactggctgagggcatggggtaaaggttagaaaaccttcacctaggacttgacccttaccaaaccacagagaatccaaaccaatccatgataatgtcagtaggagacttaaccttagtgtgttacacacctgacttaacatctctaaactcagattgaaaagagaccgaatgtgcagattccacagtcttaagctttccccttcagatgtcagtgtctgcatgtgggaaagccatagcacacatcttacctttccaagtaatcagattgagaaaaccctatgagtattccagactacagagtttgcccaaatcaactgtaaatgacacttgtgtaacgtatatatagtgtttcatgaggtgtatataaaatagcaaattatgacagaacagtgatcacatatatttggatttatatgatatacagttacagtttactctgcagaggtaccttacctggtattctttgaattttttttttttttggaggaggaagagagcaacaaatttgattatatttttaagtgtcttagatcctgagaaagatttattgtgcattatttgaaccctgtcaatatctttttgagtaattgttttgtttcttacccttaaatagtcttgtgaagctgtaggcatgatagataacatggcttttactccttactgtttgaaaagataagtactttagcttctttctgcagccatttcatctgcgccaacactttggaacctaatactgtgtaaggctttacaatatacggattggctttttgtgacccagattgattggttgccacatgttatgtttgttgaagtggttctcatgcaaaaatattacacatttgtgttctgggttttttttttttttaaccaactcaatatgtgtttgatgatagtgaattgataaaacccgaagcttttccctgtaaatcttacatctttgcctttaaagaatgggttacaaccatcactagatcacagtagtgcctaatgaaggttgagaaccgtaggagaggctctcatgctgtaaataatgttgcaggctaataacctttcatcacttcctttgtgcgcttcctgccttaagtgacaagtagcaacatggcttgggtcccctgtgcagcatcagcttatgctgccacaagtcagtttgcaccctaggtgcccaggagctagtatccttagatctttctatcgctaacttaattctcttcgttatttatctgaccctctaactccatgtctaacttgcattaaaaaaaaaaaaattctttacagtcaacccaagcttaacatggactcaggttccccagcagccttaatttgttttgttaacatctgttccttctttttcagctctcctagagtatttctgagtgttgtgttcatctaatcttagtattcttttaattacaaattgacctcacagcttgaggtttcttgtgtcctattctgtggactacctgtgctcctttgcttcccctcccctcgcataataactatattaagaaattttttttggccttgagttggctggaaaaaaaatataaaatttaaaaaatttaaaaaaaaagatttgcaaaatgtaagtgtagatcatttgaacaagcaaaattaaagtacccactgggggaaatgtgtctgaatcttactcttctggatctgcaggattagggcttggaagtatgtcaaagatgcagggagtgtcaaagtttaggaagattgtagagctgagagcaagaagcagaaatgagtgagtcaaagaagggagtcctaatatatcaccagatctaggaggggagaggagacagacagaagaaaacaccagaggcaagaactgtagaaggccaggtttctgagaatgaattgagcggggtgtcctgagcagtttggaaaaggagtttttgatggtatggtgtaggtgagggctggctgcataggaaggactgaggttggaacggacatcgggaaagctgaggggcagtgaggtttactacatgggaaaaggactcttgaaacgagaatcagtgttgatgtcggggtgaactttgtgggtacattacttggtgttaacattgttggcagtggtagccccttttcagaaagcaacttgctgtaagtcagggtgtccgttccaaccttcagctagtgaaaaggtagtaacaaatggtaaacaagagaatgattgtttaaacctatctgtggacacttaatgcaactgtttaaaaatgataatcacgagttatgtagcaacgtggaaatatatttacagaacattaagtggagaaagcaggacacgaaagtatatttatactacagttataactcaacagttcatttatatgctgttcatttaacagttcatttaaacagttcattataactgtttaaaaatatatatgcttatagtcaaaagctgttgtggtgttgttgttgtaggcttatagttgagcattattttcttaaatttcttgaatgttctttatggtagtgttactaaaaagtttatgatcacattttcattgtgaacataatttgaactcattatcacacacttggaaaatacagaaaagtggaggaaaaaaaatcatatccccaccatccaaagacatatactctcctcttatcttgttcattcttgtttctgtgcacaggtttatgattataactgtgtcaaaatgtatattcaaaatagctgttacattacctttgtggaattatggttaaatactttcactttaattttttcaaatgttccctataataatgtcctgataacagtgtattatgtgtgtctccattggtgtgcataatacatacccagaggaaaaattagaaaataaagtaaattattttaaaaaattacctatattcccaacacctaacaactactgctaacatcttgatctgtttcctctatcttgtttcagtgcacacgcttgtgataacagtgttaaatatgtgtgcataaagtcttaaatgaaaagatgtggaaaataactaaaatagtgttgtcattgtgggaatttggttaaatattttgtctcaaattccttaaataatctttggtgttttggtaataaattttatgtatgtattttccattacaaatataatacatactcatacaaaactttggaaattcagtaaagaaaattcacacatattcccaacacccaacaacaattaactgttaacatcttgatctgtgcactagtctgtgattattagggtgttagtgataagtatgcataaatgtcaaagatgggaagaaagatgaaaaacaagaaatagttgtgtggttgttgtgggattatggttattttgtttcggtttccttgaaaggtcatcattctagtgttttggtagtccacctttactacatatatttccattatatatgaaatgtgttcattatagaaactttgaagttacagaaatgtagaagagaaactcacccatgttttcaccatccaaagagtgtggttaacatcttgatatattttcttcatcttgtttctgtgcacaggtttttggtttgttaatatggttgtggtcattctatctgtaatagtgtcaacaataaaaataaagttaaaaataaatattt

SEQ ID NO: 2946 - DNA, 589 bp, Homo sapiens
  source 1..589: mol_type = genomic DNA
agtctggtcctcactgctgtggattgcctttactaaaatagagatctatgcagaaatacagttgcatagcttttcacataaggctcttcatgatatggcctttgcctgcttttatggcatggtccatctactctgccccatgtgcctctccttgctgccatacagaactctatcaggggaacctgcccccaatatttcaaggcaagaaataatggcggcagctacgggggatcctggactctctaaactgcagtttgccccttttagtagtgccttggatgttgggttttggcatgagttgacccagaagaagctgaacgagtatcggctggatgaagctcccaaggacattaagggttattactacaatggtgactctgctgggctgccagctcgcttaacattggagttcagtgcttttgacatgagtgctcccaccccagcccgttgctgcccagctattggaacactgtataacaccaacacactcgagtctttcaagactgcagataagaagctccttttggaacaagcagcaaatgagatatgggaatccataaaatcaggcactgctcttgaaaaccctgta

SEQ ID NO: 2947 - DNA, 1720 bp, Homo sapiens
  source 1..1720: mol_type = genomic DNA
agcacactggaaggagtcatggcggatggtcaggtggcggaactgctgctccggcggctggaggcgtctgatggcggcctggacagcgccgagttggcggctgagctgggcatggagcaccaggcggtggtgggcgccgtgaagagccttcaggcgctgggcgaggtcatcgaggctgaacttcggtccaccaagcactgggagcttactgcggagggcgaggagattgcccgggagggcagccatgaggcccgtgtgtttcgaagcattcccccagagggcctggcccagagcgagcttatgcgactgcccagtggcaaagtgggcttcagcaaggccatgtccaacaagtggattcgggtggacaagagtgcggctgacgggccccgggtgttccgagtggtggacagcatggaggatgaggtgcagcggcggctccagctggtccgggggggacaggctgagaagctgggggagaaggagaggagcgagctgaggaagaggaagctgttggctgaagttggctcttggcgggaccggcccttcaagccctacaacttcttggcccacggtgtcctccccgacagcggccaccttcacccgctgctcaaggtccgctcccagttccgacagatcttcctggagatggggttcaccgagatgccgactgataacttcattgagagctccttctggaactttgacgccctcttccagccccagcagcacccagcccgtgaccagcacgacaccttcttccttcgagatccagcggaggccctgcagctcccaatggactatgtccagcgggtcaagcggacccactctcagggcggctacggctcacaggggtacaagtataactggaagctggacgaggcccggaaaaacctactgcgaacccacaccacatcagccagcgcccgtgcgctctaccgccttgcccagaagaagcccttcactccggtcaagtacttctccatcgaccgcgtattccggaatgagaccctggacgccacgcacctggctgagttccaccagatcgagggcgtggtggcggatcatggtctcaccttgggccacctcatgggcgttctgcgggagttcttcaccaagctgggtatcacgcaactccgcttcaagccagcctacaacccatacacagagcccagcatggaggtgttcagctaccaccaaggcctgaagaagtgggtggaggtcggaaactcgggggtcttccgtccagagatgctgctgcccatggggcttcccgagaacgtgtcggtcattgcctggggcctctccctggagcgcccaacgatgatcaaatatggcatcaacaatatccgggagctggtgggccacaaggtgaacctgcagatggtgtatgacagtcccctgtgccgcctggatgccgagccgaggccccctcccacacaggaggctgcgtgacatgggccactctaggacaggtcatcctccccgagtccctgctgctgcgctcctttgcatccctggccagtgaccttgtatttatgaggcctctgtgaggccagcccccaccttcctctttcccacctgtcccaggaccagaatcccagggacagaggactgggtagcaggttccttctgttgtcctgtgtggtgtgtctactgtgagggtgggccctgaggagacctgtgggccacctattgtctaataaagtgggcagttgccccc

SEQ ID NO: 2948 - DNA, 3564 bp, Homo sapiens
  source 1..3564: mol_type = genomic DNA
gtcgcggccttcgccgccgccaacggggctgtccctgtagctcccgatggagtttgaggtcgtgaaacctccgccgagctctgccccggcgagacgaggcgcctccgtcgccaagccgcgccgtcgcggggctcccgggagcggcccttagcgaccccgcccgggccccctcagcttacaaaacactacacagcaaaataatgatctgctagactgctaacccgagcatccagcttccacaatgcctgtgcaggcagctcaatggacagaatttctgtcctgtccaatctgctataatgaatttgatgagaatgtgcacaaacccatcagtttaggttgttcacacactgtttgcaagacctgcttgaataaacttcatcgaaaagcttgtccttttgaccagactgccatcaacacagatattgatgtacttcctgtcaacttcgcacttctccagttagttggagcccaggtaccagatcatcagtcaattaagttaagtaatctaggtgagaataaacactatgaggttgcaaagaaatgcgttgaggatttggcactctacttaaaaccactaagtggaggtaaaggtgtagctagcttgaaccagagtgcactgagccgtccaatgcaaaggaaactggtgacacttgtaaactgtcaactggtggaggaagaaggtcgtgtaagagccatgcgagcagctcgttcccttggagaaagaactgtaacagaactgatattacagcaccagaaccctcagcagttgtctgccaatctatgggccgctgtcagggctcgaggatgccagtttttagggccagctatgcaagaagaggccttgaagctggtgttactggcattagaagatggttctgccctctcaaggaaagttctggtactttttgttgtgcagagactagaaccaagatttcctcaggcatcaaaaacaagtattggtcatgttgtgcaactactgtatcgagcttcttgttttaaggttaccaaaagagatgaagactcttccctaatgcagctgaaggaggaatttcggagttatgaagcattacgcagagaacatgatgcccaaattgttcatattgccatggaagcaggactccgtatttcacctgaacagtggtcctctcttttgtatggtgatttggctcataaatcacacatgcagtctatcattgataagctacagtctccagagtcatttgcaaagagtgtccaggaattgacaattgttttgcaacgaacaggtgacccagctaacttaaatagactgaggcctcatttagagcttcttgcaaacatagaccctaatccagacgctgtttcaccaacttgggagcagctggaaaatgcaatggtagctgttaaaacagtagttcatggccttgtggacttcatacaaaattatagtagaaaaggccatgagacccctcagcctcagccaaacagcaaatacaagactagcatgtgccgagatttgcgacagcaagggggttgtccacgaggaacaaattgtacatttgcccattctcaggaagagcttgaaaagtatcgattaaggaacaaaaagatcaatgccactgtaagaacgtttcctcttctaaataaagttggtgtaaacaacactgtcacaaccacagccggaaatgtcatttctgtcataggaagtactgaaacaacagggaaaattgttccaagtacaaacggaatttcaaatgcagaaaacagtgtttcccagctaatctcacgtagtactgacagtaccttaagagctctggagaccgtgaagaaagtgggaaaggttggcgctaatggtcagaatgctgctgggccctctgcagattctgtaactgaaaataaaattggttctccacccaagactcctgtaagtaatgtagcagctacctcagctgggccctctaatgttggaacagagctgaattctgtgcctcaaaaatccagcccatttctaactagagtaccagtatatcctccgcattctgaaaacattcagtattttcaagatccaaggactcagataccctttgaagtcccacagtacccacagacaggatactatccaccacctccaacggtaccagctggtgtggctccctgtgttcctcgctttgtgaggtccaataacgttccagagtcctccctcccacctgcttccatgccatatgccgatcattacagtacattttcccctcgagatcgaatgaattcttctccttaccagcctcctcctccgcagccgtatggaccagttcctccagtaccttctggaatgtatgctcctgtgtacgacagcaggcgcatctggcgcccacctatgtaccaacgagatgacattattagaagcaattctttacctccaatggatgtgatgcactcatctgtctatcagacatctttgcgggaaagatataactcattagatggatattattcggtggcttgtcagccaccaagtgagccaaggacaactgtgcctttaccaagggaaccttgtggtcatttgaagaccagttgcgaggagcagataagaagaaagccagatcagtgggcacagtaccacactcagaaagcacctcttgtctcttcaactcttcctgtggcaacacagtcaccaacaccaccttctcctctgttcagtgtagactttcgtgcggatttctcagagagtgtgagtggtacaaaatttgaagaagatcatctttcccattattctccctggtcttgtggcaccataggctcctgtataaatgccattgattcagagcccaaagatgtcattgctaattcaaatgctgtgttaatggacctggacagtggtgatgttaagagaagagtacatttatttgaaacccagagaaggacaaaagaagaagatccaataattccctttagtgatggacccatcatctcaaaatggggtgcgatttccagatcttcccgtacaggttaccataccacagatcctgtccaggccactgcttcccaaggaagtgcgactaagcccatcagtgtatcagattatgtcccttatgtcaatgctgttgattcaaggtggagttcatatggcaacgaggccacatcatcagcacactatgttgaaagggacagattcattgttactgatttatctggtcatagaaagcattccagtactggggaccttttgagccttgaacttcagcaggccaagagcaactcattacttcttcagagagaggccaatgctttggccatgcaacagaagtggaattccctggatgaaggccgtcaccttaccttaaaccttttaagcaaggaaattgaactaagaaatggagaggtaaagaaactgaacctttcggcttcatgcttaatgtatttgttttctgctgctgcatcttggttataccattactgagtgcattttggtgtgcctatctctgatggatgattgattgcttttaaaacttataacagaaataaaattgtaatcccagatttcttaaataattctttaactagatcatcgggatttttgtttttttg

SEQ ID NO: 2949 - DNA, 2031 bp, Homo sapiens
  source 1..2031: mol_type = genomic DNA
ggcggggggttcgcccagcgtcgtggactatttccctagcgaggacttctaccgctgcggctactgcaagaacgagtcgggcagccgctccaatggcatgtgggcacattccatgacagtacaggattatcaggatctcatagaccgaggatggcgaagaagtggaaaatatgtgtacaaacctgtcatgaatcaaacatgttgtcctcagtacacaataaggtgccgacctttacaatttcagccttcaaaatctcacaagaaggttttgaaaaaaatgttgaaatttctagctaaaggggaggttcccaaaggaagttgtgaggatgagcccatggattccacaatggatgatgctgttgcgggtgactttgcattgataaataaactggatatacagtgtgatcttaaaacactcagtgatgacatcaaagagagtttagagagtgaaggaaaaaattcaaagaaagaagaacctcaggaattacttcagtcacaagatttcgtaggagagaagttgggctctggtgaaccgtcacattcagttaaagttcacacagttcctaagccaggcaaaggggctgatttgagtaagcctccatgtcgaaaagcaaaggaaatccggaaagaaaggaaaaggttaaaactaatgcagcagaacccagctggagaacttgagggtttccaggctcaaggtcacccaccatctttgtttccaccaaaggctaaatccaaccagccaaaatcactcgaagatttaatttttgagtctttaccagagaatgcatcacacaagttagaggtgagggtggtgagatcatctccaccaagttcgcagttcaaagccacacttctggagtcttaccaggtctataaacgttaccagatggttattcacaagaacccacctgatacgccaaccgaaagccagttcacaagattcctttgcagttcacccttggaggcagagactccccctaatgggccagattgtggctatggctcctttcaccagcagtactggcttgacggaaagatcattgctgtgggggtgattgacatcctcccaaactgtgtatcatctgtgtatttgtactacgatcctgattattcgtttttgtctttgggcgtctactctgcactacgagaaattgcttttactaggcagcttcatgagaaaacttctcaactcagctattattatatgggtttctacattcattcatgtcccaagatgaaatataagggtcagtatagaccttctgatttgctgtgccctgagacatatgtttgggtacccattgagcaatgcctgccttcacttgaaaactccaagtactgccgtttcaaccaggacccagaagcagtggatgaggatcgcagtacggaacctgaccgattgcaggtgtttcacaagagagccatcatgccttacggtgtttataagaaacagcagaaagacccaagtgaggaggctgctgttctgcagtacgccagcctggtggggcagaagtgctccgagcggatgctgctgttcagaaactgacctgttcacctctgccgggaagttcctgtgttgtgctgatgatttgtgccaggatacatattcagtacctgtggggaaataactgtcaccacccacaaattagacattttttattttgactatctatggcttttaaaaaatattttgtggcaatgtatctgtgagaatctcatagttaatataaagattttaaaactgcattatgacctagcccccataattgggatttatcattttggaggattctttctagagcaagatacgctcaaattctcctgtttgtattttgtaaaatgaagaagtgaatctaagtaacttaatcacagttgtgcattttttttggttctgttagagaaattaaaacagactgtttcctcaggcccattttaaactgaacttatgctaggaaaccttaagtatggggaaggtagaaagttcatttcatcacttagaaaatatgtcttctcaagaacaaaactgtgctg

SEQ ID NO: 2950 - DNA, 572 bp, Homo sapiens
  source 1..572: mol_type = genomic DNA
tgaaccaccagccagctgcatttgttgtcctggaagtcattgccaactctgccagtcacactggggtccccagagaagtcaagagcctctgggatattgggcacctgaagagctgcagccccagctctgccctcagggagtttctgttttggtggggagaaggccactgaaaccagggagtgcggttgtgtttgcaaacttccaattgaagacactgagctgaaccattccgcccgcccgcccgcccgagggcactccagatctgccggaggcgctgggcaatgaccccgggactccaggccagaggggtctgaagctgtttgggaaagcagcgggactccttgggaagatggccatggccccaagcccttccctggtgcaggtgtacaccagccccgcggctgtggccgtgtgggaatggcaggacgggctgggcacctggcacccctacagtgccaccgtctgcagcttcatcgagcagcagtttgtccagcagaagggccaacgttttgggcttgggagcctggcccacagcatccccttgggccaggcagacccctcgctggcccctt

SEQ ID NO: 2951 - DNA, 654 bp, Homo sapiens
  source 1..654: mol_type = genomic DNA
caaatttgcgcgggttggagcctggcgtagtcatggccgccttccgcgacatagaggaggtgagccaggggctgctcagcctgctgggcgccaaccgcgcggaggcgcagcagcgacggctgctggggcgccacgagcaggtggtggagcggctgctggaaacgcaagacggtgccgagaagcagctgcgagagatcctcaccatggagaaggaagtggcccagagccttctcaatgcgaaggagcaggtgcaccagggaggcgtggagctgcagcagctggaagctgggcttcaggaggctggggaggaggacacccgtctgaaggccagcctccttcagctcaccagagagctggaagagctcaaggagattgaggcggatctggagcgacaggagaaggaggtcgacgaggacacgacagtcacaatcccctcggccgtgtacgtggctcaactttaccaccaagttagtaaaattgagtgggattatgagtgtgagccagggatggtcaaaggcatccatcatggccccagtgtggcccagcccatccacctggacagcacccagctctccaggaaattcatcagcgactacctctggagtctggtggacaccgagtggtagccaggagcctcgtggctgcgtcttgcac

SEQ ID NO: 2952 - DNA, 2909 bp, Homo sapiens
  source 1..2909: mol_type = genomic DNA
aattccggaggcggcattcggtggtcagaggcctgtgcggctgcaggtagagtgtcttaggaacctaggaaataactcggaacctgtaacgtcccactggtttggacatattcctctcctgatctggcctcatctgttccagggaggtgggattgaaacatatgcagtaatgtcacctcaaaagagagttaagaacgtccaggcacaaaacaggacttcacaaggtagtagtagttttcagaccacgctttcagcctggaaagtaaaacaggatccaagcaactcgaagaacatctcaaaacatggacaaaacaatccagtgggagattatgaacatgctgatgatcaagctgaagaagatgctttgcaaatggcagtgggatattttgagaaaggtcccattaaagcttcacagaataaagataaaaccttggaaaaacacttgaaaactgtggaaaatgtggcttggaagaatgggttagcttcagaagaaattgatattctattaaatattgcactcagtggcaaatttggaaatgctgtaaacacacggatattgaagtgcatgatcccagcaacagtaatatcagaagattctgtggttaaggcagtctcctggctttgtgttggcaagtgttctggtagcaccaaggtacttttttatcgttggctggttgcaatgtttgacttcattgatcgtaaggagcaaattaacttgctctatggcttcttttttgcttcattgcaagatgatgcactgtgcccttatgtttgccatttgttatatttacttaccaaaaaagagaatgtcaaaccatttcgtgtgagaaaactgcttgatcttcaggccaaaatgggaatgcagcctcatctccaggctttgttgtcactgtataagttctttgctcctgctctgatttcagtatctttgcctgtaaggaagaagatatattttaagaattcagagaatctatggaagacggctctgcttgccgtgaagcaaagaaaccggggaccttctccagaacctctgaagttgatgttaggtccagctaatgttcgtcctctaaaaagaaagtggaattctctctcagttataccagtgctcaattccagtagctacactaaagaatgtggaaaaaaagagatgagtctttctgattgtctgaatagaagtggatcatttccactagaacaacttcaaagcttcccccaacttttacagaacatccattgcttagagctgccttctcagatgggctcagtgctaaacaactctctgctgcttcactacattaactgtgtcagagatgagccagtcttgctgaggttttattactggttgagtcaaacattacaagaagaatgtatttggtacaaggtgaataattatgaacatggaaaagaatttaccaacttcctggataccatcatcagggcagagtgcttcttacaagaggggttttattcctgtgaagcattcctgtataagagccttcctctctgggatggcctttgttgtcggtcacagttccttcagcttgtgagctggattccttttagtagcttctctgaggtgaaaccacttctttttgaccatctagcgcagctcttctttacatcaaccatttatttcaagtgtagtgtgcttcagagtctgaaagagctattgcagaattggctgttgtggctttctatggacattcacatgaaacctgttacaaacagtcctctagagacaactttgggtggatccatgaactctgtgtctaaactgatccactatgtagggtggctatccactactgcaatgcgcttggagagcaacaatactttcttgctgcactttattttggatttctatgagaaggtgtgtgacatatatataaattataaccttccattagtggtattgtttcctcctgggatcttctattctgcactcctcagcctggataccagcatcctgaaccagctgtgttttattatgcacagatatcgtaaaaatttgactgccgcaaagaaaaatgagttggtacaaaagacaaaatcagagttcaatttcagcagcaagacttatcaagaatttaatcactatttgacatcaatggttggttgcctgtggacgtccaaaccctttgggaaaggaatatatattgaccctgaaatcctagaaaaaactggagtggctgaatataaaaacagtttaaatgtagtccatcatccttctttcttgagttacgctgtttcctttttgctacaggaaagcccagaagaaaggacagtaaatgtgagctctattcggggaaagaaatggagctggtatttggactatttattttcacaggggttacaaggcttgaaactttttataagaagtagtgttcatcattcttccattcccagagcagagggcataaactgcaacaatcaatattaaatgaatgttgacataaactgaacacactggactaaactcactcctcattgctagagcaaagtggctcatcttgagttcccattttcatttcactgacagactgccatcctcaaggagtactcagactggccttctgttcatggcttaggagagccttggtgtgcctaactgatttttcaaaatttagatttttttagcctaccagtgaaaaatgaccccttcatcatcaggctctgcgttctaccaaattgtatgtaaaaagacacatctgttttgtggtaggattttttcacatttttgggtactatgagctgcattgatggaagacagcaggcaatatgtggtgacagttaactcacagacataaacatgcaaaatactttgctgtctctggggatattgccatttttcttactgtgagcaacagcaccaacaccaagttaacaggatgcaacatgtgtatgactct

SEQ ID NO: 2953 - DNA, 2594 bp, Homo sapiens
  source 1..2594: mol_type = genomic DNA
gcccagggatcagtgtctttcaatgatgtgactgtggacttcactcaggaggagtggcagcacctggatcatgctcagaagactctatatatggatgtgatgttggaaaactattgccacctcatctctgtggggtgtcacatgaccaaacctgatgtgatcctcaagttggaacgaggagaagagccatggacatcatttgcaggtcatacctgcttggaagaaaactggaaagctgaagactttttagtgaaattcaaggaacaccaagagaagtattctagatcagttgtaagcatcaaccacaaaaaactggtgaaggagaagagtaaaatatatgaaaagacatttactctaggcaaaaaccctgtgaattcaaaaaatctacctcctgaatatgatactcatggaaggattttgaaaaatgtttcagaattaatcatcagtaatctaaatcctgcaagaaagagacttagtgagtataatggatatgggaaatcactcctgagtactaaacaagagactactcatcctgaagtcaaatcccataatcaaagtgccagagctttcagtcataatgaagttcttatgcagtatcagaaaacggaaactccagcacagtcatttggatataatgactgtgagaaatcattccttcaaaggggaggcctgattacacatagtagaccttacaaaggagaaaacccatctgtatataataaaaaaagaagagcaaccaatattgaaaaaaaacatacatgcaatgaatgtgggaaatctttctgcaggaaatcagtattgattctgcatcagggaattcactcagaagaaaaaccctatcaatgtcatcaatgtggaaatgcatttagaaggaaatcatatctcattgatcatcagagaactcacacaggagagaaaccctttgtttgcaatgaatgtggtaagtccttccgcctcaagacagccctcactgatcatcagagaacacacacaggggagaaatcgtatgaatgtctgcaatgtaggaatgccttcagattgaagtcacacctcattcgtcatcagagaactcacacgggagagaaaccatatgagtgtaatgactgtgggaagtccttccgccagaagacaacactctctctacatcagagaatccatacaggtgagaaaccctacatttgtaaagaatgtgggaagtcctttcaccagaaggcaaatcttactgtacatcagagaactcatacaggggaaaagccctatatttgtaatgaatgtgggaaatccttctcccagaagacaacccttgctcttcatgagaaaactcataatgaggagaaaccctatatttgtagtgaatgtggaaagtccttccgccagaagacaacccttgtagcacatcagagaacacatacaggggagaaatcttatgaatgtcctcactgtgggaaggcctttagaatgaagtcatacctcattgatcatcaccgaactcacacaggagagaaaccatatgaatgtaatgaatgtggtaaatcattcagtcaaaagacaaatctcaatctacatcagagaattcatacaggggagaaaccctatgtttgtaatgaatgtgggaagtcctttcgccagaaagcaaccctcactgtacatcagaaaatacataccggccagaaatcctatgaatgtcctcagtgtgggaaagcctttagcaggaagtcatatctcattcatcatcaaagaactcatacgggagagaaaccatataaatgtagtgaatgtggaaagtgcttccgccagaagacaaatcttattgtacatcagagaactcacacaggtgagaaaccctatgtttgtaatgagtgtggtaagtctttcagttataagagaaacctcattgtccatcaaagaactcacaagggagaaaacattgaaatgcaataaatgatgtggtttcttatatgaattctttacaagctgttgtaaacatttagttttaaaaagaaaagcatgctgaaacatgttaatgtaattttaaatcacaagtctaataattattaaagtaccatacggaataactgtctactgtttactagcatataaaataagtatgatcattattattgaactctatcagctatgaagctaaattttaaagtcaactgctcttcctactgactcaaatagtttattttttaaaaatacttatataatacatgcagagacaagatacacaatgattataagtattaatctccataagagaaaatatttatgaactatatttctcattgcactctgtaataaaaagcagttagttgttacttacctaagagttaccacttccgtagcctataacatcaaaacgtagtttttgcatgttttcaattttataaatatatattttatcagacatcatgaattattttgtgtcttgcttatttcactcaattttttaagatctgtacattattgcatgtggcagtagtgtattttcattttgcatactattccattttaagaatatattgctgtttatcctattgatggatatttgtattttttatacttttgtgtaataataaaaatactgctgt

SEQ ID NO: 2954 - DNA, 1899 bp, Homo sapiens
  source 1..1899: mol_type = genomic DNA
aaaaagactttttttagaaaaaaatttcctcttgagccatcatgcacatctgactgcagccccagcgagcccttccttccttgtctgactgctcttcttctcgatttcttcttgttctgccttctcggtttgcagccctgacccccgctgtgtgtctggcccttggtgactgtccgtgtttctgttcctgtcattgtaactgtgacttttctctctgtctgcccccccttcctactggttcatgcttctcccccattcccaccctctctgcccggcctcccgctcccgccctttctcctcatgcacccggcctcgtctctgtagtctctgcacttgtctcccattaaggtcccatccatgggggggcggaagcgggagcgcaaggctgccgtcgaggaggacacctccctgtcggagagtgaggggccccgccagcccgatggggatgaggaggagagcacagccctcagcatcaacgaggagatgcagcgcatgctcaaccagctgagggagtatgattttgaggacgactgtgacagcctgacttgggaggagactgaggagaccctgctgctttgggaggatttctcaggctatgccatggcagctgcagaggcccagggagagcaggaagatagcctggagaaggtgattaaagatacggagtccctgttcaaaacccgggagaaggagtatcaggagaccattgaccagatagagctggagttggccacggccaagaacgacatgaaccggcacctgcacgagtacatggagatgtgcagcatgaagcgcggcctggacgtgcagatggagacctgccgccggctcatcacccagtctggagaccgaaagtctcctgctttcactgcggtcccgcttagcgacccgccgccgcgccaagcgaggctgaggactccgatcgcgatgtctcatctgacagctccatgagatagagacctgcctcccccttgcacccgaggccctcgcagcagggagctcagcgaggcagagggtggggctgcacagaggggaacatcagctgcagctctgcaccaggccggtccctggggactggggcgctcctccctcaggctttctccctcagtcttggcttctccagggctctggggtgtctggagctaggcttggccctaccattctggggccatttccaccacagttggggctctcctgccttcacgcgtgggtgtctgctacttccccatctttaaaatgctgccagagcgattgcggcccctcaccttgtccacgtatcaggaatgtgaatgtgggacctttcctccatccctgttgtccggagccagctcactgtcttccacactggtgctaactggcccaggcactggagtggaatagaatgcagctggaggctacgcatggcctctgcagcacacgcagctggagagggcttctgtccctgtcagcggcagagggcgttggggctggccggggcaccttgtccctgctatggtccacgtgctcacgctgtccacctgccaggtggagtgtatgtggctgtggccctccctcgtggaggtgccgtgctttaaagaggccttagtgcccgggatgggcacagtgttttgaagggaggtgggagctcttgctctcctggtcactgcagaatgacagagaaggtgaagctccatgcatgtgtgcgcgggtgtatgtgcgctcagggtctctgtttaagtatcagctaaagatgtgcttcctccgtgtctgtcatacactgagaccaacaggctacagtgtccctgattcttggaaaagcctggagaagctggggagatgcggttcacaatgcctcggtataggaggctgtgttgagctgacattcaaatggattctttaataataatgaaactggcgagt

SEQ ID NO: 2955 - DNA, 859 bp, Homo sapiens
  source 1..859: mol_type = genomic DNA
ctctggctgccttctcctgagagtcggagccacagccagagccctgcccaggccgagccggagctgcagcccgagcgcggtggtgccctcagccccgtcctcttgtcctcctcagcctcggtgccttggaatttgtgtcgctgagtcagcaagcctttcagatttgcccggtttttgttgtttgtggtttgtatcaagatgggaactcaaacaagtcattcctcctaaggagctggtgtcttcatccagaagggacagtttgtgccagctctccagagagaaaagaaacttccaattgaagacactgagctgaaccattccgcccgcccgcccgcccgagggcactccagatctgccggaggcgctgggcaatgaccccgggactccaggccagaggggtctgaagctgtttgggaaagcagcgggactccttgggaagatggccatggccccaagcccttccctggtgcaggtgtacaccagccccgcggctgtggccgtgtgggaatggcaggacgggctgggcacctggcacccctacagtgccaccgtctgcagcttcatcgagcagcagtttgtccagcagaagggccaacgttttgggcttgggagcctggcccacagcatccccttgggccaggcagacccctcgctggccccttacattattgacctccccagctggacccagttccgccaggacaccggcaccatgcgggctgtgcggagacacctgttcccccagcactcagcccctggccgaggtgtcgtctgggagtggctgagcgacgatggctcctggactgcctatgaagccagcgtctgtgactatctggagcagcaggtggccaggggcaac

SEQ ID NO: 2956 - DNA, 4529 bp, Homo sapiens
  source 1..4529: mol_type = genomic DNA
gtttgcatgcatccccacaatgttctgtctgatgtggtgaactataccctgtggttaatggagtgttctcatgcttcaggatgctgccatgctaccatgtttttttcaatttgcttctcatttcgggccgtcttggagctctttgaccgctatgatggtcttcgtcgtctggtgaacttgatcagtactttggagattctaaatttggaagatcagggtgcacttctgagtgatgatgaaatatttgctagccgccaaactgggaaacatacctgcatggccttgcgcaaatactttgaggctcacctggccattaaattggaacaagtgaagcagtcacttcagaggactgagggtggcattcttgtccacccacaacccccgtacaaggcatgctcatatactcatgaacagattgtggaaatgatggaatttttgatagaatatggcccagcgcagctatattgggaaccagctgaagttttcctcaaactttcttgtgtgcaactcttgttgcagcttatttctattgcctgcaattggaagacctattatgcaaggaatgacactgtgcgctttgctttggatgtcctggctattcttactgtggtgccaaaaatccagctccagttggcagaatcagtggacgtgttggatgaggctggatctacagtctctactgtaggtatcagcattattttgggagtggctgagggtgagttcttcatccatgatgctgaaattcagaagtcagcacttcagattatcatcaattgtgtgtgtggcccagataaccgaatatccagtattggtaaatttatctctggtactcctcggagaaagctgcctcagaaccctaaaagcagtgagcacaccctggccaagatgtggaatgtggttcagtccaacaacggcatcaaggtgctcctgtccttactgtccattaagatgcccatcacagatgcagaccaaatccgggccctggcctgcaaagccctagtgggcctgtctcgcagtagcactgtccggcagatcatcagtaaactgccccttttcagcagctgccagatccagcagctgatgaaggagcctgtgctgcaggacaagcgcagtgaccatgtcaagttctgcaagtatgctgctgaactcattgaacgggtgtcaggaaaaccacttctcattggcactgatgtttccctagcacgactgcagaaagcagatgttgttgcccagtcaaggatctccttccctgagaaagagctgcttttgttgatacgaaaccatcttatttctaaagggcttggagaaacagcaaccgtgctgacaaaagaggctgacctgcccatgactgctgcctcccattcttctgcctttaccccagtcactgctgctgcttctcctgtctctctaccccgaacccctcgtatcgctaatggcattgcaactcgtctgggcagccatgctgctgtgggtgcctctgcgccttctgcccctactgctcatcctcagccacggcccccccagggtccgctagctctgcccggcccatcttatgcaggcaactcccctttgattggtagaatcagttttatcagagagaggccatcaccctgcaatggcaggaaaatcagagtgttgcggcagaagtcggaccatggtgcctacagccaaagcccagccataaaaaaacagctggacagacatcttccttccccacctacgctggacagtataatcacagagtatcttagagaacaacatgctcgctgcaagaatccagttgccacctgcccacctttctccctctttactcctcaccaatgtcctgagccaaaacagaggcggcaagcgccaataaactttacgtcaaggctaaaccgcagggcatcatttccaaagtatggaggggtggatggcggatgctttgataggcaccttatctttagcagattccgtcctatttcagtgttccgggaagccaatgaagatgagagtggcttcacctgctgtgcattctcagcacgggagcggttcctgatgcttggcacctgcacagggcagctgaagctctataatgtgtttagtggacaggaggaggccagctataactgtcacaactcagccatcacacatcttgaaccttccagggatgggtccttgctgctgacatctgctacttggagccagcctttgtctgcactttggggaatgaagtcagtatttgatatgaagcattccttcacagaagatcactatgttgagttcagtaagcactcccaggatcgggtcatcggcacaaaaggagacattgcccacatttatgatattcagactggcaacaagctgttgactctgtttaacccagatcttgccaacaactacaagaggaactgtgccacctttaatcctacagatgatcttgtcttaaatgatggcgtcctctgggatgtccgctctgcacaggccatccacaagtttgacaagttcaatatgaacatcagtggtgttttccatccaaatggactggaggtgatcattaatactgagatttgggaccttcgaacttttcatcttttgcatactgttcccgctctggatcagtgtcgcgtggtgttcaatcacacgggaacagtgatgtatggagctatgttgcaggcagatgatgaagatgacttaatggaagagaggatgaaaagcccctttgggtcatccttccgaacatttaatgcaactgactacaaacctatagcaaccattgatgtgaaacggaacatctttgacctgtgtacagacaccaaagactgctatcttgctgtcattgagaatcaaggcagcatggatgccctgaacatggacacagtatgcaggctgtatgaagtgggcaggcagcgtctggcagaggatgaggatgaagaggaggaccaggaagaggaagaacaggaggaagaagatgatgatgaagatgatgatgacaccgatgatttagatgagcttgacactgaccagttgctggaggcggagttggaggaggacgacaataatgagaacgcaggggaagatggggacaatgacttctctccctctgatgaggagctagcaaaccttctagaggagggagaggacggggaggatgaagactctgatgcagatgaggaggtggaactgatcctgggggacactgacagctctgacaactctgatttggaagatgacatcatcttatctctgaatgagtgaggagccatcactgcttggaagagattcttggcagagagaagaggggacaaatttggttgtgaagtaaacaagaaacacaagacggctaaaactctccaggggcaggtaaagccctgctgggctcagaagcactatagaatttgctgtacacactgaagtgggtctgtgtcacacaggtatttcttggtcctctggagagcagaggactcactcagctctttgcttcatgcctcgctttaatggtagtaaacacttaaccagtggaatagtctgactgctggtactgatggcatcagaagaaaacaggttaacaatcaagtagtgaaagcactatattctagtcattaactcaacggagccagtctcaactctgctgggagcacccacaggtctctgtgggggagacagggactataacagggaggcagaattcaggttggcttgacaacacaccttaggaacatgtgctaaggggctaaggaggcatcagctgtcttccttattctaccagggctgaaaatcggagtcacttaggaggcagcatgagaacagtggcacaccaccagtgaggcacatgttgcctttttgtctttaagcaacaccttagacagggcctgaaccctgggtgggggcactggatgcctgaagtaagtaagttttctcagtggggcagtctcataaaatcaccaggacattgaccacctgacctcccctaactagtgctggccaaggcctgagagttcacagaacctgctaggtcttaagagccaaaggaaggaagtggttgagggccaggaaagagaaggaatgtcatgccagggtgttactcctcaccaaaacttggcagttctttttggggccatgggacacctttctctgaagaggggttggataaggcaaaggttgaagtgtcttctctaggcacgttttctagcatgtttccttttacttggttctgtctcacaaagctgggaggtagatgattcttccgggtcctgagcacctgcttcatgaaggaagataggtagcccagagaagaagttttggacttaacaacataccaaggcagctctggcctgtgactcaggcgtttgttggagagctgcaggaaaaccactgcagtgtgcctgcaacaggacaagacccactcctgtttctggcggtaccagctaccctggaatggtggcgtgtcctgctgtacccaactgacttgcttaggtacctggcagctgtgaccacagctcaagtaaaaaaacaaaaacaggcaaataaataaacatgcttaacatgtc

SEQ ID NO: 2957 - DNA, 793 bp, Homo sapiens
  source 1..793: mol_type = genomic DNA
gacaacaagatggcggcgctgcgggacggctagcggccctgcgtgtactttcccaagcaccaccaggccaaaggtctctcagttcagagcagaaagccgtatacccagaggagcaggcagataacagaaacttccagaaacctctgtggagacagtggaagaggcaaaagggagttcctgacagctggattctagaagtagaactatgagctcacctttggcctcccttagcaagacccgaaaagtgcccctgccctcggagcctatgaatcctgggaggcgaggaatccgcatctatggagatgagcggtgacctaggcatccctgtctgcagaagatgaggtggacatgttgagtgatgggtgtggctcagaagaaaagatctcagtcccttcctgctatggcggcataggtgcccctgtgagtcggcaagtccctgcatcccatgactcggagctgatggccttcatgacgaggaagttgtgggacctggagcagcaggtgaaggcccagactgatgagatactgtccaaggatcagaagatagcggccctagaggacctggtgcagaccctccggccacacccagccgaggcaaccctgcagcggcaggaggaactggagacgatgtgtgtgcagctgcagcggcaggtcagggagatggagcggttcctcagtgactatggcctgcagtgggtgggcgagcccatggaccaggaggactcagagagcaagacagtctcagagcatggcgagagggactggatgacagccaagaagttctggaagccag

SEQ ID NO: 2958 - DNA, 2643 bp, Homo sapiens
  source 1..2643: mol_type = genomic DNA
gcctgacgcggcgttgcgtcccccgggagctgcgctaggcgaacggctgcggcgctttgtgctccagtcgctcctaacgctccctggcccggccggggccgcgcagttagggcatctgaggcggggagaagcggcggggagacgccggctgccagcatgtcgctgcctccggagaaagcctccgagctgaagcagctcatccaccagcagctgagcaagatggatgtccatggtagaataagagaaatccttgctgagactatacgggaagaattggcacctgatcaacagcatttatcaacagaagatttgatcaaagcccttagacgtcgaggaatcattgacgatgtgatgaaagaacttaattttgttactgacagtgttgagcaagaactcccttcctctccaaaacaacctatttgttttgatagacaatcgacattaaaaaaaagtgatggaactagaatggctgattcaacaacaatgttatcaataagtgatccaattcatatggtgctaatcaaaacagacatatttggtgagacgactttagtagcatcatattttctggaatggcgatcggttttgggctcagaaaatggagtgaccagtctgactgtggaacttatgggtgtaggcacagaatcaaaagtttctgtgggaattttaaatataaaacttgaaatgtatccaccactcaatcaaacgttatctcaagaagtagtgaacacacagcttgctttggaacgtcagaaaactgcagagaaagagcgattatttcttgtatatgctaagcagtggtggagagaatatttgcaaattcgaccctcacacaactcacgactggttaagatttttgcacaggatgaaaatgggataaatagaccagtctgttcctatgttaaaccacttcgagctggacggcttcttgatactccaaggcaagcagcaagatttgttaatgtccttggttatgaacgagcccctgttattggaggaggaggtaaacaggagcagtggtgcactctgctggcctttctctgtagaaacaagggtgactgtgaagatcacgctaaccttctgtgcagccttcttcttggatatggattagaagcctttgtttgtgttgggaccaaggcaaaaggagtacctcatgcatgggttatgacttgtggaactgatggggccatcactttttgggagagtttaacaggacacaggtacatccataaacctaccaatcctgatgaacctccagttgctgaacagcccaaaccactgtacccatatcgaacaattggttgtgttttcaaccatcagatgttcctgggaaattgtcaaccctctgatgcagtagaaacctgtgtatttgatttgaacgatgaatccaaatggaaacccatgagtgaggaagcaattaaatctgtgtgtgctcctggagctacaacatcccttcctccctttccacctctgtgtgcatccacaattgacgcgtcagtaacaagtaatgaaattgaaatgcagctgaggctcctggtgtcagaacacaggaaggatcttggcctcactactgtttgggaagaccagctctcctaccttttatcaccagctttggcttcttatgaatttgagcgtacaacaagtatatcagcaggcaatgaagaatttcaagatgccataagaagggctgtacctgatggtcacacatttaaagggttcccaatacattttgtgtatagaaatgcaagacgtgcatttgccacatgtcttcgatctcctttctgtgaagaaataatctgttgccgtggagaccaagtgcgactggcagttcgtgtccgagtatttacttaccctgaatctgcatgtgctgtttggatcatgtttgcttgtaaatatcgctcggtattatagggccaatatttatataagatttatacctgtgtttaattggaattttacacattgtacattacttagctatttagaggtttgttattttaaaatcacaatctggcttgaatggcatacttcaattttgtatatacttgactggtaatgtttaaaaaaaatcatgcattcctttaaaaattaaggctgaaaaacttgtataaatctccctggaatttagtataaattaagtgtatattctattttaataaatgctactttgtttacagttatcagtagtttaaatattaatataaaatgcattcagttttctttacacaaacaggtaatcaaagagatgtttgtctaagggtttgagccctagacaaatcagtatgatcattacttttcacaggttaatggaattattttatacagattaggagaaattaacctcatgacagatttatttattgcattggtgaaaataaatgttaatgaattaccacttttgtggtttattcgtggtccttgggatatttgagactgtccagaaatttatggttggaccttgaagcaagagtaggaaaaaactaataccagaaaagcataaatattaataacctcatatgaaagtacatgaatcatttagaaatatttatcactgtgatttgttgtaaaaatgaattgggtattttagaaaaactttattatacctctttgttatgatactgataaattgtgatcttgcagtcg

SEQ ID NO: 2959 - DNA, 5339 bp, Homo sapiens
  source 1..5339: mol_type = genomic DNA
acagtccctggtaaacacaagtagtattacaagtcgggagctcttcaagtcttggatgagactgtagagcggtcttgtgcggcaatgtgctaccttaaaataaataaataaataaacccctgttatgtccggagtttgtttccacccggagaggaatggaagagcaccagagagcgcttagctttctggttggatgttttgggttcatcagacttaacttctgctagaaattgttaccagcctctattagaaaatcccatggtgtcagaaagtgatttttctaaagacgttgcagtgcaagtgttgcctttggataaaatagaagagaacaacaagcaaaaagcaaatgacatcttcatttctcagtatacaatgggacagaaagatgctctaagaacagttttaaagcaaaatgtctcactttgtctcacaggctggagtgatcacagtggggtgatcacaactcactgcagtctctacctcctcaggctcatgagatcctcccacctcagcctcccgagtagctgggactacagagctcaaagcatgcctgtttttaaggaagtaaaggtacatctgttagaagatgcaggcatagagaaggatgctgttactcaggagactagaatttcacccagtggaattgattcagctacaaccgtggctgcagcaactgctgctgccattgcaaccgcagctccgttgataaaggtgcagagtgatttggaagcaaaagtcaattctgttacagaattacttagtaaattacaggagactgataaacacctgcaacgtgttacagagcagcaaacaagcattcagaggaaacaagagaaattacattgtcatgatcacgaaaagcaaatgaatgtgtttatggagcagcacataaggcatcttgaaaagttacaacaacaacaaatagatattcagactcattttattagtgctgcactcaagactagtagttttcagcctgttagtatgccctcctccagagcagtggaaaagtattccgtaaaaccagaacaccctaatcttggtagctgtaatccatctttatataacacatttgcttccaaacaagcacctttaaaagaagttgaagatacgagttttgataaacagaaatctcctttggagacaccagcacctcgcagatttgctcctgtacctgtttcaagggatgatgaactatcaaagagggaaaatcttttggaagaaaaagaaaatatggaagtgtcgtgtcacagaggaaatgtaagactattggaacaaattttgaataataatgattctttgacaagaaaaagtgaatcatcaaacaccacctcactaactaggtcaaaaataggatggactcctgagaaaacaaacagatttccttcctgtgaagagctagaaacaactaaagtgactatgcagaagtctgatgatgttcttcatgaccttggccaaaaagagaaagaaacaaatagcatggtccagccaaaagaatctctgagtatgttgaagcttccagatcttccacagaattctgttaagcttcaaacaaccaatacaacaagatctgtattgaaagatgctgagaagattttgagaggagtacaaaacaataaaaaagtacttgaagaaaacctggaagctattattcgtgcaaaagatggagctgccatgtattcgcttatcaatgctttatctaccaacagagagatgtcagagaaaattaggatcagaaagacagtggatgaatggattaaaactatttctgcagaaattcaggatgaactgtcaagaacagattatgaacaaaaaagatttgatcagaagaatcagagaaccaagaaaggtcagaatatgactaaagatattagaaccaacacacaagataaaactgtcaacaaatctgtaattccaagaaaacattctcaaaagcaaatagaagagcattttagaaatctacctatgaggggcatgcctgcttcaagtttacagaaagagagaaaggaagggcttttgaaagcaaccacagtaatacaagatgaagattatatgttacaagtctatggaaagccagtttatcagggccatcgaagcactcttaaaaaaggaccatatctcagatttaattctccatctcctaagtccagaccacagagaccaaaagtaatagaacgagttaaaggcactaaggtaaagtcaataagaacacagactgacttctatgcaacaaaacctaagaagatggattctaaaatgaaacattctgttcctgtgttacctcatggcgatcagcaatatttgttcagcccaagtagagaaatgcctactttttcaggtacattggaaggtcatctgattcctatggcaattcttttaggacaaacccaaagtaatagtgataccatgccacctgctggagtgattgtcagcaagccacaccctgtaactgtgactacttctattcctccatcatctcgaaaagtagaaactggagtaaagaaacctaacatagccattgtagaaatgaagtcagaaaaaaaggatcctcctcagcttactgtgcaggtattacccagtgtagatattgacagcatttcaaatagtagtgctgatgtcctttcacctctgtctagccccaaagaagcatctcttcctcctgtgcaaacttggataaagactccagaaattatgaaggtagatgaagaagaggtgaagtttccaggaactaactttgatgaaataatcgatgtcatacaggaagaagaaaaatgtgatgaaattccagactctgaaccaattctggagtttaacagaagtgttaaagctgattctacaaaatataatggtcctccatttccgccagttgcttctacttttcagcccactgctgatattctggataaagtaattgagagaaaagaaacactggaaaatagcttaattcaatgggtagagcaagaaataatgtcaagaattatctctgggctctttccagtccagcaacagattgcacctagtatcagtgtttcagtcagtgagacaagtgaaccactgacttctgacattgtggaaggaacaagcagtggcgccctccagctttttgttgatgctggtgttcctgtgaactcaaatgtgattaaacattttgttaacgaagctcttgctgagaccattgctgtcatgctgggtgacagagaagcaaagaagcaaggtcctgttgctacaggtgtttctggggatgcttcaacaaatgaaacatatttgccggcaagagtgtgcaccccactgcctaccccacagcctacgcctccttgctcaccttcatcacctgctaaggagtgtgttttggtaaagactccagattcttctccctgtgattcggatcatgatatggcttttcctgtgaaagaaatatgtgctgaaaaaggagatgatatgcctgccatcatgcttgttaatactccaacagttacccctactactacacctcctccagcggcggcagtttttaccccaactttgtcagatatttccattgataaattgaaggtatcaagcccagagcttcccaagccatggggtgatggagacctgccactggaagaagagaaccctaactcacctcaagaagaacttcatccaagagctattgtaatgtctgtggctaaggatgaagaaccagagagtatggatttccctgctcagcctccacctccagagccagttccctttatgccatttcctgccggcaccaaggccccttccccctcacagatgccaggttctgattcatcaacactggagagcacattgagtgttactgtcactgaaactgaaactttagataaacccatctctgaaggagagattttatttagctgtggtcaaaaattggcccccaagattttagaagatataggactgtacctgacaaaccttaatgatagcttatccagcactctgcatgatgccgttgaaatggaggatgatcctcctagtgaagggcaagtgattaggatgtcccataaaaaatttcatgcagatgcaattctttcttttgctaaacaaaaccaggagtcagcagtttcccagcaagcagtctatcattcagaggacttggaaaacagtgtgggtgaacttagtgaaggacaaagaccccagctaacagcggcagcagagaacatcttaatgggacattctctctatatgcagccacctgtcactaatacacagtctttggatcaacaatgtgatcctaaaccattatctcggcaatttgacacagtttcaggtagtatttatgaagattcatgtgctagtcatggtccaatgagtttgggagaattggagttggagccaaattctaagctggttcttcccacaacacttctgacagcacaagaaaatgatgttaatttaccagtagccgctgaagatttttcccagtaccaactaaagcaaaatcaggatgttaagcaagttgaacacaaaccatcacaaagttacctacgtgttagaaataaatctgatattgcaccttcacagcaacaagtttcaccaggtgatatggatcggacacaaattgagcttaatccgtacctcacatgtgtattttcaggtgggaaagcagtgccactctccgcttcacagatgccccctgccaagatgtcagtgatgctgccgtcagtgaacctcgaggactgctctcagtctctgagtctcagcacaatgcaggaggacatggagtcttcgggggcagataccttctgaacgggaagagacagccagcacagtgtttatgccactggttttaaagtcattttaccttggcttaaaaccctctctcagactgtttggtttttgagcatattctgaaaaaaaaattccaatattttaaaataaaacaaaaagcataatttgggtatttaaagtttttaaataaaataagtataagtcattataagtctgattgtgagttgtttcttagaatcctgagatagcatagagtagtgaaagggcatggcttttgacatctaggcatttaatctataggtgtaattatctgtatgtatttataaaattatgtagctcaaggttattcattctaacatttttataacagcaaatagaaaaaatcaaatgtctatcaataatagactggttttaaagtgatggtacatcagtacaatggaatactatgtattacaaaaaaaaatttaaaaagtttattgatatggaataatctttgagatgcactgttaaagtgaaaaaagccatgtgcaaaatagtgtgtgaactatgcagttgttgaaattatttaaaatggggtggggagg

SEQ ID NO: 2960 - DNA, 2385 bp, Homo sapiens
  source 1..2385: mol_type = genomic DNA
gcgtctcttgtttgtgcggctgaccagttggcgacatggtggcacccgtgctggagacttctcacgtgttttgctgcccaaaccgggtgcggggagtcctgaactggagctctgggcccagaggacttctggcctttggcacgtcctgctccgtggtgctctatgaccccctgaaaagggttgttgttaccaacttgaatggtcacaccgcccgagtcaattgcatacagtggatttgtaaacaggatggctccccttctactgaattagtttctggaggatctgataatcaagtgattcactgggaaatagaggataatcagcttttaaaagcagtgcatcttcaaggccatgaaggacctgtttatgcggtgcatgctgtttaccagaggaggacatcagatcctgcattatgtacactgatcgtttctgcagctgcagattctgctgttcgactctggtctaaaaagggtccagaaggtagagatcttttcctagcaagctgttcacaagattgcctgataagaatatggaagctgtatataaagtcaacatctttagaaactcaggatgacgataacataagactgaaagaaaatacttttaccatagaaaatgaaagtgttaaaatagcatttgctgttactctggagacagtgctagccggtcatgaaaactgggtaaatgcagttcactggcaacctgtgttttacaaagatggtgtcctacagcagccagtgagattattatctgcttccatggataaaaccatgattctctgggctccagatgaagagtcaggagtttggctagaacaggttcgagtaggtgaagtaggtgggaatactttgggattttatgattgccagttcaatgaagatggctccatgatcattgctcatgctttccacggagcgttgcacctttggaaacagaatacagttaacccaagagagtggactccagagattgtcatttcaggacactttgatggtgtccaagacctagtctgggatccagaaggagaatttattatcactgttggtactgatcagacaactagactttttgctccatggaagagaaaagaccaatcacaggtgacttggcatgaaattgcaaggcctcagatacatgggtatgacctgaaatgtttggcaatgattaatcggtttcagtttgtatctggagcagatgaaaaagttcttcgggttttttctgcacctcggaattttgtggaaaatttttgtgccattacaggacaatcactgaatcatgtgctctgtaatcaagatagtgatcttccagaaggagccactgtccctgcattgggattatcaaataaagctgtctttcagggagatatagcttctcagccttctgatgaagaggagctgttaactagtactggttttgagtatcagcaggtggcctttcagccctccatacttactgagcctcccactgaggatcatcttctgcagaatactttgtggcctgaagttcaaaaactatatgggcacggttatgaaatattttgtgttacttgtaacagttcaaagactctgcttgcctcagcttgtaaggcagctaagaaagagcatgcagctatcattctttggaacactacatcttggaaacaggtgcagaatttagttttccacagtttgacagtcacgcagatggccttctcacctaatgagaagttcttactagctgtttccagagatcgaacctggtcattgtggaaaaagcaggatacaatctcacctgagttcgagccagtttttagtctttttgccttcaccaacaaaattacttctgtgcacagtagaattatttggtcttgtgattggagtcctgacagcaagtatttcttcactgggagtcgagacaaaaaggtggttgtctggggtgagtgcgactccactgatgactgtattgagcacaacattggcccctgctcctcagtcctggacgtgggtggggctgtgacagctgtcagcgtctgcccagtgctccacccttctcaacgatacgtggttgcagtaggattggagtgtggaaagatttgcttatatacctggaaaaagactgatcaagttccagaaataaatgactggacccactgtgtagaaacaagtcaaagccaaagtcatacactggctatcagaaaattatgctggaagaattgcagtggaaaaactgaacagaaggaagcagaaggtgctgagtggttacactttgcaagctgtggtgaagatcacactgtgaagatacacagagtcaataaatgtgcactgtaatggacttaataactacatgcttgcagtcactggtatcttaaaatattatcatgtaaacaggtcatctttaccttcataa

SEQ ID NO: 2961 - DNA, 524 bp, Homo sapiens
  source 1..524: mol_type = genomic DNA
gtgcgcccttccccgcgcgcggcccctcctgctgggctggggtctgtggctgacgtccgcttttcccggaacggcaaagagaagtcattcagaattcaaaagaagttctaagtttattgcaagaaaaaaaccctgccttcaagccggttcttgcaattatccaggcaggtgacgacaacttgatgcaggaaatcaaccagaatttggctgaggaggctggtctgaacatcactcacatttgcctccctccagatagcagtgaagccgagattatagatgaaatcttaaagatcaatgaagataccagagtacatggccttgcccttcagatctctgagaacttgtttagcaacaaagtcctcaatgccttgaaaccagaaaaagatgtggatggagtaacagacataaacctggggaagctggtgcgaggggatgcccatgaatgttttgtttcacctgttgccaaagctgtaattgaacttcttgaaaaatcaggtgtcaacctagatggaaagaagattttg

SEQ ID NO: 2962 - DNA, 1124 bp, Homo sapiens
  source 1..1124: mol_type = genomic DNA
acggggcggggacgagctgtcgcgctggttgctcgtgcaggagcgggacccggaacagaccgccgtgagagaggaggggcgccggccgggattcgcggcccggagctcgggaccggagtcaggaatggagagaagggtaatggttttacctcttattgtggaaacctgttgagatcacagagaatatactgacggcataaaagggcagaaccatagcagggtgcggttgcttcattccagcctcgcagtcacctctgtgccctgctggttgtcttcccagcgctgctgtagttgccttccatggatctataggagagcaagtcctccaggagaagaagtcctcaccagtgaacggagacctctctgaactaaggataccatggccacgtcagccccactacggagcctggaagaggaggtgacctgctccatctgtcttgattacctgcgggaccctgtgaccattgactgtggccacgtcttctgccgcagctgcaccacagacgtccgccccatctcagggagccgccccgtctgcccactctgcaagaagccttttaagaaggagaacatccgacccgtgtggcaactggccagcctggtggagaacattgagcggctgaaggtggacaagggcaggcagccgggagaggtgacccgggagcagcaggatgcaaagttgtgcgagcgacaccgagagaagctgcactactactgtgaggacgacgggaagctgctgtgcgtgatgtgccgggagtcccgggagcacaggccccacacggccgtcctcatggagaaggccgcccagccccacagggaaaaaatcctgaaccacctgagtaccctaaggagggacagagacaaaattcagggcttccaggcaaagggagaagctgatatcctggccgcgctgaagaagctccaggaccagaggcagtacattgtggctgagtttgagcagggtcatcagttcctgagggagcgggaggaacacctgctggaacagctggcgaagctggagcaggagctcacggagggcagggagaagttcaagagccggggcgtcggggagcttgcccggctggccctggtcatctccgaactggagggcaaggcgcagcagc

SEQ ID NO: 2963 - DNA, 1868 bp, Homo sapiens
  source 1..1868: mol_type = genomic DNA
tttggtgctcaagagaggcttggaggagaccacagttctttctccatgtgtgaggaattaaaggcaactgtgcagaaacacacgcagagcctgaagcccagcaaggaggatctgaacaggcttaatcaggccatccagtggctgacggtggaggtgggcagtgctgagagtcagcaccatgacttgtggatcttactgtggtggccgcgccttcagctgcatctcggcctgcgggccccggcccggccgctgctgcatcaccgccgccccctaccgtggcatctcctgctaccgcggcctcaccgggggcttcggcagccacagcgtgtgcggaggctttcgggccggctcctgcggacgcagcttcggctaccgctccgggggcgtgtgcgggcccagtcccccatgcatcaccaccgtgtcggtcaacgagagcctcctcacgcccctcaacctggagatcgaccccaacgcgcagtgcgtgaagcaggaggagaaggagcagatcaagtccctcaacagcaggttcgcggccttcatcgacaaggtgcgcttcctggagcagcagaacaaactgctggagacaaagctgcagttctaccagaaccgcgagtgttgccagagcaacctggagcccctgtttgagggctacatcgagactctgcggcgggaggccgagtgcgtggaggccgacagcgggaggctggcctcagagcttaaccacgtgcaggaggtgctggagggctacaagaagaagtatgaggaggaggtttctctgagagcaacagctgagaacgagtttgtggctctgaagaaggatgtggactgcgcctacctccgcaaatcagacctggaggccaatgtggaggccctgatccaggagatcgacttcctgaggcggctgtatgaggaggagatccgcgttctccagtcccacatctcagacacctccgtggttgtcaagctggacaacagccgggacctgaacatggactgcatcattgccgagatcaaggcacagtacgatgacattgtcacccgtagccgggctgaggccgagtcctggtaccgcagcaagtgtgaggagatgaaggccacggtgatcaggcacggggagaccctgcgccgcaccaaggaggagatcaacgagctgaaccgcatgatccagaggctgacggctgaggtggagaatgccaagtgccagaattccaagctggaggctgcggtggctcagtctgagcagcagggtgaggcggccctcagcgatgcccgctgcaagttggccgagctggagggtgccctgcagaaggccaagcaggacatggcctgcctgatcagggagtaccaggaggtgatgaactccaagctgggcctggacatcgagatcgccacctacaggcgcctgctggagggcgaggagcagaggctgtgcgagggcgtcggctcggtgaatgtctgcgtcagcagctcccgcggtggcgttgtctgtggcgatctctgcgcctccactactgcccctgttgtctccaccagagtcagtagcgtccccagcaacagcaacgtggtggtgggcactactaacgcctgcgccccctccgcccgggttggcgtctgcggcggcagctgtaagaggtgctaggaggctgccgcctccgccagcgcctgtcgccgtcactctccacccagccagtacctcgcgccaccagaacgcgccgcccgcgccggcctcccaatagccgccgcccgctgcctgcactctaagcgccctccccaccgctccgctccgggagccatccccggtcgcaggagtccggggagggccgggaggcgccatggtctctctctgtagcctttcctggtagtcaatt

SEQ ID NO: 2964 - DNA, 2238 bp, Homo sapiens
  source 1..2238: mol_type = genomic DNA
atggctctgctgtccgagggcctggacgaggtgcccgccgcctgcctgtcgccgtgcgggccgcccaacccgaccgagctgttcagcgagtcacggcgcctggctctggaggagctggtggcgggcggccccgaagccttcgcggccttcctgcgacgcgagcgcctggctcgtttcctgaaccccgatgaggtgcacgccattctgcgcgcggcggagaggccgggagaggagggcgcggcggcggcggcggcggccgaggactcgttcggctcctcgcacgactgctcttcgggcacctacttccccgagcagtcggacctggagccaccgctgttggagcttggctggcccgccttctaccagggcgctggcgaaggtggcccctacggctgcaaggacgctctgcgccagcagctccgctcggcgcgagaggtgattgcagtggtcatggacgtgttcacagacatcgacatcttcagagacctgcaagaaatatgcaggaaacagggagttgctgtgtatatccttctggaccaggctctcctctctcaatttctggatatgtgcatggatctgaaagttcatcctgaacaggaaaagttaatgacagttcggactatcacaggaaatatctactatgcaaggtcaggaactaagattattgggaaggttcacgaaaagttcacgttgattgatggcatccgcgtggcaacaggctcctacagttttacatggacggatggcaaattaaacagcagtaacttggtaattctgtctggccaagtggttgaacactttgatctggagttccgaatcctgtatgcccagtccaagcccatcagccccaaactcctgtctcacttccagagcagcaacaagtttgatcacctcaccaaccgaaaaccacagtccaaggagctcaccctgggcaacctgctgcggatgcggctggctaggctgtcaagtactcccaggaaggcggacctggacccagagatgcccgcagagggcaaggcagagcgcaagccccatgactgtgagtcctctactgttagtgaggaagactacttcagcagccacagggacgagctccagagcagaaaggccattgacgctgccactcaaacagagccaggagaggagatgccagggctgagtgtgagtgaggtgggaacacaaaccagcatcaccacagcatgtgctggtacccagactgcagtcatcaccaggatagcaagctctcaaaccacgatttggtccagatcgaccactactcagactgacatggatgagaacattctctttcctcgaggaactcaatctacagaagggtcaccagtctcaaaaatgtctgtatcgagatcttccagtttgaagtcttcctcctctgtgtcttcccaaggctctgtggcaagctccactggttctcccgcttccatcagaaccactgacttccacaatcctggctatcccaagtacctgggcaccccccacctggaactgtacttgagtgactcacttagaaacttgaacaaagagcggcaattccacttcgctggtatcaggtcccggctcaaccacatgctggctatgctgtcaaggagaacactctttactgaaaaccaccttggccttcattctggcaatttcagcagagttaatttgcttgctgttagagatgtagcactttatccttcctatcagtaactgctccgtgttcagactcctggtttcttccaggcttacagtggacatcatcagcttcctgctttaaaaaatatcttatgtccctaattgcctttcttttacctgactttgtcacctttgttgtctttgaattctttaggctgcatattattttacatgctttgttttgtcatgtatataccaggtattggttttatggtttaaacactatggatacaggggtttgttttgcacaattttaatagtcatgcactacataatgatgttttggtcaatgacagaccacgtatatgttggcagtctcataagattataatactgtatttttactataccttttctgtgtttagatacaaataccattatgttacagttgcctacagtattcagtgcagtaacatgatgtacaggtttgtagcctgttttgcatttttcttaggttgtatgctcttctgttttaaaggtttgaatcaccagcatttttgtgatcaaaatcctatttagaaaaaataaaactactttctgttt

SEQ ID NO: 2965 - DNA, 10861 bp, Homo sapiens
  source 1..10861: mol_type = genomic DNA
cgccccccctgcgcccgcccctcccccttcgctttccttctccccccgcctcggctccgacatgaggggccggcggggcaggccgcccaagcagcccgcggctcccgctgcggagcgctgcgccccggccccgccgccaccgccgccgccgcccacgtccggacccatcggggggctccgctcgcggcaccgcggcagcagccggggcaggtgggccgccgcccaggctgaggtggcgcccaagacgcggctgagctcgcccagggggggcagcagtagccggaggaagccgccgccgccgccgccggccccccccagcaccagcgccccgggccggggggggcgaggaggcgggggcggcaggacggggggcgggggcggcggcggccacctggcccggaccaccgcggcccggagggccgtcaacaaagtggtgtacgatgaccacgagagcgaggaggaggaggaagaggaggacatggtctccgaggaggaggaggaggaggacggcgacgccgaggagacccaggattctgaggacgacgaggaggatgagatggaagaggacgacgatgactccgattatccggaggagatggaagacgacgacgacgacgccagttactgcacggaaagcagcttcaggagccatagtacctacagcagcactccaggtaggcgaaaaccaagagtacatcggcctcgttctcctatattggaagaaaaagacatcccgccccttgaatttcccaagtcctctgaggatttaatggtgcctaatgagcatataatgaatgtcattgccatttacgaggtactgcggaactttggcactgttttgagattatctccttttcgctttgaggacttttgtgcagctctggtgagccaagagcagtgcacactcatggcagagatgcatgttgtgcttttgaaagcagttctgcgtgaagaagacacttccaatactacctttggacctgctgatctgaaagatagcgttaattccacactgtatttcatagatgggatgacgtggccagaggtgctgcgggtgtactgtgagagtgataaggagtaccatcacgttcttccttaccaagaggcagaggactacccatatggaccagtagagaacaagatcaaagttctacagtttctagtcgatcagtttcttacaacaaatattgctcgagaggaattgatgtctgaaggggtgatacagtatgatgaccattgtagggtttgtcacaaacttggggatttgctttgctgtgagacatgttcagcagtataccatttggaatgtgtgaagccacctcttgaggaggtgccagaggacgagtggcagtgtgaagtctgtgtagcacacaaggtgcctggtgtgactgactgtgttgctgaaatccaaaaaaataaaccatatattcgacatgaacctattggatatgatagaagtcggaggaaatactggttcttgaaccgaagactcataatagaagaagatacagaaaatgaaaatgaaaagaaaatttggtattacagcacaaaggtccaacttgcagaattaattgactgtctagacaaagattattgggaagcagaactctgcaaaattctagaagaaatgcgtgaagaaatccaccgacacatggacataactgaagacctgaccaataaggctcggggcagtaacaaatcctttctggcggcagctaatgaagaaattttggaatccataagagccaaaaagggagacattgataatgttaaaagcccagaagaaacagaaaaagacaagaatgagactgagaatgactctaaagatgctgagaaaaacagagaagaatttgaagaccagtcccttgaaaaagacagtgacgacaaaacaccagatgatgaccctgagcaaggaaaatctgaggagccaacagaagttggggataaaggtaactctgtgtcagcaaatcttggcgacaacacaacaaatgcaacttcagaagagactagtccctctgaagggaggagccctgtggggtgtctctcagaaacccccgatagcagcaacatggcagagaagaaggtggcatctgagctcccccaggatgtgccagaagaacctaacaagacatgtgagagcagtaacactagtgctaccactacctccatccagcctaatctggaaaacagtaacagcagcagtgaactaaattcttcccagagtgaatctgctaaggcagctgatgatcctgaaaatggagaaagagaatctcatacacctgtctctattcaggaagagatagtaggtgatttcaaatcggagaagtccaacggggagctaagtgaatctcctggagctggaaaaggagcatctggctcaactcgaatcatcaccagattgcggaatccagatagcaaacttagtcagctgaagagccagcaggtggcagccgctgcacatgaagcaaataaattatttaaggagggcaaagaggtactggtagttaactctcaaggagaaatttcacggttgagcaccaaaaaggaagtgatcatgaaaggaaatatcaacaattattttaaattgggtcaagaagggaagtatcgcgtctaccacaatcaatactccaccaattcatttgctttgaataagcaccagcacagagaagaccatgataagagaaggcatcttgcacataagttctgtctgactccagcaggagagttcaaatggaacggttctgtccatgggtccaaagttcttaccatatctactctgagactgactatcacccaattagaaaacaacatcccttcatcctttcttcatcccaactgggcatcacatagggcaaattggatcaaggcagttcagatgtgtagcaaacccagagaatttgcattggctttagccattttggagtgtgcagttaaaccagttgtgatgctaccaatatggcgagaatctttaggacataccaggttacaccggatgacatcaattgaaagagaagaaaaggagaaagtcaaaaaaaaagagaagaaacaggaagaagaagaaacgatgcagcaagcgacatgggtaaaatacacatttccagttaagcatcaggtttggaaacaaaaaggtgaagagtacagagtgacaggatatggtggttggagctggattagtaaaactcatgtttataggtttgttcctaaattgccaggcaatactaatgtgaattacagaaagtcgttagaaggaaccaaaaataatatggatgaaaatatggatgagtcagataaaagaaaatgttcacgaagtccaaaaaaaataaaaatagagcctgattctgaaaaagatgaggtaaaaggttcagatgctgcaaaaggagcagaccaaaatgaaatggatatctcaaagattactgagaagaaggaccaagatgtgaaggagctcttagattctgacagtgataaaccctgcaaggaagaaccaatggaagtagacgatgacatgaaaacagagtcacatgtaaattgtcaggagagttctcaagtagatgtggtcaatgttagtgagggttttcatctaaggactagttacaaaaagaaaacaaaatcatccaaactagatggacttcttgaaaggagaattaaacagtttacactggaagaaaaacagcgactcgaaaaaatcaagttggagggtggaattaagggtataggaaagacttctacaaattcttcaaaaaatctctctgaatcaccagtaataacgaaagcaaaagaagggtgtcagagtgactcgatgagacaagaacagagcccaaatgcaaataatgatcaacctgaggacttgattcagggatgttcagaaagtgattcctcagttcttagaatgagtgatcctagtcataccacaaacaaactttatccaaaagatcgagtgttagatgatgtctccattcggagcccagaaacaaaatgtccgaaacaaaattccattgaaaatgacatagaagaaaaagtctctgaccttgccagtagaggccaggaacccagtaagagtaaaacaaaaggaaatgattttttcatcgatgactctaaactagccagtgcagatgatattggtactttgatctgtaagaacaaaaaaccgctcatacaggaggaaagtgacaccattgtttcttcttccaagagtgctttacattcatcagtgcctaaaagtaccaatgacagagatgccacacctctgtcaagagcaatggactttgaaggaaaactgggatgtgactctgaatctaatagcactttggaaaatagttctgataccgtgtctattcaggatagcagtgaagaagatatgattgttcagaatagcaatgaaagcatttctgaacagttcagaactcgagaacaagatgttgaagtcttggagccgttaaagtgtgagttggtttctggtgagtccactggaaactgtgaggacaggctgccggtcaaggggactgaagcaaatggtaaaaaaccaagtcagcagaagaaattagaggagagaccagttaataaatgtagtgatcaaataaagctaaaaaataccactgacaaaaagaataatgaaaatcgagagtctgaaaagaaaggacagagaacaagtacatttcaaataaatggaaaagataataaacccaaaatatatttgaaaggtgaatgcttgaaagaaatttctgagagtagagtagtaagtggtaatgttgaaccaaaggttaataatataaataaaataatccctgagaatgatattaaatcattgactgttaaagaatctgctataaggccattcattaatggtgatgtcatcatggaagattttaatgaaagaaacagctccgaaacaaaatcgcatttgctgagttcttcagatgctgaaggtaactaccgagatagccttgagaccctgccatcaaccaaagagtctgacagtacacagacgaccacaccctcagcatcttgtccagaaagcaattcagttaatcaggtagaagatatggaaatagaaacctcagaagttaagaaagttacttcatcacctattacttctgaagaggaatctaatctcagtaatgactttattgatgaaaatggtctgcccatcaacaaaaatgaaaatgtcaatggagaatctaaaagaaaaaccgtcatcacagaagtcaccacgatgacctccacagtggccacagaatcaaaaactgtgatcaaggtagaaaaaggcgataagcaaactgtggtttcttccacagaaaattgtgcaaaatccactgtcacaaccaccactacaacagtgaccaagctttccacaccctccacaggcggcagtgtggacatcatctctgtaaaggagcagagcaaaaccgtggtcaccacgacagtgacagactccctgaccaccacgggaggcacactggttacatctatgactgtgagcaaagagtattccacacgagacaaagtgaaactgatgaaattttcaagaccaaagaagactcgttcaggtacagctctgccatcctatagaaaatttgttaccaagagcagcaagaagagcatttttgttttgcctaatgatgacttaaaaaagttggcccgaaaaggaggaatccgagaggtcccttattttaattacaatgcaaaacctgctttggatatatggccatatccttctcctagaccgacctttggcatcacttggaggtatagacttcagacagtaaagtccttagctggagtgagcctgatgttacggttactgtgggcaagtttgagatgggatgatatggcggccaaggctcctccaggaggagggactacacggacagaaacatccgaaactgaaatcacaacaacagaaataattaagaggagagatgttggtccttatggcattcgatctgaatattgtatcaggaaaatcatttgtcccattggagttccagaaacaccaaaagaaacgcctacacctcagaggaaaggccttcgatcaagtgcactgcggccaaagagaccagaaacgcccaagcaaactggccctgttattattgaaacctgggtagcagaagaagaactggaattgtgggagatcagggcatttgctgagagagtggagaaagaaaaggcacaagcagttgagcaacaggctaagaaacgactggagcagcagaagccgacagtgattgcaacttccactacttccccaacaagcagtacaaccagcaccatctctccagcacagaaggttatggtggcccccataagtggctcagttacaactggaaccaaaatggtactaactactaaagttggatctccagctacagtaacattccaacaaaacaagaactttcatcaaacctttgctacatgggttaagcaaggccagtcaaattcaggcgttgttcaagtacagcagaaagtcctgggtatcattccatcaagtacaggtaccagtcagcaaacctttacttcattccagcccaggacagcaacagtcacaattaggcccaatacctcaggctctggaggaaccacaagcaattcacaagtaatcacagggcctcagattcgccctggtatgaccgtgattagaacaccactccaacagtcaacactaggaaaggcaattattcgaacacctgtgatggtacagccaggtgctcctcagcaagtgatgactcaaatcatcagggggcagcctgtctccactgcagtctccgcccctaacacggtttcctcaacacctgggcagaaaagcttaacttcagcaacgtccacttcaaatatacagtcttcagcctcacaaccccctcgcccccaacaaggacaagtgaagctcaccatggctcaacttactcagttaacacagggccacggtggcaatcaaggtttgacagtagtaattcaaggacaaggtcaaactactggacagttgcagttgatacctcaaggggtgactgtactcccaggcccaggccagcagctaatgcaagctgcaatgccaaatggtactgttcagcgattcctctttaccccattggcaacaacagccaccacagccagcaccaccaccaccactgtttccacgacagcagcaggtacaggtgaacaaaggcagagtaaactgtcaccccagatgcaggtacatcaagacaaaaccctgccaccagctcagtcatcaagtgtgggtccagcagaagcccagccacagactgctcagccttcagctcagccccagccccaaacccagccccagtccccagctcagcctgaagttcagactcagcctgaagttcagacccaaacaactgtttcatcccatgtcccttctgaagcacaacccacccacgcacagtcatccaagccccaagttgcagcagtctcagcctcaaagtaatgtccaaggacagtctcctgttcgtgtccaaagtccatcacagactcgaatacgtccatcaactccatcccaactgtctcctggacaacaatcccaggttcagactacaacctcacaaccgattccaattcaaccacatacatctcttcagataccttcccaaggccagccacagtcacaaccccaggtggtgatgaagcataatgctgtaatagaacatttaaaacagaaaaagagcatgactccagctgaaagagaagagaatcaaagaatgattgtctgtaaccaggtgatgaagtatattttggataagatagataaagaagaaaaacaggcagcaaaaaaacggaagcgtgaagagagtgtggagcagaaacgtagcaagcagaatgccactaagctgtcagctctgctcttcaagcacaaagagcagctcagagccgagatcctgaagaagagagcactcctggacaaggatctgcaaattgaagtgcaggaagagctgaagagagacctgaaaattaagaaagaaaaagacctgatgcagttggctcaggccacagcagtagctgcaccctgccccccagtgacaccagctcctccagcccctccagcccctccaccttcacctccccctccacctgctgtgcaacacacaggccttctgtccacgcccaccttacctgctgcttcccagaagaggaagcgggaagaggaaaaagactccagctcaaagtccaagaaaaagaaaatgatctctactacctcaaaggaaactaagaaggacacaaagctttactgtatctgtaaaacgccttatgatgaatctaaattttatattggctgtgatcggtgtcagaattggtaccatgggcgctgcgttggcatcttgcaaagtgaggcagagctcattgatgagtatgtctgtccacagtgccagtcaacagaggatgccatgacagtgctcacgccactaacagagaaggattatgaggggttgaagagggtgctccgttccttacaggcccataagatggcctggcctttccttgaaccagtagaccctaatgatgcaccagattattatggtgttattaaggaacctatggaccttgccaccatggaagaaagagtacaaagacgatattatgaaaagctgacggaatttgtggcagatatgaccaaaatttttgataactgtcgttactacaatccaagtgactccccattttaccagtgtgcagaagttctcgaatcattctttgtacagaaattgaaaggcttcaaagctagcaggtctcataacaacaaactgcagtctacagcttcttaaagttcagcgtgttaacctaacataaaacacagcaagaatctggttgtctgaactattttaaattaaggagccagatgtttttagtcaggctatcctgacaagacttgacctaaacttcgtttttattggtcataacagtccaattatattcttggccaattttgtccaacggacaagaaaaaagcaaagtcaacgacaccattatcttgtcaagatcagatggttttactattgtggcagaagcgagaaaactttgtttattgaaaaaaaaagaaaaagaaagcaagaaaaaaagatactatggggtcaagtgtaactccatggaaatgccacgtctgctcttcagtgaagaagctggtttagagtctcacagaaaacttttgactgtatttatttattgttgcaaaaaagacgcttttttattgctgccctcatttgtcagctaattattttttcttataaaatccagccccggttacatataatcatctgtatcttatcatgattcctgtaggtaaaagtacaagacgacctctagatgtcttttctttctatgaaaggagctgctatgtacacatgtgcacacacacacaactgggaatcaacaatgagtttattgttcatggtagattaaaattaagcttgcataaaggttgggctaagtggtcctggactacagactctgttgccttgaatataacagtacaatttgtcaattactctgcaccaggctaaaatgagtaaaatctatttgaaggtatcttgtttgtaaacatttgtcagattctaatttttttcttttgtattaaaattcaactatggatgtatatgaaacaaaataaatggagataatttttctcccacagacagaggtgtctttgaatgtgcgctaatgattatctgtaagcctttgtggggagggaggcctgcaaggtcatgaaaggcagaagagtctaattgtgcctggatttctccaggacagcagtggcccctcgttttatcattcccagtccattgtcatcacgtcagagaaaaatcttcaggggtgctaatcctgttgcatcagttgatcatactaacgagaacggtaatgcgacaagatacacattgccttcatctgtacattctgtgataccaggcaaattaccaattacacacagctacttatattttatgaagggcattttttagatgacctcatcctctgtgttatttgttgattgggtttgttttctgtttgttggtttgtttgtttcttccacgtaaggaaaagtagtgtaaacagtagcgagaaaatggaaaccacagaggaagatgtattttgcatgtttttcctttcagtgttcttacacgttgtatcactgcattgtggtaatagcttctataaaatctgccatagttggattatgcagctttgcaaaaatttttactagattttgcactaactcatattagctttgtcctaccaacttctggaatttatctaattattgtttttcaaagtttctttccttttaatgtttccctgctatgcaaaacctttcccagacctcagtttcttaaaagaaagatgttgctacagttcccgattctttcttattacaggctcaggtgtacaggttattctgggttaattttatctaatgaagcccattcctttttgtacataaagatgtcacttaaacttatgcttacaaactaaagactaatcgctcaatatgaaaacatgaaaaaatttttgcttaaagtattaagatggaagtagttaaatatgggttattttgtccttttacttttttaaaaaatgttacatattgtatgcactgtgctgatgcaagaattctacattttaatgagttataaaattattctgcatctcatcacgtcacagtatttctgtactatttattcatatatataaatatatatgggcttaatcatttaaaatttgttgcagcaagaactttcctacctgtaggcaatagattgctatgtttttaacaaattgtggcaaattctaaacagcaattcttttgtacgtaataggacatttcatcctagaaaaataaagtaatgtttttgacattgga

SEQ ID NO: 2966 - DNA, 682 bp, Homo sapiens; identical to SEQ ID NO: 2784
  source 1..682: mol_type = genomic DNA

SEQ ID NO: 2967 - DNA, 1738 bp, Homo sapiens
  source 1..1738: mol_type = genomic DNA
aaagttccgggtgaggcgtgggtcccacaaccgcttggaatttgcctcccggctccgctctggaagctaagaaggggcacgagagccggagacgggaacctgagagcagggaagccagtagccggccggaggagcgcgcggccgctccagtcggaaggagccgttgcagccctgcccggcgtgtggcggggtcagcgaggcccctgcggtgcttcgcccgcgccttccgctccgcactcacccgccctctgggcctcccacaggaatcaaagatcaactcccactgaggacaaatggacctgtaattccgggtgtgacgagagaacgagatttaccttcctgaattaaaaaacaggtcattaagcttgggccctgactcttctttgtgagaaggtacagagatggaaaccttacaatccgagactaaaacgagggtccttccctcatggctgacagcccaggtggctacaaagaatgtggcaccaatgaaggcccccaagaggatgagaatggcagcagtgccagtggcagcagcaaggtgcgacagctctggtcagaagactcctgcgaatctgactccctgcgacaaggactgtgtactgcatgaatgaggctgagatagttgatgttgctctgggaatcctgattgagagccgcaaacaggaaaaggcctgcgagcagccggccctggcgggggctgataacccagagcactcccctccctgctccgtgtcgcctcacacaagttctgggagcagcagtgaggaagaggacagtgggaaacaggcactggctccaggcctcagcccttcccagaggccggggggttccagctctgcctgtagcaggagccctgaggaggaggaggaagaggatgtgctgaaatacgtccgggagatctttttcagctagggcataaactgtgcactgaactgtctgccgagagcagctggaggacagctgagcttccactggtgctgctgggccgcccgcctgtgggaatggggctctctgtgctcctacctttgtgccttcttgggcctggcagattcacctcaggccagaagcccctggacactccgggccttggggctgccgttctgagtgtgcggaaggcaggactcaaaatgagatcccatttgactccctctgtatgtactgtgccctctcctggctcttgaggctctggagtcccaattgtctgtgttagtcagtgaccaggttccagggaaaatgatgtcatgtggtggtccaacttactggaaccaaagagacagtactttgcaaagaaaaggatcactgccaggtgcactggaattgctacagtttagtccgcatgatctctcctgaaggaggaagcctgtttcaaaaatagtttccatcatgagtctatcaatgagctcccacctctccagccagcctagaaagcaaacgagctgcccacagttctctgccctgtctgggaggttgaggccacagtgtatagactggtaagccagacaggcctcctcccgcaagctgctaccttgctttcacctgtaccttggtccccgggcagctagctataaagcaagagggacaggagcccagaagagacactgaggacaagagatcacaccagagtacatgtctctgcctctgttttcagtgtggctttggacaggaatatatgaataaatcactgccatacaggttttccaatacacaagtgctagaaaatacacacaattccccaatg

SEQ ID NO: 2968 - DNA, 577 bp, Homo sapiens
  source 1..577: mol_type = genomic DNA
ttctttccagggaagaagggcggggatgtcagggctggagagtgcccgtgtccttctgtgtgcattgggctccttcctccttaattctctgctttccacttttaggctgaactccagtgcacccagttagacttggagcggaaactcaagttgaatgaaaatgccatctccaggctccaggctaaccaaaagtctgttctggtgtcggtgtcagaggtcaaagcagtggctgaaatgcagtttggggaactccttgctgctgtgaggaaggcccaggccaatgtgatgctcttcttagaggagaaggagcaagctgcgctgagccaggccaacggtatcaaggcccacctggagtacaggagtgccgagatggagaagagtaagcaggagctggagacgatggcggccatcagcaacactgtccagttcttggagaggagtatgacatcagaactcaagtgtctgccattgttcagcgcaaatattggacttccaaacctgagcccagcaccagggaacagttcctccaatatgtgcatgacatcacgttcgacccggacacagcacacaagtatct

SEQ ID NO: 2969 - DNA, 1162 bp, Homo sapiens
  source 1..1162: mol_type = genomic DNA
cccaaacagagcgttttctggtccccgagctcctcccgaccccacccgctcctacggcctccaaccggccccccccaggtgtgtgcagtggcctcagggatccggaaagtctaggactgaacttctcctaacatccagtaatggggacctggaacctgggcttactagagtgccgcgcgtagggctccaggtcgctggcttctgcgcttccttcctctccaaagttgagtatctcctatctgtgtcctcgtacatactgccgcctgaggtgccatggcccccaagccgggggccgagtggagcacagccctgtcccatctggtgctgggagtggtgtctctgcacgcagccgtgagcacagccgaggcaagtcgaggggctgctgctggcttcctgctccaggtcttggctgccaccaccacgctggccccagggctgagcacacacgaagactgccttgctggagcctgggtggccaccgtcatcggccttccccttctggccttcgatttccactgggtgaatggggaccgctcctctgccaacctgctcctgggaggaggcatggtgctggcagtggctggcggccacctcggccctgagggccgctctgtggctggtcaggcaatgctgttggtggtcgcagtgaccatcctcattgtagctgtcttcacggccaacacttatgggatgtgggggggggcgatgctgggtgtggcaggcctcctgagccggctggaggaggacaggctgctgctgctaccgaaggaggatgtctgtcgctgggccttggctgtaggcagctgggcttactgccgggccctgcatacacagcgcctccagtgggagtgacagttggatacagccaggcagggtttctgccctgccgaacactttccctcccacctgcctgctcctggcgccttctccctaggggtagactcttctgcctactgaagtgggtttgctgcacattgactggtcaggggcagagtctgggtgctgtcctttggccacgtgtggggacttgtctagaccagaatgaaagggacagggtcccagacacgtttgggggtcctgattctgggctggacacggttgtggatccagagaagaggcctagtctccaataaatcttaggaattttgcaggaatatgaaaa

SEQ ID NO: 2970 - DNA, 1725 bp, Homo sapiens
  source 1..1725: mol_type = genomic DNA
gaataagcccgagcagccggtcctccagtggctccgctccccgttctctgtgggctcaaaatgacagaggctcacaggacacctgcatgcccaaggcactccaccgtatgtgatcaacctggatccagcagtacatgaagttccctttcctgccaatattgatattcgtgatactgtaaagtataaagaagtaatgaaacaatatggacttggacccaatggcggcatagtgacctcactcaatctctttgctaccagatttgatcaggtgatgaaatttattgagaaggcccagaacatgtccaaatatgtgttgattgacacacctggacagattgaggtattcacctggtcagcttctgggacaattatcactgaagcccttgcatcctcatttccaacagttgtcatctatgtaatggacacatcgagaagtaccaacccagtgaccttcatgtccaacatgctctatgcctgcagcatcttatacaaaaccaagctgcctttcattgtggtcatgaataaaactgacatcattgaccacagctttgcagtggaatggatgcaggattttgaggctttccaagatgccttgaatcaagagactacatacgtcagtaacctgactcgttcaatgagcctggtgttagatgagttttacagctcactcagggtggtgggtgtctctgctgttctgggtactggattagatgaactctttgtgcaagttaccagtgctgccgaagaatatgaaagggagtatcgtcctgaatatgaacgtctgaaaaaatcactggccaacgcagagagccaacagcagagagaacaactggaacgccttcgaaaagatatgggttctgtagccttggatgcagggactgccaaagacagcttatctcctgtgctgcacccttctgatttgatcctgactcgaggaaccttggatgaagaggatgaggaagcagacagcgatactgatgacattgaccacagagttacagaggaaagccatgaagagccagcattccagaattttatgcaagaatcgatggcacaatactggaagagaaacaataaataggagactttagcacacttcacttgtttctagaagtccagaattttggacctccacgtgaaagaactgttcttacctctgaactgggggctcccataagggataattttcctcagagtagcaaagtttctcttattagagaaatcttgtgactcagatgaagtcagggatagaagacccttggacctggcaggttaatgctgattattccttggcctttcccttgtatttatgcaaggaaggatatactgagctgatactcttccaagcctacaacttcaagttttatcatttgaactcaagtacttttgctgctgaggaatggaatcaaaagaacgtagtctcctggtgaccacctcagatctctattattaggctagatgtatagcctctactcccccagcttcttgctcttgaccctgcactgtaagttgcccttctattagcagccaaggaaaagggaaacatgagcttatccagaacggtggcagagtctccttggcaatcaaccaacgttgctatgaaatatgcctcacactgtatagctcattataggacgtcaggtttgttgaaaaaagtgggcaagacatgattaatgaatcagaatcctgtttcattggtgacttggataaagactttttaatttt

SEQ ID NO: 2971 - DNA, 4054 bp, Homo sapiens
  source 1..4054: mol_type = genomic DNA
actgcctttccaggatttattgcgaggatggagggaggcgcaggcgttctcattcatagttctcccatcctgaaagttctgttcctcttttgtccagaaactgggccctcgtcagactgccttgccctgttcctgactcaggccaaggcctgcagccgggaagaggttggggcggcgtgagttatgtgaaaagcgctcagaatacagtatgtcatgtaagaagctgaaagtgtatttatggagctagaggacaatgctgtccttccctggcacaagtgggcgtccgaagttggatttttcaaaaagaagaccccggccagtaaaaagtcaccaaataacaaaaccccaaaacttctgcagcgcttggcacatcttgtttattcagtaagctttagggattaaaaggtggactcccattattgtcccagttgtttagaaaatatgccatcggctgaagccaaactaaaaaagaatagatgtgccaattgttttgactgtcctggctgcatgcacaccctctctactcgggccacgagcatctccacacagcttccagatgacccagccaagaccaccatgaagaaagcctattacctggcatgtggattttgtcgctggacgtctagagatgtgggcatggcagacaaatctgtagctagtggcggttggcaggaacctgaaaatcctcacacacaacggatgaacaaattgattgaatattaccagcagcttgctcagaaagagaaggttgagcgagatcgcaagaaactggcacgacgtagaaactatatgcctctggctttttcggacaaatatggtcttggaaccaggcttcagcgaccacgagctggtgcatccatcagtacccttgccggactttcccttaaagaaggagaggatcagaaagagataaagattgagccagctcaggctgtggatgaagtggaacctctacctgaagactattatacaagaccagtaaatttaacagaggtaacaacccttcagcagcgtctgttacagcctgacttccagccagtctgtgcttcacagctctatcctcgccacaaacatcttctgatcaaacggtccctgcgctgccgtaaatgtgaacataatttgagcaagccagaatttaacccaacgtcaatcaaattcaaaatccagctggtcgctgtcaattatattccagaagtgagaatcatgtcaattcccaaccttcgctacatgaaggagagccaggtcctcctgactcttacaaatccagttgagaacctcacccatgtgactctcttcgagtgtgaggagggggaccctgatgatatcaacagcactgctaaggtggtggtgcctcccaaagagctcgttttagctggcaaggatgcagcagcagagtacgatgagttggcagaacctcaagactttcaggacgatcctgacattatagccttcagaaaggccaacaaagtgggtattttcatcaaagttacaccacagcgtgaggagggtgaagtgaccgtgtgcttcaagatgaagcatgattttaaaaacctggcagcccccattcgccccattgaagaaagtgaccagggaacagaagtcatctggctcacccagcatgtggaacttagcttgggcccacttcttccttaaaaggttccactggagggcagatcccaaaggacagtatcaccgtaaacctgcgttaaaatgtggaagctgctgcttcattaggccttgtttataacgatgtacccatgcactacggaattctattgctaagaaagtgggagcataggcaaggcattgggaacacagggtagctgctgttgctcttgctctcacccctgttgacaccagtaagtctgtgtctccctcactgaaccctgcacgttgagtaacagcagcataattccatcctaggaaaggggatgggtgttccttggaatggcattgtatttaccacctgagaaactctgtactgtctcttgatctgatctcactaaggatcacaatgtcacagatgaaacttaaatgataacccaaaggtagacctgctgttaatgatccagcattggtcacaatgtaccaactgctttctgcattccgttaaatatcatctaacagtctaaaacatatcccttcattgccataatggctgccattttgccatagatttccatataactgaaaaactgaattgtcactttatctttagtatcatgatgattggaaaaacctgtgaagttgttaaggcactctcatttgccctctttttctaagtgaatacaggacacgtattagttgttcttaatttttttcccagtaaaatatggatcttttaagaagaatttgagaagcaaacaattacatgtcatgtcaagggggtagcagattccattcgttttcaatattgccacaatacccagggattaatgctgccacaggggggcaatctttatttgtcttacttcctaccccttccctgttctgcctctttaactcagttaagttgttctgtttgggacctggaaaagaacccaaagaaaacctgagtggacaggttcatttctggaatgcagaaaacattttaaaggctagatttttagaatattctcaactagcattctttccattgatttgaaggggaaattaactattataatctcttgaatccaaaactggatattaagaactttcccccttactaagtttaagacttttgtcatgtggtgagtcaaataagaccattttgattgtaaaccataaaatagttcagcaagtagcccacagttctggcctaacagcagacttgctgttttcacttggtatcctggagttgggttgctaaccttaatttctatgatgttttctaaaatgaaacttgataaagtagaccaccagctgcaccgtgttttctgtaaaagtattgttagtaagtggccaagagacttgaggaaaatacagattttttgtttaccttggtcttgttttaagtcttaaaaaattaaagataacattataatgtagaatacagatgggacatagtccttgtaagcttcccttgaaaatgttttaaatatttaggaagcttttaaaagacactaaattgtactctaaaagacactaaattgtactaattgtacaaaggtcaagccaattttatgaaacagtcctacagagtaatatatgtgatgcagtgtaagaaggaaaatactcatctctaacattatggtaataacatttagcctcttaggagttggagcagggggatgggtaattacagatttgcagactatagaaagagtttcatttttttgtgaccccacagagtctcaaatttttatttcactacctgctagagcctactgtgaaatcactgctccatatttgccagtggaggaaatgggcatagagtagagaatagcttcatatgtttacacgtttgcatagactacacacatgtcatgcgtttatggcaggtagctggtatttattccccaaagtaataatgttgaagtatgggtctcatcattcccatacacagaaacacaaaacactttgatcataaacttttttcttcagaagccaaactaacttgcagaataatagagccactggtttaatgtttcctcaagataggttttagtgtaagctagtattctgtgtgttcgtagaaatgattcaatacctgcagctggtgaattaggaattgtatttgttgccttttttatattagatgaggtgcaaaaattttaatgctagtcagtatgcaccaccacaggaaagttagatcccattagcacttgaaactacagctttggaaacttaggctaagttaatttggatttgttacttgattcacctactgaccttttcttttgtttgaagtgcttatcagcataatgagctaagtgtcatgcatatttgtgaagaaacaccctttttggtcccttttgggacagagaggtactccttgatctttatgaatgacaggttactgttttgccttattgcttaacttaatgtagtgaaataaagcagacaaagcttg

SEQ ID NO: 2972 - DNA, 3058 bp, Homo sapiens
  source 1..3058: mol_type = genomic DNA
acgtcagagggtcgcgccgctgcaggaacccgctctgcctgagctaccgcgagtcgtagaaaattacgtaatgatagggggccggtcagagtgagggcacctgaggtacacgaaatccctccggcttgcccacttcctcggactttccaccaatcaggagcttcctccccagcaccaaccaattgtgggagagaagttttctctgtgctacaagcccggaatttcattcatacccagctacgctccgaatgagggagcagaggtacagcggccgaatgagcgggaacagttattccacgacaggtgtacatcagacgcattgcttaggcctcttattttacgttctccaagcaactccataagacaactgtctcggaaaggctacagtgatgacagaccgacttaagttcggattcggcttccaccgcttcttagtggtatgcaaagaagccttttcaccctgatgtccttagagataatatggatcagtccagagttctcctctgggtgaaagcagaaccctttatagtgggtgccttgcaggtcccccctccatccaagtttagtcttcactatctcaggaagatatccacctatgtgcaaatccgggccacagaaggagcttacccgcgcctctactggtctacatggaggcacatcgcttgtgggaagctgcagttggccaaggacctggcgtggctttacttcgaaatatttgatagtctttcaatgaagacacctgaggagcgcctggaatggtctgaggttctgtccaactgcatgtctgaggaggaagttgaaaagcagagaaatcagctttcagtggacacgctacagtttctgctcttcttatacattcaacagttgaacaaggtctccctaaggacatctttgattggcgaagagtggcccagtcccagaaacaaatctcagtctcctgacctgactgaaaaatctaattgtcataataagaactggaatgattacagtcaccaagcttttgtctatgatcatctgtctgatctcctcgagctgcttttagatccaaaacaactcactgcatcatttcattcaacccatagtagtctagtgtctcgagaagctgttgtggcgctcagcttccttattgaaggtacaataagtagagccaggaagatctatccacttcatgaacttgcactgtggcaaccactgcatgcagatagtggcttctcaaagatctctaagactttctctttctacaaactggaaacctggttgaggtcctgtttgactgggaatccatttggtacatcagcttgcctcaagtctggaaagaaattggcttgggctcatcaagttgaagggaccaccaaaagagctaagattgcttgtaatactcatgtggcccctaggatgcaccgactggtagtgatgagccaggtttacaagcagacactggctaagagctcagacactctggcgggggcacatgtaaagattcatcgttgcaacgaatcttttatatatctgctctctcccttacgatctgtgacaattgagaagtgcaggaatagcatctttgtcttgggccctgtagggactacacttcacctccacagttgtgacaatgttaaagtcattgctgtttgccatcgtttgtccatctcttctacaacaggttgcatctttcacgttcttacgcctacacgcccacttattctctctgggaaccagacagtaacttttgccccttttcatacacattacccaatgctagaggaccatatggccaggactggccttgctacagtgcctaactattgggataatccaatggttgtgtgcagagagaacagcgacacaagagtcttccagcttttaccaccttgtgaattctatgtatttattattccctttgaaatggaaggggacacaacagagatacccgggggtcttccatctgtatatcagaaagcactgggtcaaagagaacagaagatacagatctggcagaaaactgtgaaggaggctcatttgacaaaggatcaaaggaagcagttccaggtactggtagagaacaagttttatgaatggttgattaatacaggacatcgccaacagctggacagccttgtaccccctgcagcaggctccaaacaagcagctggataaggatcttacatgcagacactgggccctggaaatacaaggataaatggaggatggtgctcatcttgaaacttgaaactaaattgggaaggtgctattgctgcttaagagacattgggacttttctgtctttttttttttttttttttgaggcagagtcttgttctgtcgcccaggctggagtgcagtggcgcgatctcggctcactgcaagctctgcctcccgggttcacgccattctcctgcctcagcctcctgagtagctgggactacaggcgcccgccaccacgcccggccaattttttttgtatttttagtagagacggggtttcaccgtgttagtcaggatggtctcgatttcctgacctcgtgatccgcccatctcggcctcccaaagtgctgggattacaggcgtgagccaccgtgcccagccttctgttctatttaagaactttgatttccattccattttcatttattactgtttaggccgaattttcgctaaacttctgactttcatataaacatattgcttatagaacatcagaagactcgtctttgtgatgcccaaatgaaaaagttggtgaaggtagtaccattgtatgtatgttaatattaaagcaactgagtgtagatttgcaactatagtgtgtatcttcatttgtgtgatgaaagagttttattctttctagagttaaataagagttttatagttctttgtaactatttaaaaggaaattgctactccttttaaaaaataattggaaaggaagtatgatttgttggtatatagacatagaaatagttttatactatattttagtccttaaagtatggaacttaatgaaattgtttaaaaaaatctttatttttcacttcctgcttcaaattttcaataaacaaactct

SEQ ID NO: 2973 - DNA, 1294 bp, Homo sapiens
  source 1..1294: mol_type = genomic DNA
agtagctgcaccactagaaagatggcggagcaagagcaaagaaaaatccctttggttccagaaaatctcctgaaaaagaggaaggcttatcaagccctcaaagccacccaggcaaagcaggcacttttggcaaagaaggagcagaagaaaggaaaagggctcaggtttaagcgactggaatcattcctacatgattcctggcggcagaaacgtgacaaggtgcgtctcagacgactagaagtgaaacctcatgccttggaattgccagataaacattccttggcctttgttgtacgcatcgaaaggattgacggcgtgagtttactggtgcagagaaccattgcaagacttcgcctaaagaaaatttttagtggtgtctttgtaaaagtcaccccccagaatctaaaaatgctgcgtatagtggaaccttatgtgacctggggggaagtttggcgtcatttgcttggaagacctcattcatgaaattgccttcccagggaagcatttccaggagatctcatggttcttgtgccctttccacctctcagtggcccgtcatgctaccaaaaatagagtgggcttcctcaaggagatgggcacacctggctatcggggtgaacgcatcaatcagctcatccgtcagctgaactagacccaggtgaggcagggctgaaaactgcccttgggctgacttttgataggccatgccttgccactttacaagttctttttgcatttactagtatttaagagtaaccttgagattgggaggaatagaggaggctggtacaaatagatggagacctgctgggatcagtgaatgcctgattaggacatggggctatgcatagcctaagagttataggcttaaagatgtcgagtaactaaaaactgtattgctggccgggcgcggtggctcacgcctgtaatcccagcactttgggaggccaaggcgggcagaccatgaggtcaggagattgagaccatcctggccaacatggtgaaaccctgtctctactaaaaatacaaaaatgagctgggtgtggtggcgcgtgcctgtagtcccagctactcgagaggctaaggcaggaaaatcgcttgaacccaggaggcagagattgcagtgagccaagattgcaccagtgcactccagctgggcgacagagcgagactccatctcggaaaaaaaaaaaaaaaaactattgctgcagtcattcagatggaaatgaggaaagaataatattaataactgatttcaaaaaggacttgaagatgtgaatcatctattttgctg

SEQ ID NO: 2974 - DNA, 11198 bp, Homo sapiens
  source 1..11198: mol_type = genomic DNA
ggcaccgcccaccggcttgaatcccggcgcctcagaggactatgaggcgggcgccaactgcttgggccgcagggcgggaggcagcgcgggagtggggcgttgaggggccggcctagcttggggctctggccttgcgtcttccgaccgaatcaccgctcctgagcccggtgcggggctgccgctatcgcctggccgtgggtgccggagcggccgggttgcgactcagcgttcttgggtgggcgcgggcggcgtctccgcggcgggcatcccccgaggccgccctcgggccatgatcgactccgtgaagctgcgccgcgacagcgcggcggacttcttctcccactacgagtacctgtgcgcgctgcagaactcggtgccgctgcccgccgtgcgcgcctgtctccgggagggcgtgctggatttcaacgccgaccgcctccgcggggtggactgggcgcctctgctgagcaccctcaagatcaataaagacctgcccttggtctccatcaagagcttcttccagccctggctgggggacacaggttctgacatgaataaattttgcagaagtcgtgttcctgcgataagatacaaagatgtgaccttccagttgtgtaaagctcttaaaggctgtttaagtatatcaagtgtgctaaagaacctggagctaaatggactaattctgagagagagggatttaactattctagcaaagggattgaataaatcggcttctttggtgcacctgtctcttgcaaattgtccaattggagatggaggtttagaaattatttgtcaaggtataaagagctctatcactcttaagacagtcaacttcacaggatgtaatctgacatggcagggagcagatcacatggccaagatcttaaagtatcagaccatgagaaggcatgaagaaacctgggctgagagtcttcgctataggagacctgatcttgactgtatggctggcttaagacgtatcacactgaattgcaacacacttattggtgacctaggtgcatgtgcttttgcagactctctcagtgaggatttatggctgagagctcttgacctgcaacagtgcggcctcaccaatgaaggagcaaaggctttgctagaggcccttgaaaccaatacaactctggtcgttctggatataagaaaaaatccactcattgatcattctatgatgaaagcagttatcaaaaaagtcctccagaatggaaggagtgccaaatcagagtaccagtggataacttctccatcagtgaaggaaccatccaaaactgctaaacagaaaaggagaactataattctaggaagtggtcacaaaggaaaagctactattagaattggattggctacaaagaaacctgtaagtagtggcagaaaacactcccttggtaaagaatattatgcgcccgcacctcttccacctggtgtgtctggtttcttgccgtggcgtactgcagaacgtgcaaaaagacacaggggtttcccattaatcaaaacacgtgatatatgtaatcagttgcagcaaccaggttttcctgtgactgtgacagtagagagtccttcatcctctgaagttgaagaggttgatgattcttcagagagtgttcatgaagtgcctgagaaaactagtatagaacaagaagcattacaggaaaaactggaggagtgcctaaagcagttaaaggaagaaagagtgataaggcttaaggttgataaacgagtcagtgagctggaacatgaaaatgcccagttaagaaatataaatttctctttgtctgaagcccttcatgcacagtcattgacaaatatgatcctggatgatgaaggtgttttgggcagcattgagaattcttttcagaagtttcatgctttcttggatctccttaaagatgctgggcttgggcagcttgccacaatggctgggatagatcagtcagattttcaattactaggtcatccccagatgacttctactgttagtaatccacctaaagaagaaaagaaggcgcttgaagatgaaaaaccagaaccgaagcagaatgccctagggcaaatgcaaaatatccagtttcagaaaattacaggtgatgctagaattcctttgcctctcgactcctttcctgtcccagtttctactccagagggcttaggaacttccagcaacaacctaggagtcccagctactgagcagcggcaggagtcttttgaaggattcattgctagaatgtgttctccttcaccagatgcgacttctggaactggaagtcaaagaaaagaagaggagttgtccagaaatagcagatcttcttcagagaaaaagaccaaaacagaatcccattgaaatgactggagaaatattaaaataaaaataatagcagagttggaaaaccagaaatttgaacagtgaaatttctggaagataagaagcagatgatttaagtaccagttaattaaaggatggaacagctaagccattccactcatctttggagcatctgattctggagtttgccaccaggctaagaaagcagctatctgaagtgggagctctgacccaagaaatgctgggatcggagaataagggaattatccaaaatggctccgaagaggaactgaagttaagctgcccacatgatctctctaactatgatgacctgccacttccgtttataatcaccatataagtgcctgtaatcatttgtgttcattaaaagtgaaccagaattcccatttggatgaaaaaataacacttccaactttaatcttaggccctcatttataaatatggacaaccaagaatcatcaaatttgaagaaaaccagtaacataaaaggaggcatgaaattaaaattaacctgttcaagaagatagttactaggagaaacatgaaatttttaaattaatgaatcaaaatcttcagcaattcataaagatactgtgttcataaagaataggatgccatgaaaaaaatatttagagtttctggaaattaaaaatttgattatgaaactgaaacactcagaagatggactacacagcagaatggattcatttgaagcttaaattcatgaaatggaaggtattaattggtcttagacgtttcatcagcaacttaattacttagaaaaaatctttctcagagtaactaagcaaaatgaacaatgaacccattaacgtgtggttttgttttttgggttttttttttttgagtcaaggtctcactcatgtcacccaggctggggtgtagtgatgggatcacagcttattgtaaccatgaaccattgggcttaaattatcttcccacctcagcctcccaagtagctgcaatgtaccaccatgccgaagttttaaaaaattattgtagagttgggttctttctttcttttctttttttctttttttcttttttttttgagacggagtctcgctctattgcccaggctggagtgcagtggtacaatctcagctcactgcaacctcctcgatctcagctcactgcaaccgtgaagtgatcttcctgcctcagcccccctagtaactgggattacaggcacacaccaccatgcctggctaatttttgtatttttagtaaagacggggtttcaccatgttggccaggctggtctcgaactcctaacctcaggtgattcacccacctcggcctcccaaagtgctgggattacaggcatgagccactgcatccggccaagatgggttctttcttaggctggtcttgaactcctggcctcaaatgatcctcccaccttggcctcccaaagtgctgagactacagacctgagccactgtgcccagccccatgaaagatgtttagatcaaataaactgataaagatattgataaagatatgagacaaactacttcagctttgtgacctgcaaatccccttttataatcaccagaggtgcctgtagtcagaaaaagtctaaataaatactaatgacatatgaaaacaaagtccaaccaaagttctaggtttgaacatgaatggaggcatggcaggacacagaaagtgaaagcttgtcctagatattgtcttattcatgggaaggatacaggtagtgtttgattctaggtattgattgaaaaaatatattaaaatatatataaagttaagggtatgttagtaaggataggttaggtgatgttgcattaacagctcccaaattttaattactttcaacaacataggtttatttgtgcccatgcagtttgcctttggcagattggctagaggcccctattcaacatcaacctcaatctggaagcgaggctggtggaacgtcactatttggaacattgctggttgcagtgtccaaggaaagacagtatgatgcagcatatattgtgacttaaagcttctgtctagatgtgacatatgtcacttctgttcacatttctttggccaaagaaagtcacatggttatgcctgagttcagcagaccagggaagtgcagaattgccatttgccatgagaagagagggaagcaaatgtatgtcaacaactttaatagctacaaaactacctggaaagagggaatggaatttttaggtccaacaagacgggaaagaaaaagaaacaagctacatagaaataaaaaatccacaatatagcaagatcaagttttttactcataataaacatgaacaggttaaattctggaatccttaggcttgagtaaaaacatgaaatcccactgtgtgctatttgcaaaatctaaaacgctgtcatagattataaagagatgaacaaaaatataccaggcagatgctaaagagtaaatgtggctgtgttagctgcagactaaatagaacccaaggtgaaaattggtaaaggggacaaaagcttcttttggctgataagtacagtgttgcagaagattttttaaaaaaatatatctgcaatttaaaaacttgatgttaggccgggcgcagcggctcacgcctgtaatcctagcactttgggaggccgaggtgggtggatcacctgaggtcagaagttcaagaccagcctggccaacatggcaaaactccgtctctactaaaaatacaaaaaaaaaaaaaaaaaattagctgggtgtcatggcgcatgcctgtaatcccagctactcgggaggctgaggcaggagaatcgcttgaacctgggaggcggagtttgcagtgagctgagatggcaccgctgcactccagcctgggccatagaggagactccgtctcaaacaaacaaaaaccttcatcttaaaattatagggtaagaatttagaaatacaaggaaaaatggccagccagttataacaagaagctttaagacatctcttttcagaatcagtggatcgactgctgcacacacactagaatggctaacattttgaaatgctgataaatatgcagagcaactggagttcctcacagctggtaggaatgcaaaatgactcagtcactcaaaacagtttggcagattctttaaatgctaacatacacataccatatgaccaagcagtcccactcctgggtatttagagagatgaaaacttagttcacacaaaacctgtgcgtggatatttatagcagctccattcatagtgaccaagatgtcttccaacaggtgaatggatagcgatgtatccatatggtggcaaacatgccacaattcggatgaatctcaacatcatatgctgagtgaaaaagccagtctcggaaggctacattctgtatgattccatttatatggcattcttgaaaagacaaaactatagtgacagaacagattggagattgccaggtgttggggttgggaggagttgattacaaagaggctgtacaagggagtttgtttgtttgtttgttttggtgatgaacagttctgtatcctgattgcggtggtggtaacgtgagtctatacatatgttaaaatttatagaactgcatactctcaaaaaaattagttttactctataataatattagagcttaaaaaattcatccctcttgcccatcagtagatcaggatatgaaggataccattgaacataaatattttgtatccatgatgaatacaaagtatattctcctggaaaaccaatagaacattcatataaatgattcctatgaaggtaaaaaacttacaaaattcaaagatcatacagatcatgtgctctgtataatgtaataatagtaacaaaaggcctgtccacttggaaatttttaaatgatcttctaaataactcatttaaaggagaaatcaaaataaattgcaaattatttagaattaataaaaacttctctaaagctgaggaattctaccaaagaggtgttagaggaaattgtatagattttgatttactttccaggaagaaagaagacaaaagagatgaattaaacatttaaagctaagaaagagataaaccaaaagaaaggtgaggaattggtaaaagcagaaatgaataaaatagcaaattttgatcagtgaaacacaggtttttaaaaatgaaagataaacctttgtaaaatatgataaagaaaaaaaagcaagaagtaattaacaaaaattgccagcattaggaataattttagaaggatacctacaactagaagagatatttttaattatgagcacttttataatttactataaataattgtgtagtgttaaaccaataaatttgaaagactagatgaaatgtgactgtttaaaaatatggattgtaaaaattgataaaaaatagaaaatgtaaataaacgaaacatcttaggagaaattgaaaaaataggacaagaacttatttttaaaaagaggccaggtgcggtggcccatgcctgtaataccagtactttgggaggccgaggtgggcggatcacctgagatgaggagttcaagaccagcctggccaacatggtgaaaccccgtctctactaaaaatacaaaaattagccgggcttggtggcgggcacttgtaatcccaactactcaggagtctgaggcatgagtgtcgcttgaacctgggaggcagaggttgcagtgagctgaggtcacaccgttgcactctagcctgggagacaagagggaaactctgtctccaaaaaaaaaaaaaaaaaaatacagttagaaaaactttaaaggggccaggtgtggtggctcatgtctgtaatcccagcactttgggacaccaaagtgggaacattgctgagaccagcagtttgagaccagcctgggcaagacctcatctctacaaaaattaaaaaacaaaacaaaacaaaaaaacccaaaacttagccaggcatggtggtgcgtgcatgtagtcccagccactcaggaggctgaagtgggaggatcgcttgaggccgggattcgaggctgcagtgagctgtgatcatgccaccactgctctctagcctgggcaagagtgagactccgactcaagaagagaaaaagaaaaaccttccaggggcacatttatttgtaaaccattccagaggatagaaaagagatgtaaggctccctaattcattccatacggttagcgtaatccttatagcaaactgcacaaataaaacacaaggaaaactaaaccaaattcaattaatgtaggtgcaaaaaatccaaaataaaactagcagtttgaattcagcattgtagcaaaagatatatcattttcaaggaagatttgtaccaaaacatgcaagattgagtgaagagtaactcactgtagctcactaaattaacagattaaagaagtatagtcatcttcacaagctgaaagagtatgtgataaattcaacatcctctggtattcttaacaatctcgaaatagaaggaaacttccttagcttagcttcttggcttcattaaatatacctaacagaaatccacaggaaacaaacttggtgaaaagtttttgctaagataaaaacggtactaaaaagtacacattttgggaaatgagacaaggctctcgttatttgtaaatatggggtctttttttttttggacaaaaaaccccctgtgatgatctactggcatgctattacagctaataaagctgaataaggaggctgtgcacaacaccaacacaccggtatgaaaagtgtgtacaccagcaataaccaattagaaaatgtatgaggaaatagactctcatccacaatagctgcgagaagtaaatattatctagaaataagattaacaagagaaatgtaaggcctatataaataaaaggataaatctatgctagagggtataaaagaaacacaaaaatagaggtatgccatgtataagacccaacataataaatagttctaccaaattaatttataaattcaaagcaatttcatataaccacagtaaagctttttaaatggatgtaataacctgattataacattaatctgaaagtcatcaggcataaagcaattttgattacatctcaaaacaatccatggagttagggtaaatgtgctgttcacacaggaataatcacaggtatagaaccgagaacctaggaacagagcaatgtatatatatatgtatttaaaaaatggcatcacaagtcagtagagaagggtttgaactattcagtaaatgatgttgaggttatttactactttttcttatttcatatcatggatgaaaaaaatcaagatgaattaaacatggaaattaaaaataactagaagaaaatactggaaaaaaattgtaataaatgtgtaagaaaggcattcccaaccaagacacaaaacccagtagccatgaaaaaaaagatagatttgactacatttttaaaaagtaaaacctttcactttttacaaaactttgataaaattagatttcataaataaaggagtgggaaaatacatgtaatagaacagaagatttaagataatataaagagcacctacaaacaacaaaaattggacaaaggctataaaaatattttataaataagaaatacagactataaacataaactttcaacctcgtaagcaatcaggaaaattaaagttaaaatgagatactatttttcaatacattgaaatggcagattattaaagattggtgatagtgctggagataatgtgaggaaaggagtattctcagtcattgtagaaattgatacagcttttggatggacagtttgacagtgtgtatcaacatgtgaaatgtctccagcctttgatctaatgactaattttaggcatccagcctgaagaaatattcacacaagtgcccaaagagtcagatacaagactgtgtgaagtgttttttgagataataaaaaactagaaacagcataaatgtacagaaatgcagaaattgttgaattagtacataccaatttctgacatataacactctgcagcagataaagacaatagctctctagtgtggacatgaaaatatttctaagacattgacaggacgaagaagttgcacagtaaccacgcactcctgtttacatttgtatagttaaaacttgtttacctatacgtagcatatatgcgtgtgtgcaccctagaaaagagtctgtgataacacatatcaagctattgacagcggttttgtctgctgaaggaggaaaaaaggggggcttctcacattttactccatttaattctaggttgtttggtttaaaaaaaaagtttttatgtacaacagacaatttttaaaattccttttcatcatagaaaatgaaaatgtgtactctgttatcctttacgctctgtccatttttttcttcaaaaatgtgtctgacctattatcaatgtgaatgaaaatgagctttgctacataacctcttttcagagctttgtattcctgaagtgttggagtcgcctacatggcatagtcaaatgtttttaacttaaccacaacccacagtaaaaatgaagctttctgcaaagttaaaagtagtagtcctggccccaccttccttgtgtgcacgtataattaatggaaaattgcatcaaacaactctgattgtacttctagtgactaattcatgttctgttctattccttgcctttaaagaaaattatgttggcaactcacgaagtatgtttcacaatccactaatgggtaatgtcctactgtttggaaacactggctagagtgtttcaaacatctgctctgtttacccctgacaaaactgctactcgtggggcaatgcaagtctttcccacatttgttttattttatggctaaaagtcatttctgcatttgcaaattacttccaaagcctaccttccttgagctctttaactctctatagtcttctggtaattttctttagatttcccttttcagaacccttttgtgacactgaaaacctgagttttcaaactgatacatctacctgagaattttcacatataatttggtcaaaaagttaaaaaataagaagactttgccctgtgactgaggtgctcagaaggtatggctggctgctcacaaaggcacatagtgagtgataggggctgaaagggctcagagaatgcccgagttctcttagtacagtttgtacattttaaaccactgtgaactgaaaaaaaaaaaaaaggcaaccttggtagtttagaaatagataaggacccacttatagattaaataataattagcttgttccagagagaccagtgaagattagttggtttatttaatgtgttagaaagatggtcctcaaagtccttgaaatgtgaaggcggcttttatctccttaagaaaacaagaaaactccacaaaatcttgaaagctagataatcctagcttaaatgataaaatttgagtagagtttgaaaacactaaaatcagtttgccaaataaccagctctaatttctttataccaaagccaaacttcacctaaatcttacctaagaattgagttccttattgtaaccagataggagacacttttgtatattattccaaatattgcaaacctacaaggagtaaaaggtgttattattttaaagaagaaggaatgaggcctgagaggtattgattcacttggttgagggcttcaagtagcacaaggcaaaagcaggatttgttgacttccaaacctgttttcttccttcaccatgtggcctttgcatctttcccacacaaatattattccacaaatatttattgtcaccaactataataaaagaacagaactatgtatca

SEQ ID NO: 2975 - DNA, 940 bp, Homo sapiens
  source 1..940: mol_type = genomic DNA
gggtggcgcccgcggcaggcggcggccatgaacttctccgaggtattcaagctctccagcttactctgcaagttctccccggacggcaagtacctggcttcctgtgtccagtaccggttagtggtccgggatgtgaacacccttcagatccttcagctgtacacgtgcctagaccagatccagcacatcgagtggtcggcagactcgctcttcatcctgtgcgccatgtacaagcgagggctggtgcaggtctggtctttagagcagcccgaatggcactgcaaaatagacgagggctcagccgggctggtggcctcgtgctggagcccggacgggcgccacattctcaacaccacggaattccatctgcggataaccgtctggtccttgtgcacaaaatccgtgtcttacatcaaatacccgaaagcttgtctgcagggaatcaccttcaccagggacggccgctacatggcgctggcagaacggcgcgactgcaaagattacgtgagcatcttcgtctgcagtgattggcagctcctgcggcattttgatacggacacccaggatctcacagggattgagtgggccccaaacggctgtgtgctggcagtgtgggacacctgcttggaggtgcgcatccttaatcacgtgacttggaaaatgatcacggagtttgggcatcctgcagccattaatgatcccaagatagtggtgtataaggaggccgagaagagcccacagctgggactgggctgcctctccttcccgccgccccgggccggggccggccctctcccgagctcagagagtaaatatgagatcgcctctgtcccagtctccttacagacactgaaacctgttaccgacagagcaaacccgaaaatcggcataggaatgctggcatttagtcctgacagctacttcctggcgacaaggaacg

SEQ ID NO: 2976 - DNA, 1224 bp, Homo sapiens
  source 1..1224: mol_type = genomic DNA
agtctatccccagtgtgagctagagagcggaccatgaaggaagtgggcagaccccgggaagttagaggacgcccggggaaaagcagaattcagaaggagctggcggacatcactttagaccctccacctaattgcagtgctggtcccaaaggcgataacatctatgaatggagatcaaccattctagggcctccaggatccgtgtatgagggtggtgtattctttctcgatatcacttttacaccagaatatcccttcaagcctccaaaggttacatttcggacaagaatctatcattgtaatattaacagtcaaggtgttatttgcttggacatattgaaagataattggagtccagcactaaccatttctaaagtcctcctttctatctgctcacttcttacagactgtaatcctgccgaccccttggtgggaagtattgccactcagtatatgaccaacagagcagaacatgacagaatggccagacagtggaccaagagatacgctacataaattggggtttcacaattcttacattatttgtctgtcacagaagagagctgcttatgattttgaaggggtcagggagggtgggagttggtaaagagtagggtatttctataacagatattattcagtcttatttcctaagattttgttgtaacttaaggtatcttgctacagtagacagaattggtaatagcaacttttaaaattgtcattagttctgcaatattagctgaaatgtagtacagaaaagaatgtacatttagacatttgggttcagttgcttgtagtctgtaaatttaaaacagcttaatttggtacaggttacacatatggccatttatgtaaagtccctctaagactacatactttttgtttaaaacaaaattggaatttgttttcccttcttggaagggaacattgatatttaacagagtttttagagattgtcatctcatatatataaaatggacacgtggctataaaacaccatataagagatgagtagtgcgttttattttatatgccaatctactttgtttaaaaaaggtctgaatcaggacttgtgaaaacctgtagtgaaataccttaagctgttaactaactgtaaggcgtggaataggagttgctcagtggattggttctatgttgtggactacttaagtctgcatttgttactgtgctaataaacaatattaaaaaccacctaataaa

SEQ ID NO: 2977 - DNA, 795 bp, Homo sapiens
  source 1..795: mol_type = genomic DNA
agaggccaggtgcggtggctcgcgcttacattcctagcactttgggaggccaaggcgggcggatcacctgaggtcaggcgttggagaccagcctagccaacatgatgaaacctcgtctctactaaaaatacaaaaaattagctgggcgtggtggtgcgtgcttgtagtcccagacactccggaggtgaggcgggagaatcgcttgagcccgggaggtggaggttgcagtaagccaacaccgtgccactgcactacagcctgggcgacaggctgataggaagatgtcttcaggaaatgctaaaattgggcaccctgcccccaacttcaaagccacagctgttatgccagatggtcagtttaaagatatcagcctgtctgactacaaaggaaaatatgttgtgttcttcttttaccctcttgacttcacctttgtgtgccccacggagatcattgctttcagtgatagggcagaagaatttaagaaactcaactgccaagtgattggtgcttctgtggattctcacttctgtcatctagcatgggtcaatacacctaagaaacaaggaggactgggacccatgaacattcctttggtatcagacccgaagcgcaccattgctcaggattatggggtcttaaaggctgatgaaggcatctcgttcaggggcctttttatcattgatgataagggtattcttcggcagatcactgtaaatgacctccctgttggccgctctgtggatgagactttgagactagttcaggccttccagttcactgacaaacatggggaag

SEQ ID NO: 2978 - DNA, 962 bp, Homo sapiens
  source 1..962: mol_type = genomic DNA
ggcctcgaccctatgctttgattcgcgtggcgcaggcgcctactgccccgccggcggggcccgggcttcctgccgcgggatgttctcccgaaggagccacggggatgtgaagaagtccacccagaaggtgctggacccgaagaaggacgtgctgacccgcctgaagcacctgcgggcgctgctggaaaatactgcagtttctacctgaacgaattttctttcgatggcattaccagagtataggctcaactttaaagaagcttctacacactggaaattctattaagataagatgtgaaggaatcaggctgtttcttctgtggcttcaagcacttcagacaaactgtgcagaagagcaggttctgatttttgcttgcctggtgcctggtttcccagcagtcatgtcatccaggggcccttgcacactggagacactcatcaatcccagccctagtgtagctgatgtaaagatatatccagaagaaatcactccactcctaccagccatatcaggggagaagattgctgaggaccaaacctgcttttttcttcaaatactgttgaagtatatggttattcaggctgcgagcttggagtggaagaataaggagaatcaagatactggttttaaatttctttttacattgtttcgaaagtattatcttcctcatttatttccatcatttactaagttaacaaacatctacaaacctgtacttgacatcccccatttgagaccaaagcctgtgtacattactaccactcgagacaatgagaacatttacagtacaaagattccatatatggcagctcgtgttgtttttattaagtggattgtaaccttctttttggaaaaaaagtatctaactgcaacacaaaacactaaaaatggagttgatgtattgcctaaaatcatccaggtatgccatccatcatctttttatctgttaatgcttgtgtaa

SEQ ID NO: 2979 - DNA, 1947 bp, Homo sapiens
  source 1..1947: mol_type = genomic DNA
gagcgacgcgtacgtctacctgcctgccttacagggcacctaggagggaccccttcctggcccatccgcgccgcgcaggcgcacgcccacgcagcgcctagacgcccgagccgagcgtcccgtctcctagtaaccagccgctagcccccttttccacgactcatttcttaatctctgcctgaggctgccgcacctggatggaacgcgcatgcgcaaggctgtctctcgcagccccgccttccctcagcttgaaacacctgctgcttcgcggcggtggctttgtgccacttttcccagggcttgggcatcattctggacccatgttcggtgaaccggttactctcagagctgctttcgggcgcagctcctgctgcagccagggcccgttttaagagaggcttccaggtccagccctcccgctgcagcctgcagggagcgagccggcctgtcccgatgacatagacactaggtttttacagcaattctctgatgaccttgatatggtagaacgctgtgtatttcaagagtaagctctcgtttgaggagactaacaattcctgttttcgccagatttcttcttgaatggcaacctaaatgccagtccaaagaggcccccaatagacttgttcacccttcatgtcctcaactctggggaagttaagtaatcaagttgaagaaacacttccactacttaaaaagcctctaaagagagcaatcactacacttatggctgggattttgcgcttagtagttcaatggcccccaggcagactacagactgtgacaaaaggtgtggagtctcttatttgtacagattggattcgtcacaaattcaccagatcaagaattccagaaaaagtgtttcaggcctcacctgaagatcatgaaaaatacggtggggatccacagaaccctcataaactgcatattgttaccagaataaaaagtacaagaagacgtccatattgggaaaaagatataataaagatgcttggattagaaaaagcacatacccctcaagttcacaagaatatcccttcagtgaatgcaaaattgaaagtagttaagcatttgataagaatcaagcccttgaagttgccacaaggacttccagcagaggagaacatgtctaacacgtgcctcaaaagcactggggagttagtagtgcagtggcatctgaaacctgtggagcagaaagcacatgagtcctaatgccccagcagcttccgattggaaaatgcaaattgtttttatttaaagatgacggagtcttgctctgtcacccaggatggagtgtaatgccacggtttcagcttactgcaatctctctgcctcctggcttcaagcatttctcctgcctcagcctcccgagtagctgggaccacagaaaccacaacaaaggtgcttgcccatggctcctcgcttccctctgcctcatgactgatgccaattattccccttgtggccccctgtggtgtgacatgtactccctctccggggatccgaaatgaaaccaatttctacaacataggaatgatttcggcatgtctaggagagtcagagaaaagacgggagggaaatgggggagaaagaaaaacgtgagagaaccttctacttcctgaaaggcaccatgactctggaatgttacctgtaattaagaatgtcagaagaaccgagcctccattctaaagtttctgtggtgaagtcatctgtatttcctaggaaacttgaagaggaacaaactgaaacttgacaaaactcggaagagacttacaagaatcagaagtgcacacatggtgccatatttggaagtcatgaagaaaaactgaacagcattaccgaggaaaaacttcttactcctaaatatgcaacgctgtcagtaagaagcacattaaggctaagggttactaataatatttaaataaatgtggccattatgcttctagg

SEQ ID NO: 2980 - DNA, 1476 bp, Homo sapiens; identical to SEQ ID NO: 1945
  source 1..1476: mol_type = genomic DNA

SEQ ID NO: 2981 - DNA, 380 bp, Homo sapiens
  source 1..380: mol_type = genomic DNA
accttcctggagcagtcgaaaacccgatttaacaagaactacaaggggatgagtctatccaaaatcaccaccaccgtgggcctaaacatcggcactgtggatgtgggaaaggctcggctcatgttctgggacttaggagggcaggaagagctgcagtctttgtgggacaaggacaagacaaagtgtggggacctggggaccctgcactcctccaaagtgagtgcctcctttcggctcagagaccttgctgctgaccaccacaggacacagaaatggcaaagaccagatgtggggacggcaggatggctgcctctcccctgatgaggttccttcagttctagcttaacatttgttcttccatgatcaccagaagactcctc

SEQ ID NO: 2982 - DNA, 2240 bp, Homo sapiens
  source 1..2240: mol_type = genomic DNA
cttccgagttaccgccgccgtcgccgccgctcctcctctcccggtcctgggtttccttggcgctgcggccgccgctccctctgcgacctgtatgaggaggaggaggaggaggatgtgaagatggcggagctgcagatgctgctggaagaggaaatcccggggggccgccgggccctcttcgacagctacacaaatctggaacgggtggccgattactgcgagaacaactacatacagtcagcagataagcagagagccctagaagaaaccaaagcctacaccacccaatccttagcaagtgttgcctatctgataaacaccttggccaacaatgtcctgcagatgctggatatccaggcatcccagctacgaaggatggaatcttcaatcaatcatatttcacaaacagttgatattcataaagagaaagttgcaagaagagaaattggtattttgactaccaataaaaacacttcaaggacacataagattattgctccagccaaccttgaacgaccagttcgttatattagaaaacctattgactatacaattctagatgatattggacatggagtaaaggtgagtacccagaacatgaagatgggtgggctgccgcgtacaacacctccaactcagaagccccctagtccccctatgtcagggaaagggacacttgggcggcactccccctatcgcacactggagccagtgcgtcctccagtggtaccaaatgattacgtacctagcccaacccgtaatatggctccctcgcagcagagccctgtgaggacagcttctgtgaatcaaagaaatcgaacttacagcagcagtgggagtagtggagggagccacccaagtagtcggagcagcagtcgagagaacagtggaagtggtagtgtgggggttcctattgctgttcctactccatctcctcccagtgtctttccagcccctgctggctctgctggcactcctccccttcctgctacttctgcatctgcccctgctcctcttgttcctgctactgtcccttcctccactgccccagacgctgctgctgggggtgcccagacccttgctgatggcttcacttctccaactccccctgttgtttcttccactccccctacaggtcatcctgtacagttctacagcatgaataggcctgcctctcgccatactcccccaacaatagggggctcgttgccctatagacgccctccttccattacttcacaaacaagccttcagaatcagatgaatggaggacctttttatagccagaatccagtttcagatacaccacctccaccgccacctgtggaagaaccagtctttgatgagtctcccccacctcctcctcctccagaagattacgaagaggaggaagctgctgtggttgagtatagtgatccttatgctgaagaggacccaccgtgggctccacgttcttacttggaaaaggttgtggcaatttatgactatacaaaagacaaggaagatgagctgtcctttcaggaaggagccattatttatgtcatcaagaagaatgacgatggttggtatgagggagttatgaatggagtgactgggctttttcctgggaattacgttgagtctatcatgcattattctgagtaaagctcagcagggctgtgcttgcctcacaggaatagtcaggtcttcccagattatctgaaggccctggggattccactccagtaaagtagaatgaaggatacaaatgataaaaattacacttttttttttggtttattccccagtattaaaaacaaagcaagctgagtctgaacaaatggatctttctgccatcatttgtacaatgctgagctgtctggattgaaataaaatgaccatttttatgtatgtcaaaggtataacagcataactgtgtagccaaaacaaaatcagattaagactgattcagaaaaatctgggatctttctcaggaatactgtatacccttgggatttctcctcctgcagaatctgtggcattggatgttcttcattgcctgtgctaaggggttaacctcatggcccagtgggtaccctagccccttcttttcttccacttgtatgaagaggagggaaccaacatttaaataccacacttaaccatttttacaattatttcagatggcttttttcctctgtgacactgtaaattctgcattctctcagcacttgagtgcaccaaacgagtgaatgctgaac

SEQ ID NO: 2983 - DNA, 588 bp, Homo sapiens
  source 1..588: mol_type = genomic DNA
agcgtggagccggtgccgagccggggcgaagctggatcccctagatagactgtcttcaagctcactgatattttcctctgcttgatccattgtgctgttgagagcctctagtaaatttttcagatgctgccatgaaagcaggcccacctttccttactggagaatattttgtgaatttgatttagaaaactgacagacttcaaggatgcagctgctactaccggaggtgtgtggcaccttacctcagcaaggccatgagaccgtgtggccatgatgtgggcccctcatggcctcagcaggaacacagcactatagtattggcctccgccagaaaaacagcttcaagcagagtggtccctcaggcacagtacctgccacgccacctgagaaaccctcggagggcagagtctggcctcaggcccatcagcaagtgaagccaatctggaagctggaaaagaagcaagtggagacactgtcagcagggttgggcccaggcctcttgggcgtcccaccccagccagcatatttcttttgccccagcactttatgtagctctgggaccacggctgtcattgcaggccacagcag

SEQ ID NO: 2984 - DNA, 1398 bp, Homo sapiens
  source 1..1398: mol_type = genomic DNA
gacacaggaaactcccctgaaacctgtttctcagcttcccggcccagctggggcacccactggaaggagaggccaggcggaagaccctggctccgtcatggcctctgccctgaggccaccccgtgtccccaagcctaagggtgtcctgccttcacactactatgagagctttctagagaagaaggggccctgtgaccgggattacaagaagttctgggcaggcctgcagggtctcaccatttatttctacaatagcaatcgggacttccagcacgtggagaagctcaacttgggagcatttgagaaactcacagatgagattccctggggaagctcacgtgaccctggcacccacttcagcctgattctccgggatcaggagatcaagttcaaggtagagaccttggagtgtcgggaaatgtggaaaggcttcatcttaacggtggtggagctccgtgtcccgaccgacttgaccctgcttcctgggcacctatacatgatgtctgaagtcttggccaaagaggaggcgcgccgtgcactggagacaccctcgtgcttcctgaaggtgagccggctggaggcacaactgctcctggagcgctaccccgagtgcgggaacctgctgctgcggcccagcggggacggcgccgacggcgtgtcggtcaccacgcggcagatgcacaacgggacgcacgtggtccggcattacaaggtgaagcgggagggccccaagtacgtgatcgatgtggaacagccgttctcttgcacctccctggacgccgtggtcaactatttcgtgtcgcataccaaaaaggcgctggtgccattcctgttagacgaggactacgagaaggtgctaggctacgtggaagccgataaggagaatggcgagaatgtgtgggtggcgccctccgctccgggcccaggtcctgcaccctgcacaggtggccccaagccgctgtcacctgcgtctagccaggacaagctgcccccactgcccccactaccgaaccaggaagagaactacgtgacccccattggagatggcccagctgttgactatgagaaccaagatgtggcttcctctagttggccagtcatcctgaagccaaagaagttgccaaagcctcctgccaagcttccaaagccacccgttggacccaagccagagcccaaagtctttaatggtggcttgggcaggaagctgccagtcagttcagcccagcctctcttccccacagccgggctggcagacatgacggcagagctacagaagaagctggagaagaggcgggcactggagcactgattcggacacaccagggaccagcgggctagtcccagggcatggcccagcggccagattctttttcccaggattaaaactctgaccccagg

SEQ ID NO: 2985 - DNA, 1678 bp, Homo sapiens
  source 1..1678: mol_type = genomic DNA
gcggcgagccgcgagccaggcagtccggggcatccagactgcaggccgcgcccaggccgcgcccaggctgcgccgcccgcctgcctcccgcgctgccgcgtcgccagtgctagcgctcctctccagcatgctgcggcggggcagccaggcgctccggcgcttctccactggccgggtttatttcaaaaacaagctgaagttggcactaattggccagagcctctttggacaagaagtctatagccacctccgcaaagagggccaccgagtagtaggggtgttcacagttccagacaaggatggaaaagctgaccctctggctttggctgcagagaaagatgggacccctgtgttcaagcttcctaaatggagggtcaagggcaagaccatcaaagaagtggcagaagcctacagatccgtgggtgcagagctaaatgtgctccctttctgcactcagttcattcccatggatataattgatagtccaaagcacggctctatcatttatcacccatccatcctgcccaggcacagaggagcctctgctatcaattggactctaattatgggagataagaaagctgggttttctgttttctgggctgatgatggcttggatacaggacccatccttcttcagagatcatgtgatgttgaacccaatgatacagtggatgcactttataatcggtttctttttcctgaaggaatcaaggccatggtagaagctgtccaactcatagctgatggaaaagctcctcgtataccccagccagaagaaggggcaacatatgaaggtatccagaaaaaggaaaatgctgagatttcttgggaccagtctgccgaagttttacataactggattcgaggtcatgataaagtccctggagcttggacagagataaatggacagatggtcactttctatggctcgacattactgaatagctctgtgcctcctggagaaccactggaaattaaaggtgccaagaagcctggtctcgttaccaaaaatggacttgttctttttggtaacgatggaaaagcactgacggtgagaaatctgcagtttgaagatggaaaaatgatccctgcctctcagtacttttcaacgggtgagacgtcagtggtagaactgacagctgaagaggtgaaagtggcagagaccatcaaggtcatctgggctggaattttaagcaatgtccccattattgaagactcaacagacttctttaaatctggagcaagctcaatggatgttgccaggctggttgaagagatcagacagaaatgtggtgggcttcagttgcagaatgaagatgtctatatggccaccaagtttgaaggctttatccaaaaggtcgtgaggaaactgagaggagaagatcaagaggtggagctggttgtagattatatttcaaaggaggtcaatgaaatcatggtaaaaatgccataccagtgtttcataaatggacagttcacagatgcagacgatggaaagacttacgacactatcaacccaacagatggatctacaatatgcaaagtatcctacgcttctttggcggatgttgataaagcagtagcagcagcaaaagatgcttttgaaaacggtgaatggggaagaatgaatgcaagagaaagaggaagattgatgtatagcatgagaatgaactaa

SEQ ID NO: 2986 - DNA, 4666 bp, Homo sapiens
  source 1..4666: mol_type = genomic DNA
tggcagcttgttttgccttcacgggagtagaaggaggcggcgtccggccgcggccgacggtagttcgcttccccgagagtgcgcggaggcccgggtgcgaggagggcctgtttctcttcagccctggttcattcacctcgcggaccgagggccccgccgtcaggagccggcgaccgtgccctggtgcgagctgtgatggtcattgtcctccagagcagtgatggaggaaataccagcccaggaagcagcagggtcaccaagggtccagtttcagtctttggagacccagtctgagtgtctgtccccagagcctcagtttgtgcaggacaccgacatggaacagggactcactgggggatttccaatttccaagcctgatgggatctcccagctggaacaggatctacaggtctttgatctggaaactaagactagagaagtcttaagagatgactgctcagatggagagaccagagaagagaacaagctgttgattcctaagcagaaaatttcggaagaagtgcattcatacaaagtgagagtaggaagactcaaacacgatattacccaagttcctgagactagagaagtgtataagtctgaggacagattagaaagacttcaggaaattctaaggaaatttctgtacctggagagagagtttaggcaaataacaatcagcaaggaaaccttcaccagtgagaagaacaatgaatgtcatgaacccgaaaaaagcttcagtctggactctactattgatgcagatcagagagttcttagaatacagaataccgatgacaatgataagtatgacatgagcttcaaccagaattcagcctctggtaaacatgaacacttaaatctaacagaggattttcagagtagtgaatgtaaggaaagcttaatggatctctcccaccttaataaatgggagagcatccctaacactgagaaatcctataaatgtgatgtatgtgggaaaattttccatcagagctcagcccttactagacatcagagaatccatactagagagaagccctacaaatgtaaagaatgtgaaaagtctttcagtcagagctcaagtcttagtcgacataaaagaatacacactagagaaaaaccttacaaatgtgaagcatctgataaatcctgtgaagcgtctgataaatcctgtagtccaagctcaggcataattcagcataagaaaattcacaccagagccaaatcttacaaatgtagcagttgtgaaagagtcttcagtcgtagtgtccaccttactcaacatcagaaaattcacaaagagatgccctgtaagtgtactgtatgtggcagtgacttctgccatacttcatacctacttgaacatcagagggtccatcatgaagagaaagcctatgagtatgatgaatatgggttggcctatattaaacaacaaggaattcatttcagagaaaagccctatacgtgtagtgaatgtggaaaagacttcagattgaattcacatcttattcagcatcaaagaattcacacaggagagaaagcacatgaatgtaatgaatgtggaaaagctttcagtcaaacctcatgccttattcagcatcacaaaatgcataggaaagagaaatcgtatgaatgtaatgagtatgagggcagtttcagtcatagctcagatcttatcctgcaacaagaagtcctcaccagacagaaagcctttgattgtgatgtatgggaaaagaactccagtcagagagcacatctagttcaacatcagagcattcataccaaagagaactcatgaatgtaatgaagatgggaagatatttatcaaattcaggcttcattcagcatctgagagttcacaccagggagaaatcatgtatgtactgcatgtggtaaagccttcagtcatagctcagccattgctcagcatcagataattcacaccagagagaaaccctctgaatgtgacgaatgaagaaaaggtattagtgttaaactcttaatcgactcctgcaaatctataccagtgagaaatcttacaaatgtattgaatgtggcaaatttttcatgctattagtattttcataccttagtcacatttggagaattcacatgggaataaaattccattgctgcaatgaatgtgaaaaagccatcagtcaaagaaactaccttgtttagtatcaaattcacgccatgcaaaaagattataaatgtaataagcatgtatgtgtgtgaggagattcagtcataacccaacgctcattcaacatcaaagaatttatacctaagagaacttatttgggtgtagtaaatggcagatctttcaataggagtttaactagtctttgtcatatcagaatatccatagtagacaagaatttgatgtaacgcaaatggaaaaactcgacaccacatttcaggctttacccaacatcgaaataatggagagaaaattgttgattatttgtttatgaaattgttaatacatagtcccaatctttttcattgcacaaaaatctagggttgacttggtaaatgcagtgacattttctcatggagttcctttatttaatatgtattctaagtaggtacgtttatttttacttttttattataattttgatattaaaaagaacagagatggggtcttgctttgttgcccaggctggtcttgaactcctggcctcaagcgatcctcccacctgtcctcccaaagtgctggggttacaggcgtgtgtcactgtgctgggcctattttatttatagaactcatttaagctgtttttattttaatatgccctataaacatttttatattttttgaaattggttcttagtgttcacaacttccataagatactgctaatgcaccagtattaaaacacatcgacgtaagtagctcatttagctttttctgctgttcttggcccaagttctttccaaaaccaactcttaggcctgctctttactagggatcttatgtcgtattgctttacagccacaacacttggattcctgttgattaacttctccattctcttaagcacctttagaagatttagaagtttcctagttttaagtgtttcaccagcaagtattccatacctacttgatgttgctggtctggtgtcttatttcctaaagtgaagcatctttttttaaaaaagaatttgattgacaatatatccagtccaatataagtatgaaggattctctctcctgagattgtagcaggcagccaaacattttcaaatgatgcccaaggttttagctgtcttgtgtgcatccacagtctgcgaagaagacatgataaggacatcagggagccaacaagactcctaatagcctcactacattcatccagtgcctattctgcatgcctaagcttagagttcttttatatacctctacggccagcaaaatgctcaggtctgctcttggtagggtaaacataaagaagatacacaggccgggcatggtggctcacacctgtaatcccagcactttgggaggctgaggcggatggatcacgaggtcaggcagtcgagaccatcctggccaacatggtgaaaccccgtctctactaaaaatacaaaagttagccgggtgtggtggcacgcgcctgtaatcccagctactcaggaggctgaggcaggagaactgcttgaacctgggaggcggaggttgcagtgagccgagattgcaccactgcactccagcctgggcgacagagcaggactctctctcaaaaaaacacaaaaaaacaaaaacaaaaaaccatacacacacacacacacacacaaatcagcatcataagggaatgtagccttccaacagagatgatgctgttcgtatgttaatctcagagacagtatttcaagagagtggcaggtctgttcctggtaaaattttaaccattaggattgcagataaatgtttgaattctgctcctctctcatcaatccaggacagtatttgaagtgtgagggctttgtgtatagttgtttatccattaccacatttttgtattttaatagtctacaggctatataaaagaacatggctttttgactgataaaagtgattacagatgttggctcaagttcagggccaccatcatatacctaacaagagttcatgattctttaggtaatgtcaaaacattttgtatttttccatcttaagctttataacattttgtgagtaagacaaatgttatttaaaattcttgttgtcagtccagcaattgaggctttcatagttcagtgttataatattcagtagggaccctcaacaaatatataaaaatatgttgctcactctataatcctcctatggctaacctctaggatagttctgccactatattttacttctttgccatcagcaagagtaggatttcatcaaggcaaggtaggaatctaaatgaaattgatatataaatgaattgatctaaatgtaaaagcaaatgaaaaatgcatgtgttttttcctgtcaaacatgtatacccttatgtatagagaccagtagtcacgtatggtgactgaaacaggattatgtaatccctaaaaagcagaatatgtaaaaatcacatgtatgcgtttggtttaggaatgtgcttttgtacttccacttgaataaaggtgtgtttggtattctg

SEQ ID NO: 2987 - DNA, 628 bp, Homo sapiens
  source 1..628: mol_type = genomic DNA
gttctgatttttgcttgcctggtgcctggtttcccagcagtcatgtcatccaggggcccttgcacactggagacactcatcaatcccagccctagtgtagctgatgtaaagatatatccagaagaaatcactccactcctaccagccatatcaggggagaagattgctgaggaccaaacctgcttttttcttcaaatactgttgaagtatatggttattcaggctgcgagcttggagtggaagaataaggagaatcaagatactggttttaaatttctttttacattgtttcgaaagtattatcttcctcatttatttccatcatttactaagttaacaaacatctacaaacctgtacttgacatcccccatttgagaccaaagcctgtgtacattactaccactcgagacaatgagaacatttacagtacaaagattccatatatggcagctcgtgttgtttttattaagtggattgtaaccttctttttggaaaaaaagtatctaactgcaacacaaaacactaaaaatggagttgatgtattgcctaaaatcatccaggtatgccatccatcatctttttatctgttaatgcttgtgtaataaaatacactggaacatagccaaa

SEQ ID NO: 2988 - DNA, 536 bp, Homo sapiens
  source 1..536: mol_type = genomic DNA
aacattaaacctggggaaggcctgggcatgtacatcaaatcaacctatgatgggttacacgtgattactggaaccacagaaaatgtgggatggcagctgaaaaatctggtgaagaaattgagagagaatcccaccggagttgtgttactgcttaagaagcgccccaccgggtctttcaactttactcctgctcccctgaaaaacctacggtggaagccacctcttgtacagacctcacctccacccgcgacaacccagtcccctgaaagcactatggatacctcactgaagaaggagaagtcagccatcctggatctttatattcctcctccgcctgctgttccctactctccccgggatgagaatggcagttttgtttatggagggtccagtaagtgcaaacaaccattgcctggtcctaagggttcagagtccccgaattccttcttggaccaggaaagccggagacgaagattcaccattgcagactcggatcagttgcctgggtactcggtggaaaccaacattctgcccac

SEQ ID NO: 2989 - DNA, 3185 bp, Homo sapiens
  source 1..3185: mol_type = genomic DNA
gcttcagtagcgagaggggctgagaaagtggtgacaccgccggggtgcggagggagtccctgaaacttctcccaacagccccagggccaatcttccctcagcccactcccctcttcgccagctcccaggtccccactcctgtaccgggggtggggtggggagccaggcccgtctcccgctgggacacacacaggggccgggagcggggacgggacccccgaggcgggggggacgaaccgacagacagacggctgggcgcccgccccagcgggcaggcaggcaggaggaggcggaggcgggggtacgacggggagcactgggtctggggagtttcctctcaactatcgggggagaaactccccgcagccggaggaaagacccagacagtgttttcctcccgggggccgtgctcccccgccccgcgtagcggcggtcgccgccaccggcgcctccacctctaccatctcctctttctccaccacctcgggccccggtgtccccggccagcactatgcccatcttactgttcctgatagacacgtctgcctctatgaaccagcgcagccatctgggcaccacctacctggacacggccaaaggcgcggtagagaccttcatgaagctccgtgcccgggaccctgccagcagaggagacaggtatatgctggtcactttcgaagagccgccctatgctatcaaggctggatggaaagaaaaccatgcaacgtttatgaatgaattgaaaaaccttcaggctgaaggacttacgactcttggccaatccctaaggacagcttttgatttattaaatttaaatagattagtaactggcatagacaactatgggcagggaagaaacccttttttcttggagccagcaataattatcacaattactgatgggagcaagttgactaccaccagtggagtccaggatgagcttcatttacctcttaattctcctttgcctggaagtgaattgaccaaggaaccttttcgttgggatcagagactctttgcattagtgttgcggttgcctggcaccatgtcagtagaatcagaacagttgacaggtgtgcctttagatgactctgcaatcacaccaatgtgtgaagtgacaggcggccgttcatattctgtgtgttctccaagaatgcttaatcagtgtctggagtccttggtgcagaaagtacaaagtggggtggtaataaactttgaaaaagcaggaccagatccttcccctgtagaagatgggcagccagatatatcaaggccttttggatctcagccttggcatagctgtcacaaactcatatatgtcagaccaaatcctaaaactggggttcctataggtcattggcctgttccagagtctttttggccagatcaaaattcgccaacactaccacctcgtacatctcatcctgtagtgaagttttcctgtacagactgtgaaccaatggttattgataaacttccttttgacaaatatgagttggaaccttcaccactgactcaatttatcctggaaaggaaatctcctcaaacatgttggcaggtgtacgtgagcaatagtgcaaaatacagtgaacttggtcatccttttggttacttgaaagccagtacagcactgaactgtgtcaacttatttgtgatgccttacaattatccagtccttcttcccctcttagcccttgaagaaagctgttaggatgatgggagcacctaacctaatagcagacagtatggaatatggacttagttacagtgtcatttcatacctcaaaaaactgagtcaacaggccaaaatagaatctgatcgagtcattggatctgtaggcaaaaaagtagtacaggagactggaataaaagtccggagccgatcacatggtttatcaatggcatataggaaagattttcaacaactcctccagggaatttcagaggatgtccctcacagactgctagaccttaatatgaaggaatacactgggttccaagttgctttgctgaataaggatttgaagccacagacatttagaaatgcttatgacataccaagacgaaatcttttggatcacttaacaagaatgagatctaatcttttgaagagcactcgcagatttctgaaaggacaggacgaagatcaagtgcacagtgttcctatagcacaaatggggaactaccaggaatacctcaagcaagtaccttctccactaagagaacttgatcctgatcagccacgaaggttgcatacatttggcaacccctttaagctggataagaagggtatgatgatagatgaagcagatgaatttgtggctggacctcaaaataaacataaacgacccggagaaccaaatatgcaagggatccctaaaagacgtcggtgtatgtctccactactaagaggcagacagcagaatcctgttgtaaacaatcatattgggggaaaaggaccacctgcacctacaactcaagcacagccagatcttattaaacctcttcctcttcataaaatttcagaaaccactaatgattcgataatacatgatgtggttgaaaatcatgttgcagaccaactttcatcagacattacaccaaatgctatggatacggaattttcagcatcttctccagccagtttactggaacggccaaccaatcatatggaggctcttggtcatgaccatttaggaaccaatgacctcactgttggtggatttttagaaaatcatgaggagccaagagataaagaacaatgtgctgaagagaacataccagcatcttcactcaacaaaggaaagaaattgatgcattgcagaagccatgaagaggtcaatactgaactaaaagcacaaataatgaaagagatccgaaagccaggaagaaaatatgaaagaatcttcactttactgaagcatgtgcaaggcagtttacaaacaagactaatatttttacaaaatgtcattaaagaagcatcaaggtttaaaaaacgaatgctaatagaacaactggagaacttcttggatgaaattcatcgaagagccaatcagatcaaccatattaatagcaattaaaagaaaatagaatgtggccacttatttcactatcttcttcaaatacaaagtaaatacaagactgttgtgatcttgcattcattttctgacatgcattgttggcta

SEQ ID NO: 2990 - DNA, 1509 bp, Homo sapiens
  source 1..1509: mol_type = genomic DNA
ctggactgtgggccacggctgcctgtagaagtggggccatctctgtcctcccccagctcgggctgcggggaggggagcatcagcgtgggggagaacgtgtcagacgtggctcccacccaaccatggtggcccaacaccccgggagacagtgtctctgaagaactaggccctgggaggagcggggacactgaggacctctctccaaattggcctctcaactcacaggaagacacagctgcccagagcagcccaggccgtggtgaggaggcggaggcatcggcggcggaggctcagggtggggagcaggcctacctggcaggcctggcagggcagtaccacttggagcggtacccggacagttacgagtccatgtccgagccgcccattgctcatcttttgcgccccgtgcttccccgggccttcgccttccccgtggacccccaggtccagtctgccgctgatgagactgctgtgcagctgagcgagttgctgacgctgcccgtgctcatgaagcgctccatcacggcaccgctggccgcccacatctccttggtgaacaaggccgctgtcgactacttcttcgtggagctgcacctggaggcgcactatgaggcactgcggcacttcctgctgatggaggacggcgagttcgcccagtccctcagcgacctgctctttgagaagcttggagctgggcaaacgcccggagagctgctcaacccgctggtgctgaactctgtgctgagcaaggccctgcagtgcagcctgcatggggacaccccgcacgcctccaacctctccctcgctctcaagtacctgcccgaggtgtttgcccccaacgccccggatgtgctgagctgcctggagctcaggtacaaggtggactggcctctcaacattgtcatcaccgagggctgcgtgagcaagtacagcggcgtcttctccttcctgctgcagctgaagctcatgatgtgggcgctcaaggacgtctgcttccacctcaagcgcacagttccgtcagctgcagctgttcaagcacgagatgcagcatttcgtgaaggtcatccagggctacatcgccaaccagatcctgcacgtcacctggtgcgagttcagggccaggttggccaccgtgggcgacctggaggagatccagcgtgcgcacgcagagtacctgcacaaggccgtcttcaggcggcgcccgtcatgaacgtcatccacagcatcttcagcctcgtgctcaagttccgcagccagctcatctcccaggcctgggggccccctgggggcccgcggggtgcagagcaccccaactttgcactcatgcagcagtcctacaacaccttcaagtactactcccactttctcttcaaagtggtgaccaagctggtgaaccgcggctaccagccccacctggaggactttctgctgcgcatcaacttcaacaactactaccaggacgcctgaggctgctctgcgggggacgtgcacaataaaggtgttctcgga

SEQ ID NO: 2991 - DNA, 4403 bp, Homo sapiens
  source 1..4403: mol_type = genomic DNA
gggcccgtcctcgaggcgcgcggcgcggggcgcgggcgccggggcctgaggcggcgggcgacgcccgggggcctgacggccggccccgcgccatggtgtgagcgccgccgcccgtgcacgctccgtccgccctccgcgcggcccggccggcagagagccccgagcggcccgagagcgcagccgagcccgccgccgccgcccgcggccccgcgaggagagtaccgggccggctcggctgccgcgcgaggagcgcggtcggcggcctggtctgcggctgagatacacagagcgacagagacatttattgttatttgttttttggtggcaaaaagggaaaatggcgaacgactcccctgcaaaaagtctggtggacatcgacctctcctccctgcgggatcctgctgggatttttgagctggtggaagtggttggaaatggcacctatggacaagtctataagggtcgacatgttaaaacgggtcagttggcagccatcaaagttatggatgtcactgaggatgaagaggaagaaatcaaactggagataaatatgctaaagaaatactctcatcacagaaacattgcaacatattatggtgctttcatcaaaaagagccctccaggacatgatgaccaactctggcttgttatggagttctgtggggctgggtccattacagaccttgtgaagaacaccaaagggaacacactcaaagaagactggatcgcttacatctccagagaaatcctgaggggactggcacatcttcacattcatcatgtgattcaccgggatatcaagggccagaatgtgttgctgactgagaatgcagaggtgaaacttgttgactttggtgtgagtgctcagctggacaggactgtggggcggagaaatacgttcataggcactccctactggatggctcctgaggtcatcgcctgtgatgagaacccagatgccacctatgattacagaagtgatctttggtcttgtggcattacagccattgagatggcagaaggtgctccccctctctgtgacatgcatccaatgagagcactgtttctcattcccagaaaccctcctccccggctgaagtcaaaaaaatggtcgaagaagttttttagttttatagaagggtgcctggtgaagaattacatgcagcggccctctacagagcagcttttgaaacatccttttataagggatcagccaaatgaaaggcaagttagaatccagcttaaggatcatatagatcgtaccaggaagaagagaggcgagaaagatgaaactgagtatgagtacagtgggagtgaggaagaagaggaggaagtgcctgaacaggaaggagagccaagttccattgtgaacgtgcctggtgagtctactcttcgccgagatttcctgagactgcagcaggagaacaaggaacgttccgaggctcttcggagacaacagttactacaggagcaacagctccgggagcaggaagaatataaaaggcaactgctggcagagagacagaagcggattgagcagcagaaagaacagaggcgacggctagaagagcaacaaaggagagagcgggaagctagaaggcagcaggaacgtgaacagcgaaggagagaacaagaagaaaagaggcgtctagaggagttggagagaaggcgcaaagaagaagaggagaggagacgggcagaagaagaaaagaggagagttgaaagagaacaggagtatatcaggcgacagctagaagaggagcagcggcacttggaagtccttcagcagcagctgctccaggagcaggccatgttactgcatgaccataggaggccgcacccgcagcactcgcagcagccgccaccaccgcagcaggaaaggagcaagccaagcttccatgctcccgagcccaaagcccactacgagcctgctgaccgagcgcgagaggtggaagatagatttaggaaaactaaccacagctcccctgaagcccagtctaagcagacaggcagagtattggagccaccagtgccttcccgatcagagtctttttccaatggcaactccgagtctgtgcatcccgccctgcagagaccagcggagccacaggttcctgtgagaacaacatctcgctcccctgttctgtcccgtcgagattccccactgcagggcagtgggcagcagaatagccaggcaggacagagaaactccaccagtattgagcccaggcttctgtgggagagagtggagaagctggtgcccagacctggcagtggcagctcctcagggtccagcaactcaggatcccagcccgggtctcaccctgggtctcagagtggctccggggaacgcttcagagtgagatcatcatccaagtctgaaggctctccatctcagcgcctggaaaatgcagtgaaaaaacctgaagataaaaaggaagttttcagacccctcaagcctgctgatctgaccgcactggccaaagagcttcgagcagtggaagatgtacggccacctcacaaagtaacggactactcctcatccagtgaggagtcggggacgacggatgaggaggacgacgatgtggagcaggaaggggctgacgagtccacctcaggaccagaggacaccagagcagcgtcatctctgaatttgagcaatggtgaaacggaatctgtgaaaaccatgattgtccatgatgatgtagaaagtgagccggccatgaccccatccaaggagggcactctaatcgtccgccagagtacagttgaccaaaagcgtgccagccatcatgagagcaatggctttgccggtcgcattcacctcttgccagatctcttacagcaaagccattcctcctccacttcctccacctcctcctccccatcctccagccagccgacacccaccatgtccccacagacaccccaggacaagctcactgctaatgagactcagtccgctagtagcacactccagaaacacaaatcttcctcctcctttacaccttttatagaccccagattactacagatttctccatctagcggaacaacagtgacatctgtggtgggattttcctgtgatgggatgagaccagaagccataaggcaagatcctacccggaaaggctcagtggtcaatgtgaatcctaccaacactaggccacagagtgacaccccggagattcgtaaatacaagaagaggtttaactctgagattctgtgtgctgccttatggggagtgaatttgctagtgggtacagagagtggcctgatgctgctggacagaagtggccaagggaaggtctatcctcttatcaaccgaagacgatttcaacaaatggacgtacttgagggcttgaatgtcttggtgacaatatctggcaaaaaggataagttacgtgtctactatttgtcctggttaagaaataaaatacttcacaatgatccagaagttgagaagaagcagggatggacaaccgtaggggatttggaaggatgtgtacattataaagttgtaaaatatgaaagaatcaaatttctggtgattgctttgaagagttctgtggaagtctatgcgtgggcaccaaagccatatcacaaatttatggcctttaagtcatttggagaattggtacataagccattactggtggatctcactgttgaggaaggccagaggttgaaagtgatctatggatcctgtgctggattccatgctgttgatgtggattcaggatcagtctatgacatttatctaccaacacatatccagtgtagcatcaaaccccatgcaatcatcatcctccccaatacagatggaatggagcttctggtgtgctatgaagatgagggggtttatgtaaacacatatggaaggatcaccaaggatgtagttctacagtggggagagatgcctacatcagtagcatatattcgatccaatcagacaatgggctggggagagaaggccatagagatccgatctgtggaaactggtcacttggatggtgtgttcatgcacaaaagggctcaaagactaaaattcttgtgtgaacgcaatgacaaggtgttctttgcctctgttcggtctggtggcagcagtcaggtttatttcatgaccttaggcaggacttctcttctgagctggtagaagcagtgtgatccagggattactggcctccagagtcttcaagatcctgagaacttggaattccttgtaactggagctcggagctgcaccgagggcaaccaggacagctgtgtgtgcagacctcatgtgttgggttctctcccctccttcctgttcctcttatataccagtttatccccattctttttttttttcttactccaaaataaatcaaggctgcaatgcagctggtgctgttcagattcta

SEQ ID NO: 2992 - DNA, 456 bp, Homo sapiens
  source 1..456: mol_type = genomic DNA
gcccttcagatctctgagaacttgtttagcaacaaagtcctcaatgccttgaaaccagaaaaagatgtggatggagtaacagacataaacctggggaagctggtgcgaggggatgcccatgaatgttttgtttcacctgttgccaaagctgtaattgaacttcttgaaaaatcagtaggtgtcaacctagatggaaagaagattttggtagtgggggcccatgggtctttggaagctgctctacaatgcctgttccagagaaaagggtccatgacaatgagcatccagtggaaaacacgccagcttcaaagcaagacggagtctcgttctgtcaccaggctggagtgcaggcgcgtgatctaggctcactgcaagctctgcctcccaggttgaagtgattctcctgtgaaagggaattatttttgatgagtcattaaagtatatccattcccagaa

SEQ ID NO: 2993 - DNA, 2088 bp, Homo sapiens
  source 1..2088: mol_type = genomic DNA
ggggagtgggagccgcggggttcagagcgatgattcccccacaggaggcatccgctcgacggcgggagattgaggacaagctgaagcaggaggaggagactctgtccttcatccgagacagcctggagaagagcgaccagctcactaagaacatggtgtctatcttatcatcctttgagagccgccttatgaagctggagaactccatcatccctgtgcacaagcagacggagaatctgcagcggctgcaggagaatgttgagaagacgctgtcctgcctggaccatgtcatcagctactaccatgtggccagtgacactgagaagatcatcagagagggccccacaggtaggctggaagagtacctgggaagcatggccaagattcagaaggcagtggagtatttccaggacaacagcccagacagcccggaactcaacaaagtgaaactgctctttgagcgcgggaaggaggccctggagtccgaatttcgcagcctgatgacgcggcacagtaaggtcgtctcgcccgtgctcatcttggatctgatcagtggtgacgatgatctggaggcccaggaggacgtgaccctggagcacctgcccgagagcgtgctccaggatgtcattcgcatctcccgctggctggtggaatatggccgcaaccaagatttcatgaacgtctactaccagatacgctccagccagctggaccgctccatcaaaggactgaaggagcatttccataagagcagttcttcctctggggttccctactcccctgctatccccaacaagaggaaagacacacctaccaagaagccagtcaagcggccagggacgatccgtaaggctcagaaccttctgaaacagtattcccagcatggtctagatgggaaaaaggggggctctaacctcattcctctggaagggagagatgacatgctggacgtggagaccgatgcctacatccactgcgtcagtgccttcgtcaagctggcgcagagcgagtaccagctgctggccgacatcatccccgagcaccaccagaagaagaccttcgactccctgatacaggatgccctggatgggctgatgcttgaaggggagaacatcgtgtctgctgcccggaaggccattgtgcgacacgacttctccacggtgctcaccgtcttccccatcctgcgacacctcaagcagaccaagcctgagtttgaccaggtgctccagggcacggctgccagcacaaagaacaagctgcctggcctcatcacatccatggagaccatcggtgccaaagcgctggaggacttcgcagacaacatcaagaatgacccggacaaggagtacaacatgccgaaggacggcaccgtacacgagctcaccagcaatgccatcctcttcctgcagcagcttttggacttccaggagacggcaggcgccatgctggcctcccaaggtaaagtgctgggcaacctgcagttgaacttgctgagcaagtccaaggtgtacgaggacccagctctgagcgccatcttcctgcacaacaactacaattacatcctcaagtccctggagaagtctgaactgatccagctggtggcagtgacacagaagactgctgagcgctcctaccgggagcacattgagcagcagatccagacctaccagcgcagctggttaaaggtgactgattacatcgcagagaagaatctacctgtgttccagccgggagtcaagctccgggacaaggagcggcagattatcaaggagcgttttaagggcttcaatgatggcctcgaagaactgtgcaaaatccagaaggcctgggctattccagacacagagcagagggacaggattcgccaggcccagaagaccattgtcaaggagacctacggggcctttctacagaagtttggcagcgtgcccttcaccaagaacccggagaagtacatcaagtacggggtggagcaggtgggcgacatgatcgatcgccttttcgacacctctgcctgagcctgctgctagccctgcctggttccaccagactggcgtgtcattggacagataaaccagtgttagcttg

SEQ ID NO: 2994 - DNA, 2252 bp, Homo sapiens
  source 1..2252: mol_type = genomic DNA
ttcgcggtgccaccgccccgcccacgcctcctcgccggcctccgagtgcgtcacgtgacgggtcggtggcgctggcggttgctgtcagctgattcccggggttggtggcagcggcggtagcagcaatggactttctcctggggaacccgttcagctctccagtgggacagcgcatcgagaaagccacagatggctccctgcagagcgaggactgggccctcaacatggagatctgcgacatcatcaacgagacggaggaaggtcccaaagatgccctccgagcagtaaagaagagaatcgtggggaataagaacttccacgaggtgatgctggctctcacagtcttagaaacctgtgtcaagaactgcgggcaccgcttccacgtgctggtggccagccaggacttcgtggagagtgtgctggtgaggaccatcctgcccaagaacaacccacccaccatcgtgcatgacaaagtgctcaacctcatccagaccgtgttcaactcagagacacaatcaggacaggattctgtgggcactgactccagccagcaagaggactctggccagcatgctgcccctctgcccgccccgcccatactctccggtgacacgcccatagcaccaaccccggaacagattgggaagctgcgcagtgagctggagatggtgagtgggaacgtgagggtgatgtcggagatgctgacggagctggtgcccacccaggccgagcccgcagacctggagctgctgcaggagctcaaccgcacgtgccgagccatgcagcagcgggtcctggagctcatccctcagatcgccaatgagcagctgacagaggagctgctcatcgtcaatgacaatctcaacaatgtgttcctgcgccatgaacggtttgaacggttccgaacaggccagaccaccaaggccccaagtgaggccgagccggcagctgacctgatcgacatgggccctgacccagcagccaccggcaacctctcatcccagctggcaggaatgaacctgggctccagcagtgtgagagctggcctgcagtctctggaggcctctggtcgactggaagatgagtttgacatgtttgcgctgacacggggcagctcactggctgaccaacggaaagaggtaaaatacgaagccccccaagcaacagacggcctggctggagccctggacgcccggcagcagagcactggcgcgatcccagtcacccaggcctgcctcatggaggacatcgagcagtggctgtccactgacgtgggtaatgatgcggaagagcctaagggggtcaccagcgaagaatttgacaaattcctggaagaacgggccaaagccgcggaccgattgcccaacctctccagcccctcagctgaggggcccccgggtcccccatctggcccagcgccccggaagaagacccaggagaaagatgatgacatgctgtttgccttatgagtgtggggtctggcaccctgcagcccaggtccccactgctctcacacccttaggctgggacctccctccctcctctggtgttaaggctgctttgggggtggcttgttacccccttttcctcctctttgaagacggagctgccccagctgtggctgggggtgtggaggcagtgggatgaactgggggacaggtctgcgctgcagtgggatctggctgctctgcctcctttcccaccccagctgaccatgagactttgctgagaagtggaggccccaggacaggctggctggctggctggctgcttgacccagtgtgactctccttcactgagtgataccctgctccgggcccatgccccaaggagcccttcagagcccacactgccagtcgaggcctggctggaggctggccacagtggaaattctgccgagcctcttgtcccttccctgctctgctgcatggggccccatggctttggctggccactgagggtagggtgtggaggtgtggaggccccctgaggagctgcggcggcccaggtacgaagctgcaactctgcgcgcagtgggcgagatctcatcagccccaggctgcaggtgaggcttcaggggatgctggggccccactgcccctccgctgccttgccctccatccttcctctgttccttctggccgggcaccacagcactggggctcacctcttggttgatcctcttgtactgggagaggtgccttttgtatccccaattaaaggtagaaaaccaccctgctagcagcattgtc

SEQ ID NO: 2995 - DNA, 2248 bp, Homo sapiens
  source 1..2248: mol_type = genomic DNA
gtctttccctttgacaagtcgctgctgctgcagcaaaaataaaggacgcgaccgccgcagcctctgcggagccgggctcgggtcgccggagccgcgccccaccccgccagctccagagccacgactaatggctgaaggataaatcaacatggcaactatgattccaccagtgaagctgaaatggcttgaacacttgaacagctcctggattacagaggacagtgaatctattgctacaagagagggagttgctgttctgtattctaaactggttagcaataaggaagtagtacctttgccccaacaagttttatgcctcaaaggaccacagttgccagactttgaacgtgagtctctttcaagtgatgagcaggaccactatttggatgcccttcttagcagccagctagcattggcaaagatggtatgttcagattccccatttgccggggcacttagaaaacgactgcttgtactccagcgtgtcttttatgcactttctaataaataccatgacaaaggcaaggtgaagcagcagcagcattctccggagagcagttctggttcagcagatgtccattctgttagtgaacgcccccggtcaagcactgatgcacttatagaaatgggtgttcgaactggtctaagtttattatttgcgcttctaagacaaagttggatgatgcctgtgtcaggacctggtctcagtctttgcaacgatgtcattcatactgcaattgaagttgtgagctctttgccaccattatcattagcaaatgaaagcaagattcctcctatgggcttggactgcttatcgcaagtaacaacatttcttaaaggagtcactattcctaattctggggcagacactttaggtcgtagattagcttctgagttgctgcttggtttggcagctcaacgaggctcattgcgatatcttcttgaatggatagaaatggctttgggggcttcggcagttgtacacaccatggagaaaggcaaactactctcaagccaggaaggaatgatcagctttgactgctttatgaccatattaatgcagatgaggcgttctttgatatcagaaaaccaggactctgcagatgttgatcctcaggagcattcatttactcgaactattgatgaagaagctgaaatggaagaacaggctgagagagaccgggaagaggggcatccggagccagaggatgaagaggaggaacgggaacatgaagtgatgacagctggcaaaatctttcagtgtttcctctcagcccgtgaagtagctcgtagccgagaccgagatagaatgaacagtggggcagggtctggggctcgagctgatgatccacctcctcagtctcagcaagagcgaagggtcagcacagaccttcctgagggtcaggatgtgtacactgctgcatgcaactccgtgatccatcggtgtgccctgttaatattaggagtaagtcctgtgatagatgagcttcagaagcgaagagaagaaggacagttgcagcaaccttcaacaagtgcctctgaagggggtggacttatgaccaggagtgaaagtcttactgcagagagccggctagtccacacaagcccaaattatagactgatcaaatcgaggagtgaatctgatttgtctcagcctgaatcagatgaagagggttacgcactgagtggcagacgaaatgttgatttggatttggcagcatctcacagaaagagaggtcctatgcacagtcaattggaatccctgagtgactcttgggctcgcctgaaacatagcagagactggttatgcaactcctcctattcctttgagtcagattttgatcttaccaagtctttgggagttcacactttgattgaaaatgttgtaagctttgtgagtggagatgtggggaatgccccaggttttaaagagccagaggaaagtatgtctacaagtccccaggcctccatcattgcaatggaacagcagcagttaagggcagaacttcgtttagaggcacttcatcagatcctcgttctattgtctgggatggaagaaaaaggtagcatctcactggcaggaagcagattgagttcaggcttccagtcctccacactactcacgtctgtgaggctgcagttcctagcagggtgttttggtttaggcactgttggacacacaggaggcaagggagagagtggccgattgcatcactatcaggatgggatcagagcagcccgaggttat

SEQ ID NO: 2996 - DNA, 1034 bp, Homo sapiens
  source 1..1034: mol_type = genomic DNA
acaattgcattcccgggctggatgccggttgttaagcgcgctgttgctttgtaaaaatgcgtgtgttctggtgttttggctggggcagggaggggacaccccacgaggtctggggctgttgcccttgtgtcatccccccgccttttaactgcaaaggtcaccatggctgaccgggctgctgccgaaagggcctgcaaggatcccaatcccatcattgatggcagaaaggccaacgtgaacctggcatacttaggagcaaaaccaaggatcatgcaaccaggttttgcctttggtgttcaacaacttcatccagcccttatacaaagacctttcgggatacctgcccactatgtctatccgcaggcttttgtgcagccgggagtggtcattccacacgtccagccgacagcagctgccgcctccaccaccccttacattgattacactggagctgcatacgcacaatactcagcagctgctgctgctgccgccgccgctgctgcctatgaccagtacccctatgcagcctctccagctgctgcaggatatgttactgctgggggctatggctacgcagtccagcagccaatcaccgcagcggcacctgggacagctgccgccgccgctgcagcagctgctgccgctgcagcatttggccagtaccagcctcagcagctgcagacagaccgaatgcaatagaccagccatctgatcaaagttgaattgttttctctttccctcccaattttccaatttttagtagctaataagagagttaacattgacttaacagctttaaaaaaaaaaacagccatgctattgtgaagcagagttattattttttttatactccaggtagtgttctagatgagaaagaggtaagaatgaggggaatgggcacaattttggaaatcaatcccaaagagcctgagtaaatgaaaggccactacgaaatgacgccaggagtaacaacggaacttcacttttgtaacgggatttttatttttgctctttttatagtatcagggaagcaa

SEQ ID NO: 2997 - DNA, 2014 bp, Homo sapiens
  source 1..2014: mol_type = genomic DNA
agagcgtcatgggacatgtagttccggcatcgcgcctggtggcggagttctgccgagtggggcgccgcggccgctattgtcccgccccctgctccgcaagattcgagcctgagcggcctgggcgtctcgagaggtgagagagttggcggcgaggtctcggcggctaagcgagcgtcggcgactgtctctccgcgagaggaggcaagttggggtccaggctccaaagccggtggccgcgtaccgcggtggagccgctgtctttgaggtctgaggagagaacagacagagtctagctctttcacccaggctggagtgaagtggtgcaatctcagctcagtgcaacctccgccccctgggttcaagtgattctcctgcctcagcctccccagtagctgggattacagtgatatcctgagagaagatgggaaagggctgcaaggttgtggtttgtggattgttatctgtggggaaaactgcaattttggagcagctcctttatggaaatcatactattggaatggaagattgcgaaacaatggaagatgtatacatggcttcagtagaaacagaccgaggagtaaaagaacagttacatctttatgacaccagaggtctacaggaaggcgtggagctgccaaagcattatttttcatttgctgatggcttcgttcttgtgtacagtgtgaataaccttgaatcctttcaaagagtggagcttctgaagaaagaaatcgataagttcaaagacaaaaaagaggtagcaattgtggtattaggaaacaaaatcgacctttctgagcagagacaagtggacgctgaagtggcacagcagtgggcaaaaagtgagaaagtaagactgtgggaggtgactgttacagatcggaaaactctgattgaaccattcactttattagccagtaaactttctcaaccccagagcaaatcaagctttcctttgcctgggaggaaaaacaaagggaactctaattctgagaactaaaaatcagtaatttccacaattgtatgttgaatagtgattgcctttaagtgtctgtgaacatggagtaatattactatttaaaataggccatttgtatctacctttggtccttaggaaaattcctaaggaagtcaattaatgcactttagatgttaaaagtatttgggctaaggttattattgcctgatatgaaataatatattcttattctcattgtttgaaacctgtctttgaaattagcacctttgttatttatgttgtacttgtgaaaacagtaaaatagtttggatagttatgcaaatgcacctatgtgtaacttccccccaaccccaagctgtttcggaagatatcataatcattctgtgtaacattatgcaaacttctaagcccaaacatgactttgtttttaaaaagttcattaatctaatgtctaggattataaaacatttttttgtgtctaaattggacccaaaacattgaacagtttggggtagtaagctaaatttcatcttgtggagattttgctaaacagactaagacccatgatttagctttgctcaaattagaatgtttagcatgagttgaggtaccaggtagtgttaagtaggttcatcacgctctaaggccgttttttccttagccagacccctgttgatagaccagatacttgagggcaaactgtttgctcctcctcttgaaaatgattaggcacttaaggacagtaaagctgtattttctggaaggaagactgtatcttctggaatagttttctagaaaactagtcatatacaataaaagtatcaaaaatattgggctctaatttgatctgacttagatgtctgagtttgtgttgtttctctaaagattttggcaagactcaagcaatgtggctgactgtaactttattaatttaaaaggtaggaagtaagctacttagtggtttcacctgtgaaataactattttgactgaaatgtaaaataagctattcaacaaagaacatattaaaacatcaa

SEQ ID NO: 2998 - DNA, 2080 bp, Homo sapiens
  source 1..2080: mol_type = genomic DNA
atgaacagaagccaaccaggtctgctgagaacagacccagtccctgaggaaggagaagatgttgctgccacgatcagtgccacagagaccctctcggaagaggagcaggaagagctaagaagagaacttgcaaaggtagaagaagaaatccagactctgtctcaagtgttagcagcaaaagagaagcatctagcagagatcaagcggaaacttggaatcaattctctacaggaactaaaacagaacattgccaaagggtggcaagacgtgacagcaacatctgcttacaagaagacatctgaaaccttatcccaggctggacagaaggcctcagctgctttttcgtctgttggctcagtcatcaccaaaaagctggaagatgtaaaaaactccccaacttttaaatcatttgaagaaaaggtcgaaaacttaaagtctaaagtagggggaaccaagcctgctggtggtgattttggagaagtcttgaattcggctgcaaatgctagtgccaccaccacggagcctcttccagaaaagacacaggagagcctgtgagattcctacctttgttctgctacccactgccagatgctgcaagcgaggtccaagcacatcttgtcaacatgcattgccatgaatttctaccagatgtgcttttatttagctttacatattcctttgaccaaatagtttgtgggttaaacaaaatgaaaatatcttcacctctattcttgggaaacaccctttagtgtacatttatgttcctttatttaggaaacaccattataaaaacacttatagtaaatggggacattcactataatgatctaagaagctacagattgtcatagttgttttcctgctttacaaaattgctccagatctggaatgccagtttgacctttgtcttctataatatttcctttttttcccctctttgaatctctgtatatttgattcttaactaaaattgttctcttaaatattctgaatcctggtaattaaaagtttgggtgtattttctttacctccaaggaaagaactactagctacaaaaaatattttggaataagcattgttttggtataaggtacatattttggttgaagacaccagactgaagtaaacagctgtgcatccaatttattatagttttgtaagtaacaatatgtaatcaaacttctaggtgacttgagagtggaacctcctatatcattatttagcaccgtttgtgacagtaaccatttcagtgtattgtttattataccacttatatcaacttatttttcaccaggttaaaattttaatttctacaaaataacattctgaatcaagcacactgtatgttcagtaggttgaactatgaacactgtcatcaatgttcagttcaaaagcctgaaagtttagatctagaagctggtaaaaatgacaatatcaatcacattaggggaaccattgttgtcttcacttaatccatttagcactatttaaaataagcacaccaagttatatgactaatataacttgaaaattttttatactgaggggttggtgataactcttgaggatgtaatgcattaataaaaatcaactcatcattttctacttgttttcaatgtgttggaaactgtaaaatgatactgtagaacctgtctcctactttgaaaactgaatgtcagggctgagtgaatcaaagtgtctagacatatttgcatagaggccaaggtattctattctaataactgcttactcaacactaccaccttttccttatactgtatatgattatggcctacaatgttgtatttgttatttattaaattgtgattgttttattattgtttatgccaaatgttaactgccaagcttggagtgacctaaagcattttttaaaagcatggctagatttacttcagtataaattatcttatgaaaaccaaattttaaaagccacaggtgttgattgttataaaataacatgctgccattcttgattgctagagtttttgttagtactttggatgcaattaaaactatgtgctatcacatgtgaaaagcttaataaattccatctatcagt

SEQ ID NO: 2999 - DNA, 3318 bp, Homo sapiens; identical to SEQ ID NO: 2439
  source 1..3318: mol_type = genomic DNA

SEQ ID NO: 3000 - DNA, 804 bp, Homo sapiens
  source 1..804: mol_type = genomic DNA
gaggcggctactggctcaagaggacgacagaagccagtctctgatgcccaccgcattctccagcttcaggcctcaagccctgtagccgagaaggcgaggcctaatgttacaccaccggccaaggaggcgggtttggtgcggccactccaaggccaaagcgagaaaatcttactgcgcacgcgcaatagacagccgatggagccaccgatggagccgtccggaggggagcaagagcccggagccgtcaggttcctggacctgccctgggaagacgtgctgctcccacacgtcctgaaccgggtcccgctgcgccagctgctccggctgcagcgcgttagccgggccttccggtcgctggtgcagcttcacctggccgggctgcgtcgcttcgatgccgcgcaggtgggtccgcagatcccgcgggccgcattggcccggctgctgcgggatgccgaggggctgcaggagctggcactggcgccgtgtcacgaatggctgtcagacgaggacctggtgccggtgctggcgcggaatccgcagctgcggagtgtggcgttgggcggctgcgggcaactgagtcgccgggcgcttggggctttggccgagggctgcccacgcctgcagcgcctgtcgctcgcgcactgtgactgggtggacgggctggcgctgcgcggcctcgctgatcgctgcccggccctggaggagctggatctcaccgcctgccgccagctcaaggacgaggccatcgtgtacctggcgcagaggcgcggcgctggtctccgcagcctctctctggccgtcaac

SEQ ID NO: 3001 - DNA, 2441 bp, Homo sapiens
  source 1..2441: mol_type = genomic DNA
aactttgcctctcctttacgccaaatacgtgtccttatatctgaatctacaccactattatagattcaccttctttgagaagtccctatttgaagagaggaaaattcaggctacttgtaaccctcttattctttttagacggagttttccctcttgttgcccaggctagagtgcaatggcgcgatctcggctcaccgcaacctccgcctcccgggttcaagcgactctcctgcctcagcctcccgagtagctggaattacaggcatgcgccaccactcccggctaattttgtatttttagtagagacggggtttctccatattggtcaggctggtctcaaacccccggcctcagcctcaggtgatccgcccgcctcggcctcccaaactggtggggttacaggtgtgagccacggaacgcggctcctcttccttctggatatggctgtctcagatggccagaggcctcggaaaggcttccggtttcccggcaggcccgagtggggctgaacttccggcctcaggacgcaggcgcgggccgctcatttcgctctttccggcggtgctcgcaagcgaggcagccatgtcttatcccgctgatgattatgagtctgaggcggcttatgacccctacgcttatcccagcgactatgatatgcacacaggagatccaaagcaggaccttgcttatgaacgtcagtatgaacagcaaacctatcaggtgatccctgaggtgatcaaaaacttcatccagtatttccacaaaactgtctcagatttgattgaccagaaagtgtatgagctacaggccagtcgtgtctccagtgatgtcattgaccagaaggtgtatgagatccaggacatctatgagaacagctggaccaagctgactgaaagattcttcaagaatacaccttggcccgaggctgaagccattgctccacaggttggcaatgatgctgtcttcctgattttatacaaagaattatactacaggcacatatatgccaaagtcagtgggggaccttccttggagcagaggtttgaatcctattacaactactgcaatctcttcaactacattcttaatgccgatggtcctgctccccttgaactacccaaccagtggctctgggatattatcgatgagttcatctaccagtttcagtcattcagtcagtaccgctgtaagactgccaagaagtcagaggaggagattgactttcttcgttccaatcccaaaatctggaatgttcatagtgtcctcaatgtccttcattccctggtagacaaatccaacatcaaccgacagttggaggtatacacaagcggaggtgaccctgagagtgtggctggggagtatgggcggcactccctctacaaaatgcttggttacttcagcctggtcgggcttctccgcctgcactccctgttaggagattactaccaggccatcaaggtgctggagaacatcgaactgaacaagaagagtatgtattcccgtgtgccagagtgccaggtcaccacatactattatgttgggtttgcatatttgatgatgcgtcgttaccaggatgccatccgggtcttcgccaacatcctcctctacatccagaggaccaagagcatgttccagaggaccacgtacaagtatgagatgattaacaagcagaatgagcagatgcatgcgctgctggccattgccctcacgatgtaccccatgcgtattgatgagagcattcacctccagctgcgggagaaatatggggacaagatgttgcgcatgcagaaaggtgacccacaagtctatgaagaacttttcagttactcctgccccaagttcctgtcgcctgtagtgcccaactatgataatgtgcaccccaactaccacaaagagcccttcctgcagcagctgaaggtgttttctgatgaagtacagcagcaggcccagctttcaaccatccgcagcttcctgaagctctacaccaccatgcctgtggccaagctggctggcttcctggacctcacagagcaggagttccggatccagcttcttgtcttcaaacacaagatgaagaacctcgtgtggaccagcggtatctcagccctggatggtgaatttcagtcagcctcagaggttgacttctacattgataaggacatgatccacatcgcggacaccaaggtcgccaggcgttatggggatttcttcatccgtcagatccacaaatttgaggagcttaatcgaaccctgaagaagatgggacagagaccttgatgatattcacacacattcaggaacctgttttgatgtattataggcaggaagtgtttttgctaccgtgaaacctttacctagatcagccatcagcctgtcaactcagttaacaagttaaggaccgaagtgtttcaagtggatctcagtaaaggatctttggagcc

SEQ ID NO: 3002 - DNA, 1638 bp, Homo sapiens
  source 1..1638: mol_type = genomic DNA
gtttgtctgccggactgacgggcggccgggcggtgcgcggcggcggtggcggcggggaagatggcggcgtcctccctggaacagaagctgtcccgcctggaagcaaagctgaagcaggagaaccgggaggcccggcggaggatcgacctcaacctggatatcagcccccagcggcccaggcccattattgtgatcactctaagccctgctcctgccccgtcccaacgagcagccctgcagctcccgctggccaacgatgggggcagccgctcgccatcctcagagagctccccgcagcaccccacgccccccgcccggccccgccacatgctggggctcccgtcaaccctgttcacaccccgcagcatggagagcattgagattgaccagaagctgcaggagatcatgaagcagacgggctacctgaccatcgggggccagcgctaccaggcagaaatcaacgacctggagaacttgggcgagatgggcagcggcacctgcggccaggtgtggaagatgcgcttccggaagaccggccacgtcattgccgttaagcaaatgcggcgctccgggaacaaggaggagaacaagcgcatcctcatggacctggatgtggtgctgaagagccacgactgcccctacatcgtgcagtgctttgggacgttcatcaccaacacggacgtcttcatcgccatggagctcatgggcacctgcgctgagaagctcaagaagcggatgcagggccccatccccgagcgcattctgggcaagatgacagtggcgattgtgaaggcgctgtactacctgaaggagaagcacggtgtcatccaccgcgacgtcaagccctccaacatcctgctggacgagcggggccagatcaagctctgcgacttcggcatcagcggccgcctggtggactccaaagccaagacgcggagcgccggctgtgccgcctacatggcacccgagcgcattgaccccccagaccccaccaagccggactatgacatccgggccgacgtatggagcctgggcatctcgttggtggagctggcaacaggacagtttccctacaagaactgcaagacggactttgaggtcctcaccaaagtcctacaggaagagcccccgcttctgcccggacacatgggcttctcgggggacttccagtccttcgtcaaagactgccttactaaagatcacaggaagagaccaaagtataataagctacttgaacacagcttcatcaagcgctacgagacgctggaggtggacgtggcgtcctggttcaaggatgtcatggcgaagactgagtcaccgcggactagcggcgtcctgagccagccccacctgcccttcttcaggtagctgcttggcggcggccagccccacagggggccaggggcatggccacaggcccccctccccacttggccacccagctgcctgccccttggcccctttgtcaggggccaggggtctgccgggtgggggtgccaacaggcctggccctttcctcccctgcatccagccatgggggcctctgcgattgccggaaggttgcatggctggtcccagggccagcacaggcccgaggccgggctgcctggttttatttttatttaactttattttctg

SEQ ID NO: 3003 - DNA, 3006 bp, Homo sapiens
  source 1..3006: mol_type = genomic DNA
atggcttccagtccgctgccagggcccaacgacatcctgctggcgtcgccgtcgagcgccttccagcccgacacgctgagccagccgcggccagggcacgccaacctcaaacccaaccaggtgggccaggtgatcctctacggcattcccatcgtgtcgttggtgatcgacgggcaagagcgcctgtgcctggcgcagatctccaacactctgctcaagaacttcagctacaacgagatccacaaccgtcgcgtggcactgggcatcacgtgtgtgcagtgcacgccggtgcaactggagatcctgcggcgtgccggggccatgcccatctcatcgcgccgctgcggcatgatcaccaaacgcgaggccgagcgtctgtgcaagtcgttcctgggcgaaaacaggccgcccaagctgccagacaatttcgccttcgacgtgtcacacgagtgcgcctggggctgccgcggcagcttcattcccgcgcgctacaacagctcgcgcgccaagtgcatcaaatgcagctactgcaacatgtacttctcgcccaacaagttcattttccactcccaccgcacgcccgacgccaagtacactcagccagacgcagccaacttcaactcgtggcgccgtcatctcaagctcaccgacaagagtccccaggacgagctggtcttcgcctgggaggacgtcaaggccatgttcaacggcggcagccgcaagcgcgcactgccccagccgggcgcgcaccccgcctgccacccgctcagctctgtgaaggcggccgccgtggccgccgcggccgcggtggccggaggcgggggtctgctgggcccccacctgctgggtgcgcccccgccgccgccgccgccaccgccgcccttggcagagctggctggtgccccgcacgcccatcacaagcggccgcgcttcgacgacgacgacgactccttgcaggaggccgccgtagtggccgccgccagcctctcggccgcagccgccagcctctctgtggctgctgcttcgggcggcgcggggactggtgggggcggcgctgggggtggctgtgtggccggcgtgggcgtgggcgcgggcgcgggggcgggtgccggggcaggggccaaaggcccgcgcagctacccagtcatcccggtgcccagcaagggctcgttcgggggcgtcctgcagaagttcccgggctgcggcgggctcttcccgcacccctacaccttccctgccgcggccgccgccttcagcttgtgccataagaaagaggatgcgggtgccgccgctgaggccctggggggcgcgggcgcaggcggcgcgggcgcggcgcccaaggccggcttgtccggcctcttctggcccgcgggccgcaaggacgccttctatccgcccttctgcatgttctggccgccgcggacccctggcgggctcccggtgcccacctacctgcagcccccgcctcagccgccctcggcgctaggctgcgcgctaggcgaaagcccggccctgctgcgccaggccttcctggacctggctgagccaggcggtgctgctgggagcgccgaggccgcgcccccgccggggcagcccccgcaggtagtggccaacggcccgggctccggcccacctcctcctgccgggggcgccggctctcgcgacgcgctcttcgagtcgcccccgggcggcagcggcggggactgcagcgcgggctccacgccgcccgcggactctgtggcagctgccggggcaggggccgcggccgccgggtctggccccgcgggctcccgggttccggcgccccaccatccgcaccttctggaggggcgcaaagcgggcggtggcagctaccaccattccagcgccttccggccagtgggcggcaaggacgacgcggagagcctggccaagctgcacggggcgtcggcgggcgcgccccactcggcccagacgcatccccaccaccatcaccaccctcaccaccaccaccaccaccaccaccccccgcagccgccgtcgccgcttctgctgctgcccccgcagcccgacgagccgggttccgagcgccaccacccggccccgccgccgccgccgccgccgcccccgccgccccctctggcccagcacccgcaccaccgaggccttctgtctcccgggggaaccagctgctgctaccccagcgaggacagctccgaggacgaggacgacgaggaagaagagcaggaggtggacgtggagggccacaagccccccgagggcgaggaagaggaggaaggtcgagaccctgacgacgacgaggaagaggacgaggagacggaggtcctactcggcgaccccttagtcgggggcggccggttcctccagggccgagggccgtcggagaaggggagcagccgggaccgcgcgccggccgtcgcgggcgcgttcccgctcggcctgaactcctccaggctgctgcaggaagacgggaaactcggggaccccggctcggacctgcccccgcccccgccgccgcccctggccccccagaaggcgagtggcggcggcagcagcagcccgggcagcccagttcaccatccatcactggaggagcagccctcctacaaagatagtcagaaaactaaggaaaataaccaagtaattgtatctacaaaggatgacaacagcttttcagataagaacaaggagcatagctttttcatcacagactctgatgcttctggaggagatttttggagagaaagatcaggtgaacatacacaagaaaccaactcacctcattcactgaaaaaggatgtagaaaatatggggaaagaagaacttcagaaggttttatttgaacaaatagatttacggagacgactggaacaagaattccaggtgttaaaaggaaacacatctttcccagtattcaataattttcaggatcagatgaaaagggagctagcctaccgagaagaaatggtgcaacagttacaaattgtaagctgcatttctacttaa

SEQ ID NO: 3004 - DNA, 566 bp, Homo sapiens
  source 1..566: mol_type = genomic DNA
atgcgcagcggctcgctcggaagctgcgacgccgagtttcactctggctgccttctcctgagagtcggagccacagccagagccctgcccaggccgagccggagctgcagcccgagcgcggtggtgccctcagccccgtcctcttgtcctcctcagcctcggagctggtgtcttcatccagaagggacagtttgtgccagctctccagagagaaaagaaacttccaattgaagacactgagctgaaccattccgcccgcccgcccgcccgagggcactccagatctgccggaggcgctgggcaatgaccccgggactccaggccagaggggtctgaagctgtttgggaaagcagcgggactccttgggaagatggccatggccccaagcccttccctggtgcaggtgtacaccagccccgcggctgtggccgtgtgggaatggcaggacgggctgggcacctggcacccctacagtgccaccgtctgcagcttcatcgagcagcagtttgtccagcagaagggccaacgttttgggcttgggagcctggcccacagcatccccttg

SEQ ID NO: 3005 - DNA, 1552 bp, Homo sapiens
  source 1..1552: mol_type = genomic DNA
acccgcaccctcggcggccgcagcctcagcaccgcagagcggagagcggagcccggagcccgccgccccagtgcacttacatttcaatcgaccaagttccaaggacctatgccataatgataagcagacccgcctggctctggggagcagaaatgggagccaatgaacatggagtgtgcatagccaatgaagccatcaacaccagagagccagctgccgagatagaagccttgctggggatggatctggtcaggcttggtttagaaagaggggaaacagctaaagaagccttagatgtcattgtctccttgttggaagaacatggacaaggtgggaattactttgaagatgcaaactcctgccacagcttccaaagtgcatatctgattgtggatcgtgatgaagcctgggtgctcgagaccatagggaagtactgggctgccgagaaagtcacagagggagtgaggtgcatttgcagtcagctttcgctcaccactaagatggatgcagagcatccggaactcaggagttacgctcagagccaaggttggtggacgggagagggcgagttcaatttttccgaagtcttttctccagttgaggatcatctagactgcggtgctggcaaagacagcttagaaaaacaagaagaaagcatcacagtgcagactatgatgaacaccttacgggacaaagccagcggagtgtgcatagactctgagtttttcctcaccacagccagtggagtgtctgtcctgccgcagaatagaagctctccgtgcattcactacttcactggaacccctgatccttccaggtccatattcaagcctttcatctttgttgatgacgtaaaacttgtccccaaaacacagtctccctgttttggggatgacgaccctgccaaaaaggagcctcggttccaggagaaaccagaccgccggcatgagctgtacaaagcccacgagtgggcacgtgccatcatcgaaagtgaccaggagcaaggtcgcaagctgaggagcaccatgctggagctggagaagcaaggcctggaagccatggaagaaatcctgaccagctccgagccactggaccctgcggaagtgggggaccttttctatgactgtgttgacacggagattaagttctttaagtgaagtaagcgttccctttccccttcttatttaagacttcccaccttactaaattaccagcaaaacaaaccactctcctgtttgagtaaaatgagaaagttaatatgtggcctccttttctgaagccagatcaaactgttaccttgtgttccaccttgaatctcacagcgtccccttctgcaatgtaggtctccttcctgtgcagtgtaacatgtatcccgttgcctgttgttcggttgtgtgactaattgtggattttaagctgctattattgtatttcagtggcaatggacacattagccttttacaagaggactagagttcatcaagccttgaaaggcaggcttcacagtgccgagttggcgggaaaagcaaattcttttgaagtcttagtcttt

SEQ ID NO: 3006 - DNA, 3227 bp, Homo sapiens
  source 1..3227: mol_type = genomic DNA
ggccgggattcgcggcccggagctcgggaccggttgcttcattccagcctcgcagtcacctctgtgccctgctggttgtcttcccagcgctgctgtagttgccttccatggatctataggagagcaagtcctccaggagaagaagtcctcaccagtgaacggagacctctctgaactaaggataccatggccacgtcagccccactacggagcctggaagaggaggtgacctgctccatctgtcttgattacctgcgggaccctgtgaccattgactgtggccacgtcttctgccgcagctgcaccacagacgtccgccccatctcagggagccgccccgtctgcccactctgcaagaagccttttaagaaggagaacatccgacccgtgtggcaactggccagcctggtggagaacattgagcggctgaaggtggacaagggcaggcagccgggagaggtgacccgggagcagcaggatgcaaagttgtgcgagcgacaccgagagaagctgcactactactgtgaggacgacgggaagctgctgtgcgtgatgtgccgggagtcccgggagcacaggccccacacggccgtcctcatggagaaggccgcccagccccacagggaaaaaatcctgaaccacctgagtaccctaaggagggacagagacaaaattcagggcttccaggcaaagggagaagctgatatcctggccgcgctgaagaagctccaggaccagaggcagtacattgtggctgagtttgagcagggtcatcagttcctgagggagcgggaggaacacctgctggaacagctggcgaagctggagcaggagctcacggagggcagggagaagttcaagagccggggcgtcggggagcttgcccggctggccctggtcatctccgaactggagggcaaggcgcagcagccagctgcagagctcatgcaggacacgagagacttcctaaacaggtatccacggaagaagttctgggttgggaaacccattgctcgagtggttaaaaaaaagaccggagaattctcagataaactcctctctctgcaacgaggcctgagggaattccaggggaagctgctgagagacttggaatataagacagtgagcgtcaccctggacccacagtcggccagtgggtacctgcagctgtcagaggactggaagtgcgtgacctacaccagcctgtacaagagtgcctacctgcacccccagcagtttgactgtgagcctggggtgctgggcagcaagggcttcacctggggcaaggtctactgggaagtggaagtggagagggagggctggtctgaggatgaagaagagggggatgaggaggaagagggagaagaggaggaggaggaagaggaggccggctatggggatggatatgacgactgggaaacggacgaagatgaggaatcgttgggcgatgaagaggaagaagaggaggaggaagaggaggaagttctggaaagctgcatggtgggggtggctagagactctgtgaagaggaagggagacctctccctgcggccagaggatggcgtgtgggcgctgcgcctctcctcctccggcatctgggccaacaccagccccgaggctgagcttttcccagcactgcggccccggagagtgggcatcgccctggattatgaagggggcaccgtgactttcaccaacgcagagtcacaggaactcatctacaccttcactgccaccttcacccggcgcctggtccccttcctgtggctcaagtggccaggaacacgcctcctgctaagaccctgagccctgacatctgcccccagccccaaccctcagatgcttcacttctttggaattccaggactctcaatggggggacgggatgcctggcctaagcacctggagcaggggaccccatatccactggtagccacctccccattgctgtggccccctgaaatctcactcagtgctgttgctccatctactgccctaatggggctcttttcccacctcctgctggtttcccgagggaacttctgaccctggagtccatgagggctcctttcctttttgaccacgaccttggccccagctctgcactctctggaataagggcccgatgcagcattttcttgcccagtgtggcaagacctcagaaaaaccagtcaattacgcctaagatcattttgctgtccttaaaccccccaggttccttcttgcacaaatccactctgctgcccaccttccctggcattttaaacagacctaccccaccccaactcagagttaagcatacatggcaatgctgaaaataaacaaaatccactgaggcttcccaggccatttaaagcctggagtaccagcgcatatcatctcatggggtccagagtggagtccaggcttctctgaaaccagggctgagcatatttccatagccaaggaggtgggactccctggagctatctgtggtcttagggaaggatccagacatacacggctttggggtacaagctgtgatcactgatcaataaattatctctagattggtccttgtgaggggagttttaagaatccagaacatcttgctcttgatcagcacatccaaaaacaccaagacaaacatccagtggagcagaacctctcctgcctcgggagttctgaccaggttccccagcagggtgttaagcctctgtctctggccctaccagcatccaggttccactttcctaggagagagtggagatgggaagacagggaaaggaaggcagcaggaggccacaagcccaccaggtcttcatgtcaagagagggagtaacatgtcttctcattgcccacggacccaacctctgtccaggtgcccctcatcatcacagtttaacacaagctcccctgctccagccaaattgatctcccagtcttgtccttacccattccaagtgctctgccagcccctgttcatccaagttttaagtcctccaccctgttctaagagactgttccaacggctctgggcctcagtggtcacttgaccaccattgtctcagagctgcccactttgtgtgtgtcacatgctgcctgagtcacacgtacatcttatttctgcctctagttttgtaagctcctggagggcggataacatcttatactactcttgtattctcatggcacctagtgcagtgctgggcacagagtaggtgctcaataaagacttgttgaatgaa

SEQ ID NO: 3007 - DNA, 740 bp, Homo sapiens; identical to SEQ ID NO: 1924
  source 1..740: mol_type = genomic DNA

SEQ ID NO: 3008 - DNA, 3821 bp, Homo sapiens
  source 1..3821: mol_type = genomic DNA
ctcagcctggcggttctacctccgagggttcgcccgcccttggttttccttacaccttagcctttggctcctttgaccactcgaagccccacagcgtgttccagcggacttcaccagcagacccagaagtggtgggtgaaacactgcctctgttcctccttgagcctgtcgggagctgctgcctgccaccaccatgtctgctgcaaatcctgagactccaaactcaaccatctccagagaggccagcacccagtcttcatcagctgcagctagccaaggctgggtgttaccagaaggcaaaatcgtgccaaacactgtttttgttggtggaattgatgctaggatggatgaaactgagattggaagctgctttggtagatacggttcagtgaaagaagtgaagataatcacgaatcgaactggtgtgtccaaaggctatggatttgtttcgtttgttaatgacgtggatgtccagaagatagtaggatcacagatacatttccatggtaaaaagctgaagctgggccctgcaatcaggaaacaaaagttatgtgctcgtcatgtgcagccacgtcctttggtagttaatcctcctcctccaccacagtttcagaacgtctggcggaatccaaacactgaaacctacctgcagccccaaatcacgccgaatcctgtaactcagcacgttcagtctgctgcaaatcctgagactccaaactcaaccatctccagagaggccagcacccagtcttcatcagctgcagctagccaaggctgggtgttaccagaaggcaaaatcgtgccaaacactgtttttgttggtggaattgatgctaggatggatgaaactgagattggaagctgctttggtagatacggttcagtgaaagaagtgaagataatcacgaatcgaactggtgtgtccaaaggctatggatttgtttcgtttgttaatgacgtggatgtccagaagatagtaggatcacagatacatttccatggtaaaaagctgaagctgggccctgcaatcaggaaacaaaagttatgtgctcgtcatgtgcagccacgtcctttggtagttaatcctcctcctccaccacagtttcagaacgtctggcggaatccaaacactgaaacctacctgcagccccaaatcacgccgaatcctgtaactcagcacgttcaggcttactctgcttatccacattcaccaggtcaggtcatcactggatgtcagttgcttgtatataattatcaggaatatcctacttatcccgattcagcatttcaggtcaccactggatatcagttgcctgtatataattatcagccatttcctgcttatccaagatcaccatttcaggtcactgctggatatcagttgcctgtatataattatcaggcatttcctgcttatccaaattcaccatttcaagtcgccactggatatcagttccctgtatacaattatcagccatttcctgcttatccaagttcaccatttcaggtcactgctggatatcagttgcctgtatataattatcaggcatttcctgcttatccaaattcaccatttcaagtcgccactggatatcagttccctgtatacaattatcaggcatttcctgcttatccaaattcaccagttcaggtcaccactggatatcagttgcctgtatacaattatcaggcatttcctgcttatccaagttcaccatttcaggtcaccactggatatcagttgcctgtatataattatcaggcatttcctgcttatccaaattcagcagttcaggtcaccactggatatcagttccatgtatacaattaccagatgccaccgcagtgccctgttggggagcaaaggagaaatctgtggaccgaagcatacaaatggtggtatcttgtctgtttaatccagagaagagactgataaattccgttgttactcaagatgactgcttcaagggtaaaagagtgcatcgctttagaagaagtttggcagtatttaaatctgttggatcctctcagctatctagtttcatgggaagttgctggttttgaatattaagctaaaagttttccactattacagaaattctgaattttggtaaatcacactgaaactttctgtataacttgtattattagactctctagttttatcttaacactgaaactgttcttcattagatgtttatttagaacctggttctgtgtttaatatatagtttaaagtaacaaataatcgagactgaaagaatgttaagatttatctgcaaggatttttaaaaaattgaaacttgcattttaagtgtttaaaagcaaatactgactttcaaaaaagtttttaaaacctgatttgaaagctaacaattttgatagtctgaacacaagcatttcacttctccaagaagtacctgtgaacagtacaatatttcagtattgagctttgcatttatgatttatctagaaatttacctcaaaagcagaatttttaaaactgcatttttaatcagtggaactcaatgtatagttagctttattgaagtcttatccaaacccagtaaaacagattctaagcaaacagtccaatcagtgagtcataatgtttattcaaagtattttatcttttatctagaatccacatatgtatgtccaatttgattgggatagtagttaggataactaaaattctgggcctaattttttaaagaatccaagacaaactaaactttactgggtatataaccttctcaatgagttaccattcttttttataaaaaaaattgttccttgaaatgctaaacttaatggctgtatgtgaaatttgcaaaatactggtattaaagaacgctgcagcttttttatgtcactcaaaggttaatcggagtatctgaaaggaattgtttttataaaaacattgaagtattagttacttgctataaatagatttttatttttgttttttagcctgttatatttccttctgtaaaataaaatatgtccagaagaggcatgttgtttctagattaggtagtgtcctcattttatattgtgaccacacagctagagcaccagagcccttttgctatactcacagtcttgttttcccagcctcttttactagtctttcaggaggtttgctcttagaactggtgatgtaaagaatggaagtagctgtatgagcagttcaaaggccaagccgtggaatggtagcaatgggatataatacctttctaagggaaacatttgtatcagtatcatttgatctgccatggacatgtgtttaaagtggctttctggcccttctttcaatggcttcttccctaaaacgtggagactctaagttaatgtcgttactatgggccatattactaatgcccactggggtctatgatttctcaaaattttcattcggaatccgaaggatacagtctttaaactttagaattcccaagaaggctttattacacctcagaaattgaaagcaccatgactttgtccattaaaaaattatccatagtttttttagtgcttttaacattccgacatacatcattctgtgattaaatctccagatttctgtaaatgatacctacattctaaagagttaattctaattattccgatatgaccttaaggaaaagtaaaggaataaatttttgtctttgttgaagtatttaatagagtaaggtaaagaagatattaagtccctttcaaaatggaaaattaattctaaactgagaaaaatgttcctactacctattgctgatactgtctttgcataaatgaataaaaataaactttttttcttcaaa

SEQ ID NO: 3009 - DNA, 3107 bp, Homo sapiens
  source 1..3107: mol_type = genomic DNA
aaaaacgaaagaagcccacagttgggacgaggattccagttttgcgtcaccgtcaaggcgggaaagttcccggctgtcggttggagggtgggtcctcgccccgccccgccccctcgggccgcccttccgcgcttccgggaggcttgtcccaagctcacggacccctcgctgggtgccggttaagaccccgctccccgtcgccagtgctatggaggcggcggcggcggtggtggcggcagaggcggaagtggaaaacgaagacggcgacagcagctgcggggatgtatgcttcatggacaaaggcttgcagaggacttgaagaactaattaatctgactagactaaatgtatcttataaccacatagatgatcttagtggattgattccccttcatggaattaagcataaacttagatatattgatctacatagtaatcgtatagatagtatccatcacttacttcagtgtatggtaggattgcacttcctgaccaatcttattttggagaaagatggagacgataatcctgtctgtcgactgccagggtacagagcagttattctccagactttgccacagcttagaatcctagattgcaagaacatatttggtgaaccagtaaatttgacagaaataaattcatcacagctgcagtgcctagaaggtcttttggataatttagtttcttctgattctcccctaaatataagtgaagatgagatcattgatagaatgccagtgataacagcacctatcgatgagttagttcccttggaacagtttgcaagtacaccaagtgatgctgtgttgacgtcttttatgtctgtgtgtcaatcttctgagccagagaaaaataatcatgaaaacgatttgcagaatgagataaaacttcagaaattagatgaccaaattctacaacttctaaatgaaacttctaattcaatagataacgttcttgagaaagaccccagaccaaaaagagacacagatataacttctgaaagtgactatggaaacagtagaaaaaatggagagacaaaaaaggcagcagcaggcagcacagataagactgatccaagaggtggaactcaaagcttcagctgccgatagagaaatatacttacttagaacttcccttcatcgagaaagagaacaagcgcaacaacttcatcaacttcttgcattgaaagaacaggaacacaggaaggaacttgaaacaagggagttttttactgatgctgacttccaggatgccttagctaaagaaatagccaaagaagagaaaaagcatgagcaaatgataaaagaataccaagagaaaattgacgtgttaagccagcagtatatggatttagaaaatgaattccgtattgctttaactgttgaagccagaagatttcaagatgttaaagatggttttgaaaatgttgcaactgagttagcaaagagcaaacatgctcttatttgggctcaacgaaaagaaaatgagtcttcctctttaattaaagatctgacctgtatggtaaaggaacaaaaaacaaaactggcagaagtttctaaattgaaacaagaaacagcagcaaatttacagaatcaaatcaacacccttgaaattttaattgaagatgacaagcagaagagtattcaaatagaacttctcaagcacgaaaaagtccagcttatttctgagctagcagccaaggaatcactaatatttggtttaaggacagaaagaaaagtatggggacatgagctggcacaacaaggatcttctctagcccaaaatcgtggaaaattggaggctcaaattgagagtttatctagagagaatgaatgtctgcgaaagacaaatgaaagtgatagtgatgcattaagaataaagtgcaaaatcatagacgaccaaactgaaactattagaaaattaaaagattgtttacaagaaaaagatgaacacatcaaaagattacaagaaaagatcacagaaatagaaaaatgcactcaagaacaacttgatgaaaaatcttcacaactggatgaggtacttgagaagttggaaaggcacaatgaaagaaaagaaaaactaaaacaacagttgaaaggaaaggaagtagaacttgaagaaatcagaaaagcttacagtacactgaatcggaagtggcatgataaaggagaacttctatgtcatcttgaaacacaagtaaaagaagtgaaagaaaaatttgaaaacaaggaaaagaaacttaaagcggaaagagacaaaagtattgaactacaaaagaatgcaatggaaaaacttcatagtatggatgatgcctttaaaagacaagttgatgcaattgttgaagctcatcaagctgaaatagcacagctggccaatgaaaagcagaagtgtattgattctgcaaatttaaaggtccatcaaattgaaaaagaaatgcgtgaacttttggaagaaacatgcaagaacaaaaaaacaatggaagcaaaaattaagcaacttgcttttgctttaaatgaaattcagcaagatatgtgatggttctgagaatgaatttaattgaaatagaccagcagacctattgtaaaaatgattaaatattgtaatagtagtaactgctatgactttgaaatgtctctttctatacatttcattatgaatatatttttaaagacttttgatcaagtatttattaattgtataggttttttataataaattgttgacaattttgtctattagaaaaaactatcataactagacttacaatatttttcttgtttctgtactatacattgtttggtaattacacatttgcctacaaatttgtgaatgaaaagattagtattttcaccatatgaggtaaaacattttaatcattgttatcttattgtgatgatgaagaactaattatatttgttatttaattgatgtagctcaattcttttaaagtacttatgtagccaaaaagcatttgaaatctgtatgataaaagatgtggcattcttaagaaagtatatgtagccatctccacatcactcattatgaccccttcttttataatgcttatatcttttcattaaagattacatttaaggttttataaa

SEQ ID NO: 3010 - DNA, 2757 bp, Homo sapiens
  source 1..2757: mol_type = genomic DNA
gagcggcgacggcggcggcggcgggcacagattaattaaaagaagaatgaactataatccttgaagataactgggcaattttttaagtcggaggctgttcttactggtgtgaggatttacacacgtcttcagtttttcagcacagaccagcagaccatcatttttagaggaaatactccctctgccctcctttttggtttccttggtgggctcaactaaaaaactgaatgggatgggagatgatggcagccccccagcgaaaaaaatgataacggacattcatgcaaatggaaaaacgataaacaaggtgccaacagttaagaaggaacacttggatgactatggagaagcaccagtggaaactgatggagagcatgttaagcgaacctgtacttctgttcctgaaactttgcatttaaatcccagtttgaaacacacattggcacaattccatttaagtagtcagagctcgctgggtggaccagcagcattttctgctcggcattcccaagaaagcatgtcgcctactgtatttctgcctcttccatcacctcaggttcttcctggcccattgctcatcccttcagatagctccacagaactcactcagactgtgttggaaggggaatctatttcttgttttcaagttggaggagaaaagagactctgtttgccccaagtcttaaattctgttctccgagaatttacactccagcaaataaatacagtgtgtgatgaactgtacatatattgttcaaggtgtacttcagaccagcttcatatcttaaaggtactgggcatacttccattcaatgccccatcctgtgggctgattacattaactgatgcacaaagattatgtaatgctttattgcggccacgaacttttcctcaaaatggtagcgtacttcctgctaaaagctcattggcccagttaaaggaaactggcagtgcctttgaagtggagcatgaatgcctaggcaaatgtcagggtttatttgcaccccagttttatgttcagcctgatgctccgtgtattcaatgtctggagtgttgtggaatgtttgcaccccagacgtttgtgatgcattctcacagatcacctgacaaaagaacttgccactggggctttgaatcagctaaatggcattgctatcttcatgtgaaccaaaaatacttaggaacacctgaagaaaagaaactgaagataattttagaagaaatgaaggagaagtttagcatgagaagtggaaagagaaatcaatccaagacagatgcaccatcaggaatggaattacagtcatggtatcctgttataaagcaggaaggtgaccatgtttctcagacacattcatttttacaccccagctactacttatacatgtgtgataaagtggttgccccaaatgtgtcacttacttctgctgtatcccagtctaaagagctcacaaagacagaggcaagtaagtccatatcaagacagtcagagaaggctcacagtagtggtaaacttcaaaaaacagtgtcttatccagatgtctcacttgaggaacaggagaaaatggatttaaaaacaagtagagaattatgtagccgtttagatgcatcaatctcaaataattctacaagtaaaaggaaatctgagtctgccacttgcaacttagtcagagacataaacaaagtgggaattggccttgttgctgccgcttcatctccgcttcttgtgaaagatgtcatttgtgaggatgataagggaaaaatcatggaagaagtaatgagaacttatttaaaacaacaggaaaaactaaacttgattttgcaaaagaagcaacaacttcagatggaagtaaaaatgttgagtagttcaaaatctatgaaggaactcactgaagaacagcagaatttacagaaagagcttgaatctttgcagaatgaacatgctcaaagaatggaagaattttatgttgaacagaaagacttagagaaaaaattggagcagataatgaagcaaaaatgtacctgtgactcaaatttagaaaaagacaaagaggctgaatatgcaggacagttggcagaactgaggcagagattggaccatgctgaggccgataggcaagaactccaagatgaactcagacaggaacgggaagcaagacagaagttagagatgatgataaaagagctaaagctgcaaattctgaaatcatcaaagactgctaaagaatagaaactgttaaagagattcatctgtgtattactgacaaggttttttttgtttgttgcttgctttggtaattgaattctgaagaatttatctgcatgacgataactaggcattctatccatttgtagatcagagaaagtgaagagattatatattagtacttaaatttttacattttccaaatgaatgaaaatgtatgtttctttgtacttttttaaaaaaatcagcttagtaacaatactatatggtttcaactagtaggtaatctgcttatatttctaatgcaaacttaacaattgtgtactttttaaaagctgcaatatgtgttggaaaatagctgtggtcaattttgttatccatatttcagactcaattttagatacaatggtggctttatattttaagtatatagagctactcaaggagttgaatctccccttttctcattaacacaatttttctaagttgatatggtgtactcattaacatacaccaaatttacttttactttgttcagattgtggaatgaattt

SEQ ID NO: 3011 - DNA, 1435 bp, Homo sapiens
  source 1..1435: mol_type = genomic DNA
agggctaggggaggatggcgaggagatgggtaggagagacctggtgtctggaggaagcaatgaaggaaatgggaaggaagactgggccatgaaaacagtgtccttgcgttggacaaagctgcccccggtgaagtctgccatccgtgggcaagctcctgtggtaccctacatgcgctatggacactcaaccgtcctcatcgacgacacagtcctcctttggggcgggcggaatgacaccgaaggggcctgcaatgtgctctatgcctttgacgtcaatacgcacaagtggttcacaccccgagtgtcagggacagttcctggggcccgggatggacattcagcctgtgtcctaggcaagatcatgtacatttttgggggctacgagcagcaggcggactgtttttccaatgacattcacaagctagataccagcaccatgacatggactcttatctgtacaaagggcagccctgcacgctggagggacttccactcagccacaatgctgggaagtcacatgtatgtctttgggggccgtgccgaccgctttgggccattccattccaacaatgagatttactgcaaccgcattcgagtctttgacaccagaactgaggcttggctggactgtcccccgactccagtgctgcctgaggggcgccggagccactcggcctttggctacaatggggagctgtacatctttggtggttataatgcaaggctgaaccggcacttccatgacctctggaagtttaatcctgtgtcctttacctggaaaaagattgaaccgaaggggaaggggccatgtccccgccggcgccagtgctgctgtattgttggtgacaagattgtcctctttgggggtaccagtccatctcctgaggaaggcctgggagatgaatttgaccttatagatcattctgacttacacattttggactttagccctagtctgaagactctgtgcaaactggccgtgattcagtataacctagaccagtcctgtttgcctcatgatatcaggtgggagctgaatgccatgaccaccaacagcaatatcagtcgccccatcgtctcctcccatgggtaggaggaagtttctgccacctcccctcctgagcctgctgtcatcttcactgcccctgcccatctgtcacccacctgctcctttgacccctggacttggtatacctccatgtggagttgttgggcgagaggtgttctctgtgctgtgaattcagtggggagctgtagcggggtgggggctaggttcctccccccttgggccgagggccccttccccttggtgctctgtccccatccacctcctttcagctgctcctgggcctcagctctgcccagggccagccaggttctgctgggaagggaagggaatggggagaagggagaagcaagcagtgtctgagcctca

SEQ ID NO: 3012 - DNA, 5275 bp, Homo sapiens
  source 1..5275: mol_type = genomic DNA
aaacgtcgggaagaggcgccaaaaggatgctgggcctggctccttgaagcccgggttttcccttttgagagccacaaccaagaaataaaaatctagcaaagagggggccactttctgcggcgagatacgccctctcggccgctcctccagctcccaggccccctccctactcgacggatggctgcagctcctccaagttactgttttgttgccttccctccacgtgctaaggatggtctggtggtatttgggaaaaattcagcccggcccagagatgaagtgcaagaggttgtgtatttctcggctgctgatcacgaaccggagagcaaggttgagtgcacttacatttcaatcgaccaagttccaaggacctatgccataatgataagcagacccgcctggctctggggagcagaaatgggagccaatgaacatggagtgtgcatagccaatgaagccatcaacaccagagagccagctgccgagatagaagccttgctggggatggatctggtcaggcttggtttagaaagaggggaaacagctaaagaagccttagatgtcattgtctccttgttggaagaacatggacaaggtgggaattactttgaagatgcaaactcctgccacagcttccaaagtgcatatctgattgtggatcgtgatgaagcctgggtgctcgagaccatagggaagtactgggctgccgagaaagtcacagagggagtgaggtgcatttgcagtcagctttcgctcaccactaagatggatgcagagcatccggaactcaggagttacgctcagagccaaggttggtggacgggagagggcgagttcaatttttccgaagtcttttctccagttgaggatcatctagactgcggtgctggcaaagacagcttagaaaaacaagaagaaagcatcacagtgcagactatgatgaacaccttacgggacaaagccagcggagtgtgcatagactctgagtttttcctcaccacagccagtggagtgtctgtcctgccgcagaatagaagctctccgtgcattcactacttcactggaacccctgatccttccaggtccatattcaagcctttcatctttgttgatgacgtaaaacttgtccccaaaacacagtctccctgttttggggatgacgaccctgccaaaaaggagcctcggttccaggagaaaccagaccgccggcatgagctgtacaaagcccacgagtgggcacgtgccatcatcgaaagtgaccaggagcaaggtcgcaagctgaggagcaccatgctggagctggagaagcaaggcctggaagccatggaagaaatcctgaccagctccgagccactggaccctgcggaagtgggggaccttttctatgactgtgttgacacggagattaagttctttaagtgaagtaagcgttccctttccccttcttatttaagacttcccaccttactaaattaccagcaaaacaaaccactctcctgtttgagtaaaatgagaaagttaatatgtggcctccttttctgaagccagatcaaactgttaccttgtgttccaccttgaatctcacagcgtccccttctgcaatgtaggtctccttcctgtgcagtgtaacatgtatcccgttgcctgttgttcggttgtgtgactaattgtggattttaagctgctattattgtatttcagtggcaatggacacattagccttttacaagaggactagagttcatcaagccttgaaaggcaggcttcacagtgccgagttggcgggaaaagcaaattcttttgaagtcttagtctttccctcagtagcggtttctttcaggttaacaagaggcatttgtgcacacacacagggctcttgtgtgtgttgtcaaggggaccctccgtggcctcccgtgagtgcatgcctgtagtgcacagtgtctctacaggtgtcttctggggggcagaaccaattggaaggaagaaagggacccctctccagtcctggctccttcctacatcctgggctcctgaagaagctgtcttcccattttccatgcgctgtgcttatgtgtggtggactgcagagctgcttccacttacaggagagctgataatttgttagctggaacctattcacttccgagattcagacatagccatgctggtggccttctgaatcactgcatggatgtcccaggaggcagctctccccacacagcagcacagccatcacaggattccttgtgtagaaatgattcccagtctagttaccaacagctagtctaggagtaattgaatggccctatggcacagttccacccacagagtagtgaatctctcagccaaggagggaaagaaaaggaagaactcttgactatttagattctagttaaatatctggaatcctagcagtcactacattatctcagcagagagactttaattaaactgatttgtttccaatgtcgggttcacttaaaggatttgacttaccaccagagcatagaaaagcatgcaaggaagaccagatgggcttagcattgggaagacagagggcaaggaggtgatagatggatatagaagcatttctctgcaggataccagttcaggccccaccattcctgccaaggccattacatcccacaaacccaaatacaaagcagctgacttccctggatcttccccccactcctcacacctcacatgtcccaggagctgccttcattcaggcgggtagctgcactgggcatggggtggtggtgggagcttaccgccacctattcaagctctcagctactcctgaaacgggcagagatgatgaacagaagtgtatgtaaatacagcagctagtgggagagcaccagttgggcctaatcctgcctcatcattcttggcaggaatctgcaaatggaaacattgtgagtatcagcaatctgggaagtgacagggttaataactccttcccagaagctgtatcatgagattttgaggggaccgagccctgttacatggatgtgaacagtgaggatcagaggttttatcagaacacattctttttttctaccaactctccagagcgtgagtataggagtgccatgagctttttagtcagcagttttgtaaactctgtatataaaatcattaaccacacattgtgggtgatgggaagacgatttcagctgacagagttaatggcaaccaataatggtggcctgtagctgctaagagcttcacgcaggtttggcctgggctttcactgttggtgaatttagagtgtccttttaggtggggcggctattctaaaagtgtctttctatcactgttaagggggggggaaagtgaggttcgaggatgacgtaggtaactctcccctcccaagtccatgttccaagtggctatgtaaagcaagatgatacagaaagctgctctaaaatctcactgagtgatttcaccttcgcctactatgaaatgtctcatcagacctgacatgtctgagataaccaaggtgattcaggatttgatcaaaagaagtctagtaagaattaattacacagaagcctcctttcatttctatgggccaaacaaaggccatggataaccctacccgctttatgtcattacccattgggaaacacaatggctacttctgttagggtacattgaccttggtcaagcatcttaaagaaggcaaccctaattgagagctgtcttggctaatactctgcaccacaattgtgatgtcctagtcctaccactagagggcatggtacagcctggcaaaagttaaaaggggtgtggcagctcccatcaggtctggaggtggtctataagcacagttgacagttgtgcattgggatgggtggagaaagacgacaagagagcagagaatctgctgatgtggctgcgcttacttttagtgactttatgtacttatattaacagctggaaataggttgttgggttttgagcaggctgttatagtgaggaatgttcatttttaaatgttcctaacagattttgcttttgaaaaatgcttgttacatgaataatttgtggaccagggattgcttttctgaaggcagtatagggaacatgaatattcaagatgaaatacaaaaattatgtttaagggtcatagtgtataagtagcttcctaggaaaccctttgtgtatcttttcagactggggtgggggctgagcatgcttgtgcagaaagaagccatagccagaaaggacagaatctctcccccactcccttgccccataaccaaacataagctagctagtcttgtctaatagatgggatttactataggtgaagatagccctcatattcaaggacagaagctctggcaggagtaaattagcaaagcagaaatagtaccctttcattcttggaggtgctttgaaattttaggtagaatataatcgaaattatggaggttccttagtgctcaataatataagacctggtgttattagaacgagtctttcttataaactaacagagcaggtatatgcctgttagaccttagctgtggggttcctttactattgggtgaatcattaggtataaaaaataatcatcaaccaggcaaattactttgcttcctagctgatgtcatcccacattggtacaggtgttattcagtactgggtggttcagcagggaagccgggtgggaccagtgtgtctgtcatgaaaccactaactgcattcctgactgaagagccatctgtcatttattggggaaggtcttcagttgagctctcagccttaggaaggaagcacgtggaggagggacggaggaggttcccttgctgggcatgcttcgtagagggccaggagcagcaggtcatgtgcacatgccgttgcagcacaagcttatgcttcccgtagccgtggcttttcattctgcacagtcccaggtcccagctcccctcttatggtttctgtcataatgtgctttatctgattgactccaaacatcccgaaatgtcacctgcagatttctcgtgggaaccaatatgtacatgtttgcaattatgctgtgagaatttaaatgtgttagatggaaaatgctattggcagggaataataataaaaaaaaaagaaaatcattctgtttcctgcagtgggaactggccatgtagtcttaacagtcttttgtacaaatatctacaaagcagataatatccctatccagtgcttgcccttggaattgtctctaaatgcatcaagcatacaataaaaaaaactgaaattaacatcc

SEQ ID NO: 3013 - DNA, 3037 bp, Homo sapiens
  source 1..3037: mol_type = genomic DNA
aggtgaaaaattagacgatttcaagaattggagctgaatctgatgttaagtaatggcaacaggtgacttaaaaagaagcttacggaacctagaacaggtgctccgcttgctaaattatcctgaagaggtggactgtgtaggtttgataaagggagacccagcagcatctttgcccatcatcagctattcttttacctcatactcaccttatgtaacagaacttataatggaatccaatgtagagctcatagcaaaaaatgacttgcgctttatagatgctgtctataagcttcttcgtgatcaatttaattataaaccaattttgacaaaaaagcagtttatccaatgtgggtttgcagaatggaaaatccaaattgtttgtgatattttgaattgtgtgatgaaaaagcacaaggaattaagcagtcttcagaagattccatcacaacaaagaaagaaaatcagttctggtaagtcagaacctcctttgggcaatgagaaaatatctgcagaggctgttggcgttgatatcagtggcaggtttatgacctcaggaaagaagaaagctgtggtgattcgtcacttgtataatgaagataatgttgacatttctgaggatacattaagtccaataacagatgttaatgaagcagttgatgtgtctgacttaaatgctactgaaataaagatgcctgaagtaaaggttcctgaaatcaaggctgagcaacaggatgtaaatgttaatcctgagattactgcactacaaactatgcttgctgaatgccaagaaaatcttaagaaactgacttcgatagagaaaaggttagactgtttggaacaaaaaatgaaaggaaaagtgatggtagatgaaaacacctggactaatcttcttagtcgtgtcactcttcttgaaacagaaatgcttttgtctaaaaagaatgatgaatttatagagtttaatgaagttagtgaagactacgcttcttgtagtgacatggaccttctgaatcctcacagaaaaagcgaagtagagaggccagcaagtattcctctgtcctctggctatagtacagcatcatcagattcaactcccagagcctctactgttaattactgtggtttgaatgagatttcagagaattttcctgcatggagtgctacatcctcttgttccagtctcagctggctgctccgtgggcatacttcatacctttcatcacagagctttgcttggcctctctcctgtgtgtaatctctgtttcttggatcctgtgcttaccttttcctgctgtactctgatgtttcagtgaagctcatccacgaagtccagaattctgcctggaaaccagcttcctcctcagctccagctcttttaatgggcatatcaaaactgatgactttttccttcctgctacatgggtaacacttagttgtttgtctaatttctattttccagaaatttctcaaaatgtctgctgatagcccctcactcatatttttcatgtgggtttatagctttcatatttctttattattgtaaatgggggctgtggaaggtgagaaaacacatgctttcttaaaacagaagctctctccttcattaatttaaatatttttatcggctctagaaaatgcataaggttagtacaagatcagtagagagaaagtcaaagattacagaagtgctgaagcagaccattcttcctttcttcccaatgtctattaagatcacacataggtaaactgttacaaatccagaatggtgaaagagtccaacaatggctgagggaagtagaggttaagatatagctcaacagtgaaagtagcagggaaagagctgggcaaggccaagaccatcttttgtaccgttggtacagtaggctaaaggtacggtgttccatattaaatacagcaatatgaagaaaaataaattaagtcccttatacctaagacctctatttctctgttgattacatacacagtggcaatggaaagaagggaaaataatggggatagcatttgctcattctctgaccatgcaacactggcagcattctatacttattctattaactgcatcaaccacatcttataaaacacatttccataggccatatgtaataggccttggctttattcattgcatttattggctccttaaattgacaacatataattgttttcatataattttcatcaaataaaattcactttaatttgtatgaacatatttaaagtggaaagtatcttcccaaatggtccatatcttaaagtgtcagatattttatgggcttcacatctgaactgccagagatctcaggcatagcatgcattaatcacaaccacttactgacctggttcagatacttactcaatacatggggctagacacagagtgtgccttaggctaaagaaaaaattattcaagttgagcatatccataaactctggctcaagcagtgtattttgggggtaataaacacaagtttgttcctagttggagggatatgatgcttaggtttgaacctgttaaccttcctgggtttgagggctagaaaacgtggagacattcctttctaactaacacattttctaatagaaacaatccaccaggatgttgagcccacattttaagagttcttcggaatttactgaaaatggaaaactgattacattgggcacataggacatttatatttatagaaacattttagataagacaagaattttaaaagccagaaatcacttttagtgggcattttcagaaaaatgttgtcaactttttgtaatttttaataggcataaaaaagattgttatattgatattgacagaaattaggtggttaattagagagcgtaaaaggatgaattgctctaacattggtttagaatttttctttatatgattcaattttgtggtctggcaaaggcccaatagtcatttatctagtatgcatacctttccacagctggattttcaaatatgatgataaagttcatatgacagacctattctgaaaataaatatgtcagcagg

SEQ ID NO: 3014 - DNA, 2403 bp, Homo sapiens
  source 1..2403: mol_type = genomic DNA
ctgcgcaggcgccgagcggccgaggcgccgcggtcggctctgggactcgtctggcgtccctcagaggcagaagaggcctggaccttggcgcacacagacccaggaacagatgagcagggatgtctgcatccacacctggccgtgcacctactacctggagcccaagaggcgatgggttactggacagctgtccttaacatcgctgtcgctcaggttcatgactgacagcactggagagattctggtcagcttccccctctccagcatagttgagatcaagaaggaggcttcacattttatcttcagctccatcaccatcctggagaagggccatgccaagcactggttcagctccctgcggccaagtcgaaatgtggtcttcagcatcatcgagcatttctggagggagctgctgctgtctcagcctggagccgtggcagacgcatctgtcccaaggacccggggcgaggagctgacgggactcatggctggatcccagaaacgcctggaggacacggcgagggtcctgcaccaccagggccagcagctggacagcgtcatgagaggcctggacaagatggagtcagacctggaggtggcggacagattgctgacagaactggaatctcctgcttggtggccctttagctccaagctttggaagacaccaccggaaacaaagcccagggaagatgtctccatgaccagttgtgaaccctttgggaaagaagggatactgataaaaattcctgctgttatttcccacagaacagagtctcacgttaaaccagggaggctcaccgtccttgtgtctgggttggaaatacatgactccagttctttgctcatgcacaggtttgaaagagaagacgtggacgacatcaaggtccactcaccttacgaaattagcatccgccagcggtttattggaaagccagacatggcctatcgtttgatatctgccaagatgccagaggttatccccattttagaagtgcagttcagcaagaagatggagctgttagaagatgcattggtgctcagaagcgcaagaacctcttcccccgcagagaagagctgctcagtctggcatgcagcatctgggctgatgggccgtaccctgcaccgtgagccacccgcaggagaccaggagggcacagcactgcacctgcagacaagcctgccagccctttctgaggcagatacccaggaactaacccagggcttccggcctatgtcgctgtcaacccagacagtgttggtgatgctttgctccgagtctgcaggagctttgtggagacagagactttcctagcagggcagcaagcggaagcttttcttccagaacagcctttgctcagggcatgagggagccggccaggcccacagcgcccagggcatcctcctcacggatgtgttggaggaaagtggctttggtgctatcctgggggaccatggccataagctggcagtgtcagccacgcatcagttgcgtttctttgttcaggttgtgcctcttgctgcctgcctgagtcacccagggctgctccccttcctggctctgacgccctcagcgggtcccacaagccgctcaggaccacagagtctggccatgggtctggccaggcatccactgatgctctaagctgcagcttctcttaggaacacttctatcaggtctggctcgcaggcatgccccagggccagcctggattgtactgtccttcaagcactccttgctctatttctttgaagtttataaaagtttgtttcccccaaaacccaaagcacttttaatcaggtagtttctgtggaggtcgaactggctggaaggaaggctggttcctggatttctttactcatgtagcagggactcaaggaagtctgatttgcgcctcgcctctgactcagagcccatgaaggttcctgtgtgaggccactggctgcctcggagctgacagcatcctgcacaatggctagatggcttgtcaccccaggccgcagaggaacaactgtttctagggtttggccagacttcacattctccattctttccatccctgttatgtggaatgcacacgatgccatgtaattacttcagtcccttctcaaaggaaaaagaatctggacctgcactccaggacactagcagtttgaaggttcgctcaggaatgttctttgtctgcagacctagcagctgtacagatcgctcttgtgtttttgcactattaattaacttcaagtgcaattttggcaggcaggccaagggtctcaacaggctatttggaatgagttctcttttaaggccttcaacgtagtgagacattttcaaatcaaaaagtacagcaggagccagcctttattttgtctgtgtacacaataaaatattccgcttctataggc

SEQ ID NO: 3015 - DNA, 2020 bp, Homo sapiens
  source 1..2020: mol_type = genomic DNA
ctacacacgtgtgtgtgcgcgtgtgtataaaacacagtgcactaatactcagcctttaaaaaaaatgccacttgcaacaacgtagatggagctggacgatatcatgctaaaattatgcaaagtgaaacaagcacaaaaaagaacgagacacgggcgtggggcacgaggtgctcactgcgcaagcgcccactccaccgcgtggtttccagctggaggctgggagcgttcgtggcttcctcttttcttgctgacccttcggagctctgggaagtggctgcaccttggcggctccccagagcgcgcggtgctaatcgtgggtcgtcagcctgggtggctgggcccggcttagggcagggtttggcatttccaatggtagggggctcggaccgtccctccgcgggaccctcccgttgggacaaggccgatcgcctgggcggttggagccgctatcctggcgcgagacggtggacaagtcctatattcaagagaagataactttgaacagtttcgaaggatctaaaacgtatgtgtctgcagacatcaatgaggatgaagaattagtagaagagattaatagatcaaaaacgtttgctggctttgcaggtggtgggcctgcctgggcatcggcgcgttggaggagacgccctggggggccttagctgccctgaagcggtagacaggtggcaacgtgggggctcaggagttgacaaacacaagaaagcagcgccgaattgcaggtttatccgcagcttttattttgaagacagtgccacgaaacctgcaaatcctggtgtcccaaatagtcaataccaagttgaaaaccatctgggagaggaaaagcgttgtgctttagacaggccgtctgagactcgtgcagaccggcttttgagagctggacaggtggtggatagatcagactccatacacccgaggagccccgccatgcatagtgaagaagctagataacagtcgtttcacaactggccagcctctgcccacttgaccccgagagagctggccagtgctgggctgtactacacaggcactgatgaccaagtgcagtgcttctgttgtggcggaaaactgaaaaactgggaacctggtgatcgtgcctggtcagaacacaggagacattttcctaattgcttctttattttgggccacaacgttaatattcgaggtgaatctgatgttgcgagttctgataggaatttctcaaattcaacaagttctccaaggaatccatccatgacgggttatgaagcccggctcattacttttgggacatggatgtactccgttaacaaagagcagcttgcaagagctggattttatgctataggtcaagaggataaagtacagtgctttcactgtggaggagggctagccaactggaagcccaaggaagatccttgggaacagcatgctaaatggtatccaggttgcaaatatctgctagaagagaagggacatgaatatataaacaacattcatttaacccgttcacttgagggagctctggtacaaactaccaagaaaacaccatcactaactaaaagaatcagtgataccatcttccctaatcctatgctacaagaagctatacgaatgggatttgatttcaaggacgttaagaaaataatggaggaaagaattcaaacatctgggagcaactataaaacgcttgaggttcttgttgcagatctagtgagcgctcagaaagacactacagaaaatgaattgaatcagacttcattgcagagagaaatcagccctgaagagccgctaaggcgtctgcaagaggagaagctttgtaaaatctgcatggacagacatatcgctgttgtttttattccttgtggacatctggtcacttgtaaacaatgtgctgaagcagttgacagatgtcccatgtgcagcgcggttattgatttcaagcaaagagtttttatgtcttaatgtaactctacagtgggtgtgctatgttcttattaccctgattaaatgtgtgatgtgactc

SEQ ID NO: 3016 - DNA, 876 bp, Homo sapiens
  source 1..876: mol_type = genomic DNA
ggcagcgcgggcctcggggtcctggggcgagacggtgagcgtgggggctgggccggcgccaggggcgccgtttccttcccccacgcagctccgcgcgcccgggcctccacatcgtcgctaacggagcgttgcggcgccggcgacccctggcgagcccggggcgggacagtggccaggccggcctgggcccagcgcgtggcctccgccgtttcgggctgtgctgggtggaagattaggctccccgggcacgccgtccccgccgagaggcctcagcttcgtggcagcgccctcgtccttccagcccgctcgagggtggccgccagggcgcgatgaaggaatgtgagaaagtgcttagcgctccagccgctccgagggaagccaggtgggaggagatcccgaaacgctaaggttttgacagcgttacagtgaattctccggctgtagagattggaggaagtcgggagaaattcgtctctaagttgtaagcttgttctaaagacgaaggggaactccctagtgctacaggctgtttcaggaagccaattaattttgtacacataatacttaattaccttctaataattggagcagaagatgaacccaactaatcctttcagtgggcagcagcctagtgctttttcggcgtcttctagtaatgtaggaacacttccatctaagccgccatttcgatttggtcaaccttctctttttggacaaaacagtaccttatctgggaagagctcgggattttcacaggtatccagctttccagcgtcttctggagtaagtcattcctcttcagtgcaaacattagggttcacccaaacctcaagtgttggacccttttctggacttgagcacacttccacctttgtg

SEQ ID NO: 3017 - DNA, 816 bp, Homo sapiens
  source 1..816: mol_type = genomic DNA
acctactctagggagggggctgtgctggttctgcctgggcagccccacgctgaggtcgcctgcgaggccgctggccaggcctgagcctctgccaccatggccattgtgcagactctgccagtgccactggagcctgctcctgaagctgccactgccccacaagctccagtcatgggtagtgtgagcagccttatctcaggccggccctgtcccggggggccagctcctccccgccaccacggccctcctgggcccaccttcttccgccagcaggatggcctgctacggggtggctatgaggcacaggagccgctgtgcccagctgtgccccctaggaaggctgtccctgtcaccagcttcacctacatcaatgaggacttccggacagagtcaccccccagcccaagcagtgatgttgaggatgcccgagagcagcgggcacacaatgcccacctccgcggcccaccaccaaagctcatccctgtctctggaaagctggagaagaacatggagaagatcctgatccgcccaacagccttcaagccagtgctgcccaaacctcgaggggctccgtccctgcctagcttcatgggtcctcgggccaccgggctgtctgggagccagggcagcctgacgcagctgtttgggggccctgcctcctcctcctcctcttcctcctcctcttcagctgctgacaaacccctggcatttagtggctgggccagtggctgcccatcagggacgctatccgactctggccgaaactcactgtccagcctgcccacctacagcaccggaggtgccgagccaaccacc

SEQ ID NO: 3018 - DNA, 1846 bp, Homo sapiens
  source 1..1846: mol_type = genomic DNA
ggccttcctctcccgcttccgcctggcgtaggagctgaggcatggccttgttctccagctgagaggacgatcgtccttataggagaggccgagtctccgagggcaatttcagaggtctggtgcgagggaagcagagactttcaaggaacaaggaaatgcatactatgccaagaaagattacaatgaagcttataattattatacaaaagccatagatatgtgtcctaaaaatgctagctattatggtaatcgagcagccaccttgatgatgcttggaaggttccgggaagctcttggagatgcacaacagtcagtgaggttggatgacagttttgtccggggacatctacgagagggcaagtgccacctctctctggggaatgccatggcagcatgtcgcagcttccagagagccctagaactggatcataaaaatgctcaggcacaacaagagttcaagaatgctaatgcagtcatggaatatgagaaaatagcagaaacagattttgagaagcgagattttcggaaggttgttttctgcatggaccgtgccctagaatttgcccctgcctgccatcgcttcaaaatcctcaaggcagaatgtttagcaatgctgggtcgttatccagaagcacagtctgtggctagtgacattctacgaatggattccaccaatgcagatgctctgtatgtacgaggtctttgcctttattacgaagattgtattgagaaggcagttcagtttttcgtacaggctctcaggatggctcctgaccacgagaaggcctgcattgcctgcagaaatgccaaagcactcaaagcaaagaaagaagatgggaataaagcatttaaggaaggaaattacaaactagcatatgaactgtacacagaagccctggggatagaccccaacaatataaaaacaaatgctaaactctactgtaatcggggtacggttaattccaagcttaggaaactagatgatgcaatagaagactgcacaaatgcagtgaagcttgatgacacttacataaaagcctacttgagaagagctcagtgttacatggacacagaacagtatgaagaagcagtacgagactatgaaaaagtataccagacagagaaaacaaaagaacacaaacagctcctaaaaaatgcgcagctggaactgaagaagagtaagaggaaagattactacaagattctaggagtggacaagaatgcctctgaggacgagatcaagaaagcttatcggaaacgggccttgatgcaccatccagatcggcatagtggagccagtgctgaggttcagaaggaggaggagaagaagttcaaggaagttggagaggcctttactatcctctctgatcccaagaaaaagactcgctatgacagtggacaggacctagatgaggagggcatgaatatgggtgattttgatccaaacaatatcttcaaggcattctttggcggtcctggcggcttcagctttgaagcatctggtccagggaatttcttttttcaatttggctaatgaagggcaaccacccagaacccagaaaatgcagattcactcagtttaatcttgaatgtggaaacagttcacctcctcccttcatcacgtctccgtgtgcttagagcagtttcgttttctcagttggatgccctgtgtctctgtgagtggggtggagcaaagggaaccaatgccgaagaccgagggcaggggagggaggcgggggtggacagggaggcagcttgtgaatttttgttttactgtttaactttattaaaaaagaaaaaaaaaagagaataaaatgttttgacccttcctggccctttgctctgg

SEQ ID NO: 3019 - DNA, 1732 bp, Homo sapiens
  source 1..1732: mol_type = genomic DNA
cctctaggaccggaaaattctgggaaggctcgaggccgcggtccccggggtccgcatagtcccgatgaaaaacagacccgggaaagctggtgggagtcaggagccccggcgatgaggattgcgatgaaggaagcaggctcggagcgccgccagcgcatgcgtattggggatctgaggccagcgtcttgcgccgccattgcggggaggctgtcctcagagcaggtctggcgcgccggtggctggaccggccccaggagcccagtcaccgggcgtcattggctcaggctgcggggccctcggcaccttctccctcccgggtccaccgcggcggcggcggcggcggcggcggcggcggcggcggcgtcagggggcggagcctgccgaagcgccctttgtctgcggaggtcaacatacctggcctaaggaggcaggattgagtgactctcactcaccactggtgttgctctttgaaagtggcgcttggcaccagcatgaactccccatcctcagcaatcccatcaggtgttttgggtcttcaacctaaaattctatcttacaagatccttgccaggatgcagatttgaatactatagtgaagtctgtacatgaagaaatgatgcttttagggaggaaaaaaaaaggtaataacaaccttcaagagccccttcatctcaactcggcataaacaaggcaagattctgagagtggccgcccctggaagcagaaattattcttgtggctatccattggctcctgaggctctaatcagagatggggcacctttagtaccaggggagtgactgttgcccataaggtactggacatcaactttcaagagcagccccagctccttaagctgctggtcctggtgcatctgctgactttcatgtagaagatagcagagctttggcgacattacaacataagaactgcagagaggtgtaatcccagtggaagactgaatcgagagactcaaaaaggaaggaggggaacatggaggaggaagaaatgaatgatggctcacagatggtgagatctcaggaatcactgacgtttcaggatgtggccgtggacttcaccagagaggagtgggaccagctgtaccctgcccaaaagaacctctatcgagacgtgatgctggagaactacaggaatctagttgcactggggtatcagctttgtaagccagaggtaatcgcgcagttggagctagaggaagaatgggtgatagaaagagacagcctgctggatactcatccaggtgaccaaagccacgtaatgtccgtagttcgctcatccgtccatgccagatggattgtggggaaggtgattgggacaaaaatgcaaaagactgctaaagtgagagtgaccaggcttgttctggatccctatttattaaagtattttaataagcggaaaacctactttgctcacgatgcccttcagcagtgcacagttggggatattgtgcttctcagagctttacctgttccacgagcaaagcatgtgaaacatgaactggctgagatcgttttcaaagttggaaaagtcatagatccagtgacaggaaagccctgtgctggaactacctacctggagagtccgttgagttcggaaaccacccagctaagcaaaaatctggaagaactcaatatctcttcagcacagtgaagcgggagtggaagaaggatctaaagggaaaaactgacatgtttatgttatggaaaaagaa

SEQ ID NO: 3020 - DNA, 926 bp, Homo sapiens
  source 1..926: mol_type = genomic DNA
tcggcttccgaatggaagaggtctgtgagaagttaacctggtgataccgatccgaagagcctatcaagtgaagccccctgaaatacggagaataagaatcttagaggtaaatccgaggacaagcaggttgttcagcagaagtcttggagtgcattttcagtggttaaggtgaaaaaatgactactaaaaatttagaaaccaaagtcaccgttacttcatccccaatccgaggagcaggagatggaatggaaactgaggaaccacctaaatctgttgaagttacctccggagtccaatctagaaagcatcatagtcttcagagtccatggaagaaagcagttccatcagagagcccaggagttcttcagctagggaaaatgctcactgaaaaagcaatggaagttaaagctgtaagaatattagttcccaaagctgctataactcatgatatccccaacaaaaatacaaaggttaagtctctgggacatcataaaggagaattccttggtcagtcagagggagttatagaacctaataaggaactctcagaggtaaagaatgtattggaaaagctcaagaattctgaaagaaggttactacaggacaaagaaggtctttcaaaccagctccgtgtacagacagaggtaaatcgtgagttaaaaaagttactggtggcttctgttggggatgatcttcagtatcactttgaacgtctagcccgtgagaaaaatcagcttattttagaaaatgaagccctaggtcgaaacacagctcagctttctgaacagttagaacgtatgtcaatacagtgtgatgtatggcgaagtaaattccttgcaagcagggtaatggcagatgagttaaccaactcaagagcagctttacagcgtcaaaaccgtgatgcacacggggctatacaagatctc

SEQ ID NO: 3021 - DNA, 559 bp, Homo sapiens
  source 1..559: mol_type = genomic DNA
gtgtgtacgggtgtgtgtgtgtgtgtacgccgacacgtcggtgcggaccgacgcgggggtgtcaggagctgggacggccgggggcagaactgcaaggtgtggaatatttctggcttctagtccaatgccaagtgtgtgacctgtggctacatgattccctgaaagataagaacaatgttatgttggggatattggtctctgggccaacctggtatcagcaccaacctgcagggaattgtggctgagccccaggtgtgtgggttcatatctgacagaagtgtcaaggaagtggcctgtgggggaaaccactctgtgttcctgctggaagatggggaagtttacacatgtggtttgaacaccaaggggcaactgggccatgagagggaaggaaacaagccagaacaaattggagctctggcagatcagcatatcattcatgtggcatgtggcgagtcccacagtctggccctcagtgaccgaggccagctgttttcttggggtgcagggagtgatggtcagctaggactcatgactactgaggattctgtggcagtgccca

SEQ ID NO: 3022 - DNA, 1754 bp, Homo sapiens
  source 1..1754: mol_type = genomic DNA
gggaaaaccaactgtaacgtgccacccaaatgtaagttttactcatattttgatgttaggatggatagcttggaaaaagttggagggtacggcctttactatgaggcatctatgaaggatcaggaatggatgtagacaaggaactaggaatggaaagtgttaaagctggagcctctggaaaaccagaaatgaggctgggcactcaggaagaaacaagtgaaggtgatgctaatgaaagctcattactagtcctgtccagcaacgtgcctctcctggccctagagttcttggaaatagcccaggccaaagagaaggcctttctccccatggtcagccacacgttccacatgcgcacagaggagtctgatgcctcacaggagggcgatgacctacccaagtcctcagcaaacaccagccatcccaagcaggatgacagccccaagtcctcagaagaaaccatccagcccaaggagggtgacatccccaaggccccagaagaaaccatccaatccaagaaggaggacctccccaagtcctcagaaaaagccatccagcccaaagagagtaacatccccaagtcctcagcaaaacccatccagcccaagctgggcaatattcccaaggcctcagtgaagcccagccagcccaaggagggtgacatccccaaggccccagaagaaaccatccaatccaagaaggaggacctccccaagtcctcagaagaagccatccagcccaaagagggtgacatccccaagtcctcagcaaaacccatccagcccaagctgggcaatattgccaagacctcagtgaagcccagccagcccaaggagagtgatatccccaagtccccagaagaaaccatccagcccaaggagggtgacatccccaagtcctcagcaaagcccatccagcccaagctgggcaatattcccaaggcctcagtgaagcccagccagcccaaggagggtgacatctccaagtccccagaagaagccatccagcccaaggagggtgacctccccaagtccctagaggaagccatccagcccaaggagggtgacatccccaagtccctagaggaagccatccagcctaaggagggtgacatccccaagtccccagaagaaaccatccagcccaagaagggtgacatccccaagtccccagaagaagccatccagcccaaggagggtgacattcccaagtctccaaaacaagccatccagcccaaggagggtgacattcccaagtccctagaggaagccatcccacccaaggagattgacatccccaagtccccagaagaaaccatccagcccaaggaggatgacagccccaagtccctagaagaagccaccccatccaaggagggtgacatcctaaagcctgaagaagaaacaatggagttcccggagggggacaaggtgaaagtgatcctgagcaaggaggactttgaggcatcactgaaggaggccggggagaggctggtggctgtggacttctcggccacgtggtgtgggccctgcaggaccatcagaccattcttccatgccctgtctgtgaagcatgaggatgtggtgttcctggaggtggacgctgacaactgtgaggaggtggtgagagagtgcgccatcatgtgtgtcccaacctttcagttttataaaaaagaagaaaaggtggatgaactttgcggcgcccttaaggaaaaacttgaagcagtcattgcagaattaaagtaaacatgtattctg

SEQ ID NO: 3023 - DNA, 499 bp, Homo sapiens
  source 1..499: mol_type = genomic DNA
agaccgcggtgacgtctccaccgcgccaaactcactgaaaatcaaaccgctaccattaggagccctccacgcttaacatatccgttctttctcgtttgaaagtaaccaggctgctcctccccatttttcgccttcttctcgcggaggctgagagactaaccttacacaacatggcggcctggtgtgtctggtgtcctagagcggacgaaagcaggtgactctctagtcaacttccgacttggactccgaagatcggcgtctgcgctcggtttgagggctcggcgcggggtttcctgttcctccttctgcgcggctgcagctcgggacttcggcctgacccagcccccatggcttcagaagagctacagaaagatctagaagaggtaaaggtgttgctggaaaaggctactaggaaaagagtacgtgatgcccttacagctgaaaaatccaagattgagacagaaatcaagaacaagatgcaacagaaatcacagaagaa

SEQ ID NO: 3024 - DNA, 4068 bp, Homo sapiens
  source 1..4068: mol_type = genomic DNA
tcacggtggtggcgtggagacgtgggggcgcttccggcagcggcggcggtggtgaaggccgatgctgtgggggtgggcgtggagagaattcttctgtgggtcctctggtgttgagtggtcggcttggtgtggtgtgcggaggagctccaggcccgtcggcgcggaggctttcaggtataggctgggtcactagtcttaaaacatttcttcttgagaatgtctaaaagactgtggaatctgttagatcttatatacttttaagttggcacctgaaacttttcatcctagatttacatagtggtcttgctgtgttgcccagcctggtcttgaattcctggactcaagtgatgctcctgccttggcttcccaaactcctggaattacaactcaatgaatgacggtttttgttgctccacatcctcgtcagcatttggtgttgtcagtgttttggatttcggccattctgacagtggtctcacgtgtgaaacatggctacagattggctgggaagtattgtgtccatcaattgtggagatagcttgggtgtctatcagggaagagtgtcagctgtggatcaggtcagccagaccatttctctcacccggcctttccataatggagtgaagtgtcttgttccagaagtcaccttcagggcaggtgacattacggagttaaaaattctggagataccaggacctggagacaaccaacattttggagaccttcatcaaacagaattaggcccctctggtgctggctgccaagtgggcatcaatcagaatggcacaggcaagtttgtcaagaagccagcctcttccagcagtgcccctcagaatatccctaagaggacagatgtgaagagccaggatgttgccgtttccccgcagcagcaacagtgctcaaagagctatgtcgacaggcacatggaatccttgagtcagtccaaaagtttccgtcgtcggcacaactcctggtcatctagtagcaggcacccaaatcaggcaactcccaagaaaagtggtttaaagaatggccagatgaagaataaagatgacgagtgcttcggggatgatattgaggagatcccagacacagattttgattttgaagggaacctggctctttttgacaaggcagctgtgtttgaggagattgatacctatgaaaggagaagtggtacccgttcccggggcatcccaaatgaaaggcccactcggtaccgccatgatgagaacatcttggagtccgagcccattgtctatcgacggatcatagtgccccacaacgtgagcaaggagttctgcacggactctggcctggttgtcccaagtatttcctatgagctgcataaaaagctgttgtccgtggctgagaagcatgggctgacccttgagcggagactggagatgacaggtgtgtgtgccagtcagatggcactgaccctcctcggaggacctaacaggttgaatcccaaaaatgttcaccagaggcctacagtggctctactgtgtggacctcatgtgaagggggctcagggtatcagctgtggaaggcacctagccaaccatgatgtccaggtcatccttttcctgcccaattttgtcaagatgttggaatctatcaccaatgagctgtcgctcttcagcaagacccaaggccaacaagtgtctagcctcaaagatctgcccactagccctgtggacctggtcatcaactgcctggattgccctgagaacgtcttcctgcgcgatcaaccctggtacaaggcagctgtggcctgggccaaccagaaccgggcaccagtactcagcatagaccctcctgtgcatgaagtcgaacagggcattgatgccaaatggtcactggcactgggcctgcctctgccactgggggagcacgcaggccgtatctatttgtgcgacattggcattccccagcaggtcttccaggaggtgggcatcaactaccactcgccctttggctgcaagtttgttatcccactgcactctgcttagagggttcctgcgcaggcaggactctgctgtcccctgctgctcctgataacaaacgccttaaggatatgaagcttcatggaccttgttaaagttttttctcttttgggtttgtttcttctgtgagagaacagaacttacttaaaactgacctgtcacttgctcttagccagggaagtctttcccactgggttccgggctgggtggcaggctgagcgtgcagcaactccaggcatctctaccctcagccccctgcacggccaggtgggcctttgtttacagccgtaggcagctctcaagactgtgtttcaggtttacagccactgggcctgggcacacacattgaagagtgggccaggtcctgtctgggggcctgtacctgctctatttcagagcttgtggctttgtgtctcccctgctttccccacgcagacagcccttcctctgtagaaccagctgcacggcagctgtccaccagagggcagacctgcactctccattcatgtccagggctgtgacagaccaggccttcccctagccccacaagttgatttggggggttttgacccttactcctgagctgatccaagttttatgctgatttttccaaggatctctccctccttttccctccatcactcagaggtagggaagggggcggcattaggatggtgttactgtattgggattttatgttgttctgtcgtcttcagcacaggtagtataaggttatattactgtagaaccacagtgcccatcttgccagcagtgcccgcccccaccctcaaagctgagcaggttgagcctttgcctagtctggggccagacccctcagatggggatatccctgggggagcctggtgctgaaccagaagaggcttcctggtgcttctgtcctaggccaccactcctccagccctttgcccgcacatacatgccccacctactctttcatcccctctgcccttcccctgaaacggtcctttgcagctgtcatcccagagcaggcagatgggctcccgtgcttgagctccaccccagctcttacatcatctgggctttgaaccttttacatttgtccagtctagatgagtaggcttggggccagcaccctgtctcaaagatggcaaaatgaggctagttctggatgagctagctggtgtgggttccaaccataggaacacactgatgctcaaatcctaaggtgccaagctctaggccctggaggctggtagaacaggatctatgcctggaatcctggcagggattcctgtcaaggacttgtgtttaagcctgcttcagggcttcaggctgcttctgctctgtgtctgcccaggctggctgagcgggtggatgggtggacagaagggctcaccaaggattgtggacatagggtaggccctggtaccacgggtttcaggctgttatcacttcccttgtaggaacatagccagaagcagatgagccagggtagagggctggcccctcctctcatcttcccttcagtcttaaattgtctccagcgatgggaagaggccagggactgtaacccttgtgctgtgtattctctgagcctctgctcactctcagggccaagcagctcccaagccggggccctctcttggccaaaatctgaggagcagtctaggttacaggctttttggtaggtaggttctggctgcctgttaatgcagttaggccccctgattaggtacagtgagaaacaagctagaacaaccctggcccagaagactgtccactccagcaagatccagggatgatagccttgcagggccactgggagtttgtgcccaagcttctccctcttctctccccagggggcactgggactggtccctgccctcatccttagcctgggccttccccagaggtattaaagagaagtatgattcctctgtcttcagttcttttcaggggcatcctgcccatagtacccagttcccaaggggcccccagtcacgtggtgaagcctagcactcatgcagctcttagggaaccaaaaaccagcactgaaataaagctgaatgactgactg

SEQ ID NO: 3025 - DNA, 4112 bp, Homo sapiens
  source 1..4112: mol_type = genomic DNA
aaacattaaagcctaacctgaggtaatccctcaccggcagtgaagctcctctgctaggcactgtcgtcccgtacactgcccaagctctgggggtgtcacactaaactgtggtgatgtcacactagctgggatgacattttacagttggatcccgtaccaccgccaggcacctttaaatcaccgcagagtctgcagtgcggagggggcgggaagtccaggccccgcactcgatccacgctggctccctacggaggcccacctactcgaggcccaccgactcctactgcaatcagtactatgcgatcgtcctagagagtccattcagctgcacttccgcctcagtatggcatcacagctgcaagtgttttcgcccccatcagtgtcgtcgagtgccttctgcagtgcgaagaaactgaaaatagagccctctggctgggatgtttcaggacagagtagcaacgacaaatattatacccacagcaaaaccctcccagccacacaagggcaagccaactcctctcaccaggtagcaaatttcaacatccctgcttacgaccagggcctcctcctcccagctcctgcagtggagcatattgttgtaacagccgctgatagctcgggcagtgctgctacatcaaccttccaaagcagccagaccctgactcacagaagcaacgtttctttgcttgagccatatcaaaaatgtggattgaaacgaaaaagtgaggaagttgacagcaacggtagtgtgcagatcatagaagaacatccccctctcatgctgcaaaacaggactgtggtgggtgctgctgccacaaccaccactgtgaccacaaagagtagcagttccagcggagaaggggattaccagctggtccagcatgagatcctttgctctatgaccaatagctatgaagtcttggagttcctaggccgggggacatttggacaggtggctaagtgctggaagaggagcaccaaggaaattgtggctattaaaatcttgaagaaccacccctcctatgccagacaaggacagattgaagtgagcatcctttcccgcctaagcagtgaaaatgctgatgagtataattttgtccgttcatacgagtgctttcagcataagaatcacacctgccttgtttttgaaatgttggagcagaacttatatgattttctaaagcaaaacaaatttagcccactgccactcaagtacatcagaccaatcttgcagcaggtggccacagccttgatgaagctcaagagtcttggtctgatccacgctgaccttaagcctgaaaacatcatgctggttgatccagttcgccagccctaccgagtgaaggtcattgactttggttctgctagtcacgtttccaaagctgtgtgctcaacctacttacagtcacgttactacagagctcctgaaattattcttgggttaccattttgtgaagctattgatatgtggtcactgggctgtgtgatagctgagctgttcctgggatggcctctttatcctggtgcttcagaatatgatcagattcgttatatttcacaaacacaaggcttgccagctgaatatcttctcagtgccggaacaaaaacaaccaggtttttcaacagagatcctaatttggggtacccactgtggaggcttaagacacctgaagaacatgaactggagactggaataaaatcaaaagaagctcggaagtacatttttaattgcttagatgacatggctcaggtgaatatgtctacagacctggagggaacagacatgttggcagagaaggcagaccgaagagaatacattgatctgttaaagaaaatgctcacaattgatgcagataagagaattacccctctaaaaactcttaaccatcagtttgtgacaatgactcaccttttggattttccacatagcaatcatgttaagtcttgttttcagaacatggagatctgcaagcggagggttcacatgtatgatacagtgagtcagatcaagagtcccttcactacacatgttgccccaaatacaagcacaaatctaaccatgagcttcagcaatcagctcaatacagtgcacaatcaggccagtgttctagcttccagttctactgcagcagctgctactctttctctggctaattcagatgtctcactactaaactaccagtcagctttgtacccatcatctgctgcaccagttcctggagttgcccagcagggtgtttccttgcagcctggaaccacccagatttgcactcagacagatccattccaacagacatttatagtatgtccacctgcgtttcaaactggactacaagcaacaacaaagcattctggattccctgtgaggatggataatgctgtaccgattgtaccccaggcaccagctgctcagccactacagattcagtcaggagttctcacgcagggaagctgtacaccactaatggtagcaactctccaccctcaagtagccaccatcacaccgcagtatgcggtgccctttactctgagctgcgcagccggccggccggcgctggttgaacagactgccgctgtactgcaggcgtggcctggagggactcagcaaattctcctgccttcaacttggcaacagttgcctggggtagctctacacaactctgtccagcccacagcaatgattccagaggccatggggagtggacagcagctagctgactggaggaatgcccactctcatggcaaccagtacagcactatcatgcagcagccatccttgctgactaaccatgtgacattggccactgctcagcctctgaatgttggtgttgcccatgttgtcagacaacaacaatccagttccctcccttcgaagaagaataagcagtcagctccagtctcttccaagtcctctctagatgttctgccttcccaagtctattctctggttgggagcagtcccctccgcaccacatcttcttataattccttggtccctgtccaagatcagcatcagcccatcatcattccagatactcccagccctcctgtgagtgtcatcactatccgaagtgacactgatgaggaagaggacaacaaatacaagcccagtagctctggactgaagccaaggtctaatgtcatcagttatgtcactgtcaatgattctccagactctgactcttctttgagcagcccttattccactgataccctgagtgctctccgaggcaatagtggatccgttttggaggggcctggcagagttgtggcagatggcactggcacccgcactatcattgtgcctccactgaaaactcagcttggtgactgcactgtagcaacccaggcctcaggtctcctgagcaataagactaagccagtcgcttcagtgagtgggcagtcatctggatgctgtatcacccccacagggtatcgagctcaacgcggggggaccagtgcagcacaaccactcaatcttagccagaaccagcagtcatcggcggctccaacctcacaggagagaagcagcaacccagccccccgcaggcagcaggcgtttgtggcccctctctcccaagccccctacaccttccagcatggcagcccgctacactcgacagggcacccacaccttgccccggcccctgctcacctgccaagccaggctcatctgtatacgtatgctgccccgacttctgctgctgcactgggctcaaccagctccattgctcatcttttctccccacagggttcctcaaggcatgctgcagcctataccactcaccctagcactttggtgcaccaggtccctgtcagtgttgggcccagcctcctcacttctgccagcgtggcccctgctcagtaccaacaccagtttgccacccaatcctacattgggtcttcccgaggctcaacaatttacactggatacccgctgagtcctaccaagatcagccagtattcctacttatagttggtgagcatgagggaggaggaatcatggctaccttctcctggccctgcgttcttaatattgggctatggagagatcctcctttaccctcttgaaatttcttagccagcaacttgttctgcaggggcccactgaa

SEQ ID NO: 3026 - DNA, 2441 bp, Homo sapiens
  source 1..2441: mol_type = genomic DNA
accctgatcagggagtatcggctgcgggtgcgcaaggcgtccaggagtgacctggggctgtggagagcgacccgtggccttgtgtttcaggtacggaggttccggactggacgggcgtcaggaagtcacagacttgtcctctgatgtggccccgcccgccgccgcactaatctcttcggcgtcgtacccgtcggcccagctcgacccgccgcagccccggccccgaccgtggacactgggggtccccgagggcgctgcgacctcctcccgggtgaaatgaaacccgagggcagtcccccttaccgaccccattagagacgtatctgccgtgccaggggtctaggctccagaaacagggagtttaccacctaggatgacttcagtgactagatcagagatcatagatgaaaaaggaccagtgatgtctaagactcatgatcatcaattggaatcaagtctcagtcctgtggaagtgtttgctaaaacatctgcctccctggagatgaatcaaggcgtttcagaggaaagaattcaccttggctctagccctaaaaaagggggaaattgtgatctcagccaccaggaaagacttcagtcgaagtcccttcatttgtctcctcaagaacaatctgccagttatcaagacaggaggcaatcctggcggcgagcaagtatgaaagaaacgaaccggcggaagtcgctgcatcccattcaccagggcatcacagagctcagccggtctatcagtgtcgatttagcagaaagcaaacggcttggctgtctcctgctttccagtttccagttctctattcagaaacttgaacctttcctaagggacactaagggcttcagtcttgaaagttttagagccaaagcatcttctctttctgaagaattgaaacattttgcagacggactggaaactgatggaactctacaaaaatgttttgaagattcaaatggaaaagcatcagatttttctttggaagcatctgtggctgagatgaaggaatacataacaaagttttctttagaacgtcagacttgggatcagctcttgcttcactaccagcaggaggctaaagagatattgtccagaggatcaactgaggccaaaattactgaggtcaaagtggaacctatgacatatcttgggtcttctcagaatgaagttcttaatacaaaacctgactaccagaaaatattacagaaccagagcaaagtctttgactgtatggagttggtgatggatgaactgcaaggatcagtgaaacagctgcaggcctttatggatgaaagtacccagtgcttccagaaggtgtcagtacagctcggaaagagaagcatgcaacaattagatccctcaccagctcgaaaactgttgaagcttcagctacagaacccacctgccatacatggatctggatctggatcttgtcagtgactttatgagagtttctgccacaaggtgcccaagaggagaggaatgggaagagtgccccagcacgtggtgactgcgtgatttctgctcgttgcctttgaagataactggcaggactgactgtagaacactttgacttttttcaaaaagtgatggaatttgtacatccaaatgaatattgtatagacaattttcccaggaatgtgcaaaatgcttgaaagttcaaacttcttttttgaaatgatcttcagatccagtggcccattcttttatctttatcctgtgaaggtgtttttcaggttttgaaacaatccaaaaatcatttaggaccaagtctaaggaaacattttagtggccaagttggattccgattgtaaaggaatgatactaattttctagcatggctctgaaggtgattttaggtagaagagttttgaggctgggcgcaatggctcacgcctgtaatcctagcattttgggtgactgaggcgggtggattgcttgagcccagaagttgaagaccagcctgagaaataaggtgaaaccctgtctacaaaaaatacaaaaagttagctgggtgtggtggcgtgtgcctgtagtgctagctactcagaaggctgaggtgggaggattgtttgagcccaggaggttgaggctgcagtgagttctaattgcgccactgcactccagcctgagcgacagagtgagacactgtcttaaaaaaaattaaaaattgtaaaaaaatgaaaaaaaaagttttgagcattatttgcatcattgggatacatatgtcacttcacaagatgttcaatttgaaggaaataccactcattctctatgtcctgttgtctgtagtgtgcttcagtttttcatattgagttgacctaaatcctggattcatgacaagaaaggagtaagtactactattcattgttctatttgtttataatctgtattataaaattgcacataattaaaagctttcccttgtcttcatcta

SEQ ID NO: 3027 - DNA, 2767 bp, Homo sapiens
  source 1..2767: mol_type = genomic DNA
cgagcgcggcgaggggcgcatgcagggccccgacgcgccactgctcctgagcgcgagggagctggggcccgggcgccggggctcggcctcctggtaccgccaggagggcggcgcggtgtgcaactggctgcggaagccgcagccgctcgagccacgcaccagtttcccctcggcgcgccgctccgagttccgtccacccaggaggctgccatgggccggccctgcctccgcccagtccgaggagggtcacgcaggcggcagatgccaggcgggcagccccgcccctgcgcgccgcctcagcggcgccttcaagacgctggtcccaggcacccacgcccagggcgcctcggatacccaccccctcggccccccgcacaccccggtcctcgacccctctccgcaggatggtttcccggtcctctggcgaggatcctccaaggcgtctcacatgaaccggctcagaaacgccaaaatctacgtggagagagctgtcaagcagaagaagatctttacaatccaaggctgctacccggtgatccggtgtctcttgcgccggaggggctgggtggagaagaagatggtccatcgctcaggccccaccctgctgccaccccagaaggatctggatagctcagcgatgggtgacagtgacaccactgaggatgaggatgaagatgaggacgaggagttccagccatcacagctgttcgacttcgatgatttactgaaatttgatgacctagatggaacacatgctctgatggtgggtctatgtctcaatctccggaatttgccgtggtttgatgaggttgatgccaactccttcttcccacgctgctactgcctgggggctgaggatgacaaaaaagccttcatagaggacttctggctgactgctgcccgcaacgttctcaagctggtggtgaagtctgagtggaagtcataccctattcaggcagtagaggaagaggcctcaggagacaagcagcccaagaaacaggagaaaaacccagtgttggtgtccccagagtttgtggatgaagctctgtgtgcgtgcgaggagtaccttagcaacttggcccacatggacatcgacaaggacctggaggccccgctgtacctcacccccgagggctggtccctcttcctccagcgctactaccaagtggtccacgaaggggcagaactcaggcacctcgacactcaggtccagcgctgtgaggacatcctgcagcagctgcaggccgtggtaccccagatagacatggaaggggatcgcaacatctggatcgtgaagccaggagccaagtcccgcggacgaggcatcatgtgcatggaccacctggaggagatgctgaagctggtgaacggcaaccccgtggtgatgaaggacggcaagtgggtggtgcagaagtatattgagcggcccctcctcatctttggcaccaagtttgacctcagacagtggttcctggtaactgactggaacccacttaccgtgtggttctaccgcgacagctatatccgcttttccacgcagcccttctccctgaagaacctggacaactcagtgcacctgtgcaacaactccatccagaagcacctggagaactcatgccatcggcatccactgcttccgccagacaacatgtggtctagccagaggttccaggcccacctgcaggagatgggtgccccaaatgcttggtccaccatcatcgtgcctggcatgaaggatgctgtgatccacgcacttcagacctcccaggacaccgtgcagtgtcggaaggccagctttgagctctatggcgctgacttcgtgttcggggaggacttccagccctggctgattgagatcaacgccagccccacgatggcaccctccacagcagtcactgcccggctctgtgctggcgtgcaagctgacaccctgcgcgtggtcattgaccggatgctggaccgcaactgtgacacaggagcctttgagctcatctataagcagcctgctgtggaggtgcctcaatatgtgggcatccggctcctggtagagggcttcaccatcaagaagcccatggcgatgtgtcatcggcggatgggggtccgcccagcagtccctctgctgacccagcgaggctctggggaagcccgtcaccacttccccagcctccacaccaaggcccagctgccttctccccatgtactccgacaccagggccaggtcctcagacgacagcacagcaagctggtgggcactaaggccctgtcgaccacaggcaaggccttgaggactctacccacggctaaggtcttcatttccctcccaccgaaccttgatttcaaggtggcacccagcatcctgaagccaagaaaggctcctgctctcctgtgcctccgaggcccccagctggaagtgccttgttgcctctgccctttgaagtcggaacaattcctagcacctgtcggaaggtcaaggccaaaggcaaattcaaggccagactgtgacaaacccagggctgaggcctgccccatgaagaggctgagccccctgaaacccctgccccttgttggtacattccagaggcgcaggggcctgggggatatgaagctagggaagcccctgcttcgattccccactgcccttgtcctggatccaacaccaaataaaaagaaacaagtgaagtatttggggcttgactccattgctgttggagggtcaagagtggatggggcgaggccgtgtaccccagggtccacagcaagagcctga

SEQ ID NO: 3028 - DNA, 3239 bp, Homo sapiens
  source 1..3239: mol_type = genomic DNA
ctttgaactccaagctgctcaagaaaaagaaaagcttaaagttgaagatgagcctgaagtcttgacagaacctccaagtgccacaaccactactaccataggtatatctgcaacctggacaactttggcaggttctcatggtaaaagaaataataccataactacaaccagttcaaagaggaaaaacaggaaaaataaaattactccagaaaacgttcaaattatatttgatgatccactaccaatttcatacagtcagccagagaaggtgaatggagagtccaagagcagcagtaccagcgagagtggggacagtgataacatgaggatttccagctgcagcgatgaaagtagtaacagcaacagcagtcgtaagagtgacaatcattcaccagctgtggtcactaccactgtgagcagcaaaaagcagccatcagttcttgttacatttccaaaggaagagagaaaatctgtttctggcaaggcttcaataaaattgtcagaaactatcagtgaagggaccagtaattctctatctacttgtacaaaatctggtccatctcccctttcttctccaaatgggaagttaacagtagcaagtcctaagcgtgggcaaaagagggaagaaggatggaaagaagttgtaagaaggtcaaagaaagtatctgttccatcaactgtgatatccagagtgattggaagaggaggctgtaatatcaatgctattcgggagtttactggtgcacacatagatattgataaacagaaagacaagactggagaccggataatcactataaggggtggcactgaatcaacaagacaagcaactcaattgattaatgctttgatcaaggatccagacaaagaaattgatgaacttattccaaagaatcgtttgaaaagctcctcagcaaattccaaaatagggtcatcagcacctaccaccactgctgctaacacttccttaatgggaattaaaatgacaactgtagctctgtcatcaacatctcaaactgccacagcactcactgtgcctgcaatttcttctgcatccactcacaaaaccattaagaacccagtgaataatgtgaggcctggttttccagtttctcttccattagcatatcctcctccacagtttgcacatgctttgcttgctgctcagactttccagcagatccgtccaccaaggttgcccatgacccactttggaggtacttttccaccagctcaatccacttggggtccgtttcctgtcaggcctttgagccctgccagagctactaactcgcctaagcctcacatggtgcctcgccatagcaatcagaatagcagtggttctcaggtgaattcagcaggttctttaacttcaagcccaacaactacaaccagttcatcagcttcaacggtgcctggtacatctacaaatggcagtccaagttcaccttctgtccgaaggcagctttttgtcacagttgtgaagacatccaatgccaccacaacaacagtcacaaccacggcaagcaacaacaacactgcacccacaaatgccacatatcctatgcctactgccaaagaacactatccagtatcatccccatcttccccatcaccaccagcccagccaggaggggtttctagaaacagccctttggattgtggatcagcatctccaaataaagtggcatcttcctccgaacaggaagcaggtagtccaccagtagtagaaacaacaaacactagacctccaaacagcagcagttcttctgggagttcatcagctcattctaatcagcaacaacctccgggatctgtttctcaggaaccaagaccacctcttcagcagtctcaggttcctcccccggaagttagaatgactgttcctcctttagcaacaagttctgctccagtggcggtgccttctactgccccagtgacttaccctatgcctcagacaccaatgggatgcccccagcctactcctaaaatggaaacccctgctattagaccaccccctcatggcacaactgcccctcacaagaattcagcttcagtgcaaaattcatctgttgcagtcctcagtgtcaatcacattaaaagacctcacagtgttccctcttctgtccagctaccttcgaccttaagtacacaaagtgcttgtcagaattcagtacatccagcaaataagcctattgctcccaatttcagtgcccccttaccatttgggccctttagcacattgtttgaaaacagccctacttctgctcatgccttctggggaggatctgttgtttcatctcagtcaacaccagaatctatgctatcaggaaaatcctcatatttgccaaattcagatcctttacatcagtctgatacttccaaagctccaggttttagaccaccattacagagacctgctccaagtccctcaggtattgtcaatatggactcgccatatggttctgtaacaccttcttcaacacatttgggaaactttgcttcaaacatttcaggaggtcagatgtacggacctggggcaccccttggaggagcacccgcagctgctaactttaacagacaacatttttccccgcttagtttgttgactccgtgttcatcagcatcaaatgattcttctgcacagtcagtatcctcgggagttcgtgcaccatctcctgccccatcatcagtaccgttagggtcagaaaagcccagcaatgtgtctcaggacatagtggcatctggtcctttgaagggattggtggcaatcaagacaaagtagactggtgtaaccctgggatgggaaatcctatgatccacagaccgatgtctgacccaggagtattttcacaacatcaagcaatggagcgagatagtacaggaattgtaactccttctggtacattccatcagcatgttcctgcaggctacatggactttcctaaagttgggggtatgcctttttctgtgtatgggaatgcaatgattcctccagtagcacctatccctgatggtgctggaggacccatatttaatggccctcatgctgcagacccttcttggaactcactgataaagatggtttccagctccacggaaaataatggccctcaaacggtgtggactggaccctgggcacctcacatgaacagtgtgcatatgaaccagcttggctgatgaggatcagcttgttagcctgcagattccttttcatttggaggaaatcacaagtggcc

SEQ ID NO: 3029 - DNA, 7593 bp, Homo sapiens
  source 1..7593: mol_type = genomic DNA
gaggcggtggcggcggaggcggcaccgattgctgtgtcggccccagtgcggccgaagtcgcggtagagcgtagccccacgcccctcccccgtccgcgccctccctctttccctggggatggagaaggcgacggttccggtggcggcggcgacggctgcagaaggagaagggagccccccggcggtggcggctgtggcgggcccccccgcggcggcggaggtcggcggcggcgttggcggcagcagcagagctcgctcggcctcgtctcctcgtgggatggtgcgagtctgcgacctgctcctgaagaagaagccgccgcagcagcagcaccacaaggccaagcgtaaccggacttgccgaccccccagcagcagcgaaagcagcagcgacagcgacaacagcggcggcggtggaggcggcggtggaggcggaggtggcggcggcggcaccagcagtaacaacagcgaggaagaagaggacgacgacgacgaggaagaggaggtttctgaggtggagtctttcattttggatcaggatgatttggaaaatccaatgctggaaacagcttccaagttgctcttatcaggtactgctgatggtgcagacctcaggacagtagatccagaaacacaggctagactggaagctttactagaagctgcaggaataggaaaattgtccacggctgatggtaaagcctttgcagatcctgaagtacttcggaggttgacatcgtctgttagttgtgcgttggatgaagctgctgctgcacttacccgtatgagagctgaaagcacagcaaatgcagggcagtcggacaaccgcagtttggcagaagcctgttcagaaggagatgtaaatgctgtgcgaaagttactcattgaagggcgaagtgtaaatgaacacacagaggaaggggagagcctcctttgtttagcttgttctgctggatactatgagcttgcacaggttttgttggcaatgcatgcaaatgtggaagataggggaatcaaaggtgacattacacctttaatggctgctgctaatggaggacatgtcaaaattgtgaagttgctgctagctcataaagcagatgttaatgcacagtcttcaacaggcaatacagcacttacatatgcttgtgctggaggctatgtagatgttgtaaaggtgctcttggaatccggtgctagtattgaggaccataatgaaaatggtcatacccctcttatggaagctggaagtgctggacatgtggaagtagccagattgctgctagaaaatggggctggcattaatacgcattctaatgaatttaaagagagtgcccttaccttagcttgttacaaaggacacttagagatggtgcgatttcttttggaagcaggcgcggatcaagagcataaaacagatgaaatgcacactgctctgatggaggcttgcatggatggccatgttgaagtagctaggttacttcttgacagcggtgcccaagtgaacatgcctgctgattcatttgagtcaccattaactttggctgcatgtggtgggcatgtggaacttgcggctttacttattgaaagaggagctagcctggaagaggtcaatgatgaaggttatacaccattgatggaagcagctcgagaaggacatgaagaaatggtggcattacttcttggtcaaggagcaaatatcaatgcacagacagaagaaactcaagaaactgccttgactctggcttgctgtggaggctttctggaagtggcagactttctaattaaggcaggagccgatatagaactagggtgttctacccctttaatggaagctgctcaagagggtcatttggagttagttaaatacttattagctgcaggagctaacgttcatgcaacaacagcaacaggggatacagcactaacatatgcctgtgaaaatggtcatactgatgtagcagatgtcttacttcaggcaggcgcagatctggaacatgaatctgaaggtggaagaactcctttaatgaaagctgcaagagctggtcatgtttgtactgttcagttcttaattagtaaaggagcgaatgtgaatagaaccacagctaataatgaccatactgtactgtccctggcttgtgcagggggtcatctggcagtggtggaactacttttggctcatggggcagatcctactcaccgtttgaaagatggctcaactatgttgatagaagcagcaaaaggtggccatacaagtgttgtttgctatctcttggattatcctaataacttgctttcagcccctccaccagatgtcactcagttaactcccccatcccacgatttaaatagggctcctcgtgtaccagttcaagcactgcccatggttgttccacctcaggagcctgacaaaccacctgccaatgttgccaccactcttcccatcaggaataaagctgcttctaaacaaaagtccagcagccatttgccagcaaacagccaggatgtacagggttacatcaccaatcagtctccagagagcattgtagaagaggctcagggaaagttaacagaactggaacagaggataaaagaagccatagaaaagaatgcacagctgcagtccttggaactggctcatgctgaccaacttaccaaggagaagatcgaggagctcaacaaaacaagggaggaacaaattcagaagaaacaaaagattttggaggaactacagaaagtagaacgagagttacaactgaaaactcagcagcagctaaaaaagcagtatctagaggttaaagctcaaagaattcaacttcagcaacagcagcaacagtcttgccaacacctgggattactaactcctgttggagttggagagcagctttctgagggagactatgcacggttacagcaagtggatcctgttttacttaaagatgaaccccagcagactgctgctcagatgggttttgcgccaatccagcctctggcgatgcctcaagctttgcctctggcggcaggtcccttgcctccagggtccatcgcaaatcttacagaactgcaagtcctatcatctctccttcagccatgcttcctatctaccctgccattgatattgatgcacagactgagagtaatcatgacacggcccaagagcagcagtaccagcgagagtggggacagtgataacatgaggatttccagctgcagcgatgaaagtagtaacagcaacagcagtcgtaagagtgacaatcattcaccagctgtggtcactaccactgtgagcagcaaaaagcagccatcagttcttgttacatttccaaaggaagagagaaaatctgtttctggcaaggcttcaataaaattgtcagaaactatcagtgaagggaccagtaattctctatctacttgtacaaaatctggtccatctcccctttcttctccaaatgggaagttaacagtagcaagtcctaagcgtgggcaaaagagggaagaaggatggaaagaagttgtaagaaggtcaaagaaagtatctgttccatcaactgtgatatccagagtgattggaagaggaggctgtaatatcaatgctattcgggagtttactggtgcacacatagatattgataaacagaaagacaagactggagaccggataatcactataaggggtggcactgaatcaacaagacaagcaactcaattgattaatgctttgatcaaggatccagacaaagaaattgatgaacttattccaaagaatcgtttgaaaagctcctcagcaaattccaaaatagggtcatcagcacctaccaccactgctgctaacacttccttaatgggaattaaaatgacaactgtagctctgtcatcaacatctcaaactgccacagcactcactgtgcctgcaatttcttctgcatccactcacaaaaccattaagaacccagtgaataatgtgaggcctggttttccagtttctcttccattagcatatcctcctccacagtttgcacatgctttgcttgctgctcagactttccagcagatccgtccaccaaggttgcccatgacccactttggaggtacttttccaccagctcaatccacttggggtccgtttcctgtcaggcctttgagccctgccagagctactaactcgcctaagcctcacatggtgcctcgccatagcaatcagaatagcagtggttctcaggtgaattcagcaggttctttaacttcaagcccaacaactacaaccagttcatcagcttcaacggtgcctggtacatctacaaatggcagtccaagttcaccttctgtccgaaggcagctttttgtcacagttgtgaagacatccaatgccaccacaacaacagtcacaaccacggcaagcaacaacaacactgcacccacaaatgccacatatcctatgcctactgccaaagaacactatccagtatcatccccatcttccccatcaccaccagcccagccaggaggggtttctagaaacagccctttggattgtggatcagcatctccaaataaagtggcatcttcctccgaacaggaagcaggtagtccaccagtagtagaaacaacaaacactagacctccaaacagcagcagttcttctgggagttcatcagctcattctaatcagcaacaacctccgggatctgtttctcaggaaccaagaccacctcttcagcagtctcaggttcctcccccggaagttagaatgactgttcctcctttagcaacaagttctgctccagtggcggtgccttctactgccccagtgacttaccctatgcctcagacaccaatgggatgcccccagcctactcctaaaatggaaacccctgctattagaccaccccctcatggcacaactgcccctcacaagaattcagcttcagtgcaaaattcatctgttgcagtcctcagtgtcaatcacattaaaagacctcacagtgttccctcttctgtccagctaccttcgaccttaagtacacaaagtgcttgtcagaattcagtacatccagcaaataagcctattgctcccaatttcagtgcccccttaccatttgggccctttagcacattgtttgaaaacagccctacttctgctcatgccttctggggaggatctgttgtttcatctcagtcaacaccagaatctatgctatcaggaaaatcctcatatttgccaaattcagatcctttacatcagtctgatacttccaaagctccaggttttagaccaccattacagagacctgctccaagtccctcaggtattgtcaatatggactcgccatatggttctgtaacaccttcttcaacacatttgggaaactttgcttcaaacatttcaggaggtcagatgtacggacctggggcaccccttggaggagcacccgcagctgctaactttaacagacaacatttttccccgcttagtttgttgactccgtgttcatcagcatcaaatgattcttctgcacagtcagtatcctcgggagttcgtgcaccatctcctgccccatcatcagtaccgttagggtcagaaaagcccagcaatgtgtctcaggacaggaaagttccagtccctattgggactgaacgttctgcacgtatcaggcaaactggaacgtcagctccatctgttattgggagcaatttgtctacatcagtaggacatagtggcatctggtcctttgaagggattggtggcaatcaagacaaagtagactggtgtaaccctgggatgggaaatcctatgatccacagaccgatgtctgacccaggagtattttcacaacatcaagcaatggagcgagatagtacaggaattgtaactccttctggtacattccatcagcatgttcctgcaggctacatggactttcctaaagttgggggtatgcctttttctgtgtatgggaatgcaatgattcctccagtagcacctatccctgatggtgctggaggacccatatttaatggccctcatgctgcagacccttcttggaactcactgataaagatggtttccagctccacggaaaataatggccctcaaacggtgtggactggaccctgggcacctcacatgaacagtgtgcatatgaaccagcttggctgatgaggatcagcttgttagcctgcagattccttttcatttggaggaaatcacaagtggccgaaaaaaaaaattatgctcccaaatcattctactgatgtgcttgactgaagtgtgtaggctttttgcagaagatcttactaactgacctattttctgtgaacatttgtgactgcccattccccatcatcatccgttttaccttagttagcatttttcttatcatttttctttttttctttccctcttcccctttggacataactttctgttgaagctgttctttggctggttggttttagtactgtaaactgcttctgagcaaacacggaaatttagcaaaattatgtaaacttgatcctgaagttttagaatggcaaataaatgtacaattgtttacataacagaaaaggctaagcagaaagtaaatttcaatatgtcagtatagaggctctactttatgtagacttaaattaatgtgagatatgtaccttcatattcagaaatctggatgtttccttcatacattaaactattaataagcataacttttctactggtgtaatttaagtataaagtaaaataatgggcattatcattggatgtttccccacattggcttttaaaatacccatcttgctttctttttggtttatttgtagcaaggcacatatagaagaagaaatttctggcttttccatgttgttttattaccttttctcacttttaaaactaatacagacttatctcctcactcctttttctctccttacctttaccactaataccagtaaaattatctttctgatagtgaaaaggttctgtcaagattttcactgtaatggctgctacagagatggaccatcttcatcatcaccagtggtttcttctaattataaaatgtttaaactttctgagaatttaaaaagccaccactgttcccagtcagcatatacaagctcttaatattctgtttattaaataattcaatgtactattttatattggatgatattgattcttaacattggcttttcagtcatcaacagtcaacataaaaatttcaattttcagtaatttagtggaaaatatcttatttcttttttcaattttaaaggcttcctgcttttttacccttgtatattatcagtgaaaaggatcaacagttaatttgagccaagtaataaaagaaattctgcatttgtcacgaagacaatttatggtagacagataaatacacagattacagtgtaaagtctccatttaacctgtttataaaagatacaaggccacactaaactactcagtgggatttatatattccatccacttgaaacaataaacagtaatgtatccaagaagattatgtgtcctaccctgtctcatggaaaaattaattatatggttgaaatgtaaaagaaagtaagcataaaaatcgagtaatgt

SEQ ID NO: 3030 - DNA, 3546 bp, Homo sapiens
  source 1..3546: mol_type = genomic DNA
gagtgtgtgacccagcccttcccccgtggccaagcagagagagtggccttgaggaagccatagcagcaggaccagcatggcctctgctgcctctgtgaccagcctggcagatgaagtcaactgccccatctgtcagggtaccctgagggagccggtcactatcgactgcggccacaacttctgccgggcctgccttacccgctactgtgagataccaggcccagacctggaggagtcccctacttgcccactctgcaaagaacccttccgtcctgggagcttccggcccaactggcagctggctaacgtggtggagaacattgagcgcctccagctggtgtccacactgggtttgggagaggaggatgtctgccaagagcacggagagaagatctacttcttctgtgaggatgatgagatgcagttgtgcgtggtgtgccgggaggctggggagcacgctacccacaccatgcgcttcctggaggatgcagcggctccctatagggaacaaatccataagtgtcttaaatgtctaagaaaagagagagaggagattcaagaaatccagtcaagagaaaataaaaggatgcaagtcctcctgactcaggtgtccaccaagagacaacaggtgatttctgagttcgcacacctgaggaagtttctagaggaacagcagagcatcctcttagcacaattggagagccaggatggggacatcttgaggcaacgggatgaatttgatttgctggttgctggggagatctgccggtttagtgctcttattgaagaactggaggagaagaatgagaggccagcaagggagctcctgacggacatcagaagcactctaataagatgtgaaaccagaaagtgccggaaaccggtggctgtgtcgccagagctgggccagaggattcgggactttccccagcaggccctcccgctgcagagggagatgaagatgtttctggaaaaactatgctttgagttggactatgagccagctcacatttctctagaccctcagacttcccaccccaagctcctcttgtccgaggaccaccagcgagctcagttctcctacaaatggcagaactcaccagacaacccccagcgttttgaccgggccacctgtgttctggcccacactggcatcacaggggggagacacacgtgggtggtgagtatagacctggcccatgggggcagctgcaccgtgggcgtggtgagcgaggatgtgcagcggaagggggagcttcggctgcggccagaggagggggtgtgggctgtgaggctggcttggggcttcgtctcggctctgggctccttccccacacggctgaccctgaaggagcagccccggcaggtgagggtgtctcttgactatgaggtgggctgggtgaccttcaccaacgctgtcacccgagagcccatctacaccttcactgcctccttcactaggaaggtcattcccttctttgggctctggggccgagggtccagtttctccctgagctcctgagaaggagcagttacctactctcctctaagtacaggactcatatcaacccaagtaccatgtggacttgatccctggctgaatcacctggatgacttggaatagaaatgactgctttagaagatgggatggggccgggtggtaagggatagaagagaggactctcaatctactgatcaagtcctttccccaatgcccagtggatggccagggtacctggggactcaggctgctgccagttctgctcaccaccatccgtgcttggcacagaagtagctgcatagaaagggcactggatttgaagtcagaagacctgggttcttgaaccagcctgtcaaccagttgtatgactttaaacaaggcatctcacctcttttcatcttgttttcttccaataatgttagagttcatgtaatcacattctctagaaccatttagtttgtgttaactatgaaccaagcagtgtggtggccactggtgacttgaaaatatagagaaaaaaaaaacctgctctatatctgaaagagctcttgggaagacagagaaacataaagaggaaattacagcacagtgtggtgggtgttacgggaagtccaaccccagcattatgggagttcaggggaaggggcatagcccagcctggaaggagagggtgagtgggggatggctttctgaaaagggtggtctaaaggatgcctatggtcaatagggaaaagaggggaagaagcatcttaagaagaggaaacagcagagaactggctggatgacctgtgactctggagcactgggttgtctccattgtcattatgggcagatgtgtgccatccccagccgacgccactcactgcctccttcctcctggtgttgccacttctgggtgagattaaggtgcagggcctgggggcaggaggacataaggtatagccataaatcataacccagggaccacactcaaccctagggaaattgtcttcctgatcagttgattaccatctgaggtcaagaaatgagatagtgggagcaaatgggtcacaaatagctcagctgtgggctcagaaactgctaggtaaaagaattccagaaggaggccagggcataagttggatgacctatgaactttagtctaaagaattgagactaccgtaattgagactactgtagtgacatctgagaaatgggatggaatagtgaccatgttttattttcttgttcttgtcactattgtattttattttgcataatcatgcccttcactgacagtctccttaacatcatctgtttactctgctcagtgtaaactacaatgctctgtcatctccctactgggtctcctgggaggaggggagccatccagggtgcaaactcaaaggcagagggcacagcgtgcttaggcccaagcttagaattcaattgagaagttctgttgttcatccttacctcagcaggtagaaaagaggtggagatcagaagccagggattagagattgaattgctttccctgggagtgtgcagtatctcattaaaatgttgtatattcaaaaaaatacagacacacacaagtgcctatataatgataaaacatatccaaagcacccaaacctgtgattccagaaaagtagatcctatttttgtttatttttattggctttagctgtgtcttttgaaaggactattatcctctaaaatgtatgtgtatgaagatcctggcttgcagctcgggagctttacacaccttgtgtcactttatcttggtaacgagccaagatcatgcaaccagttcatccatgtctgacccaagagctcttaactgctatgctgcactgcctcattcagagatagatgcctgcatgggtcctggcgattattttaatgctggctacacccccacaggtgacttggattcagaaatacaatttatatttcttctttttaaattgttttattttatttttcttttaatagttatatgtcagtgagaacaatttatatgtcttacactgagaaataaaactgctcataagtgaaaa

SEQ ID NO: 3031 - DNA, 4726 bp, Homo sapiens
  source 1..4726: mol_type = genomic DNA
gtcacttccggtcgacggcggaaggcggaaggcggagcggtccctgcaacccggccggcgggaactgccttctagtttttagtctcagaccagaccaccgggcgcaccccgatgccgagcccgcagcttctggtgctcttcggcagccagacaggcacggctcaggatgtgtcggagagactgggtcgcgaggcccggcgccggcggcttggctgccgggtgcaggccctggactcctacccggtggtgaatctgattaacgagcccctggtgatatttgtttgtgcaactacaggccaaggagacccccctgacaacatgaagaacttctggaggtttatattccggaagaacctgccctccactgccctctgtcagatggactttgccgtcctgggcctcggggactcctcatacgccaagttcaacttcgtggccaagaagctgcaccgacggctactgcagcttgggggcagcgccctcctgcccgtgtgcctgggcgatgaccagcatgagctgggcctgccctccaagttcaccctgctgttcctccaagaggcacccagcacgggctctgaggggcagcgggtagctcaccccggctctcaggagcccccgtcagagtcgaagcccttcctagcacccatgatctccaaccagagagtcaccggcccctcccacttccaggacgttcggctgattgagtttgacatcttgggctctggcatcagctttgctgctggtgatgtggtgctgattcagccctccaactcggctgcccatgtccagcggttctgccaggtgctgggcctggaccctgaccagctcttcatgctgcagccgcgggagccagatgtctcctcccccacgaggctgccccagccctgctccatgcggcacctcgtgtcccactacctggacatcgccagcgtgcctcgccgctccttcttcgaactcctggcctgtctatccctccatgagctggagcgggagaagctgctggagttcagttctgcccaaggccaggaggagctctttgaatactgcaaccggccccgcaggaccatcctggaggtgctctgtgacttcccgcacacagctgccgccatccctcccgactacctgttggacctcatccccgttatccggccgagggccttctccatcgcctcctcgctgctgactcacccctcacggctgcagatcctcgtggctgtagtgcagttccagactcgcctcaaggagccccgccggggcctctgctcctcctggctggcatccctggaccctgggcaaggacctgtccgggtgcccctctgggtgcggcctgggagtctggccttcccagagacaccagacacacctgtgatcatggtggggcctggcactggggtagcccccttccgagcagccatccaggagcgtgtggcccagggccagactggaaacttcttgttttttggctgccgctggcgggaccaagacttctactgggaggctgagtggcaggagctggagaagcgggactgtctgaccctcatccctgccttctcccgggaacaggagcagaaagtatatgtgcagcaccggctccgggagctggggtcgcttgtgtgggaactgctggaccgccaggcaacgccaagtccatgccagcggacgtctcggaagccctgatgtccatcttccaggaggagggtggactctgcagcccggacgcagccgcgtatctagccaggctccagcagacacggcgcttccagacagagacgtgggcctgaggcccgcggctgcccgtgccccctctgacagccatcctcctgggagcccaggaaggcatccacgagggagctcctggccagcagccgtcatcctctcggaccagccagctggtcctctgggaacagccagctcccgagcacagccgcactcctgttgaccctggatcccaccctttgagcctgaccccactgcagcctctgcccagccagccctgcgctcccccaccctgacagtgagctgtgtcctcgtccccccacccccttcccagtcaaggtggtggcctgggccgctccacctcaccggtgcagtgacccaggacggcatcagcagcccagtgagcaccaggggtggcatagggcacccatgaggctgcgctgcactcctctgccctggggccacctcggctgctgcagcctgcccagcagcacattccagtcactgcccccgcactcccacagggctcaggctgggctcagaggccactgagatgccagctccttgagagcagtgggggtgtcccaggccagagcagcctcttcctctcctggtcccagaaaaacccttgcagtaaatggtggcctctgggtggttacttctagcgcaggcttccttccttcctctagctcctcccggtgccctgggtgctgggtgctggatggatgggcgtcctctagctcctcccggtgccctgggtgctgggtgctggatgggtgggcgtcctctagctcctcccggtgccctgggtgctgggtgctggatgggtgggcgccacggtgcacccttgttgggctgcctgtgcccgagtggcctctgcagctcttatgtctgcctctaatgggatgtgcgccctgactgcctcgttcttaagggcatagtgggtcggctaagatctgatcgccaggactgcgttctgggcaggtgctgggaaggcggaaccaagccgtccgtgccgctagggagccgagactgccggaaagaggagcggcaggagggggcgtggttgtgcagccccacccccgggaggggctttaggcactgggaaggaaagtcctgttggaggagttcggtggctgttcacacccgcctcgctgtcttggagtcttgatctgtcgtcggcgggtcgctggcacaggactaaacatggctgaggctgggctccagccagatctggctggggacagcaccgcgtgggcccaggatccacccagagcaggcaggccttgctggggccccagtcaagtccacttccagtgaggagagccagccgggaggtcagtgccagagctctggtggagcccagaccctgccttccctgagggccgcccctgtcgccgccctggggtccctgtcctcctatcctgactcctgccccagggccaccacccctgaactgtgccctggggcccccaccctccacctggccgactccagctctgggcctgtcagtccacctgggtcctctctgggccctgagtgcctggaccctctgtgccaagcaccagcaagcaaaggggatgaccttgggcacccccaaggtgctgagactacagccagtgagcccctgctgggggccaaagccatggagggtgcctgggcccttccaacctggaaggaggaggggagagagcaggcagcagggcagggggaagaggaggagtgcccgatctgcacagagccctacgggcccagagagcgccgcctggccctgctgaactgtagccacggcctgtgtgtgggctgcctgcacaggctgctgggctcggcctccagtgccgacctgggccgggtgcgctgcccgctgtgccgccagaagacgcccgtgctggaatgggagatctgccggctacaggaggagctgctacaggccgacgggccctcacgccagccccgccgagaggcccctgcatcctatcaccgcaaccctgggccctggggctccctggagcaccgctaccagctgcgcttcctggcagggcccgtgggcggccggggctgcctgcccttcctgccctgtccaccctgcctgggtgcccggctctggaccctgcgggagcggggaccctgtgcccgccgcctggcgctgctgagcctgctggcccttgagcttctggggctgctgctggtcttcacgccgctcctgctgctgggactgctcttcgtgctcctggaccgctctggccgctgagcagagcccaggacagccccgccgccaacaggccagggggcccagactggcccacgtccccatgcctgggtgctgtgaggcctgatgaccaggctggaaaaacccaaggttgggtccagggcaggggccttcaatcaagacctcccattgctgaacccacaaccagggctacccagaggcctgaccctgccagagtccatggctgcactgctgcccagacactagctgaacccaaggacaccagcgcccaaggacagctcctggaggaggccagcccagcaggaaagtctgtgagcaggaccccattcaccctgcggcagacgggcaccgtactggccacgggctgacgccggccacacttcccctccgagggccagctgagcacagcaggcatgaaagcaaacagagatacagcagtgagtcagttccttggagagggcagggactccgcccaccctgtgttcagataagggccagtgtgtgtccctgaaggtcaggccagccgggggaggggtccatgctgcgaaaattcagcctgcaaaggctcctctccccacttgatcaggcccagaccaggtgggggttggcgctggcctgtgttgcaggggacaagggcccacccaggccttggaacataagctctgcccctgcacaccctcatgtcaccacacctgggatggagacatcaggtggcccagcgagagatggaggactgatcctggaacgtgaagcagctttcaataaaccagctcctgggga

SEQ ID NO: 3032 - DNA, 2119 bp, Homo sapiens
  source 1..2119: mol_type = genomic DNA
ggcagccctccccagtggagccccgaggacccttttatttctgcaggttattgcttgatgacttgggaatgaattcttgggacagaaggaagaattttcatctattgaagaaaaattcaaaattattgagagagctgaaaaatttggactcccgccagtgccgtgagacacacaaaatcgcagtgttttacattgctgaaggtcaagaagacaagtgttcaatcctctctaatgaaagaggaagccaagcatatgaagactttgttgctggacttggatgggaggtggatctctccacccactgtgggttcatgggtggccttcagcgcaatggcagcaccgggcagacggccccttactatgctacctcaactgtggaagtgattttccatgtttccactcgaatgccgtcagactcagatgattccctcaccaaaaagcttcgtcacttggggaatgacgaggtccatatcgtctggtctgaacactccagagactaccgcaggggtattatcccaactgcctttggagatgtttcaatcattatttacccaatgaagaatcacatgttcttcatcgcgataacgaagaaacctgaggttccattttttgggcctctgtttgatggagccatagtgagtgggaagctgctgccaagccttgtatgtgccacgtgcatcaacgccagcagggctgtgaagtgcctcatcccactctaccagagcttgtatctttttgctttaaatgtgtaacttactaaccatcccagaatcaagattcctggcagtttttcataagaggtaagtattcaaaactgaattgaagagggaagagaatttttttcaacctctgttaaaaataacatagtggtttttcatagcatttgttaatttatattaaatataataattttatgctgcattaaacttagagtttactttcataatttactcacatacgtttgtgtctgagaagctgtgaccattatgagatgctcatatcttcttaggtattttgccccacgttcagtctcatcctgtatccctcttatttgtggcagtccattgtatataaggtgggatgctgagcaaaacgtatcgctcattcagagtgcctaccagaaaccaaagcaaatgaaatgaccctaataaatcaaagaatgtggcaggtaccacctgagaagtgcaagtaggtttctggaagatcagaggagatagaaattgcatttggttgagggtagagggaaagatgtcctgaattaagttgcatttggacttatcaataggaatagctagaaattcttttgtaattttcccaaatcattgatattttctctagttcctgattttgtttccaaaaacagaataaatttcactcctaaaattttttcctcaaacattaattggcctgctgtagtccttaaattcaagcatgatctcaagttataagaaaaagagattaagatgggtgaccttataaaattgatgcaaaaaaagtgacctcctaataaaacttagaatctctttgtttctaattggtattgataataatttgaaacatattgtgtttgacctctatatatacttctcccaacctgatagtaagtgatgtgttgctatagcaagtgagagttgggggtagatgaaaactatcccatgtgaatagatacggttcatgaaaaaatacctttcattaaaatcctggtcacttcattgactgatattctgcctttagattaaaaaaaaatacatatgccatgtggcaacttaaaattatcatagaaatgagtagtagaaaagagctattaggtcccatctggtccctcccctgggggccagggcaggattattcccttcagtgtactctctcgtgctttgtccaggctggtggtgagtgttttggagatggcattctttgcagtgatttccacaacactgtagacgtaatcttgtggctggtgtcaatttggccttcagcatggagtttttatttcacatactattaaaaagagcctcttggcagaaatgagaaagaactattcagcgattagtttgtcagtttgcatgtcaactaggacgagctgggcacgcatcagtcaagtatgttggaccaaggcagc

SEQ ID NO: 3033 - DNA, 562 bp, Homo sapiens
  source 1..562: mol_type = genomic DNA
gttgtgagctgcggcagagactggtggctggaggagacgccggcgctggagagtgcgctgcgccgcccgccgctgagggaccgcggggttagccactgctggctgcttccagtgttcgccgagaggtaccgggggtgacagctccgggaccggccgaaagccacataaagaagatccctaatagtcatttctcaacaattatatagtcaactgatgtaacaatggtactaatattgggacgcagactaaacagagaggatcttggggtgcgtgattccccagcaactaagcgaaaagtttttgaaatggaccccaaatctctgacaggtcatgagttttttgacttctcttcaggatcatcccatgccgaaaacatactccagatatttaatgaatttcgtgatagccgcttattcacagatgttatcatttgtgtggaaggaaaagaatttccttgccatagagctgtgctctcagcctgtagcagctacttcagagctatgttttgtaatgaccacagggaaagccgagaaatgttggttgagatcaatggtattttagc

SEQ ID NO: 3034 - DNA, 1958 bp, Homo sapiens
  source 1..1958: mol_type = genomic DNA
cctggagttccggccaggccactgcttgggaagcaagaaggtgaaggcacctctgctgggccaagcactcttagggccgaggggcactgcagctgacaagagctccctgtttcgctgaggcctggagcccccatggcctcactgagccgagccctacgtgtggctgctgcccaccctcgccagagccctacccggggcatggggccatgcaacctgtccagcgcagctggccccacagccgagaagagtgtgccatatcagcggaccctgaaggagggacagggcacctcggtggtggcccaaggcccaagccggcccctgcccagcacggccaacgtggtggtcattggtggaggcagcttgggctgccagaccctgtaccacctggccaagctgggcatgagtggggcggtgctgctggagcgggagcggctgacctccgggaccacctggcacacggcaggcctgctgtggcagctgcggcccagtgacgtggaggtggagcttctggcccacactcggcgggtggtgagccgggagctggaggaggagacgggactacacacgggctggatccagaatgggggcctcttcatcgcgtccaaccggcagcgcctggacgagtacaagaggctcatgtcgctgggcaaggcgtatggtgtggaatcccatgtgctgagcccggcagagaccaagactctgtacccgctgatgaatgtggacgacctctacgggaccctgtatgtgccgcacgacggtaccatggaccccgctggcacctgtaccaccctcgccagggcagcttctgcccgaggagcacaggtcattgagaactgcccagtgaccggcattcgtgtgtggacggatgattttggggtgcggcgggtcgcgggtgtggagactcagcatggttccatccagacaccctgcgtggtcaactgtgcaggagtgtgggcaagtgctgtgggccggatggctggagtcaaggtcccgctggtggccatgcaccatgcctatgtcgtcaccgagcgcatcgaggggattcagaacatgcccaatgtccgtgatcatgatgcctctgtctacctccgcctccaaggggatgccttgtctgtgggtggctatgaggccaaccccatcttttgggaggaggtgtcagacaagtttgccttcggcctctttgacctggactgggaggtgttcacccagcacattgaaggcgccatcaacagggtccccgtgctggagaagacaggaatcaagtccacggtctgcggccctgaatccttcacgcccgaccacaagcccctgatgggggaggcacctgagctccgagggttcttcctgggctgtggcttcaacagcgcaggaatgatgctgggtggtggctgtgggcaggagctggcccactggatcatccatgggcgcccggagaaggacatgcatggctatgacatcaggcgcttccatcactcgctcacggaccacccccgctggatccgagagcgaagccatgagtcctacgccaagaactactccgtcgtcttcccccacgatgagccgctggccgggcgcaacatgaggagagacccgctgcacgaggaactccttggacaaggctgcgtgttccaggagcggcatggctgggagcgaccgggatggtttcatccccgaggcccagctccggtcctcgagtacgactactacggggcttacgggagccgcgcgcacgaggactacgcctaccgcaggctgctggcagacgagtacaccttcgccttcccgccccaccacgacacgatcaagaaggagtgcctggcctgcagaggggccgccgctgtgtttgacatgtcctacttcgggaagttctacctggtggggctggatgcaaggaaggctgccgactggctcttctccgcagatgtcagccgacccccagggctccaccgtgtacacgt

SEQ ID NO: 3035 - DNA, 623 bp, Homo sapiens
  source 1..623: mol_type = genomic DNA
gagactgatttgccccatgggcctaagacataagctgaacctctggcctgcagttccagatccaaggtgactgagacaaactgccagctgccactggcttatcaggagcacctgggctatcttagtttccactgctgcagcctgtggcctggacatttgcccatggttgtgaggtccccatgcatgggacttcttcctcctgactccaggcttcagttcacccatcaggccttaaagcatcttcggccctatcttgccctgaactttttgctgcaaaaaccaagggcactgcctcaagcttatcttcccagccactgtttactgctgctacattgttgcccaagacacttcagaagtgactgttgttgtcatctcctgccaagtcctggaaggcaagccaccaagtcccatgcaccattcccacagcccgacaaccttcctgactctacccactggaatctaaagagtctgcccacttctggatgtttgttcaggagatggacaacatgtctcccaggctgagagccttcctctccgaacccattggagaaaaggatgtctgctgggtggatggcatcagccatgagctcgcgatcaatttggtcaccaaaggtatcaataag

SEQ ID NO: 3036 - DNA, 3411 bp, Homo sapiens
  source 1..3411: mol_type = genomic DNA
aatcacagggctgcggccgagagagaagccttattagagctttctcaacctgcagccctcatctccgccggcgagtagggccaggtgttgggagctcccacgtgggacaagatggtgtcttcggcgcagatgggcttcaacctgcaggctctcctggagcagctcagccaggatgagttgagcaagttcaagtatctgatcacgaccttctccctggcacacgagctccagaagatcccccacaaggagatggcgagcctccaggtctttgaaaagatgcaccgaatggatctgtctgagagagcaaaggatgaagtcagagaagcagctttgaaatcctttaataaaaggaagcctctatcattagggataacacggaaagaacgaccacctctagacgtggacgaaatgctggagcgcttcaaaacagaagcacaagcgtttacagaaacgaaaggaaatgtcatctgcctgggtaaagaagtctttaaaggaaaaaagccagacaaagacaataggtgcaggtatatattgaagacgaagttccgggagatgtggaagagctggcctggagatagcaaagaggtccaggttatggctgagagatacaagatgctgatcccattcagcaaccccagggtgcttcccgggcccttctcatacacggtggtgctgtatggtcctgcaggccttgggaaaaccacgctggcccagaaactaatgctagactgggcagaggacaacctcatccacaaattcaaatatgcgttctacctcagctgcagggagctcagccgcctgggcccgtgcagttttgcagagctggtcttcagggactggcctgaattgcaggatgacattccacacatcctagcccaagcacggaaaatcttgttcgtgattgacggctttgatgagctgggagccgcacctggggcgctgatcgaggacatctgcggggactgggagaagaagaagccggtgcccgtcctcctggggagtttgctgaacagggtgatgttacccaaggccgccctgctggtcaccacgcggcccagggccctgagggacctccggatcctggcggaggagccgatctacataagggtggagggcttcctggaggaggacaggagggcctatttcctgagacactttggagacgaggaccaagccatgcgtgcctttgagctaatgaggagcaacgcggccctgttccagctgggctcggcccccgcggtgtgctggatcgtgtgcacgactctgaagctgcagatggagaagggggaggacccggtccccacctgcctcacccgcacggggctgttcctgcgtttcctctgcagccggttcccgcagggcgcacagctgcggggcgcgctgcggacgctgagcctcctggccgcgcagggcctgtgggcgcagacgtccgtgcttcaccgagaggatctggaaaggctcggggtgcaggagtccgacctccgtctgttcctggacggagacatcctccgccaggacagagtctccaaaggctgctactccttcatccacctcagcttccagcagtttctcactgccctgttctacaccctggagaaggaggaggaagaggatagggacggccacacctgggacattggggacgtacagaagctgctttccggagtagaaagactcaggaaccccgacctgatccaagcaggctactactcctttggcctcgctaacgagaagagagccaaggagttggaggccacttttggctgccggatgtcaccggacatcaaacaggaattgctgcgatgcgacataagttgtaagggtggacattcaacggtgacagacctgcaggagctcctcggctgtctgtacgagtctcaggaggaggagctggtgaaggaggtgatggctcagttcaaagaaatatccctgcacttaaatgcagtagacgttgtgccatcttcattctgcgtcaagcactgtcgaaacctgcagaaaatgtcactgcaggtaataaaggagaatctcccggagaatgtcactgcgtctgaatcagacgccgaggttgagagatcccaggatgatcagcacatgcttcctttctggacggacctttgttccatatttggatcaaataaggatctgatgggtctagcaatcaatgatagctttctcagtgcctccctagtaaggatcctgtgtgaacaaatagcctctgacacctgtcatctccagagagtggtgttcaaaaacatttccccagctgatgctcatcggaacctctgcctagctcttcgaggtcacaagactgtaacgtatctgacccttcaaggcaatgaccaggatgatatgtttcccgcattgtgtgaggtcttgagacatccagaatgtaacctgcgatatctcgggttggtgtcttgttccgctaccactcagcagtgggctgatctctccttggcccttgaagtcaaccagtccctgacgtgcgtaaacctctccgacaatgagcttctggatgagggtgctaagttgctgtacacaactttgagacaccccaagtgctttctgcagaggttgtcgttggaaaactgtcaccttacagaagccaattgcaaggaccttgctgctgtgttggttgtcagccgggagctgacacacctgtgcttggccaagaaccccattgggaatacaggggtgaagtttctgtgtgagggcttgaggtaccccgagtgtaaactgcagaccttggtgctttggaactgcgacataactagcgatggctgctgcgatctcacaaagcttctccaagaaaaatcaagcctgttgtgtttggatctggggctgaatcacataggagttaagggaatgaagttcctgtgtgaggctttgaggaaaccactgtgcaacttgagatgtctgtggttgtggggatgttccatccctccgttcagttgtgaagacctctgctctgccctcagctgcaaccagagcctcgtcactctggacctgggtcagaatcccttggggtctagtggagtgaagatgctgtttgaaaccttgacatgttccagtggcaccctccggacactcaggttgaaaatcgatgactttaatgatgaactcaataagctgctggaagaaatagaagaaaaaaacccacaactgattattgatactgagaaacatcatccctgggcagaaaggccttcttctcatgacttcatgatctgaatccccccgagtcattcattctccatgaagtcatcgattttccaggtgttggtgaactgcctgtgactcctctcctccccggcccctacccctcagggataatgagttcattgctgggctagatgttttagccatgattctgcctctgttttatacctgcacacatccttatctttgtta

SEQ ID NO: 3037 - DNA, 3229 bp, Homo sapiens
  source 1..3229: mol_type = genomic DNA
gcgaagtgaagggtggcccaggtggggccaggctgactgaatgtatctcctagctatggactaaataatacatggggggaaataaacaagtattcatgagggtgaaaatgtgacccagcaggaaaattacaactattttcaattgacgttgaataggatgagtcatggaatttaagtgatttactgaagattatactactggtagatagaagagctaaagaaagatggatactatgatgctgaatgtgcggaatctgtttgagcagcttgtgcgccgggtggagattctcagtgaaggaaatgaagtccaatttatccagttggcgaaggactttgaggatttccgtaaaaagtggcagaggactgaccatgagctggggaaatacaaggatcttttgatgaaagcagagactgagcgaagtgctctggatgttaagctgaagcatgcacgtaatcaggtggatgtagagatcaaacggagacagagagctgaggctgactgcgaaaagctggaacgacagattcagctgattcgagagatgctcatgtgtgacacatctggcagcattcaactaagcgaggagcaaaaatcagctctggcttttctcaacagaggccaaccatccagcagcaatgctgggaacaaaagactatcaaccattgatgaatctggttccattttatcagatatcagctttgacaagactgatgaatcactggattgggactcttctttggtgaagactttcaaactgaagaagagagaaaagaggcgctctactagccgacagtttgttgatggtccccctggacctgtaaagaaaactcgttccattggctctgcagtagaccaggggaatgaatccatagttgcaaaaactacagtgactgttcccaatgatggcgggcccatcgaagctgtgtccactattgagactgtgccatattggaccaggagccgaaggaaaacaggtactttacaaccttggaacagtgactccaccctgaacagcaggcagctggagccaagaactgagacagacagtgtgggcacgccacagagtaatggagggatgcgcctgcatgactttgtttctaagacggttattaaacctgaatcctgtgttccatgtggaaagcggataaaatttggcaaattatctctgaagtgtcgagactgtcgtgtggtctctcatccagaatgtcgggaccgctgtccccttccctgcattcctaccctgataggaacacctgtcaagattggagagggaatgctggcagactttgtgtcccagacttctccaatgatcccctccattgttgtgcattgtgtaaatgagattgagcaaagaggtctgactgagacaggcctgtataggatctctggctgtgaccgcacagtaaaagagctgaaagagaaattcctcagagtgaaaactgtacccctcctcagcaaagtggatgatatccatgctatctgtagccttctaaaagactttcttcgaaacctcaaagaacctcttctgacctttcgccttaacagagcctttatggaagcagcagaaatcacagatgaagacaacagcatagctgccatgtaccaagctgttggtgaactgccccaggccaacagggacacattagctttcctcatgattcacttgcagagagtggctcagagtccacatactaaaatggatgttgccaatctggctaaagtctttggccctacaatagtggcccatgctgtgcccaatccagacccagtgacaatgttacaggacatcaagcgtcaacccaaggtggttgagcgcctgctttccttgcctctggagtattggagtcagttcatgatggtggagcaagagaacattgaccccctacatgtcattgaaaactcaaatgccttttcaacaccacagacaccagatattaaagtgagtttactgggacctgtgaccactcctgaacatcagcttctcaagactccttcatctagttccctgtcacagagagtccgttccaccctcaccaagaacactcctagatttgggagcaaaagcaagtctgccactaacctaggacgacaaggcaacttttttgcttctccaatgctcaagtgaagtcacatctgcctgttacttcccagcattgactgactataagaaaggacacatctgtactctgctctgcagcctcctgtactcattactacttttagcattctccaggcttttactcaagtttaattgtgcatgagggttttattaaaactatatatatctccccttccttctcctcaagtcacataatatcagcactttgtgctggtcattgttgggagcttttagatgagacatctttccaggggtagaagggttagtatggaattggttgtgattctttttggggaagggggttattgttcctttggcttaaagccaaatgctgctcatagaatgatctttctctagtttcatttagaactgatttccgtgagacaatgacagaaaccctacctatctgataagattagcttgtctcagggtgggaagtgggagggcagggcaaagaaaggattagaccagaggatttaggatgcctccttctaagaaccagaagttctcattccccattatgaactgagctataatatggagctttcataaaaatgggatgcattgaggacagaactagtgatgggagtatgcgtagctttgatttggatgattaggtctttaatagtgttgagtggcacaaccttgtaaatgtgaaagtacaactcgtatttatctctgatgtgctgctggctgaactttgggttcatttggggtcaaagccagtttttcttttaaaattgaattcattctgatgcttggcccccatacccccaaccttgtccagtggagcccaacttctaaaggtcaatatatcatcctttggcatcccaactaacaataaagagtaggctataagggaagattgtcaatattttgtggtaagaaaagctacagtcattttttctttgcactttggatgctgaaatttttcccatggaacatagccacatctagatagatgtgagctttttcttctgttaaaattattcttaatgtctgtaaaaacgattttcttctgtagaatgtttgacttcgtattgacccttatctgtaaaacacctatttgggataatatttggaaaaaaagtaaatagctttttcaaaatgaa

SEQ ID NO: 3038 - DNA, 554 bp, Homo sapiens
  source 1..554: mol_type = genomic DNA
attgcctctcaccccccggaggggttattttgggggtggttggaggcggtggcggcggcggcgaggaggggaatttccttgtgcctccattcccgggaggggggagcggcgttggaggccaccgtttccaggtgtgggaataagtatctttggaagaccaggcactttatgcagtattgagctcaggaggcagtgagtgttaaggaatgggtgtaaaacatcaacaacagcaacttgtgattggcggtgaccggatattcagttgcacatccccacatcaatgcactgccaatgtgggattacagctaagtattacgttttaaaggttatatcctgtgttgtgacctcatggtttaagtgggaataaagatgagtataagcagtgatgaggtcaacttcttggtatatagatacttgcaagagtcaggattttctcattcagcatttacctttggtatagaaagccatatcagtcagtccaatataaatggtgccctcgtcccacccgctgcattgatttctatcatccagaaaggtctacagtatgtagaagc

SEQ ID NO: 3039 - DNA, 666 bp, Homo sapiens
  source 1..666: mol_type = genomic DNA
gggaacggacgctcagggccccggtggcctgggtgcacgcgcccgccgtgcaagggatgctcccggccgcccccggttccgcggctccatctgggatgcggcgaggagggcagccgagctgtccgcaaacaacgggcctttagttttcaggtggcgaaactgactggtctggttagagcgcgtccaagccaagccgcagtgctgtttggatttttaaatttctccttctgagtgagaaaatagcaatcgagatggaaccatccgcacaacagctccagctggcagcatcacttcccgccaatttatccaacttctgccaaggctctgaaatgccaacaacgtcgaggcctgcacttgatgtcaagggtggcacctcacctgcgaaggaggatgccaaccaagagatgagctccgtggcctactccaaccttgcggtgaaagatcgcaaagcagtggccattctgcactaccctggggtagcctcaaatggaaccaaggccagtggggctcccactagttcctcgggatctccaataggctctcctacaaccacccctcccactaaacccccatccttcaacctgcaccccgcccctcacttgctggctagtatgcacctgcagaaacttaatagccagtatcaggggatggctgctgccactccag

SEQ ID NO: 3040 - DNA, 8036 bp, Homo sapiens
  source 1..8036: mol_type = genomic DNA
aaaagggcggtggggcggggggcggggcagggagagggagagaaatccagcagacatctagctctgcctttctttcccagccacagccagggtagggctgataaggcgctgatgcgttgatggcagccttgcagagctagacctgcacttaacttgcagctgcctcccgagcctccaagatgtccacgccctgggtgacaggcggcagggcgctgccccgtgctcccccggctctgctcgacagcagcacgcagtgagagcctcgccgccgccgaggagcaactcatgtaacggcacagccaacaagatgaacggagctttggatcactcagaccaaccagacccagatgccattaagatgtttgtcggacagatcccccggtcatggtcggaaaaggagctgaaagaactttttgagccttacggagccgtctaccagatcaacgtcctccgggaccggagtcagaaccctccgcagagtaaaggttgttgtttcgtaacattttatacaagaaaagctgcacttgaggcccagaatgcactgcacaatattaaaactttacctgggatgcatcatcccattcagatgaaacctgcagatagtgaaaagtccaacgctgtggaagacagaaaattgttcataggaatggtatcgaagaaatgtaatgagaacgacatcagggtgatgttctctccatttggccagatagaagaatgccggatcctccggggacctgatgggctgagtcgaggctgtgcgtttgtcacattttctacaagggcaatggcacagaatgcaatcaaagccatgcatcagtctcagaccatggagggctgctcttcacctatcgtggtgaagtttgctgacactcagaaggacaaagagcaaaggcgcctccagcagcagctcgctcagcagatgcagcagctcaacactgccacctgggggaacctgacagggctgggcggactgaccccacagtatctggcgctcctgcagcaggccacctcctccagcaacctgggtgcgttcagcggcattcaacaaatggcaggcatgaatgctttacagttgcagaacctggcgacgctggctgctgctgcagctgcggcccagacctcagccaccagcaccaatgcaaaccctctctctaccacgagcagcgccctgggagccctcacgagtcccgtggctgcttcaacccccaactccactgctggtgcagccatgaactccttgacctctctcgggactctgcaaggactggctggagccactgttggactgaataatattaatgcactagcagttgctcaaatgctctcaggtatggcggctctgaatggaggacttggcgccacaggcttgacgaatggcacggctggcaccatggacgccctcacccaggcctactcaggaattcaacagtacgcagccgccgcgctgcccactctgtacagccagagcctgctgcagcagcagagcgctgcaggcagccagaaggaaggtccagagggggcaaacctctttatttaccaccttccacaggaatttggagaccaggacattctgcagatgttcatgccttttggaaatgttatctctgctaaagtcttcattgacaaacagaccaatctgagcaagtgctttggttttgttagctacgacaatccagtctctgcacaagctgctatccaagctatgaatggctttcagatcggcatgaaacgcttgaaggtgcagctgaagcgttccaaaaacgacagcaaaccttactgatcctaaccccagaggctccctgctctcattttagctttcttaggacatcttcatgcccgttagttcatcgtttgcctagcatgtccctgtggcgtctcaaaaaaaagtttcatcgtcccgtcattgtttctgatgtctttctgacctcacatcatatttggttctcctactgacctttgatctagtttgacctttgaaatttgcatgtgacctcatctagctatgaattctgggaagtcaatgtgaaaaacattgctgcattcatgcaagactgaaatttattattagacaaattcattatagaaaaaacctgtggcaaaaacgtttctttcttattttttttcttttcctaaaacagacttgaaagtattatacagggattggcattcttcccggtcactggtaacaatagcaatatgtgtccagggacacagaatgttggtttctaacagactacttccaaaaacagtttgagaaaaaaactgtctgattttaagtctctagaggtctgtaatagtttttacatttttcaggcagtgtaaagttttttgataaggccattttaggtggctcactttctcattaagatatatatatagaaccactttttgtagattagtataagaaaaatatttaccctgttttggggcaaatgctacctatttgtgtcaccttttgctgaactcacagttagacaatccatggtttaatgcacatgaaattacctatattttatactgtttcaatgtacaggagaaaggttactgtaaactgtgttatgttggtgcttctgtgaattaagttgtggtttcatcatgagtcttaatgttctttgttgataagacaagtttagaattggtttacttaatacaaaaaaaaaaaaaagaatttcaaaaaaaaaagttgtttgcttaaaaaaaatttcatgtgagggaaaaaaaaaaaacctattccagaataagttttgtgttggcttgtgaagcattgatgtcattttttttaattgtggactatttagatgtgtttgtgttcagcaaaatgtgatgtttttttcttttaaagaaaaaaagtgaaaatatatagtgccaaattccaaaggtacttccttcctagagcttcagtgtgtttcttgtgagaagtaatttgataacatgggtattttattatgtgttttgtataaatccctaatatttaaaaaaaaaaacaaaacaaaaaaaggttacaaagtttgttaacttgctatcctgtggtcttgttgcctgaaattgttattgtttgttatttctctctgatgttttttgtaagacattgtataagtgcccatgtcccacttttttaaccactccgcacatcagtgctgtgaaggcaacctcaccatgtattttcttcataatctatggaaacctctaaggtgagaaagttttgaacttttaaccctttctacccagagctatctggaatgttgatgactttttatactgtcatgatttgagtttgttttggggtgtttccaatttggatttttttccctgcatctatcctctaagttgtttcggtttgactactttgttctttggttaagatccaaaagaaaacagaaaacaattccacgaggccaatctaaagggaaaaaatcctacactacttttactacttttgattatttctcatttttgggaaaagaattcctaatgtgctactagaattccttcttcagttttaacgagtaattggataaaccctgagggaaaacggaggtagattcagcacctaacaatcctgtatgcttttgagatcacgtttagtgctatgtcctagtctagaatattttcatataccttgcagtaaaacgactttgtggcaggacagtctcttgaggggttttgtttctgtttcctaaatactcctaaataatatttctaatcagccattatgctggggcatctctgatcccagtaggtacctctgaatataccaggtgtctggagttagaagcccatagccctttcccagcctttttggtttttttaattgaacacatttcatctaagtaaagctcagttctttatcacaatttactgaccaaatacctagcaccagttcctgctgccactttttaaagtgccatatgactttctacgaacaggtaccttgctgtcttgacaaatcctaatgtcacgcctacagccccaacacaagctccagtcttcctcttcggcatgccctggaagcttcttggcctcagctccccttccccgctcagcaccctgttaggatcagtgtgtgtggatgggatagccctgggatggaaaggactagcctctactgatgcaaaaaaacaaaaagcaacacaaacgtttccttcttatagcacatgcacttccttacaatgacatgatttgtattatcctcacatgtgtttactactgctggggccttccttcatcctctgagggctattttgtactttctgcagcaatcagcttaataacaacacttattgcacctgtctctctctgagaacacggtgtgtctcgacacgtaccacgtacgtggaaacacaagagcccaccacttgaatttctaagaccatttcattctgaaacttcttatcaattacctaaatctcaacgaaaaacaatttactgaagccgactcccctccccatctccctctcaacctcaacccacctgcatgcatctcccccagaggaaacactgagggtaggggacaggaggctcaggacgcgccctctgaatcgagtgtttcttcttcacaagtcaccaagagaggacatgagggggaaagtcctttttgcccttctccaaaaaataaccttccacagagacaaactgtccttctatccacttttatcttttaataaatatcaaaaggaaaaagctgcaagggtgcaaagggcctgtgccagaagaaaacacacacagggaaaccgctttttttaatcaattgtagagaatagtcatttttaatctaaattagagaattgtgatacaatggcagtcctcaaaggcgtaacgagttcatctttctttcaccataggggttatagttggcttgtgctactctggaatcattttactgtttgtttttattatcttaagtgctaattaaaaaaaaaataaaattttaaaaaaacctgtagtttcattacctttttgaataatgtcatacaaaaaatgtatttgtttttttgtgctgtgagaattgatgtttgtagattaataatcattttgtttagaattacaaaatagtttttaaatattgtctgagaaaagccaaagttaatgcaacctagtggaaactgtaagaccatttgagtattgtttgttttattgatgcatttggattttgttgtttgatggaatttgagccaaaaaaaaaatacgcaggctttcctatttctacaactgattgtacttatgcattttgtaccagtggaactttttatactggagattaaaaaaaaaatggaaatttttgtggcttgctctggtgggcccctgacaatgactgatttcaagtttgatttcgggttgattgattgattgattgatagaaagaaagttgcttttcttttgagaattaaaaactttggcttgatttcttttttccctttgcttatatctagcattagaattttgtcttaaaataacagcggtaagtttcactttttattctgtattgtgcagttacacaataaggtaattagatttagaagtactcagtcactttaagtggataaatgtattagttaaaactttagggtttgcttttttgctgtttagatcaaagttttttctgattcttctgtcctcattgtgaacataaccgtgtagttgaaacagtcaaacttatttttgtaatgtatgttattgtgtgatgcagttttttgcttctgtctccaatattaaaccattttcctaatacttgtttctctctctgcgtgttgtattgttggtagtcattatatgttggtgatacatctgcacacctcactgtttcacgtatctgtttttttctctatgttgtgtaaaaagatacagtcgattccacttaagtgaatatctgatttggggaagaggaaactgcacagcagccacctttgatttatgtacaaccgcccacttgaactcctgcttccaagatttatacacttttttcctacagttcacctcagtaactgcctttggggttggatttgccaaggtgttttacggtcttttgaccacacaggttaatttccccttctctcccctccctcatgagtctatccacgcagttcttaacatacattccaaactgctgcggggtttcctctccacacccacgaggccaaacccgcatcattacagtccaactcttcttagacactaatcactttctaaaagaagtgagttctccagggaagaaaaatcaacttagccagtgaaaagggttaaacttaagtctattatttgttgccctcaatcaaaagatatgtatagaaaagtcatttaaattatttatttctacaagctaattgaatccaggagcagctttaattattaacactaacggaagagaaaagaagtatttccaagggctcaaatggaagctgtactcagtccggtggaggcagggggaggtaaagtttctcacactcaagtcgtcttcatagtttactgtccttttccaaacaaaagctaataacgccatacgcatccacacactccctcctggatgaacctaagtctcgtccccactgtcaccccaaggccagttatcaaaaactgttccttctctgccctcaaagactgaagccgcaggccctgttctgcctctgctcaggaatctgattgctcttaaagtgctcttacaagattccgtcgatgtttgctccctctgtcttatctctccttccagtattttcagacgcacaagctctgactcaggccacccagcacctggcagccttcctctgcgtgccagtgaaatctctcccagtaggtgctcaggctcttcaccctctcgttgcagcagcccctctggcccgagattgtattttctagtctgctcaagaacagaggggcctggcgaggtggaggaagggaggctccctccccggggctggccgcctcagtgatggtgatgccaccagctccagcctgcacggatggagctcacttcctaccatcacttctgctttcagtctcctcatagccttcggcagtctcctctgaaaacacactgcctacgttagtgggaaaggatggctaagggtgtgatttctttttattagggaggtgggagggggatgttgggaggcatggggggtgattaaattatcatttccaaggtgcaagtgtttatttttcaaatctataagtacatagttccaccattttggcacaagacaaaatactcatgctaagcaaaggaagagaaagacaaagccagtttttgttgcttttctaaagcaacaaataattctccaaagaaggggatgaaaatgctagttcctttaagcacttactgactgtaaagttggtccctgcttaaattcatacccatagttttgagtcggtatgacaccactgcagtgtgagcaaggtgaatccgtgtgccatgcatggaccaccttgggataccgcagcaccatcaacatccgccttgctgatggaagccacacacgctgcccagcccacagcagtcgcacgcagccgatgggctcggactcttagctggcaggctaggacacacagtgaacattaatgtactgtgaatcgttcctgataagtgaataaaacattgtgaccaaacaatcagcttattcacttatcaggaatcgactgttctgctaatttgctgttgttgtttttcatctctgttgtagttcactatttttgctgtgttctgttttctcctctcatgcttgggcaaatcactgggaatattatcttcatgtgaccatgaaacgtttctattgagtgaaaatgatatcttaacaaaatctatgcacttgctatcaggaacacaatactggatgtgtcttatatatattgaactatatagtactcgatttcttaaataaagcttaagaaaggactctgttgtgtgtaaagttaatgtgattatttttcaaagcagtgtttctaaggggtatttttgttcttttaagtcttgagtgatacaggatatttttcattaaaattatatcactggctttatgacttaatattcaataaattgactttgg

SEQ ID NO: 3041 - DNA, 568 bp, Homo sapiens
  source 1..568: mol_type = genomic DNA
agatgccgccgaagcgtctagcgggaagggcgccggcgcggctggagggtctcagtacagggtctctgagcctgttgcccaatctggagtgcgatggtgcagtcacatctcactgcagccttgagctcctggactcaagtgattctccacctcagccttcctcatagctaggactacagctttgtaggcagccaatcccagagaagcagacgggatggctagttcagcccgggagcacctgctttttgtgaggcgtcgaaatccccagatgcggtacacattgagcccagagaacctccagagccttgccgcccagagctccatgccagagaacatgaccctgcagcgggccaacagcgacaccgacctggtgacttctgagagccgctccagcttaactgccagcatgtacgagtacacgctggggcaagcccagaacctcattatcttctgggacattaaagaggaggtggaccccagtgattggattggactttatcatatagatgagaattctccagccaacttctgggattctaagaacaggggtgtgactggaacacaaaaa

SEQ ID NO: 3042 - DNA, 3318 bp, Homo sapiens
  source 1..3318: mol_type = genomic DNA
gggagattacggggcggggacgagctgtcgcgctggttgctcgtgcaggagcgggacccggaacagaccgccgtgagagaggaggggcgccggccgggattcgcggcccggagctcgggaccggttgcttcattccagcctcgcagtcacctctgtgccctgctggttgtcttcccagcgctgctgtagttgccttccatggatctataggagagcaagtcctccaggagaagaagtcctcaccagtgaacggagacctctctgaactaaggataccatggccacgtcagccccactacggagcctggaagaggaggtgacctgctccatctgtcttgattacctgcgggaccctgtgaccattgactgtggccacgtcttctgccgcagctgcaccacagacgtccgccccatctcagggagccgccccgtctgcccactctgcaagaagccttttaagaaggagaacatccgacccgtgtggcaactggccagcctggtggagaacattgagcggctgaaggtggacaagggcaggcagccgggagaggtgacccgggagcagcaggatgcaaagttgtgcgagcgacaccgagagaagctgcactactactgtgaggacgacgggaagctgctgtgcgtgatgtgccgggagtcccgggagcacaggccccacacggccgtcctcatggagaaggccgcccagccccacagggaaaaaatcctgaaccacctgagtaccctaaggagggacagagacaaaattcagggcttccaggcaaagggagaagctgatatcctggccgcgctgaagaagctccaggaccagaggcagtacattgtggctgagtttgagcagggtcatcagttcctgagggagcgggaggaacacctgctggaacagctggcgaagctggagcaggagctcacggagggcagggagaagttcaagagccggggcgtcggggagcttgcccggctggccctggtcatctccgaactggagggcaaggcgcagcagccagctgcagagctcatgcaggacacgagagacttcctaaacaggtatccacggaagaagttctgggttgggaaacccattgctcgagtggttaaaaaaaagaccggagaattctcagataaactcctctctctgcaacgaggcctgagggaattccaggggaagctgctgagagacttggaatataagacagtgagcgtcaccctggacccacagtcggccagtgggtacctgcagctgtcagaggactggaagtgcgtgacctacaccagcctgtacaagagtgcctacctgcacccccagcagtttgactgtgagcctggggtgctgggcagcaagggcttcacctggggcaaggtctactgggaagtggaagtggagagggagggctggtctgaggatgaagaagagggggatgaggaggaagagggagaagaggaggaggaggaagaggaggccggctatggggatggatatgacgactgggaaacggacgaagatgaggaatcgttgggcgatgaagaggaagaagaggaggaggaagaggaggaagttctggaaagctgcatggtgggggtggctagagactctgtgaagaggaagggagacctctccctgcggccagaggatggcgtgtgggcgctgcgcctctcctcctccggcatctgggccaacaccagccccgaggctgagcttttcccagcactgcggccccggagagtgggcatcgccctggattatgaagggggcaccgtgactttcaccaacgcagagtcacaggaactcatctacaccttcactgccaccttcacccggcgcctggtccccttcctgtggctcaagtggccaggaacacgcctcctgctaagaccctgagccctgacatctgcccccagccccaaccctcagatgcttcacttctttggaattccaggactctcaatggggggacgggatgcctggcctaagcacctggagcaggggaccccatatccactggtagccacctccccattgctgtggccccctgaaatctcactcagtgctgttgctccatctactgccctaatggggctcttttcccacctcctgctggtttcccgagggaacttctgaccctggagtccatgagggctcctttcctttttgaccacgaccttggccccagctctgcactctctggaataagggcccgatgcagcattttcttgcccagtgtggcaagacctcagaaaaaccagtcaattacgcctaagatcattttgctgtccttaaaccccccaggttccttcttgcacaaatccactctgctgcccaccttccctggcattttaaacagacctaccccaccccaactcagagttaagcatacatggcaatgctgaaaataaacaaaatccactgaggcttcccaggccatttaaagcctggagtaccagcgcatatcatctcatggggtccagagtggagtccaggcttctctgaaaccagggctgagcatatttccatagccaaggaggtgggactccctggagctatctgtggtcttagggaaggatccagacatacacggctttggggtacaagctgtgatcactgatcaataaattatctctagattggtccttgtgaggggagttttaagaatccagaacatcttgctcttgatcagcacatccaaaaacaccaagacaaacatccagtggagcagaacctctcctgcctcgggagttctgaccaggttccccagcagggtgttaagcctctgtctctggccctaccagcatccaggttccactttcctaggagagagtggagatgggaagacagggaaaggaaggcagcaggaggccacaagcccaccaggtcttcatgtcaagagagggagtaacatgtcttctcattgcccacggacccaacctctgtccaggtgcccctcatcatcacagtttaacacaagctcccctgctccagccaaattgatctcccagtcttgtccttacccattccaagtgctctgccagcccctgttcatccaagttttaagtcctccaccctgttctaagagactgttccaacggctctgggcctcagtggtcacttgaccaccattgtctcagagctgcccactttgtgtgtgtcacatgctgcctgagtcacacgtacatcttatttctgcctctagttttgtaagctcctggagggcggataacatcttatactactcttgtattctcatggcacctagtgcagtgctgggcacagagtaggtgctcaataaagacttgttgaatgaa

SEQ ID NO: 3043 - DNA, 568 bp, Homo sapiens
  source 1..568: mol_type = genomic DNA
gatgcatttagtgttttcatagataggttgacgatgtgtcacactgtgtaagggaatcgcatggagatgggcattccgaactgttaatggggacatgggactccagttgtctctgatcacttgtgtggattttcctggcgtagaacgacagaagccgctagtaagtcgccaagacctacagcaggaattctgcaccaaagggcataaaatcttgttattttaatttgcatctgggagaatgtctgagcaaggagacctgaatcaggcaatagcagaggaaggagggactgagcaggagacggccactccagagaacggcattgttaaatcagaaagtctggatgaagaggagaaactggaactgcagaggcggctggaggctcagaatcaagaaagaagaaaatccaagtcaggagcaggaaaaggtaaactgactcgcagccttgctgtctgtgaggaatcttctgccagaccaggaggtgaaagtcttcaggatcagactctctgaaaactgcaaatggaaaggaattcaaaagaatttagattaaaagttaaataaaaagtaggc

SEQ ID NO: 3044 - DNA, 2031 bp, Homo sapiens
  source 1..2031: mol_type = genomic DNA
agccagcccaggcagggcgctgaatcggcacaaaccagtctcacttcttgtaccgcagtggggaggttggagagaattttttcccatgaaagggcatacgttgcccgtccccttccccgaagaacgcactaggaatactgttcctgcgtttgcatgagctgtggcaccagcaccgactcagccttccgggcctccctcatgcacggagcctctcactaggtctcacccgcggctgcgttggtgccgtccggcacggtcacgtgggcgagaaaatggcggcccccagaccgcactgcgggcgtcgcggcaggtgaagcggtggtggcagaggcgcctgcggttactggccgggccgacgggtcctgagtctccagagctcggttcttacatccccgcgtccccaggtttagcctgagcagggttgtggaaggccgggacccattgacagcacgatggtgacggagcaggaggtggatgccatcgggcagacgctggtggaccccaagcagcccctgcaggcccgcttccgggcgctgttcacgctgcgtgggctcggcggcccaggcgccattgcatggatcagccaggccttcgatgacgattccgccctgctcaagcacgagctggcctactgcctgggccagatgcaggatgcccgcgccatccccatgctggtggacgtgctgcaagacacccgtcaggagcccatggtgcgccatgaggcaggggaggccctgggggccatcggggacccggaagttctggagatcctgaagcagtattcctcggaccccgtcatcgaggtggccgagacctgccagctggccgtgcgcaggctggagtggctgcagcagcacggcggggagccggcggcgggaccctacctctccgtggaccctgccccgccggctgaggagcgtgacgtggggcgcctgcgggaggcgctgctggatgagtcccggccgctcttcgagcgataccgcgccatgttcgccctgcgcaacgcgggaggcgaggaggccgccctggcgctggccgagggtctgcactgtgggagcgccctcttccgccacgaggtcggctacgtcctgggacagctgcagcacgaggcggcggtgccccagctggcggccgccctggcccgatgcaccgagaaccccatggtgcggcacgagtgcgcggaggccctgggcgccattgcccggcccgcctgcctggccgcgctgcaggctcacgcggacgacccagagcgcgtggtgcgtgagagctgcgaggtggctctggacatgtatgagcacgagaccgggcgggccttccagtacgcggacggcctggagcagctgcgcggggccccctcctagggccccaccctcacccggagctcccggaggactcttgagggccgctcctcccccgcagagctttggcgtctaaaccgggtgtgtgtaaatcggtgtcatcgcttgtgtcttgctgggcgcatggttgctgtccccctcctccgtctgggaccgaggagctgccgttgtgctgtgactccctgagtcccctgactgctcctcggggcctggcgcagggctgtagcgtggaagtttccaggcttggggtgggactctgcgggaggctctgggatgcccggctcaggacaggggaggattgcgagggaagccaggggaggatcgcgagggaagccaggggaggatcgcgagggaagccaggggaggatcgcgagggaagccaggggaggatcgcgagggaagccaagggaggatcgcgaggggagccaggggaggatcgcgagggaagccaggggcagagctggggctctgggaagaggctgacgttatggtggcttcagcttcactaggaatgggacacagggtctgggggcctctgactcccccaccccgaggcctgggtagggacagggtggtggtccctgagtgggtcaggtagggcacaggggccagggagggacaagcagacctcagagcgctgcccagatggaatattaaattatttttgccaagc

SEQ ID NO: 3045 - DNA, 3104 bp, Homo sapiens
  source 1..3104: mol_type = genomic DNA
tccgacattggagatttctaatccctttcctttatcatgtgtctgtattgtgtaccctccttcatttccgaaattcaaacaaacaaaaaaagccagcgtctaaaaggccagatggccgatagcggacccctcctcctgcccccaatttcaagcttaaagtagccagcgtggattctgatttcaaaatagaagatgagttgtcacactccctggaccatttcttcagcacaacacagttttagggggagcctcaggatatacgtgcacatgtccttgggccaggatgtccgtactaagccctggggatctaaaaccaaagcgaggctccccacacagaggcagccttgaccgcacagatgcctccaccgatctggccatgaggtcctggccctcggagctgggctcccggacttgctcaacttcagccaccactacagccccttccaactccacccccatcgcccggcacccaggccgcaccaaaggctataactcagatgacaacctctgtgagccatccctggagtttgaggtccccaaccacaggcagtacgtgtcgcggccaagtagcttagagagcagtagaaacacatccagcaacagctcacctcttaacctaaaaggctcctccgagcagctccatggccggtctgagagcttcagcagcgaagacctgatccccagcagggacctggccactttgccccgggaagccagcacaccgggacgcaacgccctcggccgccacgagtaccccttgcctcggaacgggcctctcccacaggagggtgcccagaagaggggcacagcccctccctacgtcggagtgcggccctgctcggcctcccccagcagtgagatggtcaccttggaggagttcctggaggagagcaaccgcagctcccccacccatgacactcccagttgccgggatgacctgctgagtgactacttccgaaaggccagcgatcccccagccatcggaggccaaccaggaccacctgccaagaaagaaggggccaagatgcccaccaactttgtggcccccaccgtcaaaatggccgcccccacctcggaggggaggccgctgaagcccgggcagtacgtaaagccaaacttcagactgactgaggccgaggccccacccagcgtggccccgagacaggcccagcctccccagagcctgtctctgggcagaccccggcaggctcctgaggccttagggggcagagagacaggcagccacaccctgcaaagccccgcaccccccagctcccatagcctggcccgggagcggaccccacttgtgggaaaggctggcagctcctgtcagggcccaggtccccgcagccggccgctggacacgaggcgcttctccctggctcccccaaaggaggagaggctggcccccctgcatcagtctgccacagcccccgccattgccactgcaggtgctggtgctgctgctgctggcagtggcagcaactcccagctcctgcacttctcacctgctgcagccccggctgccaggaccaagcccaaggcgcccccacgctcaggggaggtggccaccatcacccctgtccgggcagggctcagcctctcagagggagacggggtcccggggcagggctgcagtgaggggcttccggccaagagcccaggtcggtctcccgatttggctccccacctcggccgggccctggaggactgcagtcgagggagcgtctcaaagagcagtccggcctccccggagcccggcggggatccgcagaccgtgtggtatgagtacggctgtgtgtgactgtctcgtggttgagctcgcaaacctgaaaactactgacgcgccttccgactctcacggccttttctcttgcttgcctgcggtgccaggagagggtttggaatgaggaaaggggttcccacgcatttctgctgtttgttctgtgaatggaaacactgtgccaagccccaagaggattacgcttccaggtgtgtaacgtgttttctgtgtctgccgcttccagcagctgatatctttggaacaaataatccacgtcagcatggggaccaattaggatgcaatgacaaactgacttcccccaaagcagacactactccagtatgtcccagtagaacactcatttgcaatgtgttgagctccgttaagcacacacacactcacacaacaggcttacgaggctcaggcctggcgggtcagaaagcccactccctctcccaaggccactggatcccaggagaagcccagactggcgatactacaaaggtctccagggcctggcagaccccagagtcaggcctgctgttaaaaagtgagagtgctgctgttccattcctggggtcccaagcacttccctttaccccaggacccagggcagcctgcagggcagctggcggtggccttggccatttgcccccagcctccagctggctcctgagctctgcaccagggggtttggggaccacacaggcacctgccttcctagatttccctggctcacttttctgcaaacactggatctgccaggcctggggattggggggcaggaaagaggcccccatccagccccctccaggccagtgtgcacagtgcaccgaggggtcatccgcacagagcgaggtgcaagctcgatgtgtaacctggctgcggcacccgacatccccggtctcggggtgttgatttatttctgaataactttttgggtatagaaaccaattttttttaatatatgacatgtatatgtacacactcatgtgaaatatgtatactttggggggatctatttatgttccagtgggagtcactctcttctgtcgggaatcttatctgctgctttgtgtctttggtcagattcctgacaatttagtttcctgttgtaaaggtgcttttcctggggtgaactaaacctattgattttttttttttaagatttttttttccttttgatttaatatactgagaaagaaatgggagacttttgaatgttaacaagatccattttaggagtgtttggggttgtgtattaaatagccattcattctggaactcaaggacaggactgtaataaaatggaatggaaccg

SEQ ID NO: 3046 - DNA, 1135 bp, Homo sapiens
  source 1..1135: mol_type = genomic DNA
gcactaggctgaccgcaaccggctgaccacacacagtcctcactcccctggccctggtgggcggcaggcaccatggcgcagacagtgccgccctgcgagctgccctgcaaagagtacgacgtggcccgtaacacgggcgcctacacgtcctccggcctggccaccgccagcttccgcacctccaagtacctgctggaggagtggttccagaactgctatgctcgctaccaccaggccttcgccgaccgcgaccagtcggagcggcagcggcacgagagccagcagctggccacagagacccaggcgctggcgcagcgcacgcagcaagactccacgcgcacagtgggcgagcgactgcaggacacgcacagctggaagtcggagctgcagcgtgagatggaggcgctggctgcggagaccaacttgctcctggcccagaagcaacggctggagcgcgccctggacgccacagaggtgcccttctccatcaccactgacaacctgcagtgccgtgagcgccgcgagcaccccaacctcgtgcgcgaccatgtggaaacggagctgctgaaggcccttccccctgcactctctcagtgcctcaagaactcctgcagctcccgcaaactctctgcccgcaacaagggcacctgccaactgatggagacactgacagtgcacggagaggcaaacccagggatagaggggcgcaggacccgggccctggcacacaaggaagtacccagtggttgaggcaaagaccccaatcacagagaaaaggcttgttcctacacacagcaaattaaactggccaggcaataagaagaaacacagggtccttctcctgttcttggtgtgaagatggcctttcccagcacagagccctgaggggcagcctgggcgggcatctgggcccccagagtttgggtcctcaggggctgtccagaggccaagggcaggccaacgttcccaggtgcactgagtgagcagcagcgatgactcctgaagcctggggcgtgggaactgccgctgagggaccttcccagcagcccacagaaggccctggaggaaaacaccccacttacaacgcaccaaggagaatgcccaaaagcccaagataaacccagtgagagagcag

SEQ ID NO: 3047 - DNA, 526 bp, Homo sapiens
  source 1..526: mol_type = genomic DNA
aaacacagtgctcacctaccgagcgcagccaggagcgcagcgccagacaattacaggagctgttttggatatggccgggcagcccagcgatgctcagcgaatcccacaactacaaccacaaccgtaccacacatttagcctgcaaaagcagagaaaggaaaagaaaaccgtgcagggaagccggaaacgagggacttaagggtctcctctctaggggaaaatggcgaacgactcccctgcaaaaagtctggtggacatcgacctctcctccctgcgggatcctgctgggatttttgagctggtggaagtggttggaaatggcacctatggacaagtctataagggtcgacatgttaaaacgggtcagttggcagccatcaaagttatggatgtcactgaggatgaagaggaagaaatcaaactggagataaatatgctaaagaaatactctcatcacagaaacattgcaacatattatggtgctttcatcaaaaagagccctccaggacatgatgaccaactctgg

SEQ ID NO: 3048 - DNA, 582 bp, Homo sapiens
  source 1..582: mol_type = genomic DNA
aacagaccgccgtgagagaggaggggtgccggccgggattcgcggcccggagctcgggaccggagtcaggaatggagagaagggtaatggttttacctcttattgtggaaacctgttgagatcacagagaatatactgacggcataaaagggcagaaccatagcagggtgcgaagtcctcaccagtgaacggagacctctctgaactaaggataccatggccacgtcagccccactacggagcctggaagaggaggtgacctgctccatctgtcttgattacctgcgggaccctgtgaccattgactgtggccacgtcttctgccgcagctgcaccacagacgtccgccccatctcagggagccgccccgtctgcccactctgcaagaagccttttaagaaggagaacatccgacccgtgtggcaactggccagcctggtggagaacattgagcggctgaaggtggacaagggcaggcagccgggagaggtgacccgggagcagcaggatgcaaagttgtgcgagcgacaccgagagaagctgcactactactgtgaggacgacgggaagctgctgtgcgtg

SEQ ID NO: 3049 - DNA, 1946 bp, Homo sapiens
  source 1..1946: mol_type = genomic DNA
atcgcggacgcagcctcgtgccgggagtcgccgcattgtggtccgcttctctgcactatgtcgggtggcctcctgaaggcgctgcgcagcgactcctacgtggagctgagccagtaccgggaccagcacttccggggtgacaatgaagaacaagaaaaattactgaagaaaagctatgcggaaaacgccatgcggtacataaatgggacgcgtctggatgaccgaatcattcgcacagactgggacgcaggctttaaggagggcaggcaatacggccgtgggcgatctgggggccaggttcgggatgagtatcggcaggactacgatgctgggagaggaggctatggaaaactggcacagaaccagtgagtggtgagagctctgtcagtgacaaacactcctttggcctgttgaatttgctgaagaacatcacctaaagtctgcacacgagcccatttttaccaagatttgatcagtgtctttactgagctggaagcctctgaaagttattaaaggacagaatccaaaagaatgcctttaattcttgtctgagaatcttggccatgtgtcagattatcagaacaattttgttaccaggtcagaaattgtgttctttgacaacagattggatctgtaatgttgattagtctttagccataaccactacacttttagaaagacagaaaaatgtaagaatttgtttttaccataatgagtcttaagtaggttcatgatctacattggggcctgggattatttttttaattttaagtttgcatgagatagcctaataaatggaggtggggccaggcatggtggctcacacgtgtaatcccaacactttgggaggctgaggaggaaggatagcttgaggccaggagtttgagactagactgggcaacatagcaagaccccgtctctacaaagcacaacgaaaaacaacaaatggagttgtgctatgttgtattgctttgcacaaaattaggaacaggtgtttgacaattgaatttgttttctgtgaattctaacctctaaaggcatgcttagaggtcaaggaccttcctgtgtagttggtgcaaaagcaatctccacaggacagcactgcttccatgcttcatacatcaggaaatgaggccagaacttgagtatttactaacacgtttttcaaaagatgtcagtgttatacctaaagctaaaaaaaagcaagggtttgtcatagagggaacctctaaataatttcaggggtaggggagatgttgtcaataggaaatgggataaaatatcaagagacaatgaaaacactgccttgacatgaggaccagcaagtttattcttttcattttcagtgatgttgggaatggactgggttttaaaagggagcttgaagagggaatgtttgacagtcacagaaggttcctgcagcagatgcctcttttagccatttctcatttttttcctcaaattttacctactgaggctcaagccttcacagtgagctgatggtctctacagggaggggagtctagggaatttatttggtatttgtaaggcaagaggtgatttctctctaatatatctgagttattgctcatttaaaactgttaagtccagtataattttccctgatatgaaaaaatgtgcatttttttcacttagcaacaaagtaccttctaatttccaatagtccgtgaaagttggggctgaagtacctaagtgtgaatgtctctcccgttaaactgagtgtagaaatctgaatttttaaaagagctgtaactagttgtaagtgcttaggaagaaactttgcaaacatttaatgaggatacactgttcatttttaaaattccttcacactgtaatttaatgtgttttatattcttttgtagtaaaacaacataactcagatttctacaggagacagtggttttattcggattgtcttctgtaat

SEQ ID NO: 3050 - DNA, 1162 bp, Homo sapiens
  source 1..1162: mol_type = genomic DNA
tgcccctctaccatgtggcccttcccgagccgctctctcttcccacccccgactcaggcctggctccagacggtctcctcagaccctgaggcccagggctggggggcctggaacgagaccaaggagattctggggccagagggtggggaagggaaggaggagaaagaggaggaagaggatgcagaggaagaccaggatggggatgcaggctttctgctgtctctgctggagcaagagaacctggctgagtgcccattgcctgaccaggagctggaggccatcaagatgaaggtgtgtgccatggagcaggccgaggggacgccacggcctccaggagtgcagcaacaggccgaggaagaggagggcaccgcggccgggcagctgctgagccctgagaccgtgggctgccccctctctgggacccccgaggagaaggtggaggctgaccacagatccgtctacgtgggcaacttatgcctacatagagtttgccaccaagggctccgtgcaggccgccgtggagctggaccagagcctcttccggggccgggtcatcaaggtgctgccgaaaagaaccaacttccctgggatcagctccacagaccgcgggggccttcgaggacacccaggctccaggggggcacccttcccccacagcggcctccagggcaggccccggctcagaccacaagggcagaaccgggcccgtggaaaattctcaccatggttttcaccgtattaaagggaagacccgattttgagagaggggctggggcctggatcaggagtaaaccacttgtgctccatcctggggctggggcagggagtggcgcgggggcgaggccagaggagaggggtgtccagagcagccactggccccctcttggcggggggatggcccagtagggccttgtatggtggtccagacccaaggccacagccacgagtcacagccacggcccggtggtgagcctggcatgggccccacggggatctgcggggctctgggtgttgagggaggggaggagcagagtcccaggcagtgccaggccagcttggggttggcatgctcagctcttcaactaagtcattttaagaaaaatagaaacgtgtgtcttaatggtgaagcataaattattaaacttgggctctttttaaaagc

SEQ ID NO: 3051 - DNA, 1561 bp, Homo sapiens
  source 1..1561: mol_type = genomic DNA
cttcgatgatttactgaaatttgatgacctagatggaacacatgctctgatgtcccgcatggtccagaatgagatcccctacttcatctggaccactcggcgggatgtgctcgactgtcgcttcctctccaaggatcagatgataaaccactacgcccgggctggctcctttaccacaaaggtgggtctatgtctcaatctccggaatttgccgtggtttgatgaggttgatgccaactccttcttcccacgctgctactgcctgggggctgaggatgacaaaaaagccttcatagaggacttctggctgactgctgcccgcaacgttctcaagctggtggtgaagtctgagtggaagtcataccctattcaggcagtagaggaagaggcctcaggagacaagcagcccaagaaacaggagaaaaacccagtgttggtgtccccagagtttgtggatgaagctctgtgtgcgtgcgaggagtaccttagcaacttggcccacatggacatcgacaaggacctggaggccccgctgtacctcacccccgagggctggtccctcttcctccagcgctactaccaagtggtccacgaaggggcagaactcaggcacctcgacactcaggtccagcgctgtgaggacatcctgcagcagctgcaggccgtggtaccccagatagacatggaaggggatcgcaacatctggatcgtgaagccaggagccaagtcccgcggacgaggcatcatgtgcatggaccacctggaggagatgctgaagctggtgaacggcaaccccgtggtgatgaaggacggcaagtgggtggtgcagaagtatattgagcggcccctcctcatctttggcaccaagtttgacctcagacagtggttcctggtaactgactggaacccacttaccgtgtggttctaccgcgacagctatatccgcttttccacgcagcccttctccctgaagaacctggacaactcagtgcacctgtgcaacaactccatccagaagcacctggagaactcatgccatcggcatccactgcttccgccagacaacatgtggtctagccagaggttccaggcccacctgcaggagatgggtgccccaaatgcttggtccaccatcatcgtgcctggcatgaaggatgctgtgatccacgcacttcagacctcccaggacaccgtgcagtgtcggaaggccagctttgagctctatggcgctgacttcgtgttcggggaggacttccagccctggctgattgagatcaacgccagccccacgatggcaccctccacagcagtcactgcccggctctgtgctggcgtgcaagctgacaccctgcgcgtggtcattgaccggatgctggaccgcaactgtgacacaggagcctttgagctcatctataagcagcccgtcaccacttccccagcctccacaccaaggcccagctgccttctccccatgtactccgacaccagggccaggtcctcagacgacagcacagcaagctggtgggcactaaggccctgtcgaccacaggcaaggccttga

SEQ ID NO: 3052 - DNA, 441 bp, Homo sapiens
  source 1..441: mol_type = genomic DNA
tgcaagagggtgacagcaacacactcaaggcgcttctcctgggaatggagcaggagaagagatggggagcatcgcatagatggaactagacctttttcttgggttggatgatgtgttcccgcgtctactacatggattattgcatcgagcttttagtgtcttcttattcaacaccgaaaataagcttctgctacagcaaagatcagatgctaagattacctttccaggttgttttacgaatacgtgttgtagtcatccattaagcaatccagccgagcttgaggaaagtgacgcccttggagtgaggcgagcagcacagagacggctgaaagctgagctaggaattcccttggaagaggtaaccagctctcctacacaaccatacaagctgaaacctaaacatactataaaaaggtttttaataaaatttttaaattcaaa

SEQ ID NO: 3053 - DNA, 567 bp, Homo sapiens
  source 1..567: mol_type = genomic DNA
gttttggggtcgcagcggggtggcagcttgttttgccttcacgggagtagaaggaggcggcgtccggccgcggccgacggtagttcgcttccccgagagtgcgcggaggcccgggtgcgaggagggcctgtttctcttcagccctggttcattcacctcgcggaccgagggccccgccgtcaggagccggcgaccgtgccctgtgatggtcattgtcctccagagcagtgatggaggaaataccagcccaggaagcagcagggtcaccaagggtccagtttcagtctttggagacccagtctgagtgtctgtccccagagcctcagtttgtgcaggacaccgacatggaacagggactcactgggggatttccaatttccaagcctgatgggatctcccagctggaacaggatctacaggtctttgatctggaaactaagactagagaagtcttaagagatgactgctcagatggagagaccagagaagagaacaagctgttgattcctaagcagaaaatttcggaagaagtgcattcatacaaagtgagagtaggaagactcaaac

SEQ ID NO: 3054 - DNA, 2363 bp, Homo sapiens
  source 1..2363: mol_type = genomic DNA
gatttaaaaccagctcaggagacgccaaggaaagatgggacctcccggcccaggagtattgacatttcagctactatccccaagtttacaaacacgcagattacggaacattactccacctgtatcaaactgtccactgaaaataaaatcactaccaagaatgcttttggtttgcacttgattgattttatgtcagagattcttaaacagaaagacaccgaaccaaccaactttaaagtggctgcgggtactctggatgccagcaccaagatctatgctgtgcgcgtggatgccgtccatgccgatgtatacagagtccttggggggctgggcaaagatgcaccgtctttggaagaagtagaaggccatgttgctgatggaagtgctactgaaatgggaacaaccaaaaaggctgtaaagccaaagaagaagcacttacacagaactattgagcagaacataaacaacctcaatgtctccgaagcagatcggaagtgtgagattgatcccatgtttcagaagacagcagcctcatttgatgagtgcagcacagcaggggtgtttctgtccactctccactgccaggactacagaagtgaactgctgtttccctctgatgtccagactctctccacgggagaacctctcgagttgccagagttaggttgtgtagaaatgacagatttaaaagcgcccttgcagcagtgtgcagaagatcgccagatctgcccttccctggccgggttccagtttacacagtgggacagtgaaacacataatgagtctgtgtcggccctggtagacaagtttaagaagaatgaccaggtatttgacatcaatgctgaagttgacgagagtgactgtggagacttccccgatgggtccctgggggatgactttgatgccaacgatgaacctgaccacaccgcagttggggatcatgaagagttcaggagctggaaggagccctgccaggttcagagctgccaggaagaaatgatttcccttggggatggagacatcaggaccatgtgcccccttctgtctatgaaacctggagaatattcttatttcagtcctcggaccatgtcgatgtgggctggcccggatcactggcgctttaggcctcgacgcaaacaagatgctccttcccaatcagaaaacaaaaagaagagtacaaaaaaagattttgaaattgactttgaagatgatattgactttgatgtatattttagaaaaacaaaggctgctactattctgaccaagtccactttggagaaccagaattggagagctaccacccttcctacagatttcaactacaatgttgacactctggtccagcttcacctcaaaccaggcaccaggttacttaagatggcccagggccatagggtagagactgagcattatgaagaaattgaagactatgattacaacaaccctaacgacacctccaacttttgccctggattacaggctgctgacagtgatgatgaagatttggatgacttatttgtgggacctgttgggaactctgacctctcaccttatccttgccatccacctaagacagcacaacagaatggtgacactccagaagcccaaggattagacatcacaacatatggggagtcaaacttggtagctgagcctcagaaggtaaataaaattgaaattcactatgccaagactgccaaaaagatggacatgaagaaactgaagcagagcatgtggagtctgctgacagcgctctccggaaaggaggcagatgcagaggcaaaccacagggaagctggaaaagaagcggccctggcagaagtggctgacgagaagatgcttagcgggctcacgaaggacctgcagaggagcctgccccctgtcatggctcagaacctctccatacctctggcttttgcctgtctcctacatttagccaatgaaaagaatctaaaactggaaggaacagaggacctctctgatgttcttgtgaggcaaggagattgagttcactatggagaagtcagcagcaggaggcccatcccttactcagttgccgggacatccccagtctcgggggaagaagatgccatgggcttatacccaggctgtagccaactaccaacgtgcctgtttgtttgttgctctttccttctctccatcatagtctgggtgccagcgccctgaagctccgtgctcaactgattaaactttactgccctatggtgaccatctaggagaggggagggcagagggggtgagggtactattctggattgagaaaacctatatccattctttatatcaatgtatagttttagtctcctaaattgatctgttattttccaaactattctcttgta

SEQ ID NO: 3055 - DNA, 3498 bp, Homo sapiens
  source 1..3498: mol_type = genomic DNA
aactcggtgaaaggaattggcgccgttcgacaccaggcggatccgctctgcagcacgaacccatctccagccgcagccgcagccgccgcccgggccgaggagcagccgcagcagccgccaccagtggccgagtgagcggagccgagtttgaggcagcgcctagcggtgaatcggggccctcaccatgagttcctcgcctgttaatgtaaaaaagctgaaggtgtcggagctgaaagaggagctcaagaagcgacgcctttctgacaagggtctcaaggccgagctcatggagcgactccaggctgcgctggacgacgaggaggccgggggccgccccgccatggagcccgggaacggcgacgatcagggtttccaggaaggggaagatgagctcggggacgaagaggaaggcgcgggcgacgagaacgggcacggggagcagcagcctcaaccgccggcgacgcagcagcaacagccccaacagcagcgcggggccgccaaggaggccgcggggaagagcagcggccccacctcgctgttcgcggtgacggtggcgccgcccggggcgaggcagggccagcagcaggcgggaggtaagaagaaggcggaaggcggcggaggcggcggtcgccccggggctccggcggcgggggacggcaaaacagaacagaaaggcggagataaaaagaggggtgttaaaagaccacgagaagatcatggccgtggatattttgagtacattgaagagaacaagtatagcagagccaaatctcctcagccacctgttgaagaagaagatgaacacttcgatgacacagtggtttgtcttgatacttataattgtgatctacattttaaaatatcaagagatcgtctcagtgcttcttcccttacaatggagagttttgcttttctttgggctggaggaagagcatcctatggtgtgtcaaaaggcaaagtgtgttttgagatgaaggttacagagaagatcccagtaaggcatttatatacaaaagatattgacatacatgaagttcgtattggctggtcactaactacaagtggaatgttacttggtgaagaagaattttcttatgggtattctctaaaaggaataaaaacatgcaactgtgagactgaagattatggagaaaagtttgatgaaaatgatgtgattacatgttttgctaactttgaaagtgatgaagtagaactctcgtatgctaagaatggacaagatcttggcgttgccttcaaaatcagtaaggaagttcttgctggacggccactgttcccgcatgttctctgccacaactgtgcagttgaatttaattttggtcagaaggaaaagccatattttccaatacctgaagagtatactttcatccagaacgtccccttagaggatcgagttagaggaccaaaggggcctgaagagaagaaagattgtgaagttgtgatgatgattggcttgccaggagctggaaaaactacctgggttactaaacatgcagcagaaaatccagggaaatataacattcttggcacaaatactattatggataagatgatggtggcaggttttaagaagcaaatggcagatactggaaaactgaacacactgttgcagagagccccccagtgtcttgggaaatttattgagattgctgcccgaaagaagcgaaattttattctggatcagacaaatgtgtctgctgctgcccagaggagaaaaatgtgcctgtttgcaggcttccagcgaaaagctgttgtagtttgcccaaaagatgaagactataagcaaagaacacagaagaaagcagaagtagaggggaaagacctaccagaacatgcggtcctcaaaatgaaaggaaactttaccctcccagaggtagctgagtgctttgatgaaataacctatgttgaacttcagaaggaagaagcccaaaaactcttggagcaatataaggaagaaagcaaaaaggctcttccaccagaaaagaaacagaacactggctcaaagaaaagcaataaaaataagagtggcaagaaccagtttaacagaggtggtggccatagaggacgtggaggattcaatatgcgtggtggaaatttcagaggaggagcccctgggaatcgtggcggatataataggaggggcaacatgccacagagaggtggtggcggtggaggaagtggtggaatcggctatccataccctcgtgcccctgtttttcctggccgtggtagttactcaaacagagggaactacaacagaggtggaatgcccaacagagggaactacaaccagaacttcagaggacgaggaaacaatcgtggctacaaaaatcaatctcagggctacaaccagtggcagcagggtcaattctggggtcagaagccatggagtcagcattatcaccaaggatattattgaatacccaaataaaacgaactgatacatatttctccaaaaccttcacaagaagtcgactgttttctttagtaggctaactttttaaacattccacaagaggaagtgcctgcgggttccttttttagaagctttgtgggttgattttttttcttttcttttttgtacatttttaattgcagtttaaaagtgaatcgtaagagaacctcagcattgtgcacgataagagaatgtgtcagtatttcagggttctacattttatctgtaaaatgtgacttttttttttttttatcacaacagaagtaaaatgttgctttgtacctggtgtcttttattaagaatttactccccccatttctcacagagaataacagtcgggagtcattgtcacaatataatagaaatgttagcaaccagattcatgtaaggactaagtggtcctcatgaattgcattaagactctgtactgctcatattacactccatcctctctgtagtttgctgggtagtggagggggtaagctaaatcatagtttctgacaataactgggaaggttttttcttaaaataacaatggaattggtataattgggattgaaaactaaaacttggaactaagatagagaagatggagtgtatgtagaagggctgttaaaaatgtaaaacttggttgcattatttgtggaggctcaaacttgtgaaggttaataccataatttttccatttgttctgcattttgattctgaaaagaaagctggctttgcccatttcttattaaaaaaacttgttgtaaatccagttgtctaatgggatctatatgaagttagccatgtctgtatgcccttctcccacaaaatactgtataactagtgtgcttgtagtagttaactccaccatctttgtaagctaatgaaattgtgagtcacccatttatatcttaatttttaatcatgtcagttcttgaatgggtatctccttagcctgctgatttctttttctttctaaagaaagtgggtggagaaattaatttagacgtttgtttgcaataaaaagaattcatttt

SEQ ID NO: 3056 - DNA, 1012 bp, Homo sapiens
  source 1..1012: mol_type = genomic DNA
gggggtcggggccgcagaagtgccagacggggccggaaagcagccgagcggagttcaaatttgagagcgtttggaaattggaagacttggtggcgaacgagggtcaggacctgcatcctgcctcagagttatcgacgtatccggaatgtgggatcagaggctggtgaagttggccctgttgcagcatctgcgggccttctatggtattaaggtgaagggtgtccgtgggcagtgcgatcgcaggagacatgaaacagcagccacggaaatagggggtaaaatatttggagtaccttttaatgcactgccccattctgctgtaccagaatatggacacattccaagctttcttgtcgatgcttgcacatctttagaagaacatattcataccgaagggctttttcggaaatcaggatctgtgattcgcctaaaagcactaaagaataaagtggatcatggtgaaggttgcctatcttctgcacctccttgtgatattgcgggacttcttaagcagttttttagggaactgccagagcccattctcccagctgatttgcatgaagcacttttgaaagctcaacagttaggcacagaggaaaagaataaagctatactgttgctctcctgtcttctggctgaccacacagttcatgtattaagatacttctttaactttctcaggaatgtttctcttagatccagtgagaataagatggatagcagcaatcttgcagtaatatttgcaccaaatcttcttcagacaagtgaaggacatgaaaagatgtcttctaacgcagaaaagaagggcgtgtaccagactttatcctggaaaagataccagccatgttgggtattgatggtctctgtgctactccatcactggaaggctttgaagaaggtgaatatgaaactcctggtgaatataagagaaagagaagacaacgtgtaggagattttgttagtggagcactaaataaatttaaacctaacagaacaccttctattacacctc

SEQ ID NO: 3057 - DNA, 918 bp, Homo sapiens
  source 1..918: mol_type = genomic DNA
tcatgagagtggaggctgcggccggggctatgggcagaggtggccgggtctgcttcttccctgtcactgccgcagcagcttggggtgcaaggcggcctggggcggcggaaggggcgccccccgagttccgtctgaggaagcggcggctgccgaggaagtccacgagagccgggtcccgcacgcccctggggtccgggtgctgaggcgccgcctggccgcctccccgggccgcggcaccgctccgacccagccgccctctccaccggggccgcggcagcgccagtcggggcccttccctctaagcagcccaaacgtgcagaatgccccacaagattggatttgtagtcgtcagctcatctggacacgaagacggcttcagtgcccgggagctcatgatccacgcgccaactgtcagtgggtggcggtcacctagctacgtgtctctctgtgataatgaaaagacaggttgcaaagcccgggaactaaaatcagtttatgtggatgcagtaggacaatttcttaaactgatttttcaccaaaaccatgtcaacaaatacaacatatataatcaggttgctttggttgccataaatatcattggagaccctgcagatttcagtgatgaaagcaatactgcctctcgagagaagttgattgaccactaccttgggcacaacagcgaggaccctgctctagaaggaacgtacgccaggaaatctgactatatctctccgctagatgacttagcttttgatatgtaccaagatccagaagttgcacagatcatacgaaaattagatgaaagaaaacgggaagctgtccaaaaggaacgctatgattatgccaagaaactaaaacaagccattgctgatttgcaaaaggttggtgaacgccttgggaggtatgaggtagagaaac

SEQ ID NO: 3058 - DNA, 832 bp, Homo sapiens
  source 1..832: mol_type = genomic DNA
caacagggaccgaccaaatcgtcatgcagctgtttggatgctttaaaaaaataaatccccacactcattacgcgttttatgctgctgacttttttatttttaagacatctgctcccgaaagctcagagccctttagcatttcattttctaaacgaatcctaatctttcctgtgactgaatcggttcagaggatatcttttcaataaggaaggaagccctcccctgctcactggggacgtcgcagggtttttaaacctaaagatttactcttttgtgcacagacgctggaagcatttggactcacttttccccttcgtctttctctccctttctgtctttctgtgtctcctccaagaatgaaatatgactgaggactctcagagaaactttcgttcagtatattatgagaaagtggggtttcgtggagttgaagaaaagaaatcattagaaattctcctaaaagatgaccgtctggatactgagaaactttgtacttttagtcagaggttccctctcccgtccatgtaccgtgcattggtatggaaggtgcttctaggaatcttgcctccacaccacgagtcccatgccaaggtgatgatgtatcgtaaggagcagtacttggatgtccttcatgccctgaaagtcgttcgctttgttagtgatgccacacctcaggctgaagtctatctccgcatgtatcagctggagtctgggaagttacctcgaagtccctcttttccactggagccagatgatgaagtgtttcttgccatagctaaagccatggaggaaatggtggaagatagtgtcgactgttactggatcacccgac

SEQ ID NO: 3059 - DNA, 3605 bp, Homo sapiens
  source 1..3605: mol_type = genomic DNA
gagccccagagcgcggcggcagcggcggcctggcccttccagagggccagagccagggacatgcgggcgcccgggactccgcgttccgcgcggcccggcgcctgagcgcctccgttccccgtcccggagctgccggcggcatgatccgacacgccggggcgcccgcgcgcggggaccccacgggtccggttccagttgttggcaaaggagaggaagaggaagaggaagatggcatgcggctttgtctgccagccaacccgaaaaactgccttcctcaccgccggggcatcagcatcctggagaagctcatcaaaacatgcccggtgtggctgcagctgagtctgggccaggcagaggtggccaggatcctgcaccgggtggtggctgggatgttcctggttcgccgggacagcagctcgaagcagctggtgctctgtgtccactttccttctctgaacgaaagctcggccgaggtgctcgaatacaccattaaggaagaaaagtcgatattgtacctggaaggctcggctcttgtgtttgaggacatcttcagattgattgcgttctactgtgtcagtagagacttactgcccttcacactgcggctaccccaggccatccttgaggccagcagcttcacggaccttgagaccatcgccaacctgggtctgggtttctgggactcctcgctgaatcctccacaagaaagagggaagccagcagagcccccaagagaccgggcccccggattccccctagtctccagcctcaggcccacagcccatgacgcaaactgtgcctgtgaaatcgagctgtcggtaggaaatgaccgcctgtggtttgtgaatcctattttcatcgaggactgcagcagcgccctgcccaccgaccagccacctcttggaaattgccctgcacgccctttgccgcccacctctgatgccacctcacccacctccaggtgggccccacgccgcccaccaccccctcccccagtgctgcccctgcagccctgcagcccagcccagcccccgccactgcctgcgaagaagaaccttcccactgcccctcccagacgccgcgtttccgagagggtgtccttagaagaccaaagtccggggatggcggcagagggggaccagctcagcctgcctccccaagggacctcagacggccctgaggacacgccccgggagagcacggagcaaggccaggacacagaggtgaaagccagcgatcctcacagcatgccagagctgcccaggacagccaaacaacccccagtcccgccccccaggaaaaaacggatctctcgacaactggcctcgaccctcccagctcccttagagaacgctgagctctgcacacaggcgatggccttggagacacccacgccgggtccacccagagagggccaaagccctgcttctcaggctgggactcagcaccctcctgcccaggccactgcccattcccagagctctccagagttcaagggctccctggcctccctctcagacagcttgggggtgtctgtcatggccaccgaccaggactcctactccaccagcagcacggaggaggagctggagcagttcagcagccccagcgtgaagaagaagccctccatgatcctgggcaaggctcggcaccggctgagctttgccagtttcagcagcatgttccacgctttcctctccaacaaccgcaagctgtacaagaaggtggtggagctggcgcaggacaagggctcgtactttggcagcctggtgcaggactacaaggtgtacagcctggagatgatggcgcgccagacctccagcacggagatgctgcaggagattcgcaccatgatgacccagctcaagagctacctgctgcagagcaccgagctcaaggccctggtggaccccgccctgcactccgaggaggagctcgaagcaattgtagagtctgccttgtacaaatgtgtcctgaagcccctgaaggaagccatcaactcatgcctgcatcagatccacagcaaggatggttcgctgcagcagctcaaggagaaccagttagtgatcctggccaccaccaccactgacctaggtgtgaccaccagcgtgccggaggtgcccatgatggagaagatcctgcagaagttcaccagcatgcacaaggcctactcacctgagaagaagatctccatcctgctcaagacctgcaaactcatctacgactccatggccctcggcaacccagggaagccctatggggcggatgacttcctgcctgtgctcatgtatgtgctggcccgcagcaacctcacggagatgcttctcaatgtggagtacatgatggagctcatggaccccgccctgcagctgggggagggttcctactatctgaccaccacctacggggccctggagcacatcaagagctacgacaagatcacggtgacccggcagctgagtgtggaggtgcaggactccatccaccgctgggagcgccggcgtactctcaacaaggcccgggcctcccgctcctccgtacaggacttcatctgcgtgtcgtacctggagcccgagcagcaggcgcggacgctggcgtcgcgggcggacacccaggcccaggcgctgtgcgcgcagtgcgcggagaagttcgcggtggagcggccgcaggcgcaccggctgttcgtgctggtggacgggcgctgcttccagctggcggacgacgcgctgccgcactgcatcaagggctacctgctgcgcagcgagcccaagcgcgacttccactttgtctaccggcccctggacggtggtggcggcggcggcggcgggagcccgccctgcctggtggtgcgggagcccaacttcctgtgaggccctcccggggcgcctcccctcacccccaggcgcacgtctggccccgcctctggctgcgcactcccgaccgcgacgtccacgcagcagagggacatgggccattccatgacgtgcccaggccaacgtcgcaggacagttgtgaaaataacatgacgctcgtccaaggccacttcctgagggcaagtcctaatagccctgagacaccgagacggcatgttcttcattagacggaaagggaaactgaggctcaggagagaggcgctccaggccgctgcagccaacaaaccggcgccctcttcacacgtagctcctcaggccattccccatgagtcccccacacccaccccatcctcggtctttgcaaagaagggcccgagcttagtttccccaggactggcctaggaaggagcaccggccacagctgctccccgtgccactcagggtggacccagcatctcaggagcacctcagggtgtcggttaagagacaggcctccacccctgcaccagagcctgctcttagctcccggtgcccccagaccccgcagctctgtgcccggcaagaagcagctagacacacgccagggcgccaagcacggccagctccgcggacccatggacaagcccagccccgcctcagggaaaacagggcctttccctacaggacacgccccagagctgtggcagattgcaggagccatcgtgtggggagaatttaataaaagcccttttg

SEQ ID NO: 3060 - DNA, 2229 bp, Homo sapiens
  source 1..2229: mol_type = genomic DNA
tgaaacaaaggaccaatgcccagggcggtccttaattcctccctgcagtttgaaactgtcaggttgccgtctaggtagcggttgtgcttgctgaggctgcacttgctgacactgcagctgcgacgcggctaagaggcgcagagcgaggagtcgggatttggtcgcgagcggcgacgagcatttgtgcagaatgtcatcagatgaggagaaatactcacttccagttgtgcaaaatgactccagtcgaggcagttctgtctcttcgaatcttcaggaagaatatgaagaactgcttcattatgctatagtgactccaaatattgaaccctgtgcttcacagtcatctcatcctaagggagaattggtgccagatgtcagaatttctacaattcatgatattcttcatagtcaaggaaataactctgaagtaagagaaactgcaatagaagttggaaaaggatgtgatttccatatttcaagtcattcaaagacagatgagtcatcaccagtgttatcgccaaggaagccttctcacccagtcatggattttttcagttcacatcttttagctgactcttcctcaccagcaacaaattctagtcatacagatgcccatgaaatacttgtgagcgattttcttgtttctgatgaaaaccttcagaagatggaaaatgtgcttgatctttggagttcaggtcttaagacaaacatcatatctgaactaagtaaatggagacttaattttattgactggcaccgaatggaaatgagaaaagagaaagaaaaacatgcagcacatttaaaacaactgtgtaatcagatcaatgaattgaaggagctgcaaaaaacctttgaaatctccattgggagaaaagatgaggtgatttctagcttgtctcatgccataggcaagcaaaaggaaaagatagagttgatgagaacattcttccactggcgaatcggccatgtcagagccagacaggatgtttatgaaggtaaactagctgaccagtactaccagagaactttactgaagaaagtctggaaagtctggcgttccgtagtgcaaaagcagtggaaagatgtggtagaaagagcttgtcaagcaagagctgaagaagtttgtatccagatttccaatgattatgaagccaaagttgctatgttatctggagctttggaaaatgcaaaagctgagattcaaagaatgcaacatgaaaaagagcactttgaagattccatgaaaaaagctttcatgaggggtgtatgtgcattaaatcttgaagccatgactatatttcaaaacagaaatgatgcagggatagactccacaaataataaaaaggaagagtatggtcctggtgttcaaggaaaagaacattctgctcatttggatccttcagctcctccgatgcccttaccagttacatcaccactgctgccatccccaccagccgccgtcggaggagccagcgcgactgccgttccctcagctgcttcgatgacttctaccagggctgcttccgcatcttctgttcacgttcctgtttctgctcttggtgcaggatctgcagctactgctgcatcagaagaaatgtatgtgccaagagttgtaacctctgcacaacagaaagcaggaagaactattacagcccggatcacaggaagatgtgattttgcttcaaaaaatagaattagcagcagtttagctataatgggagtttctcctcccatgagctcagttgttgtggaaaaacatcatccagtcacagtgcaaaccattcctcaagcaactgcagcaaaatatccccggaccattcatcctgaaagtagtacctcagcttccagatcacttggaaccagatcagctcacacccagtctctcacaagtgttcattccataaaagtggttgactaaagtgaatatgtccatagtggggtcttttaatccctctggtcttaccaagggttagaagtcttttggttttaacttttccatattgttagaacatcatggagacatcatgttcatctgttcaaaattacaagaggctttttcaagctctaccatgctttgtaactatatgtagaaattattttaatgttattttttatttaagcaattaagtaaaacttttttaaattaaaaaagaaactggactttatttctttaatatgtttagcctgttgctgattacagcatcaaaatatataaatttattttcacta

SEQ ID NO: 3061 - DNA, 2665 bp, Homo sapiens
  source 1..2665: mol_type = genomic DNA
gtttaccactactacagtcgaatggccaactatcggaacacgagcgagattcctctggttctggtgggaacccaggatgccataagttctgctaacccgagggtcatcgatgacgccagggcgaggaagctctccaacgacctgaaacggtgcacgtactacgagacgtgtgctacatacgggctgaatgtggagagggtcttccaggacgttgcccagaagattgttgccacaaggaagaagcagcagctgtccataggaccctgcaagtcgctacctaattctcccagccattcctccgtctgttccgcgcaggtgtctgccgtgcacatcagccagacaagtaatggaggtgggagtttaagcgactattcctcctccgttccatcgactcccagcaccagccagaaggaacttcggatcgatgttcctcccactgccaacacgcccacgcccgttcgcaagcagtctaagcgccggtccaacctgttcacctctcggaaagggagcgacccagacaaagagaagaaaggcctggagagtcgtgcggacagcattgggagcggccgagccatcccaattaaacagggcatgctgttgaagcgaagtggcaaatcgttgaataaagagtggaaaaagaaatatgtcaccctgtgtgacaatggcgtgctgacctatcatcccagtttacatgattacatgcagaatgttcatggtaaggagattgaccttctgagaaccactgtgaaagtcccagggaagaggccaccccgagccacgtcagcctgcgcacccatctccagccctaaaaccaatggcctatccaaggacatgagcagtttacacatctcacccaattcagggaatgtcactagtgcatctgggtctcagatggcaagcggcatcagcctggtctccttcaacagccgacccgacggcatgcaccagcgctcctactcagtctccagtgccgaccagtggagtgaggctacggtcattgcaaactcggccatcagcagtgacacagggctgggtgactccgtatgctccagccccagtatctccagcaccaccagccccaagctcgacccgcccccctcccctcacgccaacagaaagaagcaccgaaggaagaaaagcactagcaacttcaaagccgacggcctgtccggcactgctgaagaacaagaagaaaattttgagtttatcattgtgtccctcactggccaaacatggcactttgaagccacgacgtatgaggagcgggacgcctgggtccaagccatcgagagccagatcctggccagcctgcagtcgtgcgagagcagcaagaacaagtcccggctgacgagccagagcgaggccatggccctgcagtcgatccggaacatgcgcgggaactcccactgtgtggactgcgagacccagaatcccaactgggccagtttgaacttgggagccctcatgtgcatcgaatgctcagggatccaccggaatcttggcacccacctttcccgagtccgatctctggacctggatgactggccagtcgagctcatcaaggtgatgtcatccatcgggaacgagctagccaacagcgtctgggaagagagcagccaggggcggacgaaaccatcggtagactccacaagggaagagaaggaacggtggatccgtgccaagtacgagcagaagctcttcctggccccgctgccctgcacggagctgtccctgggccagcacctgctgcgggccaccgccgacgaggacctgcggacggccatcctgctgctggcacacggctcccgggacgaggtgaacgagacctgcggggagggagacggccgcacggcgctgcatctggcctgccgcaaggggaatgtggtcctggcgcagctcctgatctggtacggagtggacgtcacggcccgagatgcccacgggaacacagctctggcctacgcccggcaggcctccagccaggagtgcatcgacgtgctgctgcagtacggctgccccgacgagcgcttcgtgctcatggccacccctaacctgtccaggagaaacaataaccggaacaacagcagtgggagggtgcccaccatcatctgaggaacagccgtgcccgcctgctcgccgcacctgggacgcggcagcctcgccgcattctcgctcagaagtcgcagcacgtgagtcccgtcgcatcccctccctcttcctggtggccacctccctcccgcccacccactctcaccccaaacaaaatcacaaaacctggacatccctcaaggggcgaagaggcggccgggagactgcagaagtggctccttttcataaactcccctaaaccacacacaggagagagcgacgggcctcggccctttgatgatagcacatggcgcaggacccttgtcctggtggcacaagggatggggacgcgagggggaggggaggcgaggaacaaggagaaggggcaactttccttaactggcagttgagcacatagtacatttcccctctaccaaacggaacacttggattccatctcttctctgaggagctcgacggcataaatcagaagcaagcacagagtttgtcaggtttgaagcccctatgatggtgtgtgtcaaatcagttgtagctaatctgtccagggagaatactg

SEQ ID NO: 3062 - DNA, 3150 bp, Homo sapiens
  source 1..3150: mol_type = genomic DNA
gggtgggactggcagagctacggacaggtgggagcagtcagacagcctgagagagggagaccagaacgcaaagagagcgagagcattaagtaggcagggagaggcacacagaaagatagacagcaacactcgcgtgctccctccctccacacgccctcctcttaccgagcgaagcggccaggggcacagagtgggagaggactgtgggcacagaagaccggaagagggacgctgcattgctggtgggacggagggattcggacggacggacagaccagcgcacagactggcagcctgcgagagtggcagctttgagagcagagcgcagcaaagcgagaatcccgcgccgagctgctagtcggacccacagacggtcggactgacagacgtgcagacggacagaagagcagacaggaggcgggggcgcgttcactcccggcggccagccggccagagaaggcggcggtggcaccttctgagcgcgtccggagcagagaccagcagcagcaggggcagcggggacacaagccgcgaccgagccgccgccgcagccctggctgccacagctgtgtgggatcccagccgacactgcagaaagctccttttactagcagttaaataaatcgaccaaaaacaaaacaaacaaacaaacccaacaacaacaacaacaacaaaagccaagccaaaagccaaaacaaacaaatccagccaaatcaatcattgagaaacaataatattaataaaatccaaaactaaatcaaaccaatcaaggcaccaagacgcaggggggatatccacagttcgatcaaggttgacgatgtgtcacactgtgtaagggaatcgcatggagatgggcattccgaactgttaatggggacatgggactccagttgtctctgatcacttgtgtggattttcctggcgtagaacgacagaagccgctagtaagtcgccaagacctacagcaggaattctgcaccaaagggcataaaatcttgttattttaatttgcatctgggagaatgtctgagcaaggagacctgaatcaggcaatagcagaggaaggagggactgagcaggagacggccactccagagaacggcattgttaaatcagaaagtctggatgaagaggagaaactggaactgcagaggcggctggaggctcagaatcaagaaagaagaaaatccaagtcaggagcaggaaaaggtaaactgactcgcagccttgctgtctgtgaggaatcttctgccagaccaggaggtgaaagtcttcaggatcagactctctgaaaactgcaaatggaaaggaattcaaaagaatttagattaaaagttaaataaaaagtaggcacagtagtgctgaattttcctcaaaggctctcttttgataaggctgaaccaaatataatcccaagtatcctctctccttccttgttggagatgtcttacctctcagctccccaaaatgcacttgcctataagaaacacaattgctggttcatatgaaacttaggaaatagtgaataaggtgcatttaactttggagaaatacttttatggctttggtggagatttctcaatactgcaaaagttgtccagaaatgaatctgagctgatggtgactttaagttaatattattaatatatcactgcatatttttacccttatttttgctccttacagcaagattagtaggttataaaaatttaaatttaaacaaaattatttcatgacaaaatgggaaacttcacatcatacttatttttgtttgcctttcaggcatcatattagcttttataaaaaatggtcttgctgctgaaattgtacttattttatcagaggctgggtgcagtcaagacaaaagtaaaatggtttacctgagcccaggggagggaaaattgattaagatatcattatttttgtttggtttggttttgcttttttcctcttactttaattgaaatactctgaattcccctcatggaaacagagagcattgagagcactttctttaaaaggaccaaaaataaattcctaatagattttgtcctaagagagtgtttttttttctagcatcattttctttacatgccactcatgtcataaggcatggacaggctatctttcagtggccattactatgtttcgtacacatgctttattttacttgggctctgagaaatgtgtggctttccttcagcattttatttgtgcttctctttttaatggagattgaaaagggagaataatgtgaatatcacggcttatattattaaatgttgattgatggcttgtaatgtactgcacacaatatatgttaactctgcagaatgacagaccctgggagaagtaatgccccagttgtcccccactcctaatgccaggcagagaaggacagcctttatagacttaatctgctttttgtcccatttgacaaggtaccaggaggaaattttttaagggatcaactgtatcacagtgcccactctggacctaagtctagtgtatccatacaattggtgcagagaaataaggtgtaaatggtgctttgttcctgctggttccaagctcagaaaccaagactagctttgtaggagagaatgagagcctgcaagcctctctttggattggctgaggagtggtgggagcagggggttgatagaaaacatccagacacacatataagcaagtggccgtgctacctttttagagaataaagaaacagacttttgagtttatatgcaatgccttcattaggtaccaccggcacttacaaaatgtgcggactgaatcccagagaacactggcagatgtatacagtatatggattgtatcgcttccccaatgtttgtaaattcacagtatttggaaaactgccttcattttccagtgtgggaaaaactcttgctacctgtattacttgatctcagacccatacctgatggttcagtctgtccttaagttaaaagaattttgcttttctaatgttatactatttacctgtcagtgtattactgcaacttgaatcactcttttactgttgttggatataaacttatcctgtaccaatgtatttattaacacttgtattttattattgagcatatcaataaaaatattaaaaaataacagattgttttttaccaa

SEQ ID NO: 3063 - DNA, 3216 bp, Homo sapiens
  source 1..3216: mol_type = genomic DNA
tgaggggcgaaccaagatggcggcggttttggctgtgtgaggaagacggaagagacggcggcggagggaaaccgacttccactagtccgggtcgcttgggcggccgggggccctcagagtctcccgggcagtggtagcagttgcagcaggatcaggcgcctgtcggcttctgacgtttaaaacagggggagcggaagggagccactggccgcggtggcagggccagggcccctttcctgggcgtctactggcggggcccccgccccggttcccgggcggcacgatgaccgacacccggcggcgggtgaaggtgtacacgctcaacgaggaccggcagtgggacgaccggggcaccgggcatgtgtcgtctggctacgtggagcggctgaagggcatgtccctgcttgtcagggctgagagcgacggttctctacttttagagtcgaaaataaatcctaacactgcataccagaaacaacaggaagatgaaaaatttctgacagatttgtttgcacaactaacagatgaagcaacagatgaggaaaaaagacaggaattggttaactttttaaaagaattttgtgcgttttcccaaacgctacagcctcaaaacagagatgcttttttcaagactttgtcaaacatgggcatattaccagctttagaagtcatccttggcatggatgatacacaggtgcgaagtgctgctactgatatattctcatacttggttgaatataatccatccatggtacgagagtttgtcatgcaggaggcacaacagaatgatgatgtaagtaagaagttaacagagcaaaaaataaccagcaaggatattttgctcatcaacctcattatagaacatatgatttgtgatacagatcctgaacttggaggagcagtccagcttatgggcctgcttcgaactttagttgacccagagaacatgctagccactgccaataaaacagaaaagactgaatttctgggtttcttctacaagcactgtatgcatgttctcactgctcctttactagcaaatacaacagaagacaaacctagtaaagatgattttcagactgcccaactattggcacttgtattggaattgttaacattttgtgtggagcaccatacctaccacataaagaactacattattaataaggatatcctccggagagtgctagttcttatggcctcgaagcatgctttcttggcattatgtgcccttcgttttaaaagaaagattattggattaaaagatgagttttacaaccgctacataatgaaaagttttttgtttgaaccagtagtgaaagcatttctcaacaatggatcccgctacaatctgatgaactctgccataatagagatgtttgaatttattagagtggaagatataaaatcattaactgctcatgtaattgaaaattactggaaagcactggaagatgtagattatgtacagacatttaaaggattaaaactgagatttgaacaacaaagagaaaggcaagataatcccaaacttgacagtatgcgttccattttgaggaatcacagatatcgaagagatgccagaacactagaagatgaagaagagatgtggtttaacacagatgaagatgacatggaagatggagaagctgtagtgtctccatctgacaaaactaaaaatgatgatgatattatggatccaataagtaaattcatggaaaggaagaaattaaaagaaagtgaggaaaaggaagtgcttctgaaaacaaacctttctggacggcagagcccaagtttcaagctttccctgtccagtggaacgaagactaacctcaccagccagtcatctacaacaaatctgcctggttctccgggatcacctggatccccaggatctccaggctctcctggatccgtacctaaaaatacatctcagacggcagctattactacaaagggaggcctcgtgggtctggtagattatcctgatgatgatgaagatgatgatgaggatgaagataaggaagatacgttaccattgtcaaagaaagcaaaatttgattcataataatggcaacggcctaggatcagtacctgttgaaaaaaactggttctccacccctcccccatacaaaatccacaacaaagcgcagtggtctcttgtgaatgactgacacagatcagcctcttacacttgacttctgctcatcaagtgccaattcaatggagcaggaggaggggatatcatatatttaggggaaagacttaagcctttgagctctccagcttggaccacacattgcccttttctcagggaaggaaatggaaacaaaaagccaacagggcaggggttttgtaagtggaactctggattgactggtcagttgctacaatcagaatatgctttcttggaccatgtttgagactcagaagaatgggcctttctgccataattcttcactagtcaagaatgccagcagtttctttgtataaagagacctgcctttaaaatcatacattctgaacattttagtcaagctacaacaggtttggaaaacctctgtgggggaggggcgagtataaagttttcctcttttttaactgttccctttgcccttcaaactgcagatatttttttttttaagtggggacttctccctacttgattaaagattgagtggaattctagatgtggtcatttgtgtcataatttttttgttttattttgtttttgattttttttttcctcccctgagtgtatgcttagttgttgagtatatatatttgggaccattaaaactttttttgatgtaatataacctaacgttgtgctggtacctgttttaccatgtgtaatttttgttctacatcacagttcttaatttgtttagagttttatgaaagatggtatagtttttattgacaaaagcaaagtaatcttacaactatgtgcatacaaaagcaatactattttgtgactaaatattttatattaaaatttacatcagcaactgtcttgagaattcagggaaatagaatggaatttaaaacttcaacagttttgttaaatctagaaacatgaaattagtattccaaagagattctgaaatttcttttcttggggaaatgacggtacattaaatcaaaattgaggatggatgatttaaaaacatttgacttttgaataataaaaagaaaagtgaagagtaagagaaa

SEQ ID NO: 3064 - DNA, 854 bp, Homo sapiens
  source 1..854: mol_type = genomic DNA
gaggcgtgagagagcgtgcctgcccgccgcacacggggctggtttccggagtgcgtctctagagggatgcacgttgccttagccgagcttcggagagaagcctgatatgtaacccaggcaggtgggagcctcagtctgtcgggctgaggtctggcatctacaaagcctcttggccgtgttctgaacttgaagcctggaggagttctctgctcagcacagccaaggaacagaattagaagaaaaggaaccctggcctgaggtaaagcggacattgcacaaggcaggtgacaaacattaccaccccagctgtgcacgatgcagcagatgcaaccagatgttcacagaaggagaggaaatgtatcttcaaggctccaccgtttggcatcccgactgtaagcaatctacgaagaccgaggaaaagctgcggcctaccaggacatcctcggaaagtatttattctaggccaggctccagtattcctggctcaccaggtcatactatctatgcaaaagtagacaatgagatcctggattacaaggatttagcagccattccgaaggtcaaggcaatttatgacattgaacgtccagatcttattacctatgagcctttctacacttcgggctatgatgacaaacaggagagacagagccttggagagtctccgaggactttgtctcctactccatcagcagaagggtaccaggatgttcgggatcggatgatccatcggtccacgagccagggctccatcaactcccctgtgtacagccgccacagctacactccaaccacgtcccgctctccccagcatttccacagacctgatcaaggaatcaacatttaccgaaagc

SEQ ID NO: 3065 - DNA, 3318 bp, Homo sapiens
  source 1..3318: mol_type = genomic DNA
gggagattacggggcggggacgagctgtcgcgctggttgctcgtgcaggagcgggacccggaacagaccgccgtgagagaggaggggcgccggccgggattcgcggcccggagctcgggaccggttgcttcattccagcctcgcagtcacctctgtgccctgctggttgtcttcccagcgctgctgtagttgccttccatggatctataggagagcaagtcctccaggagaagaagtcctcaccagtgaacggagacctctctgaactaaggataccatggccacgtcagccccactacggagcctggaagaggaggtgacctgctccatctgtcttgattacctgcgggaccctgtgaccattgactgtggccacgtcttctgccgcagctgcaccacagacgtccgccccatctcagggagccgccccgtctgcccactctgcaagaagccttttaagaaggagaacatccgacccgtgtggcaactggccagcctggtggagaacattgagcggctgaaggtggacaagggcaggcagccgggagaggtgacccgggagcagcaggatgcaaagttgtgcgagcgacaccgagagaagctgcactactactgtgaggacgacgggaagctgctgtgcgtgatgtgccgggagtcccgggagcacaggccccacacggccgtcctcatggagaaggccgcccagccccacagggaaaaaatcctgaaccacctgagtaccctaaggagagacagagacaaaattcagggcttccaggcaaagggagaagctgatatcctggccgcgctgaagaagctccaggaccagaggcagtacattgtggctgagtttgagcagggtcatcagttcctgagggagcgggaggaacacctgctggaacagctggcgaagctggagcaggagctcacggagggcagggagaagttcaagagccggggcgtcggggagcttgcccggctggccctggtcatctccgaactggagggcaaggcgcagcagccagctgcagagctcatgcaggacacgagagacttcctaaacaggtatccacggaagaagttctgggttgggaaacccattgctcgagtggttaaaaaaaagaccggagaattctcagataaactcctctctctgcaacgaggcctgagggaattccaggggaagctgctgagagacttggaatataagacagtgagcgtcaccctggacccacagtcggccagtgggtacctgcagctgtcagaggactggaagtgcgtgacctacaccagcctgtacaagagtgcctacctgcacccccagcagtttgactgtgagcctggggtgctgggcagcaagggcttcacctggggcaaggtctactgggaagtggaagtggagagggagggctggtctgaggatgaagaagagggggatgaggaggaagagggagaagaggaggaggaggaagaggaggccggctatggggatggatatgacgactgggaaacggacgaagatgaggaatcgttgggcgatgaagaggaagaagaggaggaggaagaggaggaagttctggaaagctgcatggtgggggtggctagagactctgtgaagaggaagggagacctctccctgcggccagaggatggcgtgtgggcgctgcgcctctcctcctccggcatctgggccaacaccagccccgaggctgagcttttcccagcactgcggccccggagagtgggcatcgccctggattatgaagggggcaccgtgactttcaccaacgcagagtcacaggaactcatctacaccttcactgccaccttcacccggcgcctggtccccttcctgtggctcaagtggccaggaacacgcctcctgctaagaccctgagccctgacatctgcccccagccccaaccctcagatgcttcacttctttggaattccaggactctcaatggggggacgggatgcctggcctaagcacctggagcaggggaccccatatccactggtagccacctccccattgctgtggccccctgaaatctcactcagtgctgttgctccatctactgccctaatggggctcttttcccacctcctgctggtttcccgagggaacttctgaccctggagtccatgagggctcctttcctttttgaccacgaccttggccccagctctgcactctctggaataagggcccgatgcagcattttcttgcccagtgtggcaagacctcagaaaaaccagtcaattacgcctaagatcattttgctgtccttaaaccccccaggttccttcttgcacaaatccactctgctgcccaccttctctggcattttaaacagacctaccccaccccaactcagagttaagcatacatggcaatgctgaaaataaacaaaatccactgaggcttcccaggccatttaaagcctggagtaccagcgcatatcatctcatggggtccagagtggagtccaggcttctctgaaaccagggctgagcatatttccatagccaaggaggtgggactccctggagctatctgtggtcttagggaaggatccagacatacacggctttggggtacaagctgtgatcactgatcaataaattatctctagattggtccttgtgaggggagttttaagaatccagaacatcttgctcttgatcagcacatccaaaaacaccaagacaaacatccagtggagcagaacctctcctgcctcgggagttctgaccgggttccccagcagggtgttaagcctctgtctctggccctaccagcatccaggttccactttcctaggagagagtggagatgggaagacagggaaaggaaggcagcaggaggccacaagcccaccaggtcttcatgtcaagagagggagtaacatgtcttctcattgcccacggacccaacctctgtccaggtgcccctcatcatcacagtttaacacaagctcccctgctccagccaaattgatctcccagtcttgtccttacccattccaagtgctctgccagcccctgttcatccaagttttaagtcctccaccctgttctaagagactgttccaacggctctgggcctcagtggtcacttgaccaccattgtctcagagctgcccactttgtgtgtgtcacatgctgcctgagtcacatgtacatcttatttctgcctctagttttgtaagctcctggagggcggataacatcttatactactcttgtattctcatggcacctagtgcagtgctgggcacagagtaggtgctcaataaagacttgttgaatgaa

SEQ ID NO: 3066 - DNA, 2886 bp, Homo sapiens
  source 1..2886: mol_type = genomic DNA
gtcgcgagccggtggaggacccgcgcgcggaggagccggggagtcagcgcttcttccctccctccccctctcccctccccgctccctgcccccctccccaagaatgttccgctacgagtctttggaggattgtcctctggatgaagatgaagatgcatttcagggactgggagaagaagatgaagagattgatcaattcaatgatgatacatttgggtcaggtgcagttgatgatgattggcaggaagcacatgagcgcctggctgaattggaagaaaagctaccagtggcagttaatgaacaaacaggcaatggagagagagatgaaatggacttgttgggtgaccatgaggagaatctggcagaaaggctcagtaagatggtgattgaaaatgaactagaagatccagctattatgagggcagtgcagaccaggccagttttacaaccccaaccaggaagtctgaattccagtatctgggatggatctgaagttctgaggcgaatccgaggaccactgcttgctcaggaaatgcctacagtgtctgtattagaatatgctttgcctcagaggcccccccagggtccagaagatgatcgggacctttctgaacgagcattaccaaggcggtcaacttcacctatcattggcagtcctcctgttagagctgtccccataggcaccccacctaaacagatggctgtacccagcttcacccaacagattctgtgtccgaagcctgtccatgttcggcccccaatgccacctcgttatcctgctccctatggtgagaggatgtctccaaaccagctctgcagtgtcccgctacagcctggacggatgtctcccagccagtttgcacgggtccctggatttgttggtagtccacttgctgccatgaatcccaagttgctacaagggcgagttgggcagatgcttcccccagcaccaggcttccgtgccttctttagtgctccaccctccgctacaccacctccacagcagcaccctcctggcccaggaccccacctgcaaaacctaagatctcaggccccaatgtttagaccggacacaactcacctccatccacagcaccgtcgactcttgcatcagagacagcaacagaatagaagtcagcatcggaatctcaatggtgcgggagatagaggaagtcaccggagcagtcatcaagatcatctccgaaaggatccatatgccaatctcatgttgcagcgggaaaaggattgggtctctaaaatccagatgatgcaactgcaaagcactgatccctacctggatgatttttattaccagaattactttgaaaaactggagaaactgtcagctgctgaagaaatacaaggtgatggccctaagaaggagcgcaccaagcttatcacccctcaggtggccaaactggagcacgcctataagccagtgcaatttgagggctctttgggaaagcttaccgtttctagtgtgaataatccccgaaaaatgattgatgctgttgtgacatctcggagtgaggatgatgagacaaaagaaaaacaagttcgagacaagaggagaaaaacccttgttataattgagaaaacctacagcttactccttgatgtggaggactatgaaagacgttatctcctaagtctggaagaagagcgacctgccctaatggatgacagaaagcacaaaatttgtagcatgtatgacaacttaagggggaaattgcctggacaagagaggcctagtgatgaccactttgtacagatcatgtgtatccgaaaagggaagagaatggttgcccgtattcttcctttcctctccacagagcaagcagctgacattctcatgacaacagccaggaacctccctttccttatcaagaaggatgcacaagatgaggtgctgccatgcttactgagtcccttctctctccttctctatcatcttccatcagtgagtatcaccagccttttgcgacagctaatgaacctacctagttcagaccctgctacagaatcaacacaaaataatcagtggacggaggtgatgttcatggcaacacgagaacttctgcggattccccaagcagccctggccaagccaatctctatacctacaaacctagtgtccctcttttctcgctatgttgaccggcagaaactgaacttgctggagacaaaactgcagctagttcaggggatacgataaaagatctccaaatgtgtcctgtacctccttttggctgccacctgcactgctgccatcaccaatggagtgtttttaatgagggaaggaaggtagctttttccccaaagcaaagtcttgtgggatcgattcctgtttacaggggttgtctctctaaatgtcagatatttccccactgctctatgaaatttggctgggtgatacttctgctggtttctttaccttctgtgttacagttctgcatgtcctacttttactcagttctgttttgcattttctttgccctagagacacaagtgtaatctctccctttatccctccactactccacctcagagtagattgtagcctgccaaaggattccttccctcatcctattgaagttgttttttcattgccccatattaatatgactatagaagagccaattaagtagaaatcaagatatacacacacacatagatacacacacacacaccccatacatgtatttatgtggtcttcagagggtccttaaagaatgaattttagattgaaaaatatttagttgtctcattacctcttctaaacacaaaccagctgatgtattttaatctgtttctgttctatcttgtaattaatttggtgggttctacttgttttaacataaataaagagtatgcagcacgtttaat

SEQ ID NO: 3067 - DNA, 1709 bp, Homo sapiens
  source 1..1709: mol_type = genomic DNA
ggtacctcgtggagaagacgggggaggggagcagcgagatttccttgcggagcaatattcctagggtacagacctcgtagcccgggcccgcgactccgccccgggagcgggcaggggcggggcgagcgctccagctggcgggaaggaggaagggccgggcgcggcgcagaggcgggcgcctaccagccggcagctccggagctgcccgcgccatgtccgcgcacaatcggggcaccgagctcgaccttagctggatctccaaaatacaagtgaatcacccggcagttctgaggcgtgcggaacaaatccaggctcgcagaaccgtgaaaaaggagtggcaggctgcttggctcctgaaagctgttacctttatagatcttactacactttcaggtgatgatacatcttccaacattcaaaggctctgttataaagccaaatacccaatccgggaagatctcttaaaagctttaaatatgcatgataaaggcattactacagccgccgtttgtgtttatcccgcccgggtgtgtgatgctgtaaaagcactcaaggctgcaggctgtaatatccctgtggcatcagtggccgctggatttccagctggacagactcatttgaagacacgattagaagagatcagattggctgtggaagatggagctacagaaatcgacgtggtaattaacagaagcttggtgctgacaggccagtgggaagccctgtatgatgagattcgtcagtttcgcaaggcctgtggggaggctcatcttaaaactatattagcgacaggagaacttggaactcttactaatgtctataaagccagtatgatagcaatgatggcaggatcagattttattaagacctctactggaaaagaaacagtaaatgccaccttcccggtagctatagtaatgctgcgggccattagagatttcttctggaaaactggaaacaagatagggtttaaaccagcaggaggcatccgcagtgcaaaggattcccttgcttggctctctcttgtaaaggaggagcttggagatgagtggctgaagccagaactctttcgaataggtgccagtactctgctctcggacattgagaggcagatttaccatcatgtgactggaagatatgcagcttatcatgatcttccaatgtcttaaatcagtcaccagttccagaaaagttctttacgacaatgtttaaaaattatttttctacgtaattgctaaaattatttaattaaaaaattgggcagtaggtaactggcattcctctctttaaaatttctaccgaacttaatggaatggaaaaagcaaactcatccacatgtggtactcatttcaggcacatctgaaatgatcttaattactagaagatctgcactattaactttgtgaagagtttctcctaaaaactttaagtaaaatgttaatggtagctttgataacatcaaattctaagggagaaaaaaacaatattaaaccgcccaagcagtgtgccctagcagaggaaaatgcaacatctcgcaagcgctgctgtaacgacttcaggagtcactgattcagcactaatttcctgctgtgaaaactcatctttcatttttgccgtggataggcgcttttattaattgttgtcctaatgaaatttctgacattgtcatatacaacgatgaatatcattaaaatttttaaaataataaa

SEQ ID NO: 3068 - DNA, 3010 bp, Homo sapiens
  source 1..3010: mol_type = genomic DNA
gagtgtgtgacccagcccttcccccgtggccaagcagagagagtggccttgaggaagccatagcagcaggaccagcatggcctctgctgcctctgtgaccagcctggcagatgaagtcaactgccccatctgtcagggtaccctgagggagccggtcactatcgactgcggccacaacttctgccgggcctgccttacccgctactgtgagataccaggcccagacctggaggagtcccctacttgcccactctgcaaagaacccttccgtcctgggagcttccggcccaactggcagctggctaacgtggtggagaacattgagcgcctccagctggtgtccacactgggtttgggagaggaggatgtctgccaagagcacggagagaagatctacttcttctgtgaggatgatgagatgcagttgtgcgtggtgtgccgggaggctggggagcacgctacccacaccatgcgcttcctggaggatgcagcggctccctatagggaacaaatccataagtgtcttaaatgtctaagaaaagagagagaggagattcaagaaatccagtcaagagaaaataaaaggatgcaagtcctcctgactcaggtgtccaccaagagacaacaggtgatttctgagttcgcacacctgaggaagtttctagaggaacagcagagcatcctcttagcacaattggagagccaggatggggacatcttgaggcaacgggatgaatttgatttgctggttgctggggagatctgccggtttagtgctcttattgaagaactggaggagaagaatgagaggccagcaagggagctcctgacggacatcagaagcactctaataagatgtgaaaccagaaagtgccggaaaccggtggctgtgtcgccagagctgggccagaggattcgggactttccccagcaggccctcccgctgcagagggagatgaagatgtttctggaaaaactatgctttgagttggactatgagccagctcacatttctctagaccctcagacttcccaccccaagctcctcttgtccgaggaccaccagcgagctcagttctcctacaaatggcagaactcaccagacaacccccagcgttttgaccgggccacctgtgttctggcccacactggcatcacaggggggagacacacgtgggtgtggatggccagggtacctggggactcaggctgctgccagttctgctcaccaccatccgtgcttggcacagaagtagctgcatagaaagagcactggatttgaagtcagaagacctgggttcttgaaccagcctgtcaaccagttgtatgactttaaacaaggcatctcacctcttttcatcttgttttcttccaataatgttagagttcatgtaatcacattctctagaaccatttagtttgtgttaactatgaaccaagcagtgtggtggccactggtgacttgaaaatgtagagaaaaaaaaaacctgctctatatctgaaagagctcttgggaagacagagaaacataaagaggaaattatagcacagtgtggtgggtgttacgggaagtccaaccccagcattatgggagttcaggggaaggggcatagcccagcctggaaggagaggatgagtgggggatggctttctgaaaagggtagtctaaaggatgcctatagtcaatagggaaaagaggggaagaagcatcttaagaagaggaaacagcagagaactggctggatgacctgtgactctggagcactgggttgtctccattgtccttatgggcagatgtgtgccatccccagccgacaccactcactgcctccttcctcctggtgttgccacttctgggtgagattaaggtgcagggcctgggggcaggaggacataaggtatagccataaatcataacccagggaccacactcaaccctagggaaattgtcttcctgatcagttgattaccatctgaggtcaagaaatgagatagtgggagcaaatgggtcacaaatagctcagctgtgggctcagaaactgctaggtaaaagaattccagaaggaggccagggcataagttggatgacctatgacctttagtctaaagaattgagactaccgtaattgagactactgtagtgacatctgagaaatgggatggaagagtgaccatgttttattttcttgttcttgtcactattgtattttattttgcataatcatgcccttcactgacagtctccttaacatcatctgtttactctgctcagatgtaaaatacaatgctctgtcatctccctactgggtctcctgggaggaggggagccatccagggtgcaaactcaaaggcagagggcacagcgtgcttaggcccaagcttagaattcaattgagaagttctgttgttcatccttacctcagcaggtagaaaagaggtggagatcagaagccagggattaaagattgaattgctttccctgggagtgtgcagtatctcattaaaatgttgtatattcaaaaaaatacagacacacacaagtgcctatataatgataaaacatatgcaaagcacccaaacctgtgattccagaaaggtagatcctatttttctgtttatttttattggctttagctgtgtcttttgaaaggactattatcctctaaaatgtatgtgtatgaagatcctggcttgcagctcgggagctttacacaccttgtgtcactttatcttggtaacgagccaagatcatgcaaccagttcatccatgtctgacccaagagctcttaactgctatgctgcactgcctcattcagagatagatgcctgcatgggtcctggcgattattttaatgctggctacacccccacaggtgacttggattcagaaatacaatttatatttcttctttttaaattgttttattttatttttcttttaatagttatatgtcagtgagaacaatttatatgtcttacactgagaaataaaactgctcataagtgaaaa

SEQ ID NO: 3069 - DNA, 5125 bp, Homo sapiens
  source 1..5125: mol_type = genomic DNA
atcgggccgccggcgtccgggctccagaggccgcctggctgggcgcccggtgccttttgtctggcgcagggccggcgtttgcatcacatttcggatacctccctctctttttcgcctctccttctgcctcccgctcacatcgcctccccactcccgccaccgtcccccgccggactgctagcctcctagaccgaagcccgaggacgtctctgcccgagcgatgtcccctctccagaaagttgccgccgccgccgccgccgccgccactgccgccgctgggcggtgaaacaaagtctggcggggccgcctcccggtgcaggagcgcaccggtgcctagcggctggactccgctgccgggcgtcccgctttcccccggggagccctaaacgctccaggccatggccgagggcgcggccggcagggaggatccggcgccgcccgacgcggcggggggcgaagacgacccccgagtgggcccggatgccgccggggactgcgtgacggcggcctctgggggccggatgagggaccgtcgcagcggggtcgcactgccaggcgccgcggggaccccagcggacagcgaggcgggcctcctggaggcagcacgggcgaccccccggcgcagcagcatcatcaaggatccttcaaaccaaaaatgtggtggaagaaagaaaaccgtgtctttcagcagcatgccatcggaaaagaaaattagcagtgcaaatgactgcatcagcttcatgcaagctggctgtgagttgaagaaagtccggccaaattctcgcatttacaaccgttttttcactctggacacagaccttcaagctcttcgctgggaaccttcaaagaaagacctcgagaaagccaagcttgatatttctgccataaaagagatcagactggggaaaaacacggaaacatttagaaacaatggccttgctgaccagatctgtgaggactgtgccttttccatactccacggggaaaactatgagtctctggacctagttgccaattcagcagatgtggcaaacatctgggtgtctgggttacggtacctggtttctcgaagtaagcagcctcttgattttatggagggcaaccagaacacaccacggttcatgtggttgaaaacagtgtttgaagcagcagatgttgatgggaatgggattatgttggaagacacctctgtagagttaataaaacaactcaaccctactctgaaggaagccaagatcaggttaaagtttaaagaaatccagaagagcaaggaaaaactaaccacccgcgtgaccgaagaggaattttgtgaagctttttgtgaactttgcaccaggccagaagtgtatttcttacttgtacagatatctaaaaacaaagaatatttggatgccaatgatctcatgctctttttagaagctgagcaaggagtcacccatatcaccgaggatatatgcttagacatcataaggagatacgaactttctgaagagggacgtcaaaaagggtttcttgcaattgatggctttacccagtatttattgtcatcagaatgtgacatttttgatcctgagcaaaagaaggttgcccaagatatgacccagccattatctcactactatatcaatgcctctcataacacctatctaatagaagaccagttcagggggccagctgacatcaatgggtacattagagctttgaaaatgggctgtcgaagcgttgaactcgatgtaagtgatggttcagataatgaaccaatcctttgtaatcgaaataacatgacaacccatgtttcctttcgaagtgtcatagaggtaataaataaatttgcctttgttgcttctgaatacccactcattctttgcttgggaaatcactgctccttgccgcagcagaaggtaatggctcaacagatgaaaaaggtctttggcaataaactctatactgaagcacctttgccctcagaatcctacctcccatcaccagaaaaattaaaaagaatgatcattgtgaaaggaaagaagttgccttctgatccagatgtgttagaaggagaagtaacagatgaagatgaagaagctgaaatgtctcgaaggatgtcggtagattacaatggtgagcagaagcaaatccgactctgtagggagctctctgatttggtgtctatttgtaaatctgttcaatacagggattttgaactatctatgaaaagccaaaactattgggaaatgtgttcatttagtgaaacagaggccagccgcattgcaaatgagtacccagaggattttgttaattataataagaagttcttatcaagaatctatccaagtgccatgaggatcgattccagtaacttgaatccacaggacttttggaattgtggctgtcagattgtagcaatgaattttcagactccgggtccaatgatggaccttcacacgggctggtttcttcaaaacgggggatgtggttatgttctaaggccgtctataatgcgagatgaagtttcttacttcagcgcaaatacaaagggcattctacctggggtgtctcctctagctcttcatatcaagatcatcagtggtcagaatttcccaaagcccaagggagcttgtgccaaaggggatgtcatagatccctatgtttgtatagagatacacggaattccagcggattgttcggaacaaagaactaaaactgtacagcaaaacagtgataatcctatttttgatgaaacttttgagttccaagtaaacctacctgagctggccatgatccgttttgttgttctggatgatgactacattggggatgagtttatagggcaatatacgataccatttgaatgtttgcagcctggatatcggcatgttcccctgcgttcttttgtgggtgacatcatggagcacgtaaccctttttgtccacatagcaataactaatcgaagtggaggaggaaaggcacagaagcgcagtctttcagtgagaatggggaagaaagttcgggaatataccatgctcaggaatatcggtcttaaaaccattgatgacatctttaaaatagcggttcatccattacgagaagccatagatatgagagaaaatatgcagaatgcaatcgtgtctattaaggaactatgtggactccctccaattgccagtctgaagcagtgcctgttaactctgtcatctcggctcatcaccagtgacaatactccttcagtctcacttgtgatgaaagacagctttccttacctggagcctctgggtgcaattccagatgtgcagaaaaagatgctgactgcttatgatctgatgattcaagagagccggtttctcatagaaatggcggacacagtccaggaaaagattgtacagtgtcagaaagcagggatggagttccatgaagaacttcataatttgggggcaaaagaaggcttgaagggaagaaaactcaacaaagcaactgagagctttgcttggaacattacagtattgaagggccaaggagatctgttgaagaatgccaagaatgaagctatagaaaacatgaagcagatccagctggcatgcctgtcctgtggactgagtaaagcccccagcagcagtgctgaggccaagagcaagcgcagcctggaagccatagaggagaaggaaagtagtgaggagaatgggaagctgtgactctgggcattatcgacacgttcacccatcttatcaaggactctggtttctcattcttgttttctttctttaaatgttttataagttcacaaaatggtgccctatatggggtattggacatagatattttcacaatgtcagtatttcagtgtagttaatttatctaaattaaagcctttagtatcagtgttttaaattctgagacatgtgtcaacacccctgtgtggatgcctgtggaagagtgtgtgtgtgtgtgtgtgtgtgtgtgtgtggcagagagagagaaagagagagagagagagaaattctgttaaaatctattctgtgttgcattattcatttagtgagttattccttgatcattttgggacaattgttttaatctgaaattctaaagagcacttactgtaacctgttgctgtgtttaatttgacttctctgcctttgacatttaatttagtgatcttagcatagcttattattgaaggaagccaaatttatcaaagcatagatgttttggtagattaaatatagattagaaaaattcctaagaatcagagtagaaataaaagtgaatgaaagattaaacagatgatgagaatttctaaaaagattagcaaggtcatttcttcagtcagaaaactttaaaaaatatttattaaataaaatcaatttttaggaagttttctgtagtcatttactaaacatatgatttcactagaaaagctgatcataagtgaatttatacctacctgtgtggtactctgaaacacactgaaagctctgttgcaattaggattttgatgtgacaataatattgttgtataatttcgagatttgtaggaaggtctcattcttccaagctgagagtctagcactcattttctataacagatatggcagcttagaggtgttggctttgtttggatgtaatttagggtactaaatttaaatttaaagatattgttcaaacaatatcatatcatcacattgagctgatataaattctgtgggtccgataatatctttgtgataatttaagagctaaccagttaccacacatctatgatataaccctaacacacacagaaaagcatacatgcaaaaagaaatgactaattagggtacatttataattgcatctaggtaatttttaccctaatgtcttcataaagtacttgagtgtaatgtttgttacctccaacagaactaaatgttctatggttatgaaagaatatatttatttaaagcattgcttttattttgaaaagcttcttaattaatttgattaacaaatatgctaatttggggaaacctagagaagataattgttgaaattttgcaaatataaacatctcctatagcttctgtgttatttctgacttcttaacactattatgtttatgttgcacattactgaaagagtaaagatatgaaaa

SEQ ID NO: 3070 - DNA, 876 bp, Homo sapiens
  source 1..876: mol_type = genomic DNA
aaagagcccgctccgccgagcgccgggcgacggcaggaagcccctccgcttggccagaatggagcagccgaagggagttgattggacagtcatcatcctgacctgccagtacaaggacagtgtccaggtctttcagagagaactggaagtgcggcagaagcgggagcagatccctgctgggacgctgttactggccgtggaggacccagagaagcgtgtgggcagcggaggagccaccctcaacgccctgctggtggctgctgaacacctgagtgcccgggcaggcttcactggtcgagacttcccctttgatgactgtggcagggctttcacctgcctccccgtggagaaccccgaggcccccgtggaagccttggtctgcaacctggactgcctgctggacatcatgacctatcggctgggcccgggctccccgccaggcgtgtgggtctgcagcaccgacatgctgctgtctgttcctgcaaatcctggtgagcctgagactacctgggactgccttccttcgtcacagccacagcaagaagccagctctgcccttcttgcccaccctgcctctgggcctgccccgctgccctattagacgggaagctggagggtgtggagaatgaagcctggtggaggcagggcttctcctgctgtgcctcagtctgtctgtctataggatggacagaagcagccctgccccttctgtcccacagggctctgcggaagaactttgggagaggagggttgtcattctcccaggcgaatgtccatttggcttggaaaccgtatttcccttttagaggtgcccaggtgccgcagccctgggctcttgcttccacctggtggggaaatccgtgccttgggtggagg

SEQ ID NO: 3071 - DNA, 2911 bp, Homo sapiens
  source 1..2911: mol_type = genomic DNA
cccgcccgcgtggtcgtcgccaccgcagccgcccgagaggagctgggggaggacggtggcccgcgaggctcgtcgcagacaacgcggcggcgatgtccgcgagccagagcacaaagttatcattgttgggctggataatgcagggaaaactaccattctttaccaattttctatgaatgaagttgtacatacatctcctacaataggaagtaatgtagaagagatagtgattaataatacacgtttcctaatgtgggatattggtggccaagaatctcttcgttcttcctggaacacttactatactaacacagagtttgtaatagttgttgtggacagtacagacagagagaggatttctgtaactagagaagaactctataaaatgttagcgcatgaggacctaagaaaagctggattgctgatttttgctaataaacaagatgttaaagaatgcatgactgtagcagaaatctcccagtttttgaagctaacttctattaaagatcaccagtggcatatccaggcatgctgtgctctaactggcgagggattgtgccaaggacttgaatggatgatgtcacgacttaagattagatgatctctactgacctcttctcatagattttgtataaatgaagtgctggactttacctgaaagctgcaaaaattaatggtttagatatatttataataaactgatttaaactttttctataagaagaaaaattaagaccacttatttgaaaacaaagatgaagtctcaccttccagtttgctttctcattagttttttccaaagtaagttattgaagctgtgattgacatttttctcataatgaatcctctcaggacattgtgtagcctatggtaagtacaaagggagaggaagacattttgaattttaagagctttattatcagtttaaccctccctagttgaatgttattttcttcttgttccattaagtcagaatacaaatcagcacagatattcgaatgtttccaatattttaaaatgtaatgttacttatgaaaagtattttgcttaaggttgtgtgtgtattgtgtatatacctcaagttcaagttaatggcattgatttatgttccagacaaaaataacacaaataataatatccttcgttataaccacaatgagataagtattggcattagtgttcagtgccattttatactttctctctgtgttctctgtattgtactaaccaacctcccaaatcgctgagctgcttgtttaaaaaaaaaaaaaaggaaaaggaaaaagcatgacattgtgtatcgattttttgttgttgaccaaaatcacacacatggaaacatgtaattcaacagagtgggaaagctagcagattcttggcttagtattactaataggcaggattgtacaatgagcaactatcagattattcctttcagtggttcttatggcatctaaattactgaataaattattaatccattaatcagtgaatcaaattatgattacaattatcaaatgaatgctcagcattaattgaaaactgttttgtgaaacatgtctacccagaaaagtagcattctataaatactattaaacaacttagctatattatttttaagtattaaattatatgtcaagcagttaaagtgaatttcagagtaaaagtaaggcatgtttctgagcaacattgataatttcttaatttgcaaatttcttcttattttggtacttggaatatagtgtgagattttttatttctaaattttgttgtatcttctattacataaatgcattgacaattataaaatgcaagtgttttttgaatgattttaagaatttggcttaaaaattgattgatacaacgtattatttgtactaagaagtaacttgacccaaaacaccttttatgtttgcttagggtatattttttcagtgtctgaaagtcaaaggtattcctgtcacaactgtaaacaaacttatcctaaatgtgttaaaacatattcttgggtactctatttatgtatctttcatgccttgaaaatctgaaggttaatccaaactcacatgttttagcatatttgagaaaaaaaaactaccttcaatatcagccttttaaatttcatgaagattttggtgaggaataatagtatatagtttaagtattgacaaaactttgaaagtttctttctttaaaatgggaaatactcaatatctaaatccaggtcaggcatgggatatcagtatttaacattggatgttttatgttttatatttataatgttcaaaatgcaagcataacatttaatatttgtccacatggttttacaaaagtaaatcttaaattactaagcttttcccatatgttctcgtactttctcaaatccctataaagaattacttgttatctattaaaaatctcctttacccaaatctgtattatggtttcgccagacaaatattatgtgatgtagcccagaaaatccacaccttttgtcctttttatgttttaatttgaataatcatgtgcttagtcccttggattactgccacatcagtttaacacgatatcagcacattcccttgtcatcatcaaggtgttggctcagatttattcttaattggatgtttaaagcatgtactaccttgttacagttggtttagtgtagtggattattgacatgacatcatgagaagatgtgtaattttataccacatttataaaacatgattttgttttctacccttcaaggtaaacattaaaaataaggtggtacttgtgtacttgtacataaaaccaaaattatagttgggaaaaaaataaatttatatatgaaaatgtcaaaatcattttaaaagtattattttcaaataaaatggagaagctggtgaaaagtcatattggcaatttt

SEQ ID NO: 3072 - DNA, 2101 bp, Homo sapiens
  source 1..2101: mol_type = genomic DNA
cctgggcatgcgcgagcgcgtcccgggcccggcgagtcgagggttcaggtggtgcgccgtggcgccgcctgcgaccggcagctcgttcgccgcactttggaggcttcggctgcccctccgacccacgtagggcccggacccgggcctccttgtgaacagcgtgccggcttcgccccacgggttcaccggctggctgggcttcaagcgccgaggccgccgcagtgaccccgcccccgggccgaggatgtgaggcgggccgggcgtccccacaccgggcccgggcgccgggagtgggcgtctgggcagcgccaggcgatggccctgctgctggtgctcctcgcctcttggggcctggggcagtgagggggccggcgggcgtgggccgagtggccgcgggcgccatggagggggtgctgtacaagtggaccaactatctgagcggttggcagcctcgatggttccttctctgtgggggaatattgtcctattatgattctcctgaagatgcctggaaaggttgcaaagggagcatacaaatggcagtctgtgaaattcaagttcattctgtagataatacacgcatggacctgataatccctggggaacagtatttctacctgaaggccagaagtgtggctgaaagacagcggtggctggtggccctgggatcagccaaggcttgcctgactgacagtaggacccagaaggagaaaggcaatttgctgaaaacactgaaaacttgaaaaccaaaatgtcagaactaagactctactgtgacctccttgttcagcaagtagataaaacaaaagaagtgaccacaactggtgtgtccaattctgaggagggaattgatgtgggaactttgctgaaatcaacctgtaatacttttctgaagaccttggaagaatgcatgcagatcgcaaatgcagccttcacctctgagctgctctaccgcactccaccaggatcacctcagctggccatgctcaagtccagcaagatgaaacatcctattataccaattcataattcattggaaaggcaaatggagttgagcacttgtgaaaatggatctttaaatatggaaataaatggtgaggaagaaatcctaatgaaaaataagaattccttatatttgaaatctgcagagatagactgcagcatatcaagtgaggaaaatacagatgataatataacagtccaaggtgaaataaggaaggaagatggaatggaaaacctgaaaaatcatgacaataacttgactcagtctggatcagactcaagttgctctccggaatgcctctgggaggaaggcaaagaagttatcccaactttctttagtaccatgaacacaagctttagtgacattgaacttctggaagacagtggcattcccacagaagcattcttggcatcatgttatgctgtggttccagtattagacaaacttggccctacagtgtttgctcctgttaagatggatcttgttggaaatattaagaaagtaaatcagaagtatataaccaacaaagaagagtttaccactctccagaagatagtgctgcacgaagtggaggcggatgtagcccaggttaggaactcagcgactgaagccctcttgtggctgaagagaggtctcaaatttttgaagggatttttgacagaagtgaaaaatggggagaaggatatccagacagccctaaataatgcatatggtaaaacattgcggcaacaccatggctgggtagttcgaggggtttttgcgggacacacaaatgtctgatggtggcccaggagggctgtcactcagaatcaggcgggtgcagagtggcctgcaggacatgatgacccagcatgagacaggatgcatcacatctgggtgacgcctctctccaggggatcagcctggactaaatgcctctcctgggccaggatgcccagcaagccccgagatgcctcctggagagaaggaagtatgtgagagtatcctgagttaagtgagatctaaaatgcctgagaaaaccctgaaatgactgagtctatctggaacttatttgattgtttttctgccatcagatagaatgaggtctcaaaagagaaa

SEQ ID NO: 3073 - DNA, 1462 bp, Homo sapiens
  source 1..1462: mol_type = genomic DNA
gcgagccgggcaactgccctccttccgcgccggcggagcgattaaagtgaagaaacaatggccagcaatcacaaatcttcagcagctcgccctgtttcaagaggtggagttgggttaacaggaaggcctccttctgggatacgacccctatcaggaaatattcgagtggcaactgcaatgccacctgggacagcaagaccaggttctcgtggttgtcccatagggactggtggagttctgtcttctcaaatcaaagttgcccatcgccctgtaacacaacaaggtttgactggaatgaaaactgggacgaaaggtccccagaggcaaattttagacaaatcttactatcttgggcttcttagaagtaaaataagtgaacttacaactgaagttaataaacttcagaagggaatagaaatgtacaatcaagagaattcagtatatttgtcatatgaaaagagggctgagactttagctgttgagataaaagagcttcaaggacaactagcagactacaacatgttggtagataaacttaataccaacactgaaatggaagaagtaatgaatgattacaatatgcttaaagctcaaaatgatcgagaaacacaaagtttggatgtcatatttactgaaagacaagcgaaagaaaaacaaatcagaagtgtcgaagaagaaattgaacaggaaaaacaagcaacagatgacattatcaaaaatatgtcttttgaaaaccaagtcaagtacctagagatgaaaaccacaaatgagaaactgttacaggaattagatacacttcaacaacaattggattcacagaacatgaaaaaagagagcctggaagcagaaatagctcactcccaggtgaaacaggaggcggtattgctgcatgaaaaactttatgagttggagtcccatcgagatcaaatgattgcagaagacaaaagcataggatctccaatggaagagagagagaaattacttaagcagattaaagatgataatcaggaaatagccagcatggaaagacagttaacagatacaaaagaaaagataaatcagtttattgaagaaattagacaacttgacatggatttagaggaacaccaagatcctaccaactatggatggaaaatacttgaaaaaaatacaggaagtttcaaaaagcaagtttgaacctgccatgtgctaagcactatgctgaatccatttgaactgaagaataccctgctatagcctcccattgtttcacagatcttcagtctctctctagcacccactgtttgagcagtgttcatctggcattttattcattggctacttgtgttcactctttgcttctgtgaaaaaaaaaagactcctaaaaatcaattatatggtgaaagaaatcccttacagactaagagagagcgtaaagtgctgtctctcaacaagaaaataaaattcttagatcttttgaaaa

SEQ ID NO: 3074 - DNA, 506 bp, Homo sapiens
  source 1..506: mol_type = genomic DNA
ttcgtgacccggagctgtgcgaggagagtaccgaggagggggactcaagagtagccttcctcgaggacctgcctttcccatttgctgcctgaagttaatgtttcttgctggccaaatcagggacatgccggcattagcgggatgagtgggtgttccggcagggatgtggtcattgacggccagtgagggcgagagtaccacggcccacttcttccttggagctggagatgaggggctgggcacccgtggaataggcatgaggccagaagagagtgacagcgagctccttgaggatgaggaggatgaagtgcctcctgaacctcagatcattgttggcatctgtgccatgaccaagaaatccaagtccaagccaatgactcaaatcctagagcgactctgcagatttgactacctgactgttgtcattctgggagaagatgtaatccttaatgaacctgtggaaaactggccatcctgccactgcctcatctctttccactccaaag

SEQ ID NO: 3075 - DNA, 539 bp, Homo sapiens
  source 1..539: mol_type = genomic DNA
cttttcaagcaaagccccatctcgccgtgctcacaggactactgtcataggaacatggatgaaacttccaattgaagacactgagctgaaccattccgcccgcccgcccgcccgagggcactccagatctgccggaggcgctgggcaatgaccccgggactccaggccagaggggtctgaagctgtttgggaaagcagcgggactccttgggaagatggccatggccccaagcccttccctggtgcaggtgtacaccagccccgcggctgtggccgtgtgggaatggcaggacgggctgggcacctggcacccctacagtgccaccgtctgcagcttcatcgagcagcagtttgtccagcagaagggccaacgttttgggcttgggagcctggcccacagcatccccttgggccaggcagacccctcgctggccccttacattattgacctccccagctggacccagttccgccaggacaccggcaccatgcgggctgtgcggagacacctgttcccccagcactcagcccctggccga

SEQ ID NO: 3076 - DNA, 644 bp, Homo sapiens
  source 1..644: mol_type = genomic DNA
agtgcgttacttacctcgactcttagcttgtcggggacggtaaccgggacccggtgtctgctcctgtcgccttcgcctcctaatccctagccactatgcgtgagtgcatctccatccacgttggccaggctggtgtccagattggcaatgcctgctgggagctctactgcctggaacacggcatccagcccgatggccagatgccaagtgacaagaccattgggggaggagatgactccttcaacaccttcttcagtgagacgggcgctggcaagcacgtgccccgggctgtgtttgtagacttggaacccacagtcattgattggtgccccactggcttcaaggttggcatcaactaccagcctcccactgtggtgcctggtggagacctggccaaggtacagagagctgtgtgcatgctgagcaacaccacagccattgctgaggcctgggctcgcctggaccacaagtttgacctgatgtatgccaagcgtgcctttgttcactggtacgtgggtgaggggatggaggaaggcgagttttcagaggcccgtgaagatatggctgcccttgagaaggattatgaggaggttggtgtggattctgttgaaggagagggtgaggaagaaggagaggaatactaa

SEQ ID NO: 3077 - DNA, 1476 bp, Homo sapiens; identical to SEQ ID NO: 1945
  source 1..1476: mol_type = genomic DNA

SEQ ID NO: 3078 - DNA, 3583 bp, Homo sapiens
  source 1..3583: mol_type = genomic DNA
attcccctccacttcttgcctgagccgcctgctcctcttggaaacacgttgagcctccccgctggagagggagccagaacagggaagaacggattcacacaggatggcttgcagaagacgctatttcgtcgagggcgaggcccccagcagtgagactggcacatccctggacagcccctcagcctacccccagggccccttggtgcccggttccagcctgagcccggatcactacgagcacacgtcagtgggagcctatgggctgtactcggggccgccggggcaacagcagcgcacgcggaggcccaagctgcagcactcgacctccatcctgcgcaagcaggctgaggaggaggccatcaagcgctcacgctcactctccgagagctatgagctctcctcggacctgcaggacaagcaggtggagatgctagaacgaaagtatggggggcgcctggtaacccgccatgcggcccgcaccatccagacggcgtttcgccagtaccagatgaacaagaacttcgagcgcttgcgcagctccatgtcagagaaccgcatgtcacgccggattgtgctgtccaacatgaggatgcagttctcctttgaggggcctgagaaagtgcacagctcctacttcgaggggaagcaggtctcagtgactaacgacggctcccagctgggagccctggtgtcccctgagtgtggtgacctcagcgagcccaccaccctcaagtctccggccccctccagtgactttgcggacgccatcaccgagctggaggacgccttctctaggcaagtgaaatcactggccgagtccatcgacgatgccctcaactgccgcagcctgcacactgaggaggcaccggccctggatgcggcgcgggcccgggacaccgaaccccagacagccctgcacggcatggaccaccgcaaactggacgagatgacggcctcgtacagtgatgtcaccctgtacatcgatgaggaggagctgtcgccccctctgcccctctcgcaggcaggggaccggccgtccagcaccgagtcggacctgcggctacgggctgggggcgcagccccagactactgggccctggcccacaaagaggacaaggctgacacggacacgagctgccggagcacgccgtcgctggagcggcaggagcagcggctgcgggtggagcatctgccgctgctcaccatcgagccacccagcgacagctctgtggaccttagtgaccgctcggagcgggggtcactcaagaggcagagtgcttacgagcgcagccttggcgggcagcagggcagtcccaagcatggtccccacagcggcgcccccaagagcctcccccgggaggagcctgagttgcggccccggccccccaggcccctggacagccacttggccatcaatggctcagccaaccggcagagcaagtctgagtcggactactcagacggtgacaatgacagcatcaacagcacgtccaactccaacgataccatcaactgcagctccgagtcatcgtcccgtgacagcctgcgggagcagacgctcagcaagcagacctaccacaaggaggcccgcaacagctgggactcgcctgcctttagcaacgatgtcatccgcaagaggcactaccgcatcggcctgaacctcttcaacaagaagcctgagaagggagtccagtacctcatcgagcgtggctttgtgcccgacacgcccgtcggggtggcccacttcctgctgcagcgcaagggcctcagccggcagatgatcggcgagttcctgggcaaccggcagaagcagttcaaccgtgacgtgctcgactgcgtcgtggacgagatggacttctctaccatggagctggatgaggccctcaggaaattccaggcgcacatccgtgtccaaggggaggctcagaaagtggagcggctcatagaggcgttcagccagcgctactgcatctgcaaccctggggtggtgcggcaattccggaacccagacaccattttcatcctggccttcgccatcatcctgctgaacaccgacatgtacagccccaatgtcaagcccgagcggaaaatgaagctagaggacttcatcaagaacctccgaggtgtggacgatggtgaggacattccccgtgagatgctgatggggatctatgaacggatccgtaagcgagagctaaagaccaatgaggaccatgtgtcccaggtgcagaaggtggagaagctcattgtggggaaaaagccgatcggatccctgcatcccgggctcggctgtgtgctctctctgccccaccgtcggttggtctgctactgccggctctttgaggttccagacccaaacaagccccagaaactcggactacaccagcgagaaatcttcctgttcaacgacctcctggtggtcaccaagatcttccagaagaagaagaactcggtgacgtacagcttccgacagtccttctccttgtacggcatgcaggtcctgctcttcgagaaccagtactaccccaatggcatccggctcacctcgtctgtccccggagcagatatcaaagtgttaataaacttcaacgcccccaaccctcaagaccggaagaaattcaccgatgacctgcgggagtccattgcggaagtccaagagatggagaagcacaggatagagtcggagctcgagaagcagaaaggcgtcgtgcggcccagcatgtcccagtgctctagcctcaaaaaggagtcgggcaacggaacactgagccgggcctgcctggacgacagctatgccagcggtgagggcctcaagcgcagcgccctcagcagctccctgcgggacctctcggaagccgggaagcgagggcgtcgcagcagtgcgggatcgctagagagcaatgtggaagggtccatcattagcagtcctcacatgcgccggagagctacatcaacacgagagtgtccatctcgcccacaccagactatgcccaactcatcttccctcctgggctccttattcgggagcaagagagggaagccccctccccaggcccacctgccctcagccccagccctggccacccccccacccaccggtggtcctgcctcacttgcagcactctgtggctggccaccacctggggcccccagaggggctgccgcaggccgccatgcacgggcatcacacccagtactgccacatgcagaaccctcccccgtaccaccatcaccaccaccaccacccaccccagcacatccagcacgcacaccagtaccaccacggcccccatgggggccacccagcctacggggcccatgcccacggccacccgccgctgccctcggcccacgtggggcacacagtgcaccaccatgggcagccccctgccccgccgccccccaccagcagcaaggccaaacccagcggcatcagcacaattgtgtagacagcctgggtaggggtcccaggctccctgaaacacctgcacaccacacagggcacgcccgggggtcgccagccgcacaccaaacccggggcacttctgttgccatctctcccctctgcccctcacggcccaac

SEQ ID NO: 3079 - DNA, 550 bp, Homo sapiens
  source 1..550: mol_type = genomic DNA
gtgcgtttagggcgaagacggagttgtaaacttcttaaaattcctctctcgacacttcgggaccggaagagtccttgaaccaaaatagctcggcgggcacttccggggccggcgcccagagttccgggagggtgcaggcaggagagggaaaggcagcagcggcggcagctggaggatgaagaaggagcatgtgcttcactgccagttctccgcgtggtacccgttcttccgaggcgttaccatcaagagtgtcattcttccacttcctcagaatgtgaaggattatttactcgatgatggaactctggtggtttcaggaagggatgatccaccaacacattctcagccagacagtgatgatgaagcagaagaaatacagtggtctgatgatgagaacacagccacgcttacggatgcgtattggatagcaatgaatagttctctgaaatgtaaaaccctcagcgacatctttctgcttttcaagagttccgatttcatcactcgtgacttcactcagccgtttattcattgtactgatgattctccagat

SEQ ID NO: 3080 - DNA, 480 bp, Homo sapiens
  source 1..480: mol_type = genomic DNA
gggatgctggggcgcgagcgggactgttgactaagcttcgttactgggccctggaagcgaggttcaaaatgagcctgtttggaacaacctcaggttttggaaccagtgggaccagcatgtttggcagtgcaactacagacaatcacaatcccatgaaggatattgaagtaacatcatctcctgatgatagcattggttgtctgtcttttagcccaccaaccttgccggggaactttcttattgcaggatcatgggctaatgatgttcgctgctgggaagttcaagacagtggacagaccattccaaaagcccagcagatgcacactgggcctgtgcttgatgtctgctggagtgacgatgggagcaaagtgtttacggcatcgtgtgataaaactgccaaaatgtgggacctcagcagtaaccaagcgatacagatcgcacagcatgatgctcctgttaaaaccatccattggatcaaag

SEQ ID NO: 3081 - DNA, 8073 bp, Homo sapiens
  source 1..8073: mol_type = genomic DNA
cagcgcgcgctcctgcagccccggcggagtcccggcggggagcgcccgcgtaggcaggcacccggggcagccctccgtcctcgccgcgcggcctgagaacccctgggccctgggcgagggggctgggctgtgcagcccccgaggctaactgggcgggatcgcagctgcaggggttgtgcgagcagccacggcggcacctgtgccctgcgggcacccaccctgcccctgccgaggcaggcgcccaccgccggcggtgatgcggctgtgaagccctagtcgattaacgtgacagtgtcaggtggacccacagccatcccacctccccctctggggagtgctgagagtgaggcagcatggaggagaggaagcatgagaccatgaacccagctcatgtcctctttgaccggtttgtccaggccaccacctgcaagggaaccctcaaggctttccaggagctctgtgaccacctggaactaaagccaaaggactaccgctccttctatcacaagctcaagtccaagcttaactactggaaagccaaagccctctgggcaaaattggacaaacggggcagtcacaaagactacaaaaagggaaaagcgtgcactaacaccaagtgtctcatcattggggctggcccctgtggtctccgtacagccatcgacttatccttactgggggccaaggtggttgttattgagaaacgagatgccttctcccgcaacaacgtcttgcatctctggccattcaccatacatgatctacgaggtctgggtgccaagaagttctatggcaagttctgtgctggagccatcgaccatatcagtatccgtcagctccaactaatacttttgaaagtagccttgatcctaggcattgaaatccacgtcaatgtggaattccaaggacttatacagcctcctgaggaccaagagaatgaacggataggctggcgggcactggtgcaccccaagactcatcctgtgtcagagtatgaatttgaagtgatcatcggtggggatggtcggaggaacaccttggaagggtttcgtcggaaagaattccgtggcaaactggccatcgccatcacggcaaattttatcaaccgaaatacaacagcagaagctaaagtggaagagatcagtggtgtggcttttatattcaaccaaaaatttttccaggaactgagggaagccacaggtattgacttggagaacatcgtttactacaaagatgacacacactatttcgttatgacagccaaaaagcagagtttgctggacaaaggagtgatactacatgactacgccgacacagagctcctgctttcccgagaaaacgtggaccaggaggctctgctcagctatgccagggaggcggcagacttctctacccagcagcagctgccgtctctggattttgccatcaatcactatgggcagcccgatgtggccatgtttgacttcacttgtatgtatgcctccgagaacgccgccttggtgcgggagcagaacggacaccagttactagtggctctggtcggggacagcctcctagagcctttctggccaatgggaacaggaatagcccggggctttctagctgctatggactctgcctggatggtccgaagttggtctctaggaacgagccctttggaagtgctggcagagagggaaagtatttacaggttgctgcctcagaccacccctgagaatgtgagtaagaacttcagccagtacagtatcgaccctgtcactcggtatcccaatatcaacgtcaacttcctccggccaagccaggtgcgccatttatatgatactggcgaaacaaaagatattcacctggaaatggagagcctggtgaattcccgaaccacccccaaattgactcgcaatgagtctgtagctcgttcaagcaaactgctgggttggtgccagaggcagacagatggctatgcaggggtaaacgtgacagatctcaccatgtcctggaaaagtggcttggccctttgtgcaattatccatagataccgccctgacctgatagattttgattctttggatgagcaaaatgtggagaagaataaccaactggcctttgacattgctgagaaggaattgggcatttctcccatcatgacaggcaaagaaatggcctccgtgggggagcctgataagctgtccatggtgatgtacctgactcagttctacgagatgtttaaggactccctcccctctagcgacaccttggacctaaatgccgaggagaaagcagtcctgatagccagcaccagatcccctatctccttcctaagcaaacttggccagaccatctctcggaagcgttctcccaaggataaaaaggaaaaggacttggatggtgctgggaagaggagaaagaccagtcaatcagaggaggaggaagctcctcggggccacagaggagaaagaccgaccctggtgagcactctgacagacaggaggatggacgttgccgttgggaaccagaacaaagtgaagtacatggcgacccagctgctggccaaatttgaagagaatgcgcccgcacagtccatcggcatacggagacagcaacgggaaaaggagtgttctcggacctgccccaaaaaagtgatcaccctgtctcctccccctactccacctccctgtcgggcacatggcggccagcagacatacagggatcttgatgctgacaaccgtggcaagcagagcccccaccatgagaggccagagcctgaacctcctcgtcgattttttgtcgaccagtgggagctttctcttagtctccgctcctctgcccgccccgcctctccctcctccgactccctccgacagaagtatataaagatgtacacgggcggagtgagctcattggctgagcagatagccaatcagcttcaaaggaaagaacaacccaaagcccttctagacaagaaggaactgggctccatgaagaaggagttcccgcagaacctgggaggcagcgacacatgctacttctgccagaagcgggtctacgtgatggagaggctgagtgccgagggcaagttcttccaccggagctgcttcaagtgcgagtactgcgccaccaccctgcgcctctcggcctacgcctacgacatcgaggatggtaaattctactgtaagccacactactgctatcgactctctggctacgcacaaaggaagagaccggcagtggctcccctgtctggaaaggaggccaaaggacccctgcaggatggcgccaccacagatgcaaacggacgggccaacgccgtggccagctccactgagagaaccccaggtagcctcacttccttgtttggctgggtggcgcgtcactccctcggcctctgtgacaaggccaagggcatgagccagcacctccaaagcaacatttcttcattcgggcaacaagtggcccaaaaccctctggactcctttttcatgtgccagctgcttgcgttcggagtcccctttctctatggcctgtcggaggtgctggtgcaaatcagaggggagttccactggcaggctgtggcccagtgatggggccgtccggtgggcggcagagccgtgaagtgctgtccctcagccccgtcccgcaccatcacacctgagggcggcccaggtcctgtgtaggtagacaggagctcgcaggcgctcagacactgctcccatcacccgccctggtgaggccaaggccactcggccttcatgcagtttgcttccaagctcctctgacggcctggagctgtgttgattaagccccgtggtcttgttttgggttcaccttcacttaagattctgcgtcctgttccctgtcactgtgtgtggatgagctgtggctgctctcctgtctgccctgcaccgtgatgggacatgccctgtcctgaccccttggccactgggcttgtcatgaggtccaagccctcacctgtcccactttcatgaccacttccttgtgttgggaggtgaacagtaccatctctacctctacaaacacatttattcttgtcatagcatgacaggactcgcagggtttgtgggtaccaggcctgttgggaagaattatgtagattttccttaaaatggcctctctcagcaacttgtaaaacttgcctgtgagatgcgtccagagctccacaaactgctgggtgttctgaatgtcccacatacagctccaggtggttcacggcccagggtcactgtggcaagagggggccagcagggctgtgtttctgtctgtcacactttcctcttgttcaaaacacatgtatctcaagcagctatatacaaaactcataaaaattaaagatggtcagccagtgccaggaaatgtggaggaggagttggtcatagaatttccatggtgggacaagagaattacccatttggccttcaacgagaggttcccagagttgcatcctttcccttccctaacagctggttcatgtaggccttgtggtgctcattctgggagagggaagatgcgcccagaggctaggcggtgtgccctgggagccatgagaacccagccaagccaggtgaacgcagcttctgctactgcacgtgcccttattatcatctgagcaagttttttaagtaccctgcaggtgggaccaacattttatagccatgtttcaaccattaatgacttttaaaccttctacaatcttgaagatctttataatccatctttctcgtgaagtacccacaggcctttgcagctgacactctcagagcatgggcagaatcactggtagagaaaaataaccaaaggggtctagacagagactttggctttatgctatagaatgtacattcagttggagagagcaccaccttattagtctgggccctatttcatcagagatggattttgtgaggaacctgactactcagtagaacaactcaaaagaaactaaactttccatttcggtttggagtacagaacattttttaaaaagaattaaacacagtgaagtttaggttattcctgaatgacgccaggtttgctgactttcccatctggtcgaggttgccattcttgccatctaattgaaagtataatgggtttcaggtttttaggagttctaaagaattacgctttccatagagaataagaggaagaatgttctacatagtggggagagaggatgagggttggcagtgtggttaaagagcaaaaccaccaagaaagagtcagagccctgaggacgtctctgtccgcgtggttcttgattctgagccagaaggtgacttggtatagcacgggagttcaaaatgtggtgtcccaaaggaatcacagtgtggacctttacagttaatgacaggcactgtcccccagcttgggtggcaaaggccagtgagctcagggctgaggggcttaccctccggcagctcagagtccagaacatcttagtccggcagctcagaatcagggcaccttgcctcccggtgagctcactctgctgctagccttggtagaaaaggaacaggattatgggcagtattttatggctggcatgaaatagatacccttttctcctttgatagagatttccttctttaaatatgaaactgaagctttgaggacttaactagacttccttttgaaaagtttcagaaaagctcaggtgtggccaggcacgatggctcatgcctgtaatcccagcactttgggaggccgaggcgggcagatcacgaggtcaggagatcgagaccatcctggctaacacagtgaaaccccgtctctactaaaaatacaaaaaaattagccgggtgtggtgtggtggcggatgcctgtagtcccagctactcgggaggctgaggcaggagaatggcgtgaacccaggaggcagaggttgcagtaagtcgagatcacaccactgcactccagcctgatgacagagcaagactccatctaaaaaaaaaaaagaagaaaagggaaagctcaggtgtttcagggtcccagaatgtatgttgtagagaacagtcattagctcaggcccatggtaaccgcctctactgtgcactcgaccagtagaggcgatgatgacggcacttgattctcttgtgtgtaactcagccatcctccctagacccacgtcccaggaggcagggctggtaaagctatgactgggcagtgtttgacccagctgtgcttttactctgtgcctcctctttatattgtggcatttctctcttctcctttatgttctttttctttttatgccaaaattcttgctgttgccaaaacaaaaacaaaaaaacacacccacacccaattacaacctgcagttcaaagaaccactctaggtcggctttaaagtattgtctttctctggtaaccaaatctgtacctgctgcctaatttagtgtttgggggcattgtttacagtatttctgtttgtaatgtgcttttaatatagaaatcctcttttttgttcttaaatctatgaatgctgtgtttccaagcttatacttactactgcgtgttagtggtcctggcacagattttcttaccctggccttgtactgtccaccatgactttagaaaaagcttgaacaataggcagagaaaggaaatccccaaaagggattattttccccttggacatgagaagtttagttacaggtttcttgaattcgtttttgtccagaggaatcctctttttatctgatacggttgatgaccaaaaatgaagtagggaagccgaaggcatagccggaaaggaacagaagagctttttccccgagtgctcatcaccgggttcattaccggccagagatggacggggagaagcacgttagtttcctgtcatcttatggaaaagatgatctgaagttaaaaaatgaaggtcacaagtggcagttgcctgacccctgtccccagacattccttgcccgataaccatgaggttccatagttcggatcctgaatgggcctttaggaaatgcaggcctttcccacaccagctagaagggtagccaggcagtagaatttcattcaaccctagggttcccacctgacagagggaagttcggaagtcttactgcttcccacgtccccttcccttctaggcatttatggaaagctttttagtggagcaagagaattctacaatccagcttacctcccaccttaccccaagagccatagctgacggtgatgtgtgaatgtttatatataggtacacgtttgtatgtatatagatctaattgcacatatatgggtagatatttatttatatgttgcaccctaaattatagtaattataataattgtgaagctgtttctaaagctgcttgttcctggttctgagaaccacgggagcctcacactggggagccgtactccaggtcagggctttggggatgcacagcagcgtacgggcagcacgcctgtaaggaggtgagtgggtgggtgtctcagaaaatgggcagcacacccccaagaaagggccccaagagcagactaggaacgcagggggctgctgctgccaggacaccacggagagccgggcacccgcctcacatgtctcctgtctggctccactgagttagccgtttgagcccactcctatcttttggtggttagtgcatcttcagctcttttctgcaagacactggaacattcctaggctgtcccaaaaggagttccaccatagcctttaaggtccgagcagggcaccaaggggttcacttttctcccgagccattcagcttggggtgcctgcgggaggggcggacagccagccggcttcccggcggcggtacgagagcccaacaggagaggattagctgtgccaaggaacacgccactgctgcctgtctactgcccgccttctctccacttccatttttgcctttgtttttaacttgtgctcttgtgagttcttggtgtgtttctttgtgagtttttatttaattgtgtaactttgtttttgccgttgactgtgaaaccaagttgtcgtgcttttaattttttttttaacaaatgttacattcttatttaagagaataaattccaaacaatcttcgg

SEQ ID NO: 3082 - DNA, 1538 bp, Homo sapiens
  source 1..1538: mol_type = genomic DNA
aagcgctgaggcggtggggcccacagccatggcggagcctgtgcaggaggagctctcggtcctggccgcgattttctgcaggccccacgagtgggaggtgctgagccgctcaggaccagaaaataacacagagaaaaatgaaaattggtaaggactgacatggctggctcagtagcttttcaagactttccccctggactaccaacatgtttctttcctgtggttccctgcaccagagaggacccgagacagatgggaccgtgttcagaattcacacaaaagctgaaggatttatggatgtggatatacctctggaattggtgttccatttgccagtcaattatccttcatgtctacctggtatctcgattaactctgaacagttgaccagggcccagtgtgtgactgtgaaagagaatttacttgagcaagcagagagccttttgtcggagcctatggttcatgagctggttctctggattcagcagaatctcaggcatatcctcagccaaccagaaactggcagtggcagtgaaaagtgtactttttcaacaagcacgaccatggatgatggattgtggataactcttttgcatttagatcacatgagagcaaagactaaatatgtcaaaattgtggagaagtgggcttcagatttaaggctgacaggaagactgatgttcatgggtaaaataatactgattttactacagggagacagaaacaacctcaaggtgccaaaaagttaaatgttgagtatgaatctggctattttctgctttaaatggtgtgtctttaagtgtgttttataacaatgggatagattaattattaagatgtttctgctttcattattacaatcttaatggatcttccttttctttttaaagaatgtctgactgctaattacaagtacaaacttgcaaagcttgaagaataagattgcattttaaaaatcatgtcacttaataaagtgacaggttatttaaaagctctgtggcacatgagtgtttgtttctgtaattagctatgagcttgaattttataaatgtgcactaaaagtttgtgcatattaatatttcttcccatagttaggcacagcaaggtgtgtatttgtggatagtctgcaagatttgtaactttctggctgttaaaaatacattctgacactttaatttggtatctataatacctggaaagaggagcttgtctgttataaccgagatttcatgttagtagaagtagaatcattagggctgtcaacttgtcacctcctacctaacttttgctttccacctgacttgtctcagcagttgctttcaaaatcatcatcttcttcagatttttcaagttcttattctaaactcatctgacctgttttaggtgggacaagatgaggaaaactgttttttatattttaaatattagaagagctacaaatcaataggttttatactttcagataggttaggtcatgaataattacatttgaatttatttaagacaaatttagtgtgaacagtgaatttatttaagac

SEQ ID NO: 3083 - DNA, 2794 bp, Homo sapiens
  source 1..2794: mol_type = genomic DNA
agatatccaaggggaggcgtccaggaggtagttgggtttccaagtctggggttggaggggcaggtccaggctgcctgagggtaggggtagcatttaaggccatgcggtggggggagtggttcacggtggccctcaggaggaaggaaggaaaaacagccgtctctggcctctggcctctccaggctctccaccctgggggcagaatcaattctgtagccctctagcaccggcagtggctccgcagtcagctgggcagtggccgtgactgggtcactctaccctaggaagtgagtgcaggggctgctggagagccagaggctggcagcgactatgtgaagttctccaaggagaagtacatcctggactcatcgccagagaaactccacaaggaattggaggaggagctcaaactcagcagcacggatctccgcagccatgcctggtaccatggccgcatcccccgagaggtctcggagaccttggtacaacgcaacggcgacttcctcatccgggactcactcaccagcctgggcgactatgtgctcacgtgccgctggcgcaaccaggccttgcacttcaagatcaacaaggtggtggtgaaggcaggcgagagctacacacacatccagtacctgtttgagcaggagagctttgaccacgtgcccgccctcgtgcgctatcatgtgggcagccgcaaggctgtgtcagagcagagtggtgccatcatctactgcccggtgaaccgcaccttcccactgcgctacctcgaggccagctatggcctgggacaggggagtagcaagcctgctagccccgtcagcccctcaggccccaagggcagccacatgaagcggcgcagcgtcaccatgaccgatgggctcactgctgacaaggtcacccgcagcgatggctgccccaccagtacgtcgctgccccgccctcgggactccatccgcagctgtgccctcagcatggaccagatcccagacctgcactcacccatgtcgcccatctccgagagccctagctcccctgcctacagcactgtaacccgtgtccatgccgcccctgcagccccttctgccacagcattgcctgcctcccctgtcgcccgccgttccagtgagccccagctgtgtcccggaagtgccccaaagacccatggggagtcagacaagggcccccacaccagcccctcccacacccttggcaaggcctccccgtcaccatcactcagcagctacagtgacccggactctggccactactgccagctccagcctcccgtgcgtggcagccgagagtgggcagcgactgagacctccagccagcaggccaggagctatggggagaggctaaaggaactgtcagaaaatggggcccctgaaggggactggggcaagaccttcacagtccccatcgtggaagtcacttcttccttcaacccggccaccttccagtcactactgatccccagggataaccggccactggaggtgggccttctgcgcaaggtcaaggagctgctggcagaagtggatgcccggacgctggcccggcatgtcaccaaggtggactgcctggttgctaggatactgggcgttaccaaggagatgcagaccctaatgggagtccgctggggcatggaactgctcaccctcccccatggccggcagctacgcctagacctgctggaaaggttccacaccatgtccatcatgctggccgtggacatcctgggctgcaccggctctgcggaggagcgggcagcgctgctgcacaagaccattcagctggcggccgagctgcgggggactatgggcaacatgttcagcttcgcggcggtcatgggtgccctggacatggcccagatttctcggctggagcagacatgggtgaccctgcggcagcgacacacagagggtgccatcctgtacgagaagaagctcaagccttttctcaagagcctcaacgagggcaaagaaggcccgccgctgagcaacaccacgtttcctcatgtgctgcccctcatcaccctgctggagtgtgactcggccccaccagagggccctgagccctggggcagcacggagcacggcgtggaggtggtgctggctcacctggaggccgcccgcacagtggcacaccacggaggcctgtaccacaccaatgctgaagtcaagctgcaggggttccaggcccggccggagctcctggaggtgttcagcacggagttccagatgcgccttctctggggcagtcagggtgccagcagcagccaggcccggcgctatgagaagttcgacaaggtcctcactgccctgtcccacaagctggaacctgctgtccgctccagcgagctgtgaccccagggacatttcccctctgcagctgcggacagcgtcaggggcagaggggcacacaactttccccagagcaccccaaggacactgtgatcaacccgagaatgttctgggttcaactcaagcatctcccttgcacctccagggtcctgcgtggactctgggttccatcccacctgctacatgctcaccaggtctccattgaggaagaacaggaacgccggttcccccaccagcttttgctgctccccttcctgctggggttccctgttttcgagccatgggaggcaggctgctcacgcctcctcactctctgtctgtccctcaccaacaccaaggcctccatctcactgtaaataagtctctgttctgtaaatagatgtacagaagccatgttatttctttcatataataaacttttatgactcttt

SEQ ID NO: 3084 - DNA, 582 bp, Homo sapiens; identical to SEQ ID NO: 3048
  source 1..582: mol_type = genomic DNA

SEQ ID NO: 3085 - DNA, 1017 bp, Homo sapiens
  source 1..1017: mol_type = genomic DNA
tgtggccggaggctgatcaggtactgtggacgggcggcggagttcgggagacaggggcagggcggcatcggggagctgcgggacggggcggggaggaggcccgaggtctgagccacccgtgaggtctcggcgcggaggcctggacagctgggggtggcggcgttggtctcccgaactggagggaggccgggccttcccgggctgtggtgggcgcccgcgccccgtggaaggcggaggcgtgagtcggggcgtcagagacgttgccattctttgtcagcggaaaagatcgtcgtctgcgcacagtcacctgaggtttaggaactcgtggaactggaaaccgagtcgcaggagactaagagttgcgagtctccccttagagaattcagaaacaagcgtagacagcatcgtcagaaacacgagcgtgacgacaccggcctccccgtgccgagtccacgcgtgtgacgcgggtgcatacacctgcgtccgtgcaagagggtgacagcaacacactcaaggcgcttctcctgggaatggagcaggagaagagatggggagcatcgcatagatggaactagacctttttcttgggttggatgatgtgttcccgcgtctactacatgtgttctagaacagatcagacattttgtaatgatgcctgaaataaacactaaccacctcgacaagcaacaggttcaactcctggcagagatgtgtatccttattgatgaaaatgacaataaaattggagctgagaccaagaagaattgtcacctgaacgagaacattgagaaaggattattgcatcgagcttttagtgtcttcttattcaacaccgaaaataagcttctgctacagcaaagatcagatgctaagattacctttccaggttgttttacgaatacgtgttgtagtcatccattaagcaatccagccgagcttgaggaaagtgacgcccttggagtgaggcgagcagcacagagacggctgaaagctgagctaggaattcccttggaagag

SEQ ID NO: 3086 - DNA, 2117 bp, Homo sapiens
  source 1..2117: mol_type = genomic DNA
ggacccaggggttacgacccatcagcccttgcgcgccaccgtcccttctctcttcctcggcgctgcctacggaggtggcagccatctccttctcggcatcatggccgccctcagaccccttgtgaagcccaagatcgtcaaaaagagaaccaagaagttcatccggcaccagtcagaccgatatgtcaaaattaagcgtaactggcggaaacccagaggcattgacaacagggttcgtagaagattcaagggccagatcttgatgcccaacattggttatggaagcaacaaaaaaacaaagcacatgctgcccagtggcttccggaagttcctggtccacaacgtcaaggagctggaagtgctgctgatgtgcaacaaatcttactgtgccgagatcgctcacaatgtttcctccaagaaccgcaaagccatcgtggaaagagctgcccaactggccatcagagtcaccaaccccaatgccaggctgcgcagtgaagaaaatgagtaggcagctcatgtgcacgttttctgtttaaataaatgtaaaaactgccatctggcatcttccttccttgattttaagtcttcagcttcttggccaacttagtttgccacagagattgttcttttgcttaagcccctttggaatctcccatttggaggggatttgtaaaggacactcagtccttgaacaggggaatgtggcctcaagtgcacagactagccttagtcatctccagttgaggctgggtatgaggggtacagacttggccctcacaccaggtaggttctgagacacttgaagaagcttgtggctcccaagccacaagtagtcattcttagccttgcttttgtaaagttaggtgacaagttattccatgtgatgcttgtgagaattgagaaaatatgcatggaaatatccagatgaatttcttacacagattcttacgggatgcctaaattgcatcctgtaacttctgtccaaaaagaacaggatgatgtacaaattgctcttccaggtaatccaccacggttaactggaaaagcactttcagtctcctataaccctcccaccagctgctgcttcaggtataatgttacagcagtttgccaaggcggggacctaactggtgacaattgagcctcttgactggtactcagaatttagtgacacgtggtcctgattttttttggagacggggtcttgctctcacccaggctgggagtgcagtggcacactgactacagccttgacctccccaggctcaggtgatcttcccacctcagccttccaagtagctgggactacagatgcacacctccaaacctgggtagtttttgaagtttttttgtagaggtggtctagccatgttgcctaggctcccgaactcctgagctcaagcaatcctgcttcagcctcccaaagtactgggattacaggcatcttctgtagtatataggtcatgagggatatgggatgtggtacttatgagacagaaatgcttacaggatgtttttctgtaaccatcctggtcaacttagcagaaatgctgcgctgggtataataaagcttttctacttctagtctagacaggaatcttacagattgtctcctgttcaaaacctagtcataaatatttataatgcaaactggtcatttttgggattttgtttttgagactcattctgtcaccccggctggagtgcagtggcttgatcttggctccctgcaacttctgcctcctgggttcaggcgattcgattaacaattggagacgagtcgtgcagaggaaagaagtaacttagaatctaatctttattaacctgggatatcacagaaaatacttgggcctgccacttgtatttctttgtcctcaatactgaacactagacacatttgaaaccttcctcagaaggaaacaaaccaactggttatgcctgggtggtggcatggaagatgcccattgttgcccaatttgctaataagtattttgaaattagaaatgaaacatgaggtccaagcctgtccagttccctacccaacccattcctcctccctggaaaaaagaaacccgtatcatcttccaaatttctgattcatcactgccacttaaaaa

SEQ ID NO: 3087 - DNA, 7242 bp, Homo sapiens
  source 1..7242: mol_type = genomic DNA
cacaaattcgcagcaggcggctggggcggcggctggggcagcggctgcagcagcggcggacgctctgcattacccagtcttgcgtcctcggcaggcgcccgaagctgagtgcgcatcctctaccgcacccaagcttcgtctgtctcgtcaagctcttcatgctgcccaactaaaaggaaaacatgggcacaggggattttatctgcatttccatgactggaggggcgccctgggggttcagattgcaaggtggcaaggagcagaagcagcccttacaagttgcaaagattcgaaatcagagcaaagcctctgggtctgggctctgtgagggagatgaagtggtttccatcaatggcaacccttgtgcagatctcacctaccctgaagtcatcaagctcatggaaagcataacagactctctccaaatgctcatcaaaagaccatccagtggaataagtgaggctttgatatctgaaaatgaaaacaaaaacctcgagcatctcacacatgggggttatgtggaaagtaccaccctgcagattcgaccggccacaaagacccagtgcacagaattcttcctcgcccctgtcaagactgaagttcccctagctgagaaccaaagaagtggtcccgactgtgcaggcagcttgaaagaagaaacaggcccgagctaccaaagggctccccaaatgcctgactcccaaagaggacgcgtggcagaagagctgatcttaagggagaaggtagaagcggtacagcctgggcctgtggttgagctgcaactgtccctttcacaggagagacataagggcgctagtggccctttagtggctctcccgggagctgaaaaatctaagtctcctgacccagaccctaacttgtcacatgacaggattgtccacataaattcgatccctactaatgagaaagcagaccctttcctgaggtccagcaagataatccagatctccagtggcagagagttgagagtgatccaggaaagtgaagcaggagatgcgggactgccccgggtggaagtgatcctcgactgctctgacaggcagaagacagaagggtgcaggcttcaggcaggaaaggagtgtgtggattctccagtggaaggagggcagtcagaagcacctccttctctggtatcctttgccgtctcatcagaaggcacagagcagggagaagatccacgctcggaaaaagatcacagcagacctcacaagcaccgagcgcggcatgcacggctcaggaggagtgaaagcctgtcagaaaaacaagtgaaggaagcaaaatctaaatgcaaaagcattgcccttcttctaacggatgctcccaaccccaactccaagggggtgttgatgtttaagaagcgacgtcggagggccaggaaatacaccctagttagctacggtactggcgagcttgagcgagaggcggacgaggaggaagaaggtgacaaggaggatacatgtgaagtagcatttcttggtgcaagcgaatcagaggtggatgaagagttattgtctgacgttgacgacaacacacaagttgtgaactttgactgggattctggactggtggacattgaaaagaaactgaacagaggggacaagatggagatgttaccagacaccacaggcaagggagccctcatgtttgccaagaggagggagagaatggatcagatcacagcccaaaaagaagaggacaaggtaggtggaacgccaagcagagaacaagatgctgcccagaccgatggcctgagaaccacgacttcttaccaaagaaaggaggaagagtcggtaagaacgcagagctctgtgagcaaaagctacatcgaggtgagtcatggtcttggccatgttccccaacagaatggcttcagtgggacatctgagacagcaaacatccagaggatggtccccatgaatagaacggccaaacccttcccagggtctgtgaatcagccagctacccccttctcgccaacccgaaacatgacgagtcccattgctgactttcctgcacctccaccttactctgcagtcactcctccccctgacgccttctccagaggggtttcaagtccgattgctggcccagcacagccccctccatggccccagcctgccccgtggtcccagccagccttttacgattcgtctgagcgaatagcttcccgagatgagaggatctcagtgccagcaaaaagaacaggaatattgcaggaggccaaaaggagaagcacgacaaaacccatgtttacttttaaagagcccaaagtaagcccaaatcctgaactcttgtcactccttcaaaattcagaaggcaaacggggcactggagctggaggtgattccggaccggaagaagactacctcagcttgggggcagaggcttgtaatttcatgcaaagctcctctgccaaacaaaagacccctcctcctgttgctccaaaacctgcagtcaagtcctcatcctcccaaccagtaactccagtttccccagtctggtctccaggagtggctcccacccaacctcctgccttccccacatccaacccatcaaagggcaccgttgtctcctccatcaaaatagcccagccttcttaccctcctgcccggcctgcaagtactttgaacgtggctggtcccttcaaaggaccacaagcagcagtagccagtcagaattacacacccaaaccaacagtttccacaccaacagtcaatgctgttcagcctggtgcagtgggaccatccaatgagcttccaggaatgagtgggagaggagctcagctctttgctaaaaggcagtcgagaatggagaagtatgtggtcgattcagacacggtgcaggcccacgctgctcgagctcagtctcccactccatctctcccggccagttggaagtactcctccaatgtccgagcacctcctcctgtggcctataatcctatccactcgccgtcttacccactggctgctctcaagtctcagccatcagctgcacagccctccaaaatgggcaagaaaaagggaaagaaacccctcaatgcattagatgtcatgaagcaccaaccgtatcagctcaatgcatccttgtttactttccaacctccagatgcaaaggatggcctcccccagaagtcatcagtcaaggtcaattcagccctggccatgaagcaagctcttcctccccggccagtgaatgctgcctcacctacgaatgtgcaggcttcgtcagtgtactcggtaccagcctatacctctcctccttccttctttgcagaggcctcctcaccagtcagtgcatccccagtgcctgtgggcattcccacctcgccaaagcaagaatcagcctcatcatcttattttgtggcaccaaggccaaagttctcagccaagaaaagtggtgtcacaattcaggtgtggaaaccatctgttgtggaagagtaatcttgtagctgaagctgagtgtccactttgcttgaaatgaattgtttgcagtgtttcttgagtccctgagaatgcctagcaaagtcctcaacttacttaatttcagatatgtcacctcctaatctgggtccaaggagtataatatttttaatgagtcaaaaatccaactcagattgacctaaaatatatttatcttctttgcacacttaaaaaatccaggagcaccccaaaatagacatgtaccgttatattaagtaagcaggagacttaggatttgtgctgtagccacaagaaagacagtgatcagtgatatcaaacatcaggaatcagcctttatgtaacataacagctgtcctcctatggtgaaaggttcaaatgtagtgaaggtataacctatattgactgagatttcccttttaggtagtgccttatctctattactagtgttaaaggaataaggaatctatgaaggacagggagcagctctggtctgtcaatctcagccacctgtttgatatcacagagaagatactcggaggattgttggaatgtatatagtttagtaagaagtgggtaagaaagagggtcttaattactgagcacttattatgtattaggttctttgccagatgtttttacatatataaactcatttcagaaaacttatttaaagtaaatggggccgggtatggtggttcatgcctggaatcctagcactttgggaggctgaggtaggaggactgcttgaggccgggagttggagaccagcctgagcaacatagtgagaccctgtctcaataataataataataatagtaataatgaagtaaatgggataaggaaagaaggataattatctttaaaggttgattcccaccctccctccccagttacttaaggaactaagtgagtacatctccagttgcccatgaaagcataagtttgttttcctcagctgaggcaagtggtagagtatacaggataacgaagtaacatgtaaaaggcaggacgcacataaaggtgtacatggctattgtttcacctggagaaaccacatgattgggacctgaaggtttactgactgactacaggggctgattgtgaagcacgaggaaccccatgtgtgtggagactgtagggtgagagcacacaattattagcatcatttctgagtgatctcacagattttttttcttgtgtttgctttgctttttgacaactgcttctcccacgttccttgcaattctattctctcaccttcactttactatttgtattcgatggaccaggataattcaggcaaggttaccttgtaaactttaattggccacacaccatgttgtcacccagctggctatgaagtgaataatggtactgaaagtaaacctgaagacctttctcagatctattttaagtctgagtctgaccaaccatggaaaatattcgacatgaattaatgtagagaactataaagcatttatgacagctccaagaaaaatcatctactctatgcaggagatatgtttagagacctctcagaaaaacttgcctggtttgagggtacacagtaccattttaatcttctgaaaatatctgtattcctgctctttttctgctgtcactgtcaatctgctatatttttcactatcctattaaaatattactgtctcctttatctgttcaatgtccatattttaaaaaaatcttccttgtatgagctattctgatctaaataatttctctgatatttctctatatggctcccacaacaatttcattgttgttagcatatctatttctccatacattgtaaaactgtaatccttaggtatttctaaaacataaagaggagaattaagtcagctgcagaacaatggggctgattcttctgctttttctctggaaaatctttcattgcttttggtggaaatttacctagaggttacaaccacaggatgtagcttggtctcttatttgcctttttgggaaaccaattaagattaatacaggataaaggaaaaaagcaatctattcattatataacacagttgtttgtattacttgttccctgcaaaggaaatctgttgaatgcttgcattttgaattcttttctaatagaacaaccaaaaaaggcttcttatggtgcagcaggaaaaaagatcatttttatagctttgcattcttaacatagcatttaaagagcggcatgaattagaggaaagacatggaacacacaggtagtcggtttgagatcatcggcttaaaagtatcctaggatggtaatgacccagaagtatttccagttgtctagtggtgtggtatgcaggaatgagaagtgttttctttccatttcctgttggacaggtggcaatcttagcagagccactatttggagttgataactaaagatgcaaataacatgactatgccttctggtcatcctaggactatttggagttctccaaaaccttgtaagaggcatgtcaggcatgcagtaaaagcatctacaacttcagctgggcactggcagcataggtctcatcttggaccatacagtcccactttatagaagagggtggaagttctccaaaacaatatccacaacaaagtctgacctcactctgagggagatgggaagtgggaggaagaaggactaaccagctccctggagtaagaggaatttgctttccctgtctgcccaccaggggctatatgtgccacctttcaggttggggccaaggaagtgatgtcagtgtgacagaagggagagttagacctccagacgtcagcctccctcccatggggtacattttcaatctgagtgttgttgccttagctgtgttggtattagcttgattggttggtccgctggttatgaggtgtagggaggcagtttttgtttagtttttaggactttgcctcttcctttgtccttagcataatttctaggcagagcatccacgaagtcggttttcattgccagctcaagagcgacaatcatttacgagttcctatgttatgttaggtgccttatgtatattatcccaaatccactgcatggtttaaatacaggcactggaatataaatgaaaaaggtcattacagtcactgactttctgcaggaccttaaacatttctctttccacaagtttccccttaatcatgtgtcaaacctctcttcctgacgggaatgttgtgctataatgaatctgcataacgcttgggattctaggaggaaggaaggttccatggacatgtaagtacagcatattcccctcagtcttctaggagggcagagtgaatcccagaactggtaagattgggaatctgagcattgccactttaatcttagaatatttatcattttgacacatcctgttttttagagaggaaaacaaacacagtttctgcattggtagtgtaaagcataccttgttaggaacgtgttttgtaagacacatttgggttgtcactctagagcatgtcaaactttgtacttcaaaatatatttagtatgattgttagtggtaacatatatcaaggctttgaattaactgttttatttaattttcacaagaagcacttattttagccataggaaaaccaatctgagctacaaatagttctttaaaataagcccaggttatttagctattctagaaagtgccgacttctttcaagaagcaggcattgtaggacagctgagaattatcacatagcctaaattctagcctggcagcaagagtcacatctgagatgtccaaaaaaaaaaaaaaaa

SEQ ID NO: 3088 - DNA, 701 bp, Homo sapiens
  source 1..701: mol_type = genomic DNA
cagaggagggggctctgctggggagaggggctcagtctgttcttgtgaggctgagggtctggggtcgcctgcgaggccgctggccaggcctgagcctctgccaccatggccattgtgcagactctgccagtgccactggagcctgctcctgaagctgccactgccccacaagctccagtcatgggtagtgtgagcagccttatctcaggccggccctgtcccggggggccagctcctccccgccaccacggccctcctgggcccaccttcttccgccagcaggatggcctgctacggggtggctatgaggcacaggagccgctgtgcccagctgtgccccctaggaaggctgtccctgtcaccagcttcacctacatcaatgaggacttccggacagagtcaccccccagcccaagcagtgatgttgaggatgcccgagagcagcgggcacacaatgcccacctccgcggcccaccaccaaagctcatccctgtctctggaaagctggagaagaacatggagaagatcctgatccgcccaacagccttcaagccagtgctgcccaaacctcgaggggctccgtccctgcctagcttcatgggtcctcgggccaccgggctgtctgggagccagggcagcctgacgcagctgtttgggggccctgcctcctcctcctcctcttcctcctcctcttcagctgc

SEQ ID NO: 3089 - DNA, 2484 bp, Homo sapiens
  source 1..2484: mol_type = genomic DNA
ggatgccagctgagtgctggccgtgggcccctggtcctggcacgagaggagcctctgttcccaaagctggggtagatgtgttgctggactcacgtgcacacacacacgtgcatgggccgagggcagggcccgcagtcccctggtgtgggtagaacaccctgaccatctctggcgtggagagggccttccatcccccagggtgtgcctcagggccccgaagcccaggctggccctccccactcttcctgtactcctggctcaggcccctggtgcctttgggtccccacgccatctgcccatgggcctgaggccctaggcctggggagggctgtcccatggatctctgccgcagtactgtggctcagtgaagggtgccaagtacacctgtgccctccgctggtagctgctctaacacccttctgagcccgcaggccccatgaccagggagggagggagggctgtgagcagagtcctgccctgccccccagatgtccatgggcacagcaagcggggatggtcctctgtggccaccagagctggcctcctacctggggtggccggacatccgcgtctgcagagcggggcccaccccgcccgccgaggcagctgagctgtcctgcgagtggattggtttgaggtcaaggtgctgctgctactgccttctgccctgtgcacccacctacccacccacgatcccagtggagcctctttcctgactcccagcatcctcccacagccccaccccaactgctggctgcactgggcaggccttgcgtatggctggaggctgaggcagggttcgctggaggaaggggtggggcggggccgagggtcacccctgcttggtggagcctgctgtccctacccgacgtggtgcactggtggtgtttgacccaagcatgcggctcgccatcatgccccgctacagtgcaggagcgcagctgctgccaggcttagagcaggggctggtgaggaggccaggactctgcccaggagggcggaacctgaagctttgggtctgacaaactcaagcaggcagcagggagggactgcagtggccttgcttgcgctctgactggtccttgcctgtctgtgtggtccagcctgggccgcagcaggtcctggtggggaggtttactctgttttggggtctgtcaggcactgctttcccaccacctgtaagggggtttcccacctaatcagctgcagactgctcccgggttgcagccactggcctgggagcaccaggccgccttccccgcatgtgccctgggctggtgggggccttgtggtccctggagctcagcagctgttgatgtttcaatgaagggctactgggtgggggcaccagcctcgacgctgcccagccctgcagcactgagccctctcccagagggaccctgggactgccacagggtgctgagtgctgctttgttctgttcttgcttctaaaaccaattcactcaccaagacacgaggcgccggcagcagggctcggattacacgtccacctctgaggaggagtacggctcccgccacggctcccccaaacacacacgctcccacacctcaacagccactcagaccccgagggctggcagctccagccgggctcgttcccgggcccccggcccccgggacacggacgacgatgaggaggagcctgacccttatggtttcatcgtgcagacggcagagattgcggagattgccaggctgagccagacgctggtgaaggacgtggccatcctagcccaggagatccacgatgtggctggggacggtgacacactgggctcctcggagcctgcccacagcgcctccctcagcaacatgcccagcacccccgcctcgaccatctctgcccgggaggagctggtgcagcgcatccccgaggccagcctcaacttccagaaggtgccgcccggctcgctgaactctcgggactttgaccagaacatgaacgacagctgtgaggacgccctggccaacaagacgcggcctcggaaccgagaggaggtgatcttcgataacctgatgctgaacccggtgtcccagctgtcgcaggccatccgtgagaacacagagcaccttgccgagaagatgaagatcctctttcagaacacagggagagcttgggaggacctggaagccaggatcaacgccgagaacgaggtgcccatcctgaagacatctaacaaggaaatcagctccatcctgaaggaactgaggcgggtgcagaaacagctggaagttatcaatgccatcgtggaccccagtgggagcctggacctgctcctccccacactgagctcctttgttcctccccctccagcctttgcctgggaactggtccttgtttgccgggcttctcggagggttcactgtacattcgttctcaggtggtcttgtggctgtctttcggaaaatggttattttatatgatttgtcatggaatttgttctaataaatcattcttctatc

SEQ ID NO: 3090 - DNA, 395 bp, Homo sapiens
  source 1..395: mol_type = genomic DNA
tgccaacaacgtcgaggcctgcacttgatgtcaagggtggcacctcacctgcgaaggaggatgccaaccaagagatgagctccgtggcctactccaaccttgcggtgaaagatcgcaaagcagtggccattctgcactaccctggggtagcctcaaatggaaccaagagccctgctatcatcgattcggacccagtggatgaggaagtgctgatgtcgctggtggtggaactggggttggaccgagccaatgagcttccggagctgtggctggggcagaatgagtttgacttcactgcggactttccatctagctgctaatgccaagtgtccctaaagatggaggaataaagccaccaattctgttgtaaataaaaataaagttacttacaaaga

SEQ ID NO: 3091 - DNA, 902 bp, Homo sapiens
  source 1..902: mol_type = genomic DNA
aaatttgcgcgggttggagcctggcgtagtcatggccgccttccgcgacatagaggaggtgagccaggggctgctcagcctgctgggcgccaaccgcgcggaggcgcagcagcgacggctgctggggcgccacgagcaggtggtggagcggctgctggaaacgcaagacggtgccgagaagcagctgcgagagatcctcaccatggagaaggaagtggcccagagccttctcaatgcgaaggagcaggagcgacaggagaaggaggtcgacgaggacacgacagtcacaatcccctcggccgtgtacgtggctcaactttaccaccaagttagtaaaattgagtgggattatgagtgtgagccagggatggtcaaaggcatccatcatggccccagtgtggcccagcccatccacctggacagcacccagctctccaggaaattcatcagcgactacctctggagtctggtggacaccgagtggtagccaggagcctcgtggctgcgtcttgcacccagcgggcatctgccgtggtcagatccatttcaaatgaaatgtggggacatagatctttttttttttttttttgagacagagtttcactcttgttgtccagtctggagtgcaatggcacaatctcagctcacagcaacctctgcctcctgggttcaagcgattctcctgcctcagcctccaaagtagctgggattacaggcatgcgccaccacacccagctaattttttgtatttggtagagatggagtttcaccatggtggtcaggctggtcttgaactcctgacctcaggtgatccacccgcccgccttggcctcccaaagtgctaggattccaggcgtgagccatcgtgcccagctagacgtcttcctttttttttttttttt

SEQ ID NO: 3092 - DNA, 524 bp, Homo sapiens
  source 1..524: mol_type = genomic DNA
gggccatctggccatgagcacttctctctctgtctgccacgacaggggggacaggccccacctcggacacaggctggggctgcatgctgcggtgtggacagatgatctttgcccaagccctggtgtgccggcacctaggccgagattggaggtggacacaaaggaagaggcagccagacagctacttcagcgtcctcaacgcattcatcgacaggaaggacagttactactccattcaccagatagcgcaaatgggagttggcgaaggcaagtccataggccagtggtacgggcccaacactgtcgcccaggtcctgaagaagcttgctgtcttcgatacgtggagctccttggcggtccacattgcaatggacaacactgttgtgatggaggaaatcagaaggttgtgcaggaccagcgttccctgtgcaggcgccactgcgtttcctgcagattccgaccggcactgcaacggattccctgccggagctgaggtcaccaacaggccgtcgccatggagaccc

SEQ ID NO: 3093 - DNA, 3383 bp, Homo sapiens
  source 1..3383: mol_type = genomic DNA
cctcctgacgagaaccaaggcgtgtggggacgcagggcctctgcgtgtcagggagcagaacctgggccgagccctaggtgaaggggcggggtggttggccctgagccaatcatggctcgtgacgactcggctcggccaatcagaagaagggaggcctggcgctctcggggcgggtgagaaaccgcccccccttgcagctccgcggccaacgccttcgcccaggggtagttggagcggtgcaggttcccaggctccaggtactgggcgccttacgagctgggaggtggtgcctctcacccagctaattgctctctagcccttggccttcacaggtgttggtgcctgccgtgaacgcattctgacctgggccgtatctgtctcccaagactttgtgcctatggttggggacagagtgaggtcgttgccttgacgacgacagcatgcggcccgtggtcctcctaagtgtgagcttgcggcggaccgaggcccacctgcctccctgcctgcttcgccctggactcgtgactgcgtccgcagaagaaatcacaacagcgctggaattgctagtttgctaggcagcatcttttggacctgcgaaccatatgcatttcacctcaaatttgtttccaagttgaaaacctttgggtctttctatgcgaacggattgaagaaacgcaaaaagtttctacggactttaaattaaaatggaaaaatatgaaaacctgggtttggttggagaagggagttatggaatggtgatgaagtgtaggaataaagatactggaagaattgtggccataaagaagttcttagaaagtgacgatgacaaaatggttaaaaagattgcaatgcgagaaatcaagttactaaagcaacttaggcatgaaaacttggtgaatctcttggaagtgtgtaagaaaaaaaaacgatggtacctagtctttgaatttgttgaccacacaattcttgatgacttggagctctttccaaatggactagactaccaagtagttcaaaagtatttgtttcagattattaatggaattggattttgtcacagtcacaatatcatacacagagatataaagccagagaatatattagtctcccagtctggcgttgtcaagctatgcgattttggatttgcgcgaacattggcagctcctggggaggtttatactgattatgtggcaacccgatggtacagagctccagaactattggttggtgatgtcaagtatggcaaggctgttgatgtgtgggccattggttgtctggtaactgaaatgttcatgggggaacccctatttcctggagattctgatattgatcagctatatcatattatgatgtgtttaggtaatctaattccaaggcatcaggagctttttaataaaaatcctgtgtttgctggagtaaggttgcctgaaatcaaggaaagagaacctcttgaaagacgctatcctaagctctctgaagtggtgatagatttagcaaagaaatgcttacatattgaccccgacaaaagacccttctgtgctgagctcctacaccatgatttctttcaaatggatggatttgctgagaggttttcccaagaactacagttaaaagtacagaaagatgccagaaatgtttctttatctaaaaaatcccaaaacagaaagaaggaaaaagaaaaagatgattccttagttgaagaaagaaaaacacttgtggtacaggataccaatgctgatcccaaaattaaggattataaactatttaaaataaaaggctcaaaaattgatggagaaaaagctgaaaaaggcaatagagcttcaaatgccagctgtctccatgacagtaggacaagccacaacaaaatagtgccttcaacaagcctcaaagactgcagcaatgtcagcgtggaccacacaaggaatccaagcgtggcaattcccccacttacacacaatctttctgcagttgctcccagcattaattctggaatggggactgagactataccaattcagggttacagagtggatgagaaaactaagaagtgttctattccatttgttaaaccgaacagacattccccatcaggcatttataacattaatgtgaccacattagtatcaggacctcccctgtcagatgattcaggggctgatttgcctcaaatggaacaccagcactgagaaccattttggttctgaactggatgatgctcttgcacttgagatgacatcttcttgcagcaagagtgctgatatcccaagaggagagattcatggttttgatcatttccttctgaactgcctgcattttctgaggaaggccttctagaagaaggaaagacaaagacttccaaatgtttcaaaggaagattgaacaaatggccctccccaactgttatcccattacctttcacgtccaccgatgctatttcaagacatatccagtggaataacagtgatatggttcttgttacatgaatgtgtatttactgttaggagattgtatattttaagttaccatgattaaaagtgtgtaaaaaagggggacagagagaaatactataaaaggccatgttactcatgcattgaactttgtgtgttttctgtataaatgtgtacatttatttaggagtgggtttcttgggggtaggtgataaaaattaggatcagttgaagaaaattgaagaaactaggatcagtaagagaaactgtttgctttacctgaatttaactatgaaaacacacttaacaatcttacacgtttctagatattaagtgaatatgtaactcctgtccatgggtagatgtgtatctttgacttctgtaattatttttgatattctatcagtgtattatgagactctggcctccctgcagatcttctaagaaccacactaatgcaagcgtgacagagaaacctctttcgaatgacttactacaactctggcattggttagttccatgtattgtaagattctggtgctaatgctccatacagaattgatcaggactgattactcttctgtggaccaattgctattgaactacccagctgaagagggtttggggagagaacgttcattattatggactccacttttgtcccctggtagtttaagggtgatactagaatccagagaagttcctgtctccttgtggcctcaaacactcaggccgtctcaaaagcttttcaccaaggtgcaaaatcatttacctgcattccacacatcttttccaatgcatggatccaaaactttttaggtgggaggaataaactaagttggctacaggttcttgatttctgggtttctacacatgctctgcatttatcattttagagaatggttgtttagggaaccagaatttgtgagttttttt

SEQ ID NO: 3094 - DNA, 6455 bp, Homo sapiens
  source 1..6455: mol_type = genomic DNA
agggggcagagtgtcctcaccaaaataagacagttttgcacatggatggatgtttagacactgagactcctacggtgtccattcaagaaaatgtggatgtagcctctttgaagcccattagtgacagtggaattaatttcactgatgccatttggtcaccaacttgtgaaaggcgaacatgtgaatgtcacgagtccatcgaaaagaataaagacaaaacagatctcccacagagtgtggtctatcaaaatgaagagggtaggtgggtcacagaccttgcctattacacatcttttaatagcaaacaaaatttaaatgtgtctctaagtgatgagatgaatgaagacttcagatctggttctgaagcatttgatttgattgcacaagatgaagaagaatttaataaagagcatcaatttatacagccatcatttggctattttattagatcaccagagaagagagaacctattgccttaataagaaaatctgatgtatcaagaggtaatttggaaaaagaaatggctcatcttaaccatgatctatattcaggagatttaaatgaacagtcccaggcacagctaagtgaaggatcaattacacttcaggttgaagcagtagagagtacttcacaagtggatgaaaatgatgtgacgttaacggctgataaaggcaaaacagaggacactttcttcatgagcaacaaaccccaaagatacaaagacaagctaccagatagtggtgattctatgcttaggatcagcaccattgcttcagccattgcagaggcatcagttaatactgatccttcccaacttgctgcaatgatcaaggcactttcaaataaaaccagagacaagacttttcaggaagatgagaaacaaaaggactattctcatgtgcgtcatttcttacctaatgatttagaaaaaagtaatggatccaatgcacttgatatggagaaataccttaaaaaaacagaagttagtagatatgaaagtgcattggaaaacttttcaagggctagtatgtctgatacttgggatttatctttgcccaaagaacaaactactcaagacattcatccggtggacttaagtgctactagtgtaagtgtgagggcaccagaagaaaacacagcagctattgtttatgttgaaaatggagagagtgagaatcaagagtcatttagaaccataaactcctcaaattcagttacaaatagagagaataacagtgcagtagttgatgtgaagacatgttccattgacaacaaattacaagatgttggtaacgatgaaaaagctacctcaatttccactccatctgatagttattcatcagtgaggaaccccagaataacatccctttgtctgttaaaagactgtgaagaaatacgagataacagagaaaatcagaggcaaaatgagtgtgtcagtgaaataagcaacagtgagaagcatgtgacttttgaaaaccatcgcatagtctcacctaaaaatagtgatttgaaaaatacctctcctgagcatggtggacgtggctcagaggatgagcaggagagcttcagaccttccacgtcaccactgagtcattcttctcctagtgaaatttctggaacgagttcatcagggtgtgcgttagagtcctttggttcagcagctcagcagcagcagcctccctgtgagcaggagttgtctcccttggtgtgctcgcctgctggggtgagcaggctgacgtatgtgtctgaaccagagagctcctatcctaccacagccacagatgatgccctggaggaccgcaagagtgatatcaccagcgagttgagtaccacaattattcaaggcagtccagccgcattggaggaacgggctatggaaaaattgagagaaaaagttccatttcagaatagaggaaaaggaacattatcatctattatccagaataactctgatacaagaaaagcaactgaaactacttctctgagtagcaagcctgaatatgtaaaacctgactttagatggagtaaagatccttcctccaaaagtggaaatctgttggaaaccagtgaggtaggttggacatcaaaccctgaggaattggacccgatcaggctggctctcctgggcaagtcaggtctgagctgtcaggtggggtcagccacatcacaccctgtgtcctgccaggagcctatagatgaagatcaaagaataagtcctaaagataagtcaactgctggccgtgagttcagtggccaggtttctcatcagaccacctctgaaaaccagtgtactcctattcccagcagcacagttcacagctctgtggctgacatgcagaacatgcctgctgctgtgcacgcactcttgacacaaccctctctcagcgctgctccttttgctcagcggtatttgggaacactcccttcaactggaagcaccaccttgcctcagtgccatgctggcaatgccacagtctgtggcttctcaggaggccttccctatccagctgttgcaggagagcctgtgcagaactctgtggctgtgggaatttgtctaggatcaaatatcggctctggatggatgggtacctcttccctctgtaacccatattctaataccttaaatcagaacctgctaagcacaacaaaaccttttcctgtgccgtctgttggtacaaactgtggaattgaaccatgggattcaggagtgacatcaggattggggagtgtccgagtgcccgaggagttgaagcttcctcatgcttgctgtgtcgggatcgcttcccagaccctcctcagtgtgcttaatccaactgaccgctggctgcaagtcagcattggggtcctcagcattagtgttaatggtgaaaaggtggatctttcaacatatcgttgtttagttttcaagaataaagccatcataagacctcatgccacagaagagataaaagtgctttttataccatccagtcctggggttttcagatgcacattcagtgttgcttcttggccatgttcgacagatgctgagaccatcgtacaggcagaagctttggccagcaccgtcactctcactgccattgccgagagtcctgttattgaggtagaaacagaaaagaaagacgttcttgattttggtgacttgacttatggaggctggaaagccctcccactaaaattgataaaccgaacgcatgccactgtgccaattagactgattattaatgctaacgctgtagcctggcgctgtttcacgttttccaaggaatccgtccgagctcctgtggaagttgctccttgcgctgatgtggtcactcggctagcaggcccttctgtggtcaaccacatgatgcctgctagttatgatggacaggatccagaatttctgatgatttgggttcttttccatagtccaaagaaacagatcagctcttcagatattctggactcagcagaagaattctcggcaaaagttgatatcgaagttgacagcccaaaccctacgcccgttcttagaagtgtgagtctccgagcaagagcaggaatagctaggatccatgctcccagggacttgcagacgatgcatttcttggccaaagtggcttcctcaagaaagcagcacttacctttgaaaaatgctgggaacattgaagtttatttggatatcaaggtcccagaacaaggaagtcacttttcagtggatccaaagaatctactccttaaacctggagaagaacatgaggttattgtttcatttactccaaaggatcctgaagcctgcgaggaaaggatcttgaaaatatttgtgcagccatttggacctcagtatgaggtagtgttaaaaggcgaagtcatttcttcaggaagtaaacctctgtcacctggaccttgcttagatattccatcgattttgtccaacaaacaatttctggcttggggaggagtccctctaggtagaacacagcttcagaaactagctttaagaaataattctgcatctacaactcaacatttacgactgcttattagaggacaagatcaggactgctttcagcttcagaacacttttggttcagaacagcgattgaccagtaactgtgagatcagaattcacccaaaggaagacattttcatctctgtattatttgcacctactcgattatcttgcatgttggctagactagaaatcaaacaacttggaaatcgatcacaaccaggcattaagttcacaatacctttgtctggatatggaggaacaagcaatcttattttggaaggcgttaaaaaattatctgacagttacatggtaacagtgaatggcttagtacctggcaaagaaagtaaaattgttttttctgtccgcaacactggctcccgagcagcttttgttaaagcagtaggttttaaggattctcagaaaaaagttttgctggatcctaaagtattgaggatttttccagataaatttgtactcaaggaaagaacacaagaaaatgttactttaatatataatccatcagacagaggaatcaataataaaactgcaacagaactatcaactgtatacttatttggtggagatgaaatttcaagacagcagtatcgcagggccctgttacataaaccagagatgataaaacagatacttccagaacatagtgtgcttcaaaacattaattttgttgaagcatttcaagatgagctattagtaactgaagtatatgatcttccccaacgacctaatgatgttcagctcttttatggaagcatgtgtaaaattatactttcagtaattggagaattcagagattgcatttctagcagagaattccttcagccttcttccaaagctagcttggaatctacaagcgacttgggagcttctgggaaacatggtggcaacgtctctttggatgttttaccagtcaaaggtcctcagggttctcctcttctctcacgggcggctcgcccgcctctggatcagctggcctccgaagagccgtggactgtcctacccgagcacttgattctggtagctccttctccttgtgacatggcaaaaactggacgtttccagattgtgaataactctgtgaggttactgagatttgagctgtgctggccagcgcattgcctcacagtcacgccgcagcatggatgtgtcgcgccagagagtaaactacaaattcttgtgagtcctaattcctccttatccacaaaacagtcaatgttcccgtggagtggtttgatctatatacactgtgacgatggacagaagaaaattgtgaaagttcaaattcgagaagatttaactcaagtggaacttttaactcgtttgacctccaaaccatttggaattctttccccagtatctgagccttcagttagtcatttggtcaaaccaatgacaaaaccgccttccacaaaagttgaaataagaaacaagagtattacttttcctacaacagaacctggtgaaacttcagagagctgtctagaactcgagaatcatggcaccacagacgtgaaatggcatctgtcatctttagcgccaccttatgtcaagggagttgatgaaagtggagatgtttttagagctacctatgcagcattcagatgttctcctatttctggtctgctggaaagccatgggatccaaaaagtctccatcacatttttgcccagaggtaggggggattatgcccagttttgggatgttgaatgtcaccctcttaaggagcctcacatgaaacacacgttgagattccaactctctggacaaagcatcgaagcagaaaatgagcctgaaaacgcatgcctttccacggattccctcattaaaatagatcatttagttaagccccgaagacaagctgtgtcagaggcttctgctcgcatacctgagcagcttgatgtgactgctcgtggagtttatgccccagaggatgtgtacaggttccggccgactagtgtgggggaatcacggacacttaaagtcaatctgcgaaataattcttttattacacactcactgaagtttttgagtcccagagagccattctatgtcaaacattccaagtactctttgagagcccagcattacatcaacatgcccgtgcagttcaaaccgaagtccgcaggcaaatttgaagctttgcttgtcattcaaacagatgaaggcaagagtattgctattcgactaattggtgaagctcttggaaaaaattaactagaatacatttttgtgtaaagtaaattacataagttgtattttgttaactttatctttctacactacaattatgcttttgtatatatattttgtatgatggatatctataattgtagattttgtttttacaagctaatactgaagactcgactgaaatattatgtatctagcccatagtattgtacttaacttttacaggtgagaagagagttctgtgtttgc

SEQ ID NO: 3095 - DNA, 7948 bp, Homo sapiens
  source 1..7948: mol_type = genomic DNA
gcgcggcagccgggccttgctccgggacgtgtttatttgtaacttagtgctttttatcgtcttaaggaggtatttggtggaggctctttgaagttgggttcaggagtgtagaattggcaaagttattgccagcttcctgcatcaacaacagcaacttgtgattggcggtgaccggatattcagttgcacatccccacatcaatgcactgccaatgggttatatcctgtgttgtgacctcatggtttaagtgggaataaagatgagtataagcagtgatgaggtcaacttcttggtatatagatacttgcaagagtcaggattttctcattcagcatttacctttggtatagaaagccatatcagtcagtccaatataaatggtgccctcgtcccacccgctgcattgatttctatcatccagaaaggtctacagtatgtagaagcagaagttagtattaatgaggatggtaccttgtttgatggtcgaccaatagagtctctgtccctgatagatgccgtaatgcctgatgtagtacaaacaagacaacaagcttatagagataagcttgcacagcaacaggcagcagctgctgcagctgccgcagctgcagccagccaacaaggatctgcaaaaaatggagaaaacacagcaaatggggaggagaatggagcacatactatagcaaataatcatactgatatgatggaagtggatggggatgttgaaatccctcctaataaagctgttgtgttgcggggccatgaatctgaagtttttatctgtgcctggaaccctgttagtgatctcctagcatcagggtctggagactcaacagcaagaatatggaatcttagtgagaacagcaccagtggctctacacagttagtacttagacattgtatacgagaaggagggcaagatgttccaagcaacaaggatgtcacatctctagattggaatagtgaaggtacacttctagcaactggttcctatgatgggtttgccagaatatggactaaagatggtaaccttgctagcaccttagggcagcataaaggccctatatttgcattaaaatggaataagaaaggaaatttcatcctaagtgctggagtagacaagactacaattatttgggacgcacatactggtgaagccaagcaacagtttccttttcattcagcaccagcattggatgttgattggcagagcaacaacacctttgcttcttgtagtacagatatgtgcattcatgtctgtaaattaggacaagacagacctattaaaacattccaaggacatacgaatgaagtaaatgctatcaaatgggacccaactggcaatctcttggcctcctgttctgacgacatgactttaaagatatggagtatgaaacaagacaattgtgtccatgatttgcaagcacataataaagaaatttatactatcaaatggagtccaacaggaccagggactaataatccaaatgccaaccttatgttagcaagtgcatcctttgattctactgttaggttatgggatgtagaccgagggatatgcatccataccttgacaaaacaccaagagcctgtgtacagtgtagctttcagtcctgatggcaggtatctggcaagtggttcttttgacaaatgtgtacacatctggaacacgcagacaggtgctctagttcacagctataggggaacaggtggaatatttgaagtttgctggaatgcagcaggagacaaagttggagccagtgcatcagatggttcagtttgtgtattagaccttcggaaatagcgctactagttggaagccatggaccgactatgaatgtgtacatagccaaaatgactgtccctgacccatgtactgctatagtcccacttgaaccatggccagtccactacagccaaatctaaaagaaatatatacatacagtgtatataaacaaaattgcaccctgaagatgacagagttttgtcacagcttgtgaattctgttcaccaagtgctggaatctaatctgctgtgcccctaaaatagcatttagaagttttggatatgaaaaacagaagagagaaaaatatacattataaaagcagaacatacatgtaccagtttttggatactaaatgacagccttgtttctcccctttgaatcagcagacaccatggattatattctttttttcccttcagtagtgagcagtttgtatgtacagagaaaatggacttacaaaaacttgcagcagtagtttgttcttgctttaaaatttcgtttttggtttagattatggatgcatgaagtaagggagtgaatcagtttcttgtttatatttttttcaccttttaaacaaaaaattctttaaaatattttaatgcattcttttgaagaggtagatgtttggtacattttatggctcccagagcatatattcagttggtgcatgttgtggaagggggaattggaaattaaatgaaaacctatgactttggtcatgtcaatctgtaagacacatcagtaaaagggtattatgctctgttggttttgtttttttgttttgctttttttttttttttttcttttttgttttttggtgatgtggcttaaatgcaatagtttcttttttgggacatatttctgccaattaaagactagaagggcacaactttttttttaattaccatagagaagatacattaaaaaaaatcttctgatgttttgtagccataactaaattatggtaaaaatgtgcactattgtgaaaaggagcaacgtagttttgggttttttgttgtttgtttgttttgctttgttttttaagagattaaaatgtttctggataaggattagcttctcgaagtgtccatcattctgtgtagaagcttaaatatgtaatgtaaccaaactccagtattaaaaatctctcatgttgttttctttatacaaagcaagataacggcatataacactgccattacatggcaaaatgtttgctaccttagtttaaaaaacaatctcaaacaaaagacttgcttcaaggtgtttttaaatagcagtgattcagaattttttttaatgaaagtataattgcactaaccttcttcctgctgctctgattctgcatttgtggtacttgtgactacgttttttcaaatatagatagatttaagctgctaatttttttttttttagtaatcactactatatcatgtcttttactctgtttataatatcaagtattttcttaaagatatagatattaaaccttgtgctcatgcaacttagagtaacatatacagacaaatgattgcatgaggccatgtttatatgtgtgactaataaggcttgtcatgattaacataatccaggtatgtcatttctgaagagaatagtcatcaaatttatatctcgaagattttaattaaggaattgcttattgttgagcttagcaaattaataacactatttctgtcactaattattttgaggccttttagtactaaaattttaacctgtgttctaagtagaaactgatttaacccaagtaatgcagctttgattgatttcagcattcgttgctttgctatttttacaaaacagcattgattgaagcaagtcttggttttactaaggtagggtagcatttgctattggtaaagagaataaatacacttaatttcacaatacattgttatatgtaccccagttgttgttagtggggactatgatactgtaataatatttttaaaaatttacatcaagagaggcagtcattcacgatggttttgtgccagctctttttagggttttggatcacattagagatatttagaacatattaccctgtgacttacgtaggaaacctaatatgctgagtatctggcacttgaattcctgcttttattgctggaggtccacatctgtggttgacctctgttattgtttaaaaaaaataaataaaaattaaaaaaatctgtgcaataattttaaaatgtgctcccaggaatagacacaaatgttttgagtatcttttaagctgcattttcctttagtgatgcatttgtcaattgcactgaatttaaatctgaaagtcagaggtgattattgatagtacttttgtattttgatatggacagtttattcatttgcatacagttattgactttttcccagctgattaaaagatagtcaagaaattctgcaatatagctgccaaaatagacagctacatttttatgatattgtcatcttttctgttttttttttcttttttttctttagctattttacttaagcataatagccacaataggacatataaaagattataaatacagagctttattatcctgacgtcttgggtcttttaagtatatacttttctgaaaggtatccattttgtaggcttgggttcttcatgagcatacgattgtttatttttgctgctgttctcaacatcatcattgcctgctgatgtgccacgatgctgctccaatagacagcaataagattgtctctaatttgagcagtaacatgattgcaagagaccaagtttcacagcttgtaaagttctgtatttgggattcttgcttatttttccgcctgtgtttttctgagaacttattcctgatgatcaattgaatccagtagtttttctatgctatttgttgttgtataagctactgtaagaaacttatcataaggaaaaatagaaaggaaaacttgaatcaatactcattgattaaaatggaataaagaaagagcagctgccacttttaaacaacataaaggaatatctttttttgtctccgtgtaggaaatcccataagttcttatatttgttccagttcccatttcctgccattgaccagataacatcattgactttcaaatgacttttagaagtgataactcttaatttcctaatagatactagattgtattgaattctgttttaattattctctaggtaagtatgttttaggattaaataccttttacagatactgaaagtgcctccttttgtggtgtaaaaaacaaattatggtgcaaaaagtaatcactagattgaaatacatgaaggttttttgctttttgacatacgaaaatgtcaagagaaaggccaaagatttgtactttttcacttacaaagcactcctttttcccttaaacttctttctgtcaaattagatttaatgagagagtactatttttaaggagctatctgtttatgtagaatgattttgttaagagtaatgtaaactattattgagtagaggcctaaagaggactgtgcatttttgctatttaaaggaatcacaaatgatcatacttaagtgagcaaaaatgacaagttttactagctaagtagagaaataaatctcaaatgcagcgctacaattttcattatcttaagtacattgtacatttctacagaacctgtgattattctcgcatgataaggatggtacttgcatatggtgaattactactgttgacagtttccgcagaaatcctatttcagtggaccaacattgtggcatggcagcaaatgccaacattttgtggaatagcagcaaatctacaagagaccctggttggtttttcgttttgttttctttgttttttcccccttctcctgaatcagcagggatggaaggagggtagggaagttatgaattactccttccagtagtagctctgaagtgtcacatttaatatcagttttttttaaacatgattctagttaaatgtagaagagagaagaaagaggaagtgttcacttttttaatacactgatttagaaatttgatgtcttatatcagtagttctgaggtattgatagcttgctttatttctgcctttacgttgacagtgttgaagcagggtgaataactagggcatatattttttttttttttgtaagctgtttcatgatgttttctttggaatttccggataagttcaggaaaacattctgcatgttgtatctagtctgatgtacttatccatctcattacaaacaaaaacacacagactgcatttgtagctctgtaatccttgaatacggaagtaaattttcttctttcctgactttgacattgtagctatactgtttccatttttgtttttacaaatcctttgggtctaattctgtgagcctacctatagcactggattaaaatgtctgcatcatttctttagttatccagttaactttaaaactgttgtaaaagtgtaaaccagcccatgacaggtttttgtacatgttaaagaacttcattgttcagttttcatgattattgtgtaaggaagactgatgtagatgttctgtgctgtcctggaccatgttaattacacttacgacgtattttagttccacatcacaatgatttgtccccagtgacccttttatcctttctaggcacatttcttgttgttgttgttgttgcagttcccctttgcattgtattgctttgacaactgtaatttgaatcagatctgaaagaggtccagaataaaatatattttgatattatgttggctgtgtacatatataaaacctttgatgtctatgtagtttatatagactatttactagtcaggtaaagagagagggatggtatttcttgtttacagtttgtttacattttaattgcttttacttctccagtgttctattgtagaataaacctttttttccaagttagccttcataacctataacacattcattctctcccatactggtgttactgattaataactgccatcagaacccaaaccactgtttttcataaacgtattgtttcccaagatatatactttaagcccataataaaattacaaattttactatttttattacttcttgcaggagataagatttttttaaatgaaggggttatttactatttttattaaagtataatagagcatctaatcagctaagggattgtaatttttaattcttttgaaaaataaatattgtatttaaaagacgttatttcacagaagctgaaaaagagaccttagataacatttgtttggttagccacacggttgagcacaaaacaatgtgtagatgtgttgaagattagggcaggaggctcaacttctcggtgacctttttttgcttcacaacaagccaattatagttgaatcattttctctcttagctagttgttactacaaactttataagaaaaacaactagacaccttctagttttaattaataccaactcctttagagttagagactttttaaaaagaatcattgagcatattttcttttttttttttttaagaatttacactctctaggtcttctatttttcctgtttatttccttaaacagaaataaattcaagcatagttttatgttttattagaaataagccactgcagttgctagaactgacatgctttcattttcaaggggttaacttttattgcatggcatagattattagtaatatcctgcattgtatacttttccaaaaagggttggactcctaaggattagaatccttataagcttgagggaaagctgaaactaatttgaacagtaatagaagggattatttttaatttcatagttaacactttacaatggattagatttattacctagtataatccgtagcagatcagatcaaagtttactgttttaccaatatattcatttgaaaaaatacagtggaggaaaagacactttagatggtagttttatggtgcttttctctgctgtaccaaagtgctttgtcatcaatgaaatgttaaccctatgctactttttctgcatgcttcttaaatgtcatcttaatgcttaattgtcctaacttgtaatatttttgtattaaatttttttaggagttccttgtaatttctttacaatttaaaatatattaaacacaaagtgtttagtaaagtaca

SEQ ID NO: 3096 - DNA, 2335 bp, Homo sapiens
  source 1..2335: mol_type = genomic DNA
aaaatgctcccgccgacgcacagcagtgacgacacacaaggtttcggggactgagtgggtttcagactttctctcaggatttccgctggcttcaggttccggtcaggcgtcgggacagagcctgatccaggcttcggcggccggtggcagctctcgatcagctctcgcagtcggagaggcggctaaggaaaggtgccacagcagagacgcgaaggagaggccctagaaccttttcaaagaagaatggaagaaaccatgaagcttgctacgatggaagacacagtggagtactgcctgttcctgataccagatgagtcaagggactcagataaacataaagagattcttcagaagtacattgagagaataatcactcggtttgcacctatgctggtcccctacatctggcagaatcagcctttcaatcttaaatataaacctgggaaaggaggtgttcctgctcatatgtttggcgtgacaaagtttggggataacattgaggatgaatggtttattgtttatgtaataaagcagatcacaaaggaatttccagagttagtagcaaggattgaagacaatgatggtgaattcttgttaatagaagctgctgactttctccctaaatggctggatcctgaaaatagcaccaatagggtatttttctgccatggggaattgtgtattatccctgcaccaagaaaatctggagcagaatcttggttacccaccacacccccaacaattccacaagcattgaatataatcacagcacattcagaaaaaatacttgcttcagaatctatacgagctgctgtgaataggcgcatcagagggtacccagaaaaaattcaggcctcacttcatcgagcacactgcttccttccagctggcattgtggcagtgctaaagcagcgccccagattggtggctgcagcagtccaggcattttacctacgagaccctattgacctgcgagcttgtcgtgttttcaagacattcttgcctgaaacacgaataatgacatcggtcacattcactaaatgtctatatgcacaattggtgcaacaaaggtttgtgccagaccggcggagtggatacaggctgcctcctccatctgatccccagtaccgagcccatgaattgggcatgaaattggctcatggatttgagatcttatgctccaaatgtagcccacatttttctgactgcaagaaatcccttgtgactgcctcaccactctgggccagtttccttgaaagtctgaaaaagaatgattactttaagggactgatagaaggttctgctcagtaccgggaaaggctagaaatggcagagaattacttccagctctcagtagactggccagaaaggttggaggtgcagtggcgcgatcctggcttactgcaagctccacctcctgggttcacgccattcatctgcctcagcctcctgagtacctgggacaacagttctcttgctatgagccctggtgaagaaatcttaaccttattacagacaataccatttgatatagaagaccttaagaaagaagcagctaatcttcccccagaggatgatgaccagtggttagatctctcaccagatcagctggaccagctgctgcaggaagctgttggcaaaaaagaatccgagtctgtttccaaggaggagaaggagcagaactatgacttaactgaagtctcagagagcatgaaagctttcatatccaaagtctcaacccacaagggagcagagctgcctcgagaaccttctgaggctccaatcacttttgatgcagattcttttcttaattattttgataagattttagggccaaggcctaatgagtcagattctgatgatctggatgatgaagactttgaatgtttagatagtgatgatgacttggactttgaaacacacgaacctggcgaagaggcttccctgaaaggaacacttgataatctcaagtcatacatggcccagatggaccaggaactagcacacacctgcatcagcaaaagtttcaccactaggaaccaagtggaacctgtatcccagactaccgataacaattcagatgaggaagattctggtacgggagaatctgttatggcaccagtagatgtagacctgaacctggtttcaaatatattggaatcctatagctcccaagctggactggcaggacctgcttccaatcttttacaaagcatgggagtgcagctgcctgacaacaccgatcacagaccaacaagtaagccaacaaaaaattaaccagcacatttagcttctcttttttctttttaaataaatattgaatatgattctgttc

SEQ ID NO: 3097 - DNA, 2706 bp, Homo sapiens
  source 1..2706: mol_type = genomic DNA
gtgaaaggtgaggggaacagctgatccgtctgttgggaggacagatatctcaaggccaggatggaagaatcaccactaagccgggcaccatcccgtggtggagtcaactttctcaatgtagcccggacctacatccccaacaccaaggtggaatgtcactacacccttcccccaggcaccatgcccagtgccagtgactggattggcatcttcaaggtggaggctgcctgtgttcgggattaccacacatttgtgtggtcttccgtgcctgaaagtacaactgatggttcccccattcacaccagtgtccagttccaagagccaaggcccatggatgaactggtgaccctggaggaggctgatgggggctctgacatcctgctggttgtccccaaggcaactgtgttacagaaccagctcgatgagagccagcaagaacggaatgacctgatgcagctgaagctacagctggagggacaggtgacagagctgaggagccgagtgcaggagctcgagagggctctggcaactgccaggcaggagcacacggagctgatggaacagtacaaggggatttcccggtcccatggggagatcacagaagagagggacatcctgagccggcaacagggagaccatgtggcacgcatcctggagctagaggatgacatccagaccatcagtgagaaagtgctgacgaaggaagtggagctggacaggcttagagacacagtgaaggccctgactcgggaacaagagaagctccttgggcaactgaaagaagtacaagcagacaaggagcaaagtgaggccgagctggagcccttgaaggagcagcttcgaggggcccaggagcttgcagcctcaagccagcagaaagccacccttcttggggaggagttggccagtgcagcagcagccagggaccgcaccatagccgaactacaccgcagccgcctggaagtggctgaagttaacggcaggctggctgagctcggtttgcacttgaaggaagaaaaatgccaatggagcaaggagcgggcagggctgctgcagagtgtggaggcagagaaggacaagatcctgaagctgagtgcagagatacttcgattggagaaggcagttcaggaggagaggacccaaaaccaagtgttcaagactgagctggcccgggagaaggattctagcctggtacagttgtcagaaagtaagcgggagctgacagagctgcggtcagccctgcgtgtgctccagaaggaaaaggagcagttacaggaggagaaacaggaattgctagagtacatgagaaagctagaggcccgcctggagaaggtggcagatgagaagtggaatgaggatgccaccacagaggatgaggaggccgctgtggggctgagctgcccggcagctctgacagactcagaggacgagtccccagaagacatgaggctcccaccctatggcctttgtgagcgtggagacccaggctcctctcctgctgggcctcgagaggcttctccccttgttgtcatcagccagccggctcccatttctcctcacctctctgggccagctgaggacagtagctctgactcggaggctgaagatgagaagtcagtcctgatggcagctgtgcagagtgggggtgaggaggccaacttactgcttcctgaactgggcagtgccttctatgacatggccagtggctttacagtgggtaccctgtcagaaaccagcactgggggccctgccacccccacatggaaggagtgtcctatctgtaaggagcgctttcctgctgagagtgacaaggatgccctggaggaccacatggatggacacttctttttcagcacccaggaccccttcacctttgagtgatcttactccctcgtacatgcacaaatacacactcatgcacacacacactcacacacatgcatacacttaggtttcatgcccattttctatcacactgggctccatgatattctgttccctaagaactgcttctgtgtgccctgttttcatcccaagatttctcacttcatcctctcctacctggctcttttgtcccagggaggggtcctgttcggaagcagtggctgaatttatcccctgaaagtggttttggaggaaccgggatggaggaggccttcccctgtgggaatagaatcgtccactcctagccctggttgcttctgatacacagccactgcacacacacactcacactcacactcccttgtctgatgccccaaagccaattcctggggcaccctaccctctcttatttggagtttccgttggtttacctgagttttctctggggtctgcacagaggcagcagcatggacatcatggcctctcaggtcccttttggttctcagtttcattggttcctctttctgttcccccattgacttctgtgccccaccctagccttttccataaccttaggtattcagtttggaggggttttttgtatttttgaggattcctgtattctgtatcctctcctcgcatctcctcacatggaaagaaataatgtatttgtgccttctgtgaggaatggggggaacaagtggtcccaggtatccccatttccaaggcccccctccctctccaggtccccccacagcaataaaagcttccccctgatatccatccctttgtagtttgaacaaatatatttatatgatatgt

SEQ ID NO: 3098 - DNA, 3452 bp, Homo sapiens
  source 1..3452: mol_type = genomic DNA
aaagcgttacttccggcggaaaaggacgcgggagattcgattggaaggctgccggcgtgctactgagttcggccggtccgagtcactgtgcgtcgcctgggcccgttcctggtcttctcccccagggtcttgctctgtcacccaggctggagtgccatggcatcatcatagctcactatggccttgatcctcctgccttagcctcccaagcagctggtattacagatggagttttgctcttgttgcccaggctgaagtgccatggtgcaatctcggctcactgcaacctccgcatcctaggttcaagcaattctcctgccgcagcctcctgagtagctgggattacaggcaccccccaccatgctcagctactttttgtatttagtggagatggggtttcaccatgttggccaggctggtctcaaactccctacctcagaccacggtgtgaacacatgaacagaagacgaaaatttcttctagcctcagtacttgctctccagaattcaagttttatatatccatcatgtcagaagtgcttctctaggataatcctggtctccaaaaggtctaattgtccaaaatgtggctctactggtgaatctggaaatgccaattacagatacaaactttccttaaaagttgcagaatcaaacaaattgtttgttattactgtatttggaagttgcttagatacattttttggtcttactgccactggtttgcacaggtacattcaggatcctaataaaattccagaaacactggacaatgatacaactcagaatctattaactaaagcagttgaaacttgctttgttggacaaagctttatttttggagtgacgaattttgaaaaccaacctggacaaggttcagatgccagtaacttcttacagcaatgctctgaccacaaaagaaaagccaaagcactagtggcttgccagattgttctaccagacccaggtattgcaggctttactgtcattgactacttccatcaacttttgcagacttttaatttcaggaaacttcagtgtgactctcaggcacctaacaatcacttacttgctttagatcactcaaatagtgatctcagcagcatatatacttctgacagcacttctgattttttcaagtcctgcagcaaggatactttttcaaaattctggcagccatcacttgaattcacttgcattgtttcacaactaacagataatgatgatttttcagcttcagaacaaagtaaggcctttggtactcttcagcagaacagaaagtccatctccattgcagaggccactggttccagtagctgccatgatcccattcaggattcatggagccttgtttcatatatggataaaaagagtacagcagaaaagttgggtaaagaacttggcttacaagctaaggagctgagtgcagttcacagcagtcatcatgaaattggagttaatgactctaatttattctctttggaaatgcgagagccccttgagtcaagtaatacaaaatccttccacagtgcagtggaaattaaaaataggtcccagcatgagctaccatgttttcagcatcatggtatagataccccaactagccttcagaagagatctgcatgttgtccaccttcgttactcagacttgaagagacagccagcagttcccaggatggtgaccctcaaatttgggatgatctgccattctctgaaagcctgaacaagtttctggcagttcttgaaagtgagattgctgtaacccaggcagatgtcagtagtaggaaacatcatgtagataatgacattgataaatttcatgcagaccacagcaggttatctgtgactccccagagaactactggagccctgcatacaccacctatagctttaagatcatcacaagtaatagtcaaagcaaactgtagcaaagatgacttccttttcaactgtaaaggaaatctaagtcctagtgttgaaaaggagtcacaaccagataacaaagtagaggctgtctctgtaaatcataatggaagagatatgtcagaatattttttaccgaatccttacctgtcagctctgtcttcatcttcaaaagatttagaaacaatagttactcttaagaagactatcagaatctcaccacacagggagagtgaccattctagtctaaataacaaatatttgaatggatgtggagaaatatcagtttcagaaatgaatgaaaagttgacaactctgtgttataggaagtataatgatgtctctgatctttgcaaattagaaaataaacaatattgtaggtggtccaagaaccaagatgacagttttacaatttgcaggaaacttacatatcctttagaaactctttgcaatagtccaaatagaagtacaaatacattgaaagaaatgccttggggacatatcaataacaacgtaacacagagctattctattggttatgaaggtagctatgatgcctctgctgatctctttgatgatattgctaaagaaatggacattgcaactgagattaccaaaaaatcacaggatattttgttaaaatggggaacatctttggcagaaagtcacccttcagagtctgatttttcactgagatcactttctgaagacttcatccagccttcacaaaaattatccttgcaaagcctatctgactctaggcattcaagaacatgctctccaacacctcattttcaatcagattcagaatataattttgaaaatagtcaagactttgttccatgttcacagtcaactccaatttcagggttccaccaaacaagaattcatgggataaacagagctttcaaaaaacctgtattttattcagatcttgatggtaactatgaaaaaataaggattttccctgaaaatgacaaacagcaagccagcccaagctgtccaaaaaatataaaaacacctagccagaaaatcagaagccctattgtatctggtgtttcacaaccagacgttttcaatcactacccttttgctgagtgccatgaaactgatagtgatgaatgggtccctcctaccacacaaaaaatatttccttcagatatgcttggattccaaggcataggtctagggaaatgccttgctgcctatcatttccctgatcaacaagagttaccaagaaagaaactgaaacatattagacaaggaaccaataaaggtttaattaagaagaaattaaagaatatgcttgcagcagttgttacgaaaaagaaaactcataaatataactgtaaaagttcaggctggatttccaaatgtccagacattcaagtcttagcagcacctcagctgcaccctattcttggacctgattcttgttcagaagtcaaatgttgccttccattttcagaaaaaggcccaccttcagtgtgtgaaactcgaagtgcttggtcacctgaattgttttcataa

SEQ ID NO: 3099 - DNA, 1579 bp, Homo sapiens
  source 1..1579: mol_type = genomic DNA
ggccgggagttccccaagaccggaagtgtcccgaggccgggagcccgcgggaccccggagcgcgcggggccggaagaggcgggcggccagtggaggtccgcagagtttgggcgccaggcgagacggcagggcttaaagttccgggaatcaaagatcaactcccactgaggacaaatggacctgtaattccgggtgtgacgagagaacgagatttaccttcctgaattaaaaaacaggtcattaagcttgggccctgactcttctttgtgagaaggtacagagatggaaaccttacaatccgagactaaaacgagggtccttccctcatggctgacagcccaggtggctacaaagaatgtggcaccaatgaaggcccccaagaggatgagaatggcagcagtgccagtggcagcagcaaggtgcgacagctctggtcagaagactcctgcgaatctggcaaactccctgcgacaaggactgtgtactgcatgaatgaggctgagatagttgatgttgctctgggaatcctgattgagagccgcaaacaggaaaaggcctgcgagcagccggccctggcgggggctgataacccagagcactcccctccctgctccgtgtcgcctcacacaagttctgggagcagcagtgaggaagaggacagtgggaaacaggcactggctccaggcctcagcccttcccagaggccggggggttccagctctgcctgtagcaggagccctgaggaggaggaggaagaggatgtgctgaaatacgtccgggagatctttttcagctagggcataaactgtgcactgaactgtctgccgagagcagctggaggacagctgagcttccactggtgctgctgggccgcccgcctgtgggaatggggctctctgtgctcctacctttgtgccttcttgggcctggcagattcacctcaggccagaagcccctggacactccgggccttggggctgccgttctgagtgtgcggaaggcaggactcaaaatgagatcccatttgactccctctgtatgtactgtgccctctcctggctcttgaggctctggagtcccaattgtctgtgttagtcagtgaccaggttccagggaaaatgatgtcatgtggtggtccaacttactggaaccaaagagacagtactttgcaaagaaaaggatcactgccaggtgcactggaattgctacagtttagtccgcatgatctctcctgaaggaggaagcctgtttcaaaaatagtttccatcatgagtctatcaatgagctcccacctctccagccagcctagaaagcaaacgagctgcccacagttctctgccctgtctgggaggttgaggccacagtgtatagactggtaagccagacaggcctcctcccgcaagctgctaccttgctttcacctgtaccttggtccccgggcagctagctataaagcaagagggacaggagcccagaagagacactgaggacaagagatcacaccagagtacatgtctctgcctctgttttcagtgtggctttggacaggaatatatgaataaatcactgccatacaggt

SEQ ID NO: 3100 - DNA, 1676 bp, Homo sapiens
  source 1..1676: mol_type = genomic DNA
ctccttccgagttaccgccgccgtcgccgccgctcctcctctcccggtcctgggtttccttggcgctgcggccgccgctccctctgcgacctgtatgaggaggaggaggaggaggatgtgaagatggcggagctgcagatgctgctggaagaggaaatcccggggggccgccgggccctcttcgacagctacacaaatctggaacgggtggccgattactgcgagaacaactacatacagtcagcagataagcagagagccctagaagaaaccaaagcctacaccacccaatccttagcaagtgttgcctatctgataaacaccttggccaacaatgtcctgcagatgctggatatccaggcatcccagctacgaaggatggaatcttcaatcaatcatatttcacaaacagttgatattcataaagagaaagttgcaagaagagaaattggtattttgactaccaataaaaacacttcaaggacacataagattattgctccagccaaccttgaacgaccagttcgttatattagaaaacctattgactatacaattctagatgatattggacatggagtaaaggtgagtacccagaacatgaagatgggtgggctgccgcgtacaacacctccaactcagaagccccctagtccccctatgtcagggaaagggacacttggcagcagtgggagtagtggagggagccacccaagtagtcggagcagcagtcgagagaacagtggaagtggtagtgtgggggttcctattgctgttcctactccatctcctcccagtgtctttccagcccctgctggctctgctggcactcctccccttcctgctacttctgcatctgcccctgctcctcttgttcctgctactgtcccttcctccactgccccagacgctgctgctgggggtgcccagacccttgctgatggcttcacttctccaactccccctgttgtttcttccactccccctacaggtcatcctgtacagttctacagcatgaataggcctgcctctcgccatactcccccaacaatagggggctcgttgccctatagacgccctccttccattacttcacaaacaagccttcagaatcagatgaatggaggacctttttatagccagaatccagtttcagatacaccacctccaccgccacctgtggaagaaccagtctttgatgagtctcccccacctcctcctcctccagaagattacgaagaggaggaagctgctgtggttgagtatagtgatccttatgctgaagaggacccaccgtgggctccacgttcttacttggaaaaggttgtggcaatttatgactatacaaaagacaaggaagatgagctgtcctttcaggaaggagccattatttatgtcatcaagaagaatgacgatggttggtatgagggagttatgaatggagtgactgggctttttcctgggaattacgttgagtctatcatgcattattctgagtaaagctcagcagggctgtgcttgcctcacaggaatagtcaggtcttcccagattatctgaaggccctggggattccactccagtaaagtagaatgaaggatacaaatgataaaaattacacttttttttttggtttattccccagtattaaaaacaaagcaagctgagtctgaacaaa

SEQ ID NO: 3101 - DNA, 8769 bp, Homo sapiens
  source 1..8769: mol_type = genomic DNA
taaagatatatccagaagaaatcactccactcctaccagccatatcaggggagaagattgctgaggaccaaacctgcttttttcttcaaatactgttgaagtatatggttattcaggctgcgagcttggagtggaagaataaggagaatcaagatactggttttaaatttctttttacattgtttcgaaagtattatcttcctcatttatttccatcatttactaagttaacaaacatctacaaacctgtacttgacatcccccatttgagaccaaagcctgtgtacattactaccactcgagacaatgagaacatttacagtacaaagattccatatatggcagctcgtgttgtttttattaagtggattgtaaccttctttttggaaaaaaagtatctaactgcaacacaaaacactaaaaatggagttgatgtattgcctaaaatcatccagactgttggtggtggtgctgtgcaggagagagcgcctgagctggatggtggtgggcccacggagcaggacaaaagccattctaacagcagcaccttgtcggaccgaagactcagcaactccagcctctgtagcattgaagaagagcaccgaatggtgtatgaaatggtacagcggattctcttgtcaacacgaggttatgtcaacttcgtgaatgaagtatttcaccaggcatttttgttgccttcctgtgagatagctgtaacaagaaaagtagttcaagtgtacagaaagtggattctccaggacaaacctgtgttcatggaggagccagatagaaaagatgttgcccaagaagatgctgaaaaattaggattttccgagactgatagcaaggaggcctcatctgaaagttctggtcataaacgatcttccagttggggacgcacatactccttcacaagtgcaatgagcagagggtgtgtgacagaggaggaaaatacaaatgtgaaagccggcgtccaggctttgttgcaggtatttttgacgaactctgcaaacatctttttgttggaaccatgtgctgaagttcctgtgctcttgaaagaacaagttgatgcttgtaaagctgttttgattatttttaggcgcatgataatggagcttacaatgaataaaaagacatgggaacagatgttgcaaatactactcaggataacagaagctgtcatgcagaagccaaaggataaacaaataaaggacttgtttgcccagagcttggcagggttactatttaggacgctcatggtagcttggatccgagcaaacctctgtgtgtacatttctcgagagctctgggatgactttcttggtgtgctgtcctccctcacggaatgggaggaacttataaacgagtgggccaacattatggactccttgacagcagtgcttgcaagaaccgtttatggagttgagatgacaaacctacctctggataaattaagtgaacaaaaggaaaagaagcaacgaggcaaaggctgtgttctagatcctcagaaaggaaccaccgtggggaggtccttttctctcagctggcggagccacccagatgtgaccgaaccgatgcgatttaggagtgccaccacgtctggagcaccgggagtggaaaaggcaagaaatattgttcgccaaaaagcaactgaagtggaggagtgtcaacagtcagaaaatgcacctgcagccggatctggccatctcacagtgggacagcagcagcaggtccttcggagcagcagcacctccgacatccccgagccgctgtgctcagattcttctcagggtcaaaaggcagaaaacacacagaattcgagttcttcagagcctcagcctattcaagagaataaaggacatgtgaagagagaacatgaaggaataacaatcttagttcgaagaagcagcagccctgctgaattggatttgaaagatgatttgcagcagacacaaggaaaatgtagggaaagacagaagagtgaaagtaccaacagtgacacaactctgggctgtaccaatgaggcagagctgtccatgggcccatggcagacctgtgaggaagacccagaactgaatactcccacagatgttgtggctgatgctgatgcccgtcattggttacaactgagtcccaccgatgcttcaaatttaacagatagcagcgagtgcctcacagatgactgtagtataatcgccggggggagcctcactggttggcacccagactctgctgctgtgttatggcgaagggtcttggggatcctcggagatgtgaataacatccagtcacccaagatccatgccagagttttctgctatctctatgaactctggtacaaactagcaaagatacgggataatctagcaataagcctggataaccagtcttctccatctcctccagttttgatcccaccactcagaatgtttgcatcatggctgtttaaggcggcgacactgccaaatgaatataaggaaggcaaactacaagcctacaggctgatctgtgccatgatgaccagacgccaggacgttctgccaaactcagatttcctggtgcatttttaccttgtgatgcacctgggattaaccagcgaggatcaggatatcttaaatacgatcataaggcactgtccaccccgctttttctccctgggttttcctggcttctcaatgctggtgggggacttcatcacggccgctgccagggtccttagcacagacattttgacggcgcctcgttcagaggctgtcactgtcctcggctctctggtctgctttccaaatacctaccaggagattcctttactgcagtcagtgccagaagtaaatgaggccattacaggaactgaagatgtcaagcattacctcataaatattttactgaagaatgccacagaagaaccaaatgaatatgcaagatgcattgctgtttgctcccttggggtctggatatgtgaagagcttgcacagtgtacaagccaccctcaggtgaaagaggccatcaatgtgataggagtaactctgaagtttcccaacaaaatcgtggcccaggtagcttgcgatgtccttcagttgctggtttcctactgggagaagcttcagatgtttgaaacctctctgcctcggaaaatggcagaaatcctcgtggccacagttgcttttcttttaccaagtgcagagtactcctcagtggaaacagacaagaagtttattgtgtccttgctactctgcctcttggactggtgcatggcattgcccgtgagtgtccttctccaccccgtgtccacagcagtcctagaggagcagcattcggccagagcccccttgctggattatatctacagggttttgcactgctgtgtgtgtggctcaagcacgtacacccaacagagtcactacatactgaccctggctgacttgtcatccacggattatgaccccttcctgccactggcaaatgtgaagagctctgagccagtccagtatcattcatcagcagaattgggtaacctgctgactgttgaagaggagaagaagagaagaagtttggagttgatccctttgactgctcgaatggtgatggcccacctggtgaaccacctggggcactaccccctcagtgggggccctgccatactgcacagccttgtcagcgagaaccatgacaatgcccatgtggaaggctccgagctgtcctttgaggtgttcagaagtccaaacctgcagctgtttgtatttaatgatagcaccctcatctcctaccttcagacacccacagaaggaccggtagggggatcaccagtgggctctctctctgatgtgagagtaattgtgagggatatctcagggaagtactcttgggatggtaaggttttatatggacctttggaaggctgcttagcacccaatggaagaaatccttcatttctgatttcgagctggcatcgtgacacatttggacctcagaaagactcttctcaagttgaggagggggatgatgttcttgacaaattacttgaaaacattggccatacaagtcctgaatgccttttaccgtcacagctaaatctaaatgaaccttccctaaccccatgtggcatgaactatgaccaagagaaggaaatcattgaggtcattttgcgccaaaatgctcaagaggatgagtatatccagagtcataacttcgattctgcaatgaaagtcaccagccaagggcagccctccccagtggagccccgaggacccttttatttctgcaggttattgcttgatgacttgggaatgaattcttgggacagaaggaagaattttcatctattgaagaaaaattcaaaattattgagagagctgaaaaatttggactcccgccagtgccgtgagacacacaaaatcgcagtgttttacattgctgaaggtcaagaagacaagtgttcaatcctctctaatgaaagaggaagccaagcatatgaagactttgttgctggacttggatgggaggtggatctctccacccactgtgggttcatgggtggccttcagcgcaatggcagcaccgggcagacggccccttactatgctacctcaactgtggaagtgattttccatgtttccactcgaatgccgtcagactcagatgattccctcaccaaaaagcttcgtcacttggggaatgacgaggtccatatcgtctggtctgaacactccagagactaccgcaggggtattatcccaactgcctttggagatgtttcaatcattatttacccaatgaagaatcacatgttcttcatcgcgataacgaagaaacctgaggttccattttttgggcctctgtttgatggagccatagtgagtgggaagctgctgccaagccttgtatgtgccacgtgcatcaacgccagcagggctgtgaagtgcctcatcccactctaccagagcttctatgaagagcgagctctgtatctcgaagcaataattcagaaccaccgcgaagtaatgacattcgaggatttcgcagcccaagtcttttctccctctcccagctactccctcagcggaacgggggccctggcctccagtctgagtgctgacctcgaagagcccctgagtgaggaggagacagaacaccctctcctgcctctgccccgagccactaaacccagaatctccaggaaatttcgttgctgtactagtgccctcagcaggtcttcccattagtggacttctgaagcccatggtgaatcccactaccgtgtctcagatgggactcaaactaggctgtatcatcttgtcctgaaacctcacaaaccttggacttccaaagaagaaaagaaaaagtcaccaaaaaccagagatgaacccactgacacgtgggcactggtgtggctgctctgggcagatgacagcaggaaaagattctgcgctttcagggagggggcagagggcagcttgcttctgcaccccaagttgtttcttctcatttatgaacccaagcatgattcacaaaggggctggcaaaacaattgtctaattgaggaatctgatctgcattgattttgctagttccttttatgttaggatttatggtttactcaaaaatttcatcatcatggaaattggctttccccggggtcttttgcccaggagaagttttacctcagttgtccagtgttttcccacatggtacctgacgcccgctaactaagcagaggctctcctcaccacgcagaggcgcttcaggtcatgacagtgatgcccctatcttagaacactcagaagattccagaaatacagggtcctgtccttgcataagttcctgcaggacaggaagtgtcccaaggctcaaaacaacacagaccacatccacacaaaaggcgcatgccggcttcaggcgctaggctgagacgggtaccccccgaatggccttgtgcctccaaaagcctcacgctgcaactttgctgctcctgtctgttgcccagagaggcctcacacaggcctcagaaatgtttcttgtcacacaaagcttttggtagccgattccaagcgagggatttaatccttacatttttgcccatttggctccaaggaaggcttattagacctgtttttttgttgttgttgtttttttttcttaaaaacaaaatgaatgaatgaatgaaaagagaagcaatggtgagccctctcctgctggggcgccctgggtgggccttgcccgtcctgcagcagagaaatcagtcagcagcgaagagctgctggcgcaggccccaggctgtgtcctggacccttgacctgcctcagagctagaggtttgctccaccccgcacttcacttgggaagtaaatccaagaagcttaccagagtccatcgccactgcgcaggctttgttctcacagcggccaggtacagagcaacgccctgcagtgggaagggacagcagcacgagagacgcagcccctaactcagggcttatgatgggtgggctggtcctgggaaaggcgggccctgtgcgggaggcctccccaccttcctgtgccctctgccctctgcccttgcacacacttgttaccttcaggctgcttggccacccaggcctgaagaagccttctgaggctctcaccccatcagaacggccattttcactgaggagccagttttttccatttgccatggagctggtttggctggaacctggcctttgtagggaaaacggggagactcaggagccagactcactcttgggacaaatgagaaagagctgagccagtcgttcctgtcggaagggcgggcctgctcatcctggcgagaatttgcttttctgctttataggggattgcaggccaggcccactgacaggagcaccttgagaaccacctgaacagaagagaatgagggtgccccaaagtggaaggaagcttctggcccctgggccgttttgggaagggcccaggatactcacgggggctgaagggcaatgtgaagagtgactgcaagtcctggcattttctgtggtgtcagcaaatgcccctttattttaaatgattccagacatctgggcagcatagcttggccaccatcactcaggcttgatcctgctgttgagctgctcctgtctcctgtttacctcactcctgttgggaaggccatcgcatgctcctaggctccagagtcccctgtaggtctctaccagcaggtcgcctctgggagaacgtttcatcttcaggctctagaaactcctgttgcggaattgctggctttagtagaaaagatatgtcaggatttagaaatcgtattgaactctcctggacttctgctccatgatttcattttgctttcacgaaccagcgatccctaccttggggtgggaaattcaattgtaggcagcaaataactcaaccctcctgtaacccctgaggattataacgaccccatgacccccgatgacagccagcagtttggtgactagagttttttgagcctgccattctcagtagcagctttggtctggagatggaacgtggagcagggaatctgacagccacgtttctcgtgatcacgtggactggagttgtttttgttatctggggtggaaaattgcaatgatcaagtttcttttttattttttttttacttagaaaagcaaatattgtgtttttgtaataaatccctttcagcaaaattgcggaggatcattcatccactagggccccacctgaggcacagcgctgactcatcacggtggtaccagtaggtcagccatctggaaacagaagtggccctaattgggccaaaatgtggtaagactcgctggcctcaggcagggccaggccagttccctcacttctctgcacacctattcccagattccatccagagcaaagctgatgtttatcgtctcattgtacttaggctttcgtactttaaaaaattatgactttttaaaaataagccttcagcagacagaagtgaagaaatttagcctgggttgcctcagcaacaaagtctgcggttcctaagagccacatgttggggaagtggggtgacccaaacttggtgacataggttgattgatcagaccctcagccttacaagcaagagctcatgcagatccacagagccatgcacatcctgtcttcctgaccttcctcaggtggcaccacctgcgccccatggacctgctgtatcggtgtcatgtggaggtctgatgaatcctttaaaacctaactgtgatgtcgtaaatgtaactgtgctacctttatatctactgaagggcagcgtctgcatccgagggaaattcaacatgaaacaaccatcgttttagttgcactcagtctgtccatatgacatacacatgaagtgaatgtttccttatgttttcaggtctacaatgtttagtacatgtaaataaggaaaaaatttgataaatatggtaaattaagttatagcgtgtcatttgattcttattttgctgtctcttgttatttaattttcctaatgctccacatctaggttccttcctaggtggtgggaacaccttgcagacgtgtgtgcaccaggacacaccgcggcccaggcagccacaccgagaaagcacacatctccactgatggcagccacccgactctccagttaacctcttttactctttaattctgatttactgtgatgatttaataaagtggaaacacagcacttcagtgctatatgtttctctcattctcattatagtttataagaaaataaagttcaccctggcatctaataaaaa

SEQ ID NO: 3102 - DNA, 2234 bp, Homo sapiens
  source 1..2234: mol_type = genomic DNA
acacttcaaatcctgagcggctgactgtcaggggtgcgtcaggcctgcttgctgggagaatggacgagctggttgtggagcgggcgggtcccgccacccgtgggctcagcactggactgctcccagaacattaaaggtctggctgatgttccatgccacatctggacatgaagacccatgtctgcccttctgtagaagggccaaagaagaaaggaggcatcacatgtttctgctgtggggggcccttccgagcagcagacaggagcaagacaaggagccccaaactgtctcacagtcctcaaccacccagtctgggtgacccggtcgagcatttatcagagacgtccgctgattctttggaagccatgtctgagggggatgctccaacccctttttccagaggcagccggactcgtgcgagccttcctgtggtgaggtcaaccaaccagacgaaagaaagatctctgggggttctctatctccagtatggagatgaaaccaagcagctcaggatgccgaatgaaatcacaagtgcagacacaatccgtgctctcttcgtaagtgcctttccacagcagctcaccatgaaaatgctggaatcgcccagtgtcgccatttacatcaaagatgaaagcagaaatgtctattatgaattaaatgatgtaaggaacattcaagacagatcactcctcaaagtgtacaacaaggatcctgcacatgcgtttaatcacacaccaaaaactatgaatggagacatgaggatgcagagagaacttgtttatgcaagaggagatggccctggggcccctcgccccggatctactgctcatccaccccatgcgattccaaattccccaccgtctactccagtgccccattccatgcccccctccccgtccagaattccttatgggggcacccgctccatggttgttcctggcaatgccaccatccccagggacagaatctccagcctgccagtctccagacccatctctccaagcccaagcgccattttagaaagaagagatgtcaagcctgatgaagacatgagtggcaaaaacattgcaatgtacagaaatgagggtttctatgctgatccttacctttatcacgagggacggatgagcatagcctcatcccatggtggacacccactggatgtccccgaccacatcattgcatatcaccgcaccgccatccggtcagcgagtgcttattgtaacccctcaatgcaagcggaaatgcatatggaacaatcactgtacagacagaaatcaaggaaatatccggatagccatttgcctacactgggctccaaaacaccccctgcctctcctcacagagtcagtgacctgaggatgatagacatgcacgctcactataatgcccacggcccccctcacaccatgcagccagaccgggcctctccgagccgccaggcctttaaaaaggagccaggcaccttggtgtatatagaaaagccacggagcgctgcaggattatccagccttgtagacctcggccctcctctaatggagaagcaagtttttgcctacagcacggcgacaatacccaaagacagagagaccagcgagaaaatgatgaaaaccacagccaacaggaaccacacagatagtgcaggaacgccccatgtgtctggtgggaagatgctcagtgctctggagtccacggtgcctcccagccagcctccacctgtgggcacctcagccatccacatgagcctgcttgagatgaggcggagcgtggcggaactcaggctccagctccagcagatgcggcagctccagctgcagaaccaggagttgctgagggcaatgatgaagaaggccgagctggaaatcagtggcaaagtgatggaaacaatgaagagactggaggatcccgtgcagcgacagcgcgtcctagtggagcaagagagacaaaaatatcttcatgaggaagagaagatcgtcaagaagttgtgaaagcagaaaagaaatgggaggaaaaaaggcaaaatctggatcactataatgggaaagagtttgagaagctcctagaagaagctcaggccaatatcatgaagtcaataccaaatctggagatgccgccagccacaggcccactgccaaggggagatgccccagtggacaaggtggaactttcagaagattctccaaattcggaacaggacttggaaaagctggggggaaagtcgccccctcctcctc

SEQ ID NO: 3103 - DNA, 184 bp, Homo sapiens
  source 1..184: mol_type = genomic DNA
cgagaacccgctggtttattgcgacgggcacggctgcagcgtcgcggtgcatcaagcttgctatggcattgttcaagtacccactggaccgtggttttgcaggaaatgtgaatctcaggagagagcagccagagtggttgggcccatgtggtttgtgccctgtatattccagaggtacaatttg

SEQ ID NO: 3104 - DNA, 2623 bp, Homo sapiens
  source 1..2623: mol_type = genomic DNA
cttctcctgagagtcggagccacagccagagccctgcccaggccgagccggagctgcagcccgagcgcggtggtgccctcagccccgtcctcttgtcctcctcagcctcggtgccttggaatttgtgtcgctgagtcagcaagcctttcagatttgcccggtttttgttgtttgtggtttgtatcaagatgggaactcaaacaagtcattcctcctaaggagctggtgtcttcatccagaagggacagtttgtgccagctctccagagagaaaagatctgccggaggcgctgggcaatgaccccgggactccaggccagaggggtctgaagctgtttgggaaagcagcgggactccttgggaagatggccatggccccaagcccttccctggtgcaggtgtacaccagccccgcggctgtggccgtgtgggaatggcaggacgggctgggcacctggcacccctacagtgccaccgtctgcagcttcatcgagcagcagtttgtccagcagaagggccaacgttttgggcttgggagcctggcccacagcatccccttgggccaggcagacccctcgctggccccttacattattgacctccccagctggacccagttccgccaggacaccggcaccatgcgggctgtgcggagacacctgttcccccagcactcagcccctggccgaggtgtcgtctgggagtggctgagcgacgatggctcctggactgcctatgaagccagcgtctgtgactatctggagcagcaggtggccaggggcaaccagctcgtggacttggcccccctggggtacaactacactgtcaactacaccacccacacgcagaccaacaagacttccagcttctgccgcagcgtgcggcgccaagcagggccgccttacccggtgaccaccatcatcgctccgccgggccacacaggcgtcgcctgctcttgccaccagtgcctcagtggcagcagaactggccccgtgtcaggccgctaccgccactccatgaccaacctccctgcataccccgtcccccagcaccccccacacaggaccgcttctgtgtttgggacccaccaggcctttgcaccgtacaacaaaccctcactctccggggcccggtctgcgcccaggctgaacaccaccaacgcctggggcgcagctcctccttccctggggagccagcccctctaccgctccagcctctcccacctgggaccgcagcacctgcccccaggatcctccacctccggtgcagtcagtgcctccctccccagcggtccctcaagcagcccagggagcgtccctgccactgtgcccatgcagatgccaaagcccagcagagtccagcaggcgctcgcaggcatgacgagtgttctgatgtcagccattggactccctgtgtgtcttagccgcgcaccccagcccaccagccctcccgcctcccgtctggcttccaaaagtcacggctcagttaagagattgaggaaaatgtccgtgaaaggagcgaccccgaagccagagccagagccagagcaggtcataaaaaactacacggaagagctgaaagtgcccccagatgaggactgcatcatctgcatggagaagctgtccacagcgtctggatacagcgatgtgactgacagcaaggcaatcgggtccctagctgtgggccacctcaccaagtgcagccatgccttccacctgctgtgcctcctggccatgtactgcaacggcaataaggatggaagtctgcagtgtccctcctgcaaaaccatctatggagagaagacggggacccagccccagggaaagatggaggtattacggttccagatgtcgctccccggccacgaggactgcgggaccatcctcatagtttacagcattccccatggtatccagggccctgagcaccccaatcccggaaagccgttcactgccagagggtttccccgccagtgctaccttccagacaacgcccagggccgcaaggtcctagagctcctgaaggtggcctggaagaggcggctcatcttcacagtgggcacgtccagcaccacgggtgagacggacaccgtggtatggaacgagatccaccacaagacagagatggaccgcaacattacgggccacggctatcccgaccccaactacctgcagaacgtgctggctgagctggctgcccagggggtgaccgaggactgcctggagcagcagtgacctcgcaccccagcacgcccgcctctggtggccaccccgctgccccatggctggctgggtggccaggcaggaagtgcccagcccgagaggctgggaggtttgttgagggtgtggggtgtgccccacctgaagccggggctccccctgcctgcctctctctcctcctcccctctgggaattgggcagccctgggcagttgtactcatgggggcttaggatgcagctacctcagtgcgcagggcccgtctgtcctctgggggctgcttcgggcccgcggtgctcggggcctggtgtggggcgagtagagacttccccagcctggacgggcgtgggttctgggtcagcttcttttacctcaattttgtttgcaataaatgctctatagccaaa

SEQ ID NO: 3105 - DNA, 1879 bp, Homo sapiens
  source 1..1879: mol_type = genomic DNA
agatcctgtgctgggcctcccaactggtgcatggacaggctgaggaagcacaggccgggcagagccctggccaagaggggcgtcttgcgcccacactcacttggcaagtttctgcagcacctgctcgcactccagctgcttccgctcaagctgctcagcatagggcactgtccatagaggggtcaccacgtcggccactcgtgttactggtggctcactctcaccctcctgtcgcctcctcctggccatggggtcggccttgggccgggccaggcgcacactgagtgggcggcctttccagagggcaccatgcaaaacgcgcagggccttgtccctctctgcagcgctgcggaatgtcacaaaggcgcagggtggttgcccaaagagtttggttttgtggggctgcagaccaaagcggcccaggaagcgccggacgtcgctgaagctggcgtggcgaggacactcatgaggaccatgatacttccactgagaatacagacgagtccaaccatgaccctcagtttgagccaatagtttctcttcctgagcaagaaattaaaacactggaagaagatgaagaggaactttttaaaatgcgggcaaaactgttccgatttgcctctgagaacgatctcccagaatggaaggagcgaggcactggtgacgtcaagctcctgaagcacaaggagaaaggggccatccgcctcctcatgcggagggacaagaccctgaagatctgtgccaaccactacaacgtgcctctgaactcagagcaggcccgcagcgaagcttagagcacacgggggtgtggagtcagccagacgggccctgatgggaggacgcagcgcccaggctgggctcgggacgaggatcacgccgatgatggagctgaagcccaacgcaggtagcgaccgtgcctgggtctggaacacccacgctgacttcgccgacgagtgccccaagccagagctgctggccatccgcttcctgaatgctgagaatgcacagaaattcaaaacaaagtttgaagaatgcaggaaagagatcgaagagagagaaaagaaaggtgacgtggtgccatgggttggggggcttctttgcagactcactctgcatctgactatacttccaggcgggtgctttttctgtctgccagataaacattccagggtgctgtggccgcctcacgtatccagagtgatgcagctccctggggacacaggtgcttcctggggagccctgagcacttgtcagtgttgctggcctcagtccaattgggcaggcattggagtccgggcactgcctggagctcaccagaaggtgctttatgatggtcctcggtttgtctctcagagggcttggtcacctctgccatgaggctggactgcagctgtggtggcaagtgaccagatgtcactgagcagcctgaccatggtctaggcagtgcttgagtgcatccacctggcttcctttcgtcactgaatttcaagaagacagactccaggaggcggcttggccaggcaggagtctgtcccgagggcgggcaagccgctgtgggtgggtgacggcacttgggaccagcctggcgagggccatgtgcttgaatgcaccgtgcttctgttttctcactgtgctgcttgtgtttttagcaggatcaggcaaaaatgatcatgccgaaaaagtggcggaaaagctagaagctctctcggtgaaggaggagaccaaggaggatgctgaggagaagcaataaatcgtcttattttattttcttttcctctctttcctttcctttttttaaaaaattttaccctgcccctctttttcggtttgtttttattctttcatttttacaagggacgttatataaagaactgaactc

SEQ ID NO: 3106 - DNA, 488 bp, Homo sapiens
  source 1..488: mol_type = genomic DNA
atgaagagaccgggcgcagcgcgacccgggaagctccgccgaggtggtttcctagaaacatgattgtttattggcattgatctcacagtctggtgaggacttctttactgataatgtcaagttcaggttatcctcccaaccaaggagcattcagcacagaacaaagtcgttatcctcctcactctgtccagtatacatttcccaacacccgccaccagcaggagttcgcagtccctgattatcgttcctctcatcttgaagtgagtcaggcatcacagcttttgcagcaacagcagcagcaacagcttcgaaggcgaccttccttgctttcagaatttcacccaggttctgacaggcctcaagaaaggagaactagttatgaaccgtttcatccaggcccatccccagtggatcatgattcactggaatcgaagcgaccacgtctggaacaggtttctgattctcattttcagcgtgtcagtgctgcg

SEQ ID NO: 3107 - DNA, 623 bp, Homo sapiens
  source 1..623: mol_type = genomic DNA
ggagttgccgggggtcggtctttccgcaggagctactctgacctacgacactctccggtttgctgagtttgaagattttcctgagacctcagagcccgtttggatactgggtagaaaatacagcattttcacagaaaaggacgagatcttgtctgatgtggcatctagactttggtttacatacaggaaaaactttccagccattggaggttgtcgggacatttcactctccagtaaatgtggcccttggcgttactgagtcctaagaggggggacaggccccacctcggacacaggctggggctgcatgctgcggtgtggacagatgatctttgcccaagccctggtgtgccggcacctaggccgagattggaggtggacacaaaggaagaggcagccagacagctacttcagcgtcctcaacgcattcatcgacaggaaggacagttactactccattcaccagatagcgcaaatgggagttggcgaaggcaagtccataggccagtggtacgggcccaacactgtcgcccaggtcctgaagaagcttgctgtcttcgatacgtggagctccttggcggtccacattgcaatggacaacactgttgtgatggaggaaatca

SEQ ID NO: 3108 - DNA, 2097 bp, Homo sapiens
  source 1..2097: mol_type = genomic DNA
gccttggggacatttagggcagagcctcgagtgacaggtcctgggacagtgggagccaagggcaagtgctagagttgcagtgaatttagagcaaagcctcagctaagtgacacatcccagggcagtaggggatctatctaggttcgtgctgggcctcaggtaagtgacaggccttaggacaatgggggctgtggcatgcgtcaggttacctgccttgatatgggatcgtgacaggcccctccctatgtgcaggagacaagcagcccaagaaacaggagaaaaacccagtgttggtgtccccagagtttgtggatgaagctctgtgtgcgtgcgaggagtaccttagcaacttggcccacatggacatcgacaaggacctggaggccccgctgtacctcacccccgagggctggtccctcttcctccagcgctactaccaagtggtccacgaaggggcagaactcaggcacctcgacactcaggtccagcgctgtgaggacatcctgcagcagctgcaggccgtggtaccccagatagacatggaaggggatcgcaacatctggatcgtgaagccaggagccaagtcccgcggacgaggcatcatgtgcatggaccacctggaggagatgctgaagctggtgaacggcaaccccgtggtgatgaaggacggcaagtgggtggtgcagaagtatattgagcggcccctcctcatctttggcaccaagtttgacctcagacagtggttcctggtaactgactggaacccacttaccgtgtggttctaccgcgacagctatatccgcttttccacgcagcccttctccctgaagaacctggacaactcagtgcacctgtgcaacaactccatccagaagcacctggagaactcatgccatcggcatccactgcttccgccagacaacatgtggtctagccagaggttccaggcccacctgcaggagatgggtgccccaaatgcttggtccaccatcatcgtgcctggcatgaaggatgctgtgatccacgcacttcagacctcccaggacaccgtgcagtgtcggaaggccagctttgagctctatggcgctgacttcgtgttcggggaggacttccagccctggctgattgagatcaacgccagccccacgatggcaccctccacagcagtcactgcccggctctgtgctggcgtgcaagctgacaccctgcgcgtggtcattgaccggatgctggaccgcaactgtgacacaggagcctttgagctcatctataagcagcctgctgtggaggtgcctcaatatgtgggcatccggctcctggtagagggcttcaccatcaagaagcccatggcgatgtgtcatcggcggatgggggtccgcccagcagtccctctgctgacccagcgaggctctggggaagcccgtcaccacttccccagcctccacaccaaggcccagctgccttctccccatgtactccgacaccagggccaggtcctcagacgacagcacagcaagctggtgggcactaaggccctgtcgaccacaggcaaggccttgaggactctacccacggctaaggtcttcatttccctcccaccgaaccttgatttcaaggtggcacccagcatcctgaagccaagaaaggtgggcctcgacctgtgactcacacccagtggacagtgctgagcacggggtcagggctggagggcacaggcagagggcagctcccaggctggctggcaccccaagggaagagctggtctccctcagaagccccttcctccacagacttctgatcatctccctcttctcccctcctttcacaccgaggctcctgctctcctgtgcctccgaggcccccagctggaagtgccttgttgcctctgccctttgaagtcggaacaattcctagcacctgtcggaaggtcaaggccaaaggcaaattcaaggccagactgtgacaaacccagggctgaggcctgccccatgaagaggctgagccccctgaaacccctgccccttgttggtacattccagaggcgcaggggcctgggggatatgaagctagggaagcccctgcttcgattccccactg

SEQ ID NO: 3109 - DNA, 965 bp, Homo sapiens
  source 1..965: mol_type = genomic DNA
agccggggcctggtgcagcctccgcggccgctgtcagggaagcgcaggcggccaatggaacccgggagcggtcgctgctgctgaggcggcagtgtcggcagtccaaccgcgactgcccgcaccccctccgcgggggtcccccagaggatcaactaaaccttgaactaagaagaaaaatgtgttgtgagcagggggagcctcagctgcctcaggccgttcaggacagaagggtgtttctgaaggccggagcaagttttgaagaagtccctatcagattacacttggttgactactccggagcagccactaagagggatgaacaggcctgcgtggaaattgaatgagattcctgttcgactggctcctgagagagaattcatcaagtccctgatggcgatcggcaagcggctggccacgctccccaccaaagagcagaaaacacagaggctgatctcagagctctccctgctcaaccataagctccctgcccgagtctggctgcccactgctggctttgaccaccacgtggtccgtgtaccccacacacaggctgttgtcctcaactccaaggacaaggctccctacctgatttatgtggaagtccttgaatgtgaaaactttgacaccaccagtgtccctgcccggatccccgagaaccgaattcggagtacgaggtccgtagaaaacttgcccgaatgtggtattacccatgagcagcgagctggcagcttcagcactgtgcccaactatgacaacgatgatgaggcctggtcggtggatgacataggcgagctgcaagtggagctccccgaagtgcataccaacagctgtgacaacatctcccagttctctgtggacagcatcaccagccaggagagcaaggagcctgtgttcattgcagcaggggacatccgccggcgcctttcggaacagctggctcataccccgacagccttcaaacgaga

SEQ ID NO: 3110 - DNA, 1667 bp, Homo sapiens
  source 1..1667: mol_type = genomic DNA
atggccaagtggggccaggggaacccccactggatcgtggaggagcgggaggacgggaccaacgtgaacaactggcgctggcggacagagcgggatgccaccagcttgtccaaagggaagttccaggagctcctggtgggcatcgttgtggagaatgacgctggccgcggcgagatcaacgagttgaagcaggtggaaggggaggcttcgtgcagcagccgcaaaggaaagctgattttcttctatgagtggaacatcaaactgggctggaaaggcatcgttaaagaatctggagtgaagcacaagggattgattgaaatacccaatctttctgaggaaaatgaagtagatgacactgaggtatcgttgagtaaaaagaaaggagatggggttatactgaaggatcttatgaaaactgcaggcactgccaaggtcagggaggcccttggagattacctgaaggcacttaagacggaatttacaacgggaatgattttaccaacgaaagctatggcaacccaggaattgactgtcaaaagaaaactgagtgggaataccctgcaggttcaggcctcatctccagtggcactgggtgtaaggattcccactgtggctcttcacatgatggaactgtttgacacaactgtagagcagctgtatagcatcttcactgtaaaggagttaacaaataagaagatcatcatgaaatggagatgtgggaactggccagaagaacactatgccatggttgcactgaattttgtgcctactctagggcaaacagaattacaattgaaggagttcctatctatctgtaaagaagagaacatgaaattctgttggcagaagcagcattttgaagaaataaaaggttcactgcagctgacccccctaaatggttgaattaaaatttattataaggcattactttttgtaagcggaaaaagtgtcacatttacctcttccctatcttttgtttaaaaggactgtctttattttatattggatgaaatctatgaacatatatacaatgtaaagcattgtttgactctttattataactagacactgcattgatttaaaagtagcaaacaacctgaaattaagtattaacctgaccttccatcgatattcctctggaaataggtaagtcctgagtgcagatagttgatgtttcccaagctgaagcttgtcctatagcaagcttgcttgcagctgtacttttagttcaagatgacaaaaaataaatggcatgttgacactattcctttattttactttagggtttttaaggtgtgtagatcttaggtcgtaaaacagtggtatattgcattcaaaagcatgttgaggtgagggcaaattggctgtgttttgctccacatctccctgcacatctccctgctgtggttttgcacttcggtgtggagaggattgagaagtctgtggggacacattagttctgtggactgctggtaacacttccagtgaaacagcatataatggataaatgtttcccccctctttcacggttttctcactactttcacctgagaagactgaagcaacgtatgtaaacaaatgaaaagtcatcacaatcagtttaattaagtgcacagaatagcaatcaatcaatcagtcatgtcaataaaaataaaacaattattttt

SEQ ID NO: 3111 - DNA, 1591 bp, Homo sapiens
  source 1..1591: mol_type = genomic DNA
agcatttccggcagccatccccgcggtgctgacatcccggttgttcttctgtgccgggggtcttcctgctgtcatgaaggacgtaccgggcttcctacagcagagccagaactccgggcccgggcagcccgctgtgtggcaccgtctggaggagctctacacgaagaactttatgaaaactttatcagtgaatttgaacacaggtaaaagcctctcatccgtttttcactttgaaaatgagtgcattgatgctcggcggtgctcaaaggctggtggcttttatttcagggtgaaccctttgtccctcgtggaaatcattcttcatgtagttagacagatgactgatcctaatgtggctcttacttttctggaaaagactcgtgagaaggtgaaaagtagtgatgaggcagtgatcctgtgtaaaacagcaattggagctctaaaattaaacatcggggacctacaggttacaaaggaaacaattgaagatgttgaagaaatgctcaacaaccttcctggtgtgacatcggttcacagtcgtttctatgatctctccagtaaatactatcaaacaatcggaaaccacgcgtcctactacaaagatgctctgcggtttttgggctgtgttgacatcaaggatctaccagtgtctgagcagcaggagagagccttcacgctggggctagcaggacttctcggcgagggagtttttaactttggagaactcctcatgcaccctgtgctggagtccctgaggaatactgaccggcagtggctgattgacaccctctatgccttcaacagtggcaacgtagagcggttccagactctgaagactgcctggggccagcagcctgatttagcagctaatgaagcccagcttctgaggaaaattcagttgttgtgcctcatggagatgactttcacacgacctgccaatcacagacaactcacttttgaagaaattgccaaaagtgctaaaatcacagtgaatgaggtggagcttctggtgatgaaggccctttcggtggggctggtgaaaggcagtatagacgaggtggacaaacgagtccacatgacctgggtgcagccccgagtgttggatttgcaacagatcaagggaatgaaggaccgcctggagttctggtgcacggatgtgaagagcatggagatgctggtggagcaccaggcccatgacatcctcacctagggccccctggttccccgtcgtgtctcctttgactcacctgagagaggcgtttgcagccaatgaagctggctgctcagacggtcgacattgaatttgggtgggggttgggatcctgtctgaagtacagactgttcttgctctaaaaacaggactgtccctgatgggagccaggccacagggaggaggcttctttgtgggtctctcctgcagagggtgggggtctcagggtcttaggtgatacgggagagaaagaacgtgccaggcaggaggccccctgaagtctgtgtactccgaggtggatctccatccccatccacctgtacggacatcttttccgttgcggtttgagaatgttcctataataaacccctctgctttgtt

SEQ ID NO: 3112 - DNA, 873 bp, Homo sapiens
  source 1..873: mol_type = genomic DNA
aggagacaccgccgcagttgccggtacatcggggatttctggctctttcctcttcgccttaaattcgggtgtcttttatgaataatcaaaagcagcaaaagccaacgctatcaggccagcgttttaaaactagaaaaagagatgaaaaagagaggtttgaccctactcagtttcaagactgtattattcaaggcttaactgaaaccggtactgatttggaagcagtagctaagtttcttgatgcttctggagcaaaacttgattaccgtcgatatgcagaaacactctttgacattctggtggctggtggaatgctggccccaggtttttaacaagttaatcaggcgctacaaatacctggagaaaggttttgaagatgaagtaaaaaagctgctgctgttcttgaagggtttttcagagtcggagaggaacaagctagctatgttgactggtgttcttctggctaatggaacacttaatgcatccattcttaatagcctttataatgaaaatttggttaaagaaggagtttcagcagcttttgctgtgaagctctttaaatcatggataaatgaaaaagatatcaatgcagtagctgcaagtcttcggaaagtcagcatggataacagactgatggaactctttcctgccaataagcaaagtgttgaacacttcacaaaatattttactgaggcaggcttgaaagagctttcagaatatgttcggaatcagcaaaccatcggagctcgtaaggagctccagaaagaacttcaagaacagatgtcccgtggtgatccatttaaggatataattttatatgtcaaggaggagatgaaaaaaacaacatcccagagccagttgtcatcggaatag

SEQ ID NO: 3113 - DNA, 3546 bp, Homo sapiens; identical to SEQ ID NO: 3030
  source 1..3546: mol_type = genomic DNA

SEQ ID NO: 3114 - DNA, 832 bp, Homo sapiens
  source 1..832: mol_type = genomic DNA
ccgcaatcatggtgagtgttggtactgaggaggcctagcagggtgaaggccacggtcgcggccttcacgggttcctcggccgtcctgagtcccaaatcccaagctggagccgttcagctcccctccaccgcttagagatttggggggctctggccccgtccttgcggaccattccgaggggagtccagaggtgaggccgaggaacctccctgactttgcggggcgcgccgctcctgcgtctcctgccagtctcccttccttcttttcggtcaacaattgaaaacaaaacgaggaacagcagaggagctactgtataccgagccctcagcattgttcgtaatctccgcctgctaacagccttgtgaagaaggtgctattcttctcaacactttacagatgaggacacttgaggttcggagacgtggagcctcttgcacagctgcttaagtggtagtagagccgagatttgaaccctcctaaccattcctttctgccgcctactgcagctcccagcagagatgattgaactgttgctcggggtagggcccccagggcttgtgctggaaaagatgaaatggggaaaatggtgtcagtaattaacactgtggatacctcccatgaggacatgattcacgacgcccagatggactactatggcacccgcctggcaacctgctcatcagacaggtccgtcaaaatctttgatgtgcgcaatggagggcagatccttatcgccgacctcaggggtcatgagggtcctgtgtggcaagtggcctgggctcaccccatgtacggcaacatcctggcatcgtgctcctatgaccggaaagtc
